United States Patent Application Publication US 2011/0183924 A1 - sequence listing, part 78

SEQ ID NO: 279322 - DNA, 1950 bp, Homo sapiens
aatcaggctaggtacgaggctgggtggcgccggcgtgcccatgtgtcaggtgggcgaggactacggggagccggcgcctgaggagccgcccccggcgccgcggcccagccgtgagcagaagtgtgtgaagtgcaaggaagcgcagcccgttgtggtgatacgagccggagatgccttctgcagggactgtttcaaggccttctacgtccacaagttcagagccatgctgggcaagaaccggctcatctttccaggcgagaaggtgctcttggcgtggtctggggggccttcgtccagctccatggtctggcaggttcttgagggcctgagccaagattctgccaaaagactgcgctttgtggcaggagtcatctttgttgacgaacgaactcctggggtgttgactgtagcgctgaggtcagccgcaagagagaaacccctgcccacacggcacacatggcgaaaccaccacagctccgccatggaagcaccgacctgcggagacgaggcctcgaacgggtaaacccaggtggcagatggccctgacagcctgccctgacatggatcctctcatgagccctgactctttctgcctgcggtcatcacagagggagcagcctgtggccagagcctagaggagagatcaaagaccctggccgaagtgaagcccattctgcaagcaactgggttcccatggcatgtggtggccttagaggaggtgttcagcctgccaccgtcggtgctttggtgctctgcccaggagctggtgggatccgagggggcctacaaggcggccgtggacagcttcctccagcagcagcatgtgctgggggccgggggtggtcctggcccgactcaaggggaggaacagccaccccagcccccgctggacccccagaacctggcaagaccgcctgcccctgcccagactgaggctctttcccaactgttctgctcagtgaggacactgactgccaaggaggagcttctgcagaccctgcggacccacctgatcctccacatggcccgagcccacggctactccaaggtcatgactggggacagctgcacacgcttggctatcaagctcatgaccaacctggcgctgggtcgaggggccttcctggcctgggatacgggcttctcggatgagcggcacggggacgtggtggtggtgcggcccatgcgggaccacaccctgaaggaggtcgctttctacaaccgcctgttctccgttccttctgtcttcacaccagccgtcgacaccaaggcccctgaaaaggccagcatccaccggctgatggaggccttcatcctcaggctgcagacccagttcccctccactgtcagcactgtgtacaggacaagtgagaagctggtgaagggcccccgggatggccctgctgctggcgactccggcccccgctgcctcctctgcatgtgtgccctggacgtcgacgccgctgacagtgccacggcttttggggctcagacctcctcgcgtctctcccggatgcagtcacccatccccctgactgagacccggacacccccggggccctgctgttctccaggggtgggctgggcccagcgctgcggccagggggcctgcaggagggaggacccccaagcctgcattgaggagcagctgtgctacagctgccgcgtgaacatgaaggacttgccctcactggaccccctgccgccgtacatcctggctgaggcccagctccgcacacagagggcctggggcttgcaggagatccgggactgtctgattgaggacagtgacgacgaggcgggccagagctgagcgtgaggacgtgcttgccgggacagcaggcagtggccacctggtacaccacactggagccggaaggcaaggacgggggactggcctctgattgtccatttgtataaataaaacattttttaattaaaaaaaaaaaa

SEQ ID NO: 279323 - DNA, 902 bp, Homo sapiens
gtcccccgcgcgggcgcgggtggatctctcgggctctgacttgttttcgggtcaccttcaggcttcagccaggcacctgacgcctctttcccctcacggtgccaggccgggccgaactacatttcccaggaggctccgcggccaggtgcaaacagcgccgtgctgactacatttcccagacagccttgcggcggcccgggccttaaagcgtccatttcccagcggccctccgctgcgagaccgcagcccttctctggagtctcagagccgcaagacaccacgactcccagaggaccttgcgtcgggcaagaaagactacaccttccagaggcctctgcggcgccgcgacaggaagcggcgggcgagccgagtgtccttgcgcgtggatccgagcgaccatggtggcccgggtgtggtcgctgatgaggttcctcatcaagggaagtgtggctgggggcgccgtctacctggtgtacgaccaggagctgctggggcccagcgacaagagccaggcagccctacagaaggctggggaggtggtcccccccgccatgtaccagttcagccagtacgtgtgtcagcagacaggcctgcagataccccagctcccagcccctccaaagatttactttcccatccgtgactcctggaatgcaggcatcatgacggtgatgtcagctctgtcggtggccccctccaaggcccgcgagtactccaaggagggctgggagtatgtgaaggcgcgcaccaagtagcgagtcagcaggggccgcctgccccggccagaacgggcagggctgccactgacctgaagactccggactgggaccccactccgagggcagctcccggccttgccggcccaataaaggacttcagaagtgaaaaaaaaaaaaaaaaaa

SEQ ID NO: 279324 - DNA, 1023 bp, Homo sapiens
gtcccccgcgcgggcgcgggtggatctctcgggctctgacttgttttcgggtcaccttcaggcttcagccaggcacctgacgcctctttcccctcacggtgccaggccgggccgaactacatttcccaggaggctccgcggccaggtgcaaacagcgccgtgctgactacatttcccagacagccttgcggcggcccgggccttaaagcgtccatttcccagcggccctccgctgcgagaccgcagcccttctctggagtctcagagccgcaagacaccacgactcccagaggaccttgcgtcgggcaagaaagactacaccttccagaggcctctgcggcgccgcgacaggaagcggcgggcgagccgagtgtccttgcgcgtggatccgagcgaccatggtggcccgggtgtggtcgctgatgaggttcctcatcaagggaagtgtggctgggggcgccgtctacctggtgtacgaccaggagctgctggggcccagcgacaagagccaggcagccctacagaaggctggggaggtggtcccccccgccatgtaccagttcagccagtacgtgtgtcagcagacaggcctgcagataccccagctcccagcccctccaaagatttactttcccatccgtgactcctggaatgcaggcatcatgacggtgatgtcagctctgtcggtggccccctccaaggcccgcgagtactccaaggagggctgggagtatgtgaaggcgcgcaccaagtagcgagtcagcaggggccgcctgccccggccagaacgggcagggctgccactgacctgaagactccggactgggaccccactccgagggcagctcccggccttgccggcccaataaaggacttcagaagtgaaaaaaaaaaaaaaaaaaaaaaaaaaaaaaaaaaaagggggggggggcaaaaaaaaacccccggggggcccacataggacaaccccgtttttgggaaaaagggggcccaaaaaggggggcaataaaaaaaaaaggcagg

SEQ ID NO: 279325 - DNA, 1030 bp, Homo sapiens
gtcccccgcgcgggcgcgggtggatctctcgggctctgacttgttttcgggtcaccttcaggcttcagccaggcacctgacgcctctttcccctcacggtgccaggccgggccgaactacatttcccaggaggctccgcggccaggtgcaaacagcgccgtgctgactacatttcccagacagccttgcggcggcccgggccttaaagcgtccatttcccagcggccctccgctgcgagaccgcagcccttctctggagtctcagagccgcaagacaccacgactcccagaggaccttgcgtcgggcaagaaagactacaccttccagaggcctctgcggcgccgcgacaggaagcggcgggcgagccgagtgtccttgcgcgtggatccgagcgaccatggtggcccgggtgtggtcgctgatgaggttcctcatcaagggaagtgtggctgggggcgccgtctacctggtgtacgaccaggagctgctggggcccagcgacaagagccaggcagccctacagaaggctggggaggtggtcccccccgccatgtaccagttcagccagtacgtgtgtcagcagacaggcctgcagataccccagctcccagcccctccaaagatttactttcccatccgtgactcctggaatgcaggctggtatggtggcgcacttgtagtcccagctacttgggaggctgaggcaagagaatcgcttgaacccaggaggcgaaggttgcagtgagccgagattgcactactgcactccagcctgggagacagagcatcatgacggtgatgtcagctctgtcggtggccccctccaaggcccgcgagtactccaaggagggctgggagtatgtgaaggcgcgcaccaagtagcgagtcagcaggggccgcctgccccggccagaacgggcagggctgccactgacctgaagactccggactgggaccccactccgagggcagctcccggccttgccggcccaataaaggacttcagaagtgaaaaaaaaaaaaaaaaaa

SEQ ID NO: 279326 - DNA, 583 bp, Homo sapiens
agagagtagagagagagagagagagatagagagagactcgtgccgaattcggcacgaggtgacggccaccccgggactgcaggcggcggatgtcaggccctgtctgggccagaactgagcgctgtggggagcgcgcccggacctggcagtggagccaccgagcgagcagctcggtccagtgacccagatcccagggacctcagtcggcttaatcagagtgtggcatagaagctatttaatgattaaagtcatttgcagtaaaaaaaaaaaaaaaaaaaaaaataaaaaaaaaaaaaacaaacctttttcaggttggtattaaattcaaagaggctcgtgttaaaaaccctttgaatccgaaattcagttcgtttggcacattactcctttttaaccaatcgctttttccaaattggccttaaatctttgtggcctcaactaattgcatttccaaaagggcgtagtccctcaatggccttattaattttgagaatttccctattagggttttgtgttgtcacattttgtaaacaaagtcattttttacgcttgccttattaccttggcttttctttggttgggc

SEQ ID NO: 279327 - DNA, 300 bp, Homo sapiens
gcggccgcctactactactactactgctcgaattcaagcttctaacgatgtacgggcatcatgacggtgatgtcagctctgtcggtggccccctccaaggcccgcgagtactccaaggagggctgggagtatgtgaaggcgcgcaccaagtagcgagtcagcaggggccgcctgccccggccagaacgggcagggctgccactgacctgaagactccggactgggaccccactccgagggcagctcccggccttgccggcccaataaaggacttcagaagtgaaaaaaaaaaaaaaaaaa

SEQ ID NO: 279328 - DNA, 3556 bp, Homo sapiens
cgaactccgccccctcttctccgcgtaggcccagctccctgaagcggctgtttcgagccacgcgcccatcgggtaccgaggcacgcgccgggcgtcacgtgcgtttcgcggcgagcggaaatgacgcgagttgtgtgagccgccagtatggccgggctatggcggcgagcactggctacgtgcgactgtggggagcggcgcggtgctgggtgctgcggcggccgatgctggccgccgccggggggcgggttcccactgcagcaggagcgtggttgctccgaggccagcggacctgcgacgcctctcctccttgggcactgtggggccgaggcccggcaattgggggccaatggcgggggttttgggaagcgagcagccgcggcggaggcgcattctcggggggcgaggacgcctccgagggcggcgcggaggaaggagccggcggcgcggggggcagcgcgggcgccggggaaggcccggtcataacggcgctcacgcccatgacgatccccgatgtgtttccgcacctgccgctcatcgccatcacccgcaacccggtgttcccgcgctttatcaagattatcgaggttaaaaataagaagttggttgagctgctgagaaggaaagttcgtctcgcccagccttatgtcggcgtctttctaaagagagatgacagcaatgagtcggatgtggtcgagagcctggatgaaatctaccacacggggacgtttgcccagatccatgagatgcaggaccttggggacaagctgcgcatgatcgtcatgggacacagaagagtccatatcagcagacagctggaggtggagcccgaggagccggaggcggagaacaagcacaagccccgcaggaagtcaaagcggggcaagaaggaggcggaggacgagctgagcgccaggcacccggcggagctggcgatggagcccacccctgagctcccggctgaggtgctcatggtggaggtagagaacgttgtccacgaggacttccaggtcacggaggaggtgaaagccctgactgcagagatcgtgaagaccatccgggacatcattgccttgaaccctctctacagggagtcagtgctgcagatgatgcaggctggccagcgggtggtggacaaccccatctacctgagcgacatgggcgccgcgctcaccggggccgagtcccatgagctgcaggacgtcctggaagagaccaatattcctaagcggctgtacaaggccctctccctgctgaagaaggaatttgaactgagcaagctgcagcagcgcctggggcgggaggtggaggagaagatcaagcagacccaccgtaagtacctgctgcaggagcagctaaagatcatcaagaaggagctgggcctggagaaggacgacaaggatgccatcgaggagaagttccgggagcgcctgaaggagctcgtggtccccaagcacgtcatggatgttgtggacgaggagctgagcaagctgggcctgctggacaaccactcctcggagttcaatgtcacccgcaactacctagactggctcacgtccatcccttggggcaagtacagcaacgagaacctggacctggcgcgggcacaggcagtgctggaggaagaccactacggcatggaggacgtcaagaaacgcatcctggagttcattgccgttagccagctccgcggctccacccagggcaagatcctctgcttctatggcccccctggcgtgggtaagaccagcattgctcgctccatcgcccgcgccctgaaccgagagtacttccgcttcagcgtcgggggcatgactgacgtggctgagatcaagggccacaggcggacctacgtgggcgccatgcccgggaagatcatccagtgtttgaagaagaccaagacggagaaccccctgatcctcatcgacgaggtggacaagatcggccgaggctaccagggggacccgtcgtcggcactgctggagctgctggacccagagcagaatgccaacttcctggaccactacctggacgtgcccgtggacttgtccaaggtgctgttcatctgcacggccaacgtcacggacaccatccccgagccgctgcgagaccgtatggagatgatcaacgtgtcgggctacgtggcccaggagaagctggccattgcggagcgctacctggtgccccaggctcgcgccctgtgtggcttggatgagagcaaggccaagctgtcatcggacgtgctgacgctgctcatcaagcagtactgccgcgagagcggtgtccgcaacctgcagaagcaagtggagaaggtgttacggaaatcggcctacaagattgtcagcggcgaggccgagtccgtggaggtgacgcccgagaacctgcaggacttcgtggggaagcccgtgttcaccgtggagcgcatgtatgacgtgacaccgcccggcgtggtcatggggctggcctggaccgcaatgggaggctccacgctgtttgtggagacatccctgagacggccacaggacaaggatgccaagggtgacaaggatggcagcctggaggtgacaggccagctgggggaggtgatgaaggagagcgcccgcatagcctacaccttcgccagagccttcctcatgcagcacgcccccgccaatgactacctggtgacctcacacatccacctgcatgtgcccgagggcgccacccccaaggacggcccaagcgcaggctgcaccatcgtcacggccctgctgtccctggccatgggcaggcctgtccggcagaatctggccatgactggcgaagtctccctcacgggcaagatcctgcctgttggtggcatcaaggagaagaccattgcggccaagcgcgcaggggtgacgtgcatcgtcctgccagccgagaacaagaaggacttctacgacctggcagccttcatcaccgagggcctggaggtgcacttcgtggaacactaccgggagatcttcgacatcgccttcccggacgagcaggcagaggcgctggccgtggaacggtgacggccaccccgggactgcaggcggcggatgtcaggccctgtctgggccagaactgagcgctgtggggagcgcgcccggacctggcagtggagccaccgagcgagcagctcggtccagtgacccagatcccagggacctcagtcggcttaatcagagtgtggcatagaagctatttaatgattaaagtcatttgcagtgggagttagcatcactaacctgacagttgttgccaggaatttgctttgtttactgctagtatattagaaatcctagatctcagaatcacaatagtaataaacaacaggggtcattttttcctaacttactctgtgttcaggtgtggaatttctgtctcccaagaggaaatgtgacttcactttggtgccaatggacagaaaattctacctgtgctacataggagaagtttggaatgcacttaatagctggtttttacaccttgatttcgaggtggaaagaaattgatcatgaatctctaataaatttaaatctcttaaacc

SEQ ID NO: 279329 - DNA, 3811 bp, Homo sapiens
  misc_feature (3798)..(3798): n is a, c, g, or t
cgaactccgccccctcttctccgcgtaggcccagctccctgaagcggctgtttcgagccacgcgcccatcgggtaccgaggcacgcgccgggcgtcacgtgcgtttcgcggcgagcggaaatgacgcgagttgtgtgagccgccagtatggccgggctatggcggcgagcactggctacgtgcgactgtggggagcggcgcggtgctgggtgctgcggcggccgatgctggccgccgccggggggcgggttcccactgcagcaggagcgtggttgctccgaggccagcggacctgcgacgcctctcctccttgggcactgtggggccgaggcccggcaattgggggccaatggcgggggttttgggaagcgagcagccgcggcggaggcgcattctcggggggcgaggacgcctccgagggcggcgcggaggaaggagccggcggcgcggggggcagcgcgggcgccggggaaggcccggtcataacggcgctcacgcccatgacgatccccgatgtgtttccgcacctgccgctcatcgccatcacccgcaacccggtgttcccgcgctttatcaagattatcgaggttaaaaataagaagttggttgagctgctgagaaggaaagttcgtctcgcccagccttatgtcggcgtctttctaaagagagatgacagcaatgagtcggatgtggtcgagagcctggatgaaatctaccacacggggacgtttgcccagatccatgagatgcaggaccttggggacaagctgcgcatgatcgtcatgggacacagaagagtccatatcagcagacagctggaggtggagcccgaggagccggaggcggagaacaagcacaagccccgcaggaagtcaaagcggggcaagaaggaggcggaggacgagctgagcgccaggcacccggcggagctggcgatggagcccacccctgagctcccggctgaggtgctcatggtggaggtagagaacgttgtccacgaggacttccaggtcacggaggaggtgaaagccctgactgcagagatcgtgaagaccatccgggacatcattgccttgaaccctctctacagggagtcagtgctgcagatgatgcaggctggccagcgggtggtggacaaccccatctacctgagcgacatgggcgccgcgctcaccggggccgagtcccatgagctgcaggacgtcctggaagagaccaatattcctaagcggctgtacaaggccctctccctgctgaagaaggaatttgaactgagcaagctgcagcagcgcctggggcgggaggtggaggagaagatcaagcagacccaccgtaagtacctgctgcaggagcagctaaagatcatcaagaaggagctgggcctggagaaggacgacaaggatgccatcgaggagaagttccgggagcgcctgaaggagctcgtggtccccaagcacgtcatggatgttgtggacgaggagctgagcaagctgggcctgctggacaaccactcctcggagttcaatgtcacccgcaactacctagactggctcacgtccatcccttggggcaagtacagcaacgagaacctggacctggcgcgggcacaggcagtgctggaggaagaccactacggcatggaggacgtcaagaaacgcatcctggagttcattgccgttagccagctccgcggctccacccagggcaagatcctctgcttctatggcccccctggcgtgggtaagaccagcattgctcgctccatcgcccgcgccctgaaccgagagtacttccgcttcagcgtcgggggcatgactgacgtggctgagatcaagggccacaggcggacctacgtgggcgccatgcccgggaagatcatccagtgtttgaagaagaccaagacggagaaccccctgatcctcatcgacgaggtggacaagatcggccgaggctaccagggggacccgtcgtcggcactgctggagctgctggacccagagcagaatgccaacttcctggaccactacctggacgtgcccgtggacttgtccaaggtgctgttcatctgcacggccaacgtcacggacaccatccccgagccgctgcgagaccgtatggagatgatcaacgtgtcgggctacgtggcccaggagaagctggccattgcggagcgctacctggtgccccaggctcgcgccctgtgtggcttggatgagagcaaggccaagctgtcatcggacgtgctgacgctgctcatcaagcagtactgccgcgagagcggtgtccgcaacctgcagaagcaagtggagaaggtgttacggaaatcggcctacaagattgtcagcggcgaggccgagtccgtggaggtgacgcccgagaacctgcaggacttcgtggggaagcccgtgttcaccgtggagcgcatgtatgacgtgacaccgcccggcgtggtcatggggctggcctggaccgcaatgggaggctccacgctgtttgtggagacatccctgagacggccacaggacaaggatgccaagggtgacaaggatggcagcctggaggtgacaggccagctgggggaggtgatgaaggagagcgcccgcatagcctacaccttcgccagagccttcctcatgcagcacgcccccgccaatgactacctggtgacctcacacatccacctgcatgtgcccgagggcgccacccccaaggacggcccaagcgcaggctgcaccatcgtcacggccctgctgtccctggccatgggcaggcctgtccggcagaatctggccatgactggcgaagtctccctcacgggcaagatcctgcctgttggtggcatcaaggagaagaccattgcggccaagcgcgcaggggtgacgtgcatcgtcctgccagccgagaacaagaaggacttctacgacctggcagccttcatcaccgagggcctggaggtgcacttcgtggaacactaccgggagatcttcgacatcgccttcccggacgagcaggcagaggcgctggccgtggaacggtgacggccaccccgggactgcaggcggcggatgtcaggccctgtctgggccagaactgagcgctgtggggagcgcgcccggacctggcagtggagccaccgagcgagcagctcggtccagtgacccagatcccagggacctcagtcggcttaatcagagtgtggcatagaagctatttaatgattaaagtcatttgcagtacggcggcttcctcacctgctgccccgggaagggtgggcgggccacggcttttgattcacgaccaggcagcacccggagagggtgtggctcagagcgggcaccagacaggggactgcgggcccccgacacacccacacccacccacggacagcaggagagccagggcttctgtcaagctgttctttatttcagggagagggcaggggaggggctcagtctttcttggcagcagctttcctcatggcggccagtacgttgctcagctcctcccgcttcctcttggcgcggatgtgcgtccccaaccttttcttgataaatttgagggcccgtttgtccttggagaccttcagtaactccatggcgcgccgctcgtacggggcaaagccacacacctcccgaatcatgtcccgcacgaacttggtgtgtttggtcagaccccgcggcgtcggctgtgcctgggcttgctcacgttcttggtcactttgtggcccttgttgaggcccacggccatagggtagcgtagggccatggctgctgctctccagagacggccgtggcgganaggctggcgccgc

SEQ ID NO: 279330 - DNA, 3294 bp, Homo sapiens
  misc_feature (3236)..(3236): n is a, c, g, or t
cgaactccgccccctcttctccgcgtaggcccagctccctgaagcggctgtttcgagccacgcgcccatcgggtaccgaggcacgcgccgggcgtcacgtgcgtttcgcggcgagcggaaatgacgcgagttgtgtgagccgccagtatggccgggctatggcggcgagcactggctacgtgcgactgtggggagcggcgcggtgctgggtgctgcggcggccgatgctggccgccgccggggggcgggttcccactgcagcaggagcgtggttgctccgaggccagcggacctgcgacgcctctcctccttgggcactgtggggccgaggcccggcaattgggggccaatggcgggggttttgggaagcgagcagccgcggcggaggcgcattctcggggggcgaggacgcctccgagggcggcgcggaggaaggagccggcggcgcggggggcagcgcgggcgccggggaaggcccggtcataacggcgctcacgcccatgacgatccccgatgtgtttccgcacctgccgctcatcgccatcacccgcaacccggtgttcccgcgctttatcaagattatcgaggttaaaaataagaagttggttgagctgctgagaaggaaagttcgtctcgcccagccttatgtcggcgtctttctaaagagagatgacagcaatgagtcggatgtggtcgagagcctggatgaaatctaccacacggggacgtttgcccagatccatgagatgcaggaccttggggacaagctgcgcatgatcgtcatgggacacagaagagtccatatcagcagacagctggaggtggagcccgaggagccggaggcggagaacaagcacaagccccgcaggaagtcaaagcggggcaagaaggaggcggaggacgagctgagcgccaggcacccggcggagctggcgatggagcccacccctgagctcccggctgaggtgctcatggtggaggtagagaacgttgtccacgaggacttccaggtcacggaggaggtgaaagccctgactgcagagatcgtgaagaccatccgggacatcattgccttgaaccctctctacagggagtcagtgctgcagatgatgcaggctggccagcgggtggtggacaaccccatctacctgagcgacatgggcgccgcgctcaccggggccgagtcccatgagctgcaggacgtcctggaagagaccaatattcctaagcggctgtacaaggccctctccctgctgaagaaggaatttgaactgagcaagctgcagcagcgcctggggcgggaggtggaggagaagatcaagcagacccaccgtaagtacctgctgcaggagcagctaaagatcatcaagaaggagctgggcctggagaaggacgacaaggatgccatcgaggagaagttccgggagcgcctgaaggagctcgtggtccccaagcacgtcatggatgttgtggacgaggagctgagcaagctgggcctgctggacaaccactcctcggagttcaatgtcacccgcaactacctagactggctcacgtccatcccttggggcaagtacagcaacgagaacctggacctggcgcgggcacaggcagtgctggaggaagaccactacggcatggaggacgtcaagaaacgcatcctggagttcattgccgttagccagctccgcggctccacccagggcaagatcctctgcttctatggcccccctggcgtgggtaagaccagcattgctcgctccatcgcccgcgccctgaaccgagagtacttccgcttcagcgtcgggggcatgactgacgtggctgagatcaagggccacaggcggacctacgtgggcgccatgcccgggaagatcatccagtgtttgaagaagaccaagacggagaaccccctgatcctcatcgacgaggtggacaagatcggccgaggctaccagggggacccgtcgtcggcactgctggagctgctggacccagagcagaatgccaacttcctggaccactacctggacgtgcccgtggacttgtccaaggtgctgttcatctgcacggccaacgtcacggacaccatccccgagccgctgcgagaccgtatggagatgatcaacgtgtcgggctacgtggcccaggagaagctggccattgcggagcgctacctggtgccccaggctcgcgccctgtgtggcttggatgagagcaaggccaagctgtcatcggacgtgctgacgctgctcatcaagcagtactgccgcgagagcggtgtccgcaacctgcagaagcaagtggagaaggtgttacggaaatcggcctacaagattgtcagcggcgaggccgagtccgtggaggtgacgcccgagaacctgcaggacttcgtggggaagcccgtgttcaccgtggagcgcatgtatgacgtgacaccgcccggcgtggtcatggggctggcctggaccgcaatgggaggctccacgctgtttgtggagacatccctgagacggccacaggacaaggatgccaagggtgacaaggatggcagcctggaggtgacaggccagctgggggaggtgatgaaggagagcgcccgcatagcctacaccttcgccagagccttcctcatgcagcacgcccccgccaatgactacctggtgacctcacacatccacctgcatgtgcccgagggcgccacccccaaggacggcccaagcgcaggctgcaccatcgtcacggccctgctgtccctggccatgggcaggcctgtccggcagaatctggccatgactggcgaagtctccctcacgggcaagatcctgcctgttggtggcatcaaggagaagaccattgcggccaagcgcgcaggggtgacgtgcatcgtcctgccagccgagaacaagaaggacttctacgacctggcagccttcatcaccgagggcctggaggtgcacttcgtggaacactaccgggagatcttcgacatcgccttcccggacgagcaggcagaggcgctggccgtggaacggtgacggccaccccgggactgcaggcggcggatgtcaggccctgtctgggccagaactgagcgctgtggggagcgcgcccggacctggcagtggagccaccgagcgagcagctcggtccagtgacccagatcccagggacctcagtcggcttaatcagagtgtggcatagaagctatttaatgattaaagtcatttgcagtnacacaaacaaacaacaaaaaaaggggggcggaaaaaaacccagggggccaacaacgac

SEQ ID NO: 279331 - DNA, 3742 bp, Homo sapiens
  misc_feature (3729)..(3729): n is a, c, g, or t
cgaactccgccccctcttctccgcgtaggcccagctccctgaagcggctgtttcgagccacgcgcccatcgggtaccgaggcacgcgccgggcgtcacgtgcgtttcgcggcgagcggaaatgacgcgagttgtgtgagccgccagtatggccgggctatggcggcgagcactggctacgtgcgactgtggggagcggcgcggtgctgggtgctgcggcggccgatgctggccgccgccggggggcgggttcccactgcagcaggagcgtggttgctccgaggccagcggacctgcgacgcctctcctccttgggcactgtggggccgaggcccggcaattgggggccaatggcgggggttttgggaagcgagcagccgcggcggaggcgcattctcggggggcgaggacgcctccgagggcggcgcggaggaaggagccggcggcgcggggggcagcgcgggcgccggggaaggcccggtcataacggcgctcacgcccatgacgatccccgatgtgtttccgcacctgccgctcatcgccatcacccgcaacccggtgttcccgcgctttatcaagattatcgaggttaaaaataagaagttggttgagctgctgagaaggaaagttcgtctcgcccagccttatgtcggcgtctttctaaagagagatgacagcaatgagtcggatgtggtcgagagcctggatgaaatctaccacacggggacgtttgcccagatccatgagatgcaggaccttggggacaagctgcgcatgatcgtcatgggacacagaagagtccatatcagcagacagctggaggtggagcccgaggagccggaggcggagaacaagcacaagccccgcaggaagtcaaagcggggcaagaaggaggcggaggacgagctgagcgccaggcacccggcggagctggcgatggagcccacccctgagctcccggctgaggtgctcatggtggaggtagagaacgttgtccacgaggacttccaggtcacggaggaggtgaaagccctgactgcagagatcgtgaagaccatccgggacatcattgccttgaaccctctctacagggagtcagtgctgcagatgatgcaggctggccagcgggtggtggacaaccccatctacctgagcgacatgggcgccgcgctcaccggggccgagtcccatgagctgcaggacgtcctggaagagaccaatattcctaagcggctggtggaggagaagatcaagcagacccaccgtaagtacctgctgcaggagcagctaaagatcatcaagaaggagctgggcctggagaaggacgacaaggatgccatcgaggagaagttccgggagcgcctgaaggagctcgtggtccccaagcacgtcatggatgttgtggacgaggagctgagcaagctgggcctgctggacaaccactcctcggagttcaatgtcacccgcaactacctagactggctcacgtccatcccttggggcaagtacagcaacgagaacctggacctggcgcgggcacaggcagtgctggaggaagaccactacggcatggaggacgtcaagaaacgcatcctggagttcattgccgttagccagctccgcggctccacccagggcaagatcctctgcttctatggcccccctggcgtgggtaagaccagcattgctcgctccatcgcccgcgccctgaaccgagagtacttccgcttcagcgtcgggggcatgactgacgtggctgagatcaagggccacaggcggacctacgtgggcgccatgcccgggaagatcatccagtgtttgaagaagaccaagacggagaaccccctgatcctcatcgacgaggtggacaagatcggccgaggctaccagggggacccgtcgtcggcactgctggagctgctggacccagagcagaatgccaacttcctggaccactacctggacgtgcccgtggacttgtccaaggtgctgttcatctgcacggccaacgtcacggacaccatccccgagccgctgcgagaccgtatggagatgatcaacgtgtcgggctacgtggcccaggagaagctggccattgcggagcgctacctggtgccccaggctcgcgccctgtgtggcttggatgagagcaaggccaagctgtcatcggacgtgctgacgctgctcatcaagcagtactgccgcgagagcggtgtccgcaacctgcagaagcaagtggagaaggtgttacggaaatcggcctacaagattgtcagcggcgaggccgagtccgtggaggtgacgcccgagaacctgcaggacttcgtggggaagcccgtgttcaccgtggagcgcatgtatgacgtgacaccgcccggcgtggtcatggggctggcctggaccgcaatgggaggctccacgctgtttgtggagacatccctgagacggccacaggacaaggatgccaagggtgacaaggatggcagcctggaggtgacaggccagctgggggaggtgatgaaggagagcgcccgcatagcctacaccttcgccagagccttcctcatgcagcacgcccccgccaatgactacctggtgacctcacacatccacctgcatgtgcccgagggcgccacccccaaggacggcccaagcgcaggctgcaccatcgtcacggccctgctgtccctggccatgggcaggcctgtccggcagaatctggccatgactggcgaagtctccctcacgggcaagatcctgcctgttggtggcatcaaggagaagaccattgcggccaagcgcgcaggggtgacgtgcatcgtcctgccagccgagaacaagaaggacttctacgacctggcagccttcatcaccgagggcctggaggtgcacttcgtggaacactaccgggagatcttcgacatcgccttcccggacgagcaggcagaggcgctggccgtggaacggtgacggccaccccgggactgcaggcggcggatgtcaggccctgtctgggccagaactgagcgctgtggggagcgcgcccggacctggcagtggagccaccgagcgagcagctcggtccagtgacccagatcccagggacctcagtcggcttaatcagagtgtggcatagaagctatttaatgattaaagtcatttgcagtacggcggcttcctcacctgctgccccgggaagggtgggcgggccacggcttttgattcacgaccaggcagcacccggagagggtgtggctcagagcgggcaccagacaggggactgcgggcccccgacacacccacacccacccacggacagcaggagagccagggcttctgtcaagctgttctttatttcagggagagggcaggggaggggctcagtctttcttggcagcagctttcctcatggcggccagtacgttgctcagctcctcccgcttcctcttggcgcggatgtgcgtccccaaccttttcttgataaatttgagggcccgtttgtccttggagaccttcagtaactccatggcgcgccgctcgtacggggcaaagccacacacctcccgaatcatgtcccgcacgaacttggtgtgtttggtcagaccccgcggcgtcggctgtgcctgggcttgctcacgttcttggtcactttgtggcccttgttgaggcccacggccatagggtagcgtagggccatggctgctgctctccagagacggccgtggcgganaggctggcgccgc

SEQ ID NO: 279332 - DNA, 3782 bp, Homo sapiens
  misc_feature (3769)..(3769): n is a, c, g, or t
cgaactccgccccctcttctccgcgtaggcccagctccctgaagcggctgtttcgagccacgcgcccatcgggtaccgaggcacgcgccgggcgtcacgtgcgtttcgcggcgagcggaaatgacgcgagttgtgtgagccgccagtatggccgggctatggcggcgagcactggctacgtgcgactgtggggagcggcgcggtgctgggtgctgcggcggccgatgctggccgccgccggggggcgggttcccactgcagcaggagcgtggttgctccgaggccagcggacctgcgacgcctctcctccttgggcactgtggggccgaggcccggcaattgggggccaatggcgggggttttgggaagcgagcagccgcggcggaggcgcattctcggggggcgaggacgcctccgagggcggcgcggaggaaggagccggcggcgcggggggcagcgcgggcgccggggaaggcccggtcataacggcgctcacgcccatgacgatccccgatgtgtttccgcacctgccgctcatcgccatcacccgcaacccggtgttcccgcgctttatcaagattatcgaggttaaaaataagaagttggttgagctgctgagaaggaaagttcgtctcgcccagccttatgtcggcgtctttctaaagagagatgacagcaatgagtcggatgtggtcgagagcctggatgaaatctaccacacggggacgtttgcccagatccatgagatgcaggaccttggggacaagctgcgcatgatcgtcatgggacacagaagagtccatatcagcagacagctggaggtggagcccgaggagccggaggcggagaacaagcaagaaggaggcggaggacgagctgagcgccaggcacccggcggagctggcgatggagcccacccctgagctcccggctgaggtgctcatggtggaggtagagaacgttgtccacgaggacttccaggtcacggaggaggtgaaagccctgactgcagagatcgtgaagaccatccgggacatcattgccttgaaccctctctacagggagtcagtgctgcagatgatgcaggctggccagcgggtggtggacaaccccatctacctgagcgacatgggcgccgcgctcaccggggccgagtcccatgagctgcaggacgtcctggaagagaccaatattcctaagcggctgtacaaggccctctccctgctgaagaaggaatttgaactgagcaagctgcagcagcgcctggggcgggaggtggaggagaagatcaagcagacccaccgtaagtacctgctgcaggagcagctaaagatcatcaagaaggagctgggcctggagaaggacgacaaggatgccatcgaggagaagttccgggagcgcctgaaggagctcgtggtccccaagcacgtcatggatgttgtggacgaggagctgagcaagctgggcctgctggacaaccactcctcggagttcaatgtcacccgcaactacctagactggctcacgtccatcccttggggcaagtacagcaacgagaacctggacctggcgcgggcacaggcagtgctggaggaagaccactacggcatggaggacgtcaagaaacgcatcctggagttcattgccgttagccagctccgcggctccacccagggcaagatcctctgcttctatggcccccctggcgtgggtaagaccagcattgctcgctccatcgcccgcgccctgaaccgagagtacttccgcttcagcgtcgggggcatgactgacgtggctgagatcaagggccacaggcggacctacgtgggcgccatgcccgggaagatcatccagtgtttgaagaagaccaagacggagaaccccctgatcctcatcgacgaggtggacaagatcggccgaggctaccagggggacccgtcgtcggcactgctggagctgctggacccagagcagaatgccaacttcctggaccactacctggacgtgcccgtggacttgtccaaggtgctgttcatctgcacggccaacgtcacggacaccatccccgagccgctgcgagaccgtatggagatgatcaacgtgtcgggctacgtggcccaggagaagctggccattgcggagcgctacctggtgccccaggctcgcgccctgtgtggcttggatgagagcaaggccaagctgtcatcggacgtgctgacgctgctcatcaagcagtactgccgcgagagcggtgtccgcaacctgcagaagcaagtggagaaggtgttacggaaatcggcctacaagattgtcagcggcgaggccgagtccgtggaggtgacgcccgagaacctgcaggacttcgtggggaagcccgtgttcaccgtggagcgcatgtatgacgtgacaccgcccggcgtggtcatggggctggcctggaccgcaatgggaggctccacgctgtttgtggagacatccctgagacggccacaggacaaggatgccaagggtgacaaggatggcagcctggaggtgacaggccagctgggggaggtgatgaaggagagcgcccgcatagcctacaccttcgccagagccttcctcatgcagcacgcccccgccaatgactacctggtgacctcacacatccacctgcatgtgcccgagggcgccacccccaaggacggcccaagcgcaggctgcaccatcgtcacggccctgctgtccctggccatgggcaggcctgtccggcagaatctggccatgactggcgaagtctccctcacgggcaagatcctgcctgttggtggcatcaaggagaagaccattgcggccaagcgcgcaggggtgacgtgcatcgtcctgccagccgagaacaagaaggacttctacgacctggcagccttcatcaccgagggcctggaggtgcacttcgtggaacactaccgggagatcttcgacatcgccttcccggacgagcaggcagaggcgctggccgtggaacggtgacggccaccccgggactgcaggcggcggatgtcaggccctgtctgggccagaactgagcgctgtggggagcgcgcccggacctggcagtggagccaccgagcgagcagctcggtccagtgacccagatcccagggacctcagtcggcttaatcagagtgtggcatagaagctatttaatgattaaagtcatttgcagtacggcggcttcctcacctgctgccccgggaagggtgggcgggccacggcttttgattcacgaccaggcagcacccggagagggtgtggctcagagcgggcaccagacaggggactgcgggcccccgacacacccacacccacccacggacagcaggagagccagggcttctgtcaagctgttctttatttcagggagagggcaggggaggggctcagtctttcttggcagcagctttcctcatggcggccagtacgttgctcagctcctcccgcttcctcttggcgcggatgtgcgtccccaaccttttcttgataaatttgagggcccgtttgtccttggagaccttcagtaactccatggcgcgccgctcgtacggggcaaagccacacacctcccgaatcatgtcccgcacgaacttggtgtgtttggtcagaccccgcggcgtcggctgtgcctgggcttgctcacgttcttggtcactttgtggcccttgttgaggcccacggccatagggtagcgtagggccatggctgctgctctccagagacggccgtggcgganaggctggcgccgc

SEQ ID NO: 279333 - DNA, 3874 bp, Homo sapiens
  misc_feature (3861)..(3861): n is a, c, g, or t
cgaactccgccccctcttctccgcgtaggcccagctccctgaagcggctgtttcgagccacgcgcccatcgggtaccgaggcacgcgccgggcgtcacgtgcgtttcgcggcgagcggaaatgacgcgagttgtgtgagccgccagtatggccgggctatggcggcgagcactggctacgtgcgactgtggggagcggcgcggtgctgggtgctgcggcggccgatgctggccgccgccggggggcgggttcccactgcagcaggagcgtggttgctccgaggccagcggacctgcgacgcctctcctccttgggcactgtggggccgaggcccggcaattgggggccaatggcgggggttttgggaagcgagcagccgcggcggaggcgcattctcggggggcgaggacgcctccgagggcggcgcggaggaaggagccggcggcgcggggggcagcgcgggcgccggggaaggcccggtcataacggcgctcacgcccatgacgatccccgatgtgtttccgcacctgccgctcatcgccatcacccgcaacccggtgttcccgcgctttatcaagattatcgaggttaaaaataagaagttggttgagctgctgagaaggaaagttcgtctcgcccagccttatgtcggcgtctttctaaagagagatgacagcaatgagtcggatgtggtcgagagcctggatgaaatctaccacacggggacgtttgcccagatccatgagatgcaggaccttggggacaagctgcgcatgatcgtcatgggacacagaagagtccatatcagcagacagctggaggtggagcccgaggagccggaggcggagaacaagcacaagccccgcaggaagtcaaagcggggcaagaaggaggcggaggacgagctgagcgccaggcacccggcggagctggcgatggagcccacccctgagctcccggctgaggtgctcatggtggaggtagagaacgttgtccacgaggacttccaggtcacggaggaggtgaaagccctgactgcagagatcgtgaagaccatccgggacatcattgccttgaaccctctctacagggagtcagtgctgcagatgatgcaggctggccagcgggtggtggacaaccccatctacctgagcgacatgggcgccgcgctcaccggggccgagtcccatgagctgcaggacgtcctggaagagaccaatattcctaagcggctgtacaaggccctctccctgctgaagaaggaatttgaactgagcaagctgcagcagcgcctggggcgggaggtggaggagaagatcaagcagacccaccgtaagtacctgctgcaggagcagctaaagatcatcaagaaggagctgggcctggagaaggacgacaaggatgccatcgaggagaagttccgggagcgcctgaaggagctcgtggtccccaagcacgtcatggatgttgtggacgaggagctgagcaagctgggcctgctggacaaccactcctcggagttcaatgtcacccgcaactacctagactggctcacgtccatcccttggggcaagtacagcaacgagaacctggacctggcgcgggcacaggcagtgctggaggaagaccactacggcatggaggacgtcaagaaacgcatcctggagttcattgccgttagccagctccgcggctccacccagggcaagatcctctgcttctatggcccccctggcgtgggtaagaccagcattgctcgctccatcgcccgcgccctgaaccgagagtacttccgcttcagcgtcgggggcatgactgacgtggctgagatcaagggccacaggcggacctacgtgggcgccatgcccgggaagatcatccagtgtttgaagaagaccaagacggagaaccccctgatcctcatcgacgaggtggacaagatcggccgaggctaccagggggacccgtcgtcggcactgctggagctgctggacccagagcagaatgccaacttcctggaccactacctggacgtgcccgtggacttgtccaaggtgctgttcatctgcacggccaacgtcacggacaccatccccgagccgctgcgagaccgtatggagatgatcaacgtgtcgggctacgtggcccaggagaagctggccattgcggagcgctacctggtgccccaggctcgcgccctgtgtggcttggatgagagcaaggccaagctgtcatcggacgtgctgacgctgctcatcaagcagtactgccgcgagagcggtgtccgcaacctgcagaagcaagtggagaaggtgttacggaaatcggcctacaagattgtcagcggcgaggccgagtccgtggaggtgacgcccgagaacctgcaggacttcgtggggaagcccgtgttcaccgtggagcgcatgtatgacgtgacaccgcccggcgtggtcatggggctggcctggaccgcaatgggaggctccacgctgtttgtggagacatccctgagacggccacaggacaaggatgccaagggtgacaaggatggcagcctggaggtgacaggccagctgggggaggtgatgaaggagagcgcccgcatagcctacaccttcgccagagccttcctcatgcagcacgcccccgccaatgactacctggtgacctcacacatccacctgcatgtgcccgagggcgccacccccaaggacggcccaagcgcaggctgcaccatcgtcacggccctgctgtccctggccatgggcaggcctgtccggcagaatctggccatgactggcgaagtctccctcacgggcaagatcctgcctgttggtggcatcaaggagaagaccattgcggcccaggcagggctgaccctgactctgcccccaggccaagcgcgcaggggtgacgtgcatcgtcctgccagccgagaacaagaaggacttctacgacctggcagccttcatcaccgagggcctggaggtgcacttcgtggaacactaccgggagatcttcgacatcgccttcccggacgagcaggcagaggcgctggccgtggaacggtgacggccaccccgggactgcaggcggcggatgtcaggccctgtttgggccagaactggatgtcaggccctgtctgggccagaactgagcgctgtggggagcgcgcccggacctggcagtggagccaccgagcgagcagctcggtccagtgacccagatcccagggacctcagtcggcttaatcagagtgtggcatagaagctatttaatgattaaagtcatttgcagtacggcggcttcctcacctgctgccccgggaagggtgggcgggccacggcttttgattcacgaccaggcagcacccggagagggtgtggctcagagcgggcaccagacaggggactgcgggcccccgacacacccacacccacccacggacagcaggagagccagggcttctgtcaagctgttctttatttcagggagagggcaggggaggggctcagtctttcttggcagcagctttcctcatggcggccagtacgttgctcagctcctcccgcttcctcttggcgcggatgtgcgtccccaaccttttcttgataaatttgagggcccgtttgtccttggagaccttcagtaactccatggcgcgccgctcgtacggggcaaagccacacacctcccgaatcatgtcccgcacgaacttggtgtgtttggtcagaccccgcggcgtcggctgtgcctgggcttgctcacgttcttggtcactttgtggcccttgttgaggcccacggccatagggtagcgtagggccatggctgctgctctccagagacggccgtggcgganaggctggcgccgc

SEQ ID NO: 279334 - DNA, 3264 bp, Homo sapiens
cgaactccgccccctcttctccgcgtaggcccagctccctgaagcggctgtttcgagccacgcgcccatcgggtaccgaggcacgcgccgggcgtcacgtgcgtttcgcggcgagcggaaatgacgcgagttgtgtgagccgccagtatggccgggctatggcggcgagcactggctacgtgcgactgtggggagcggcgcggtgctgggtgctgcggcggccgatgctggccgccgccggggggcgggttcccactgcagcaggagcgtggttgctccgaggccagcggacctgcgacgcctctcctccttgggcactgtggggccgaggcccggcaattgggggccaatggcgggggttttgggaagcgagcagccgcggcggaggcgcattctcggggggcgaggacgcctccgagggcggcgcggaggaaggagccggcggcgcggggggcagcgcgggcgccggggaaggcccggtcataacggcgctcacgcccatgacgatccccgatgtgtttccgcacctgccgctcatcgccatcacccgcaacccggtgttcccgcgctttatcaagattatcgaggttaaaaataagaagttggttgagctgctgagaaggaaagttcgtctcgcccagccttatgtcggcgtctttctaaagagagatgacagcaatgagtcggatgtggtcgagagcctggatgaaatctaccacacggggacgtttgcccagatccatgagatgcaggaccttggggacaagctgcgcatgatcgtcatgggacacagaagagtccatatcagcagacagctggaggtggagcccgaggagccggaggcggagaacaagcacaagccccgcaggaagtcaaagcggggcaagaaggaggcggaggacgagctgagcgccaggcacccggcggagctggcgatggagcccacccctgagctcccggctgaggtgctcatggtggaggtagagaacgttgtccacgaggacttccaggtcacggaggaggtgaaagccctgactgcagagatcgtgaagaccatccgggacatcattgccttgaaccctctctacagggagtcagtgctgcagatgatgcaggctggccagcgggtggtggacaaccccatctacctgagcgacatgggcgccgcgctcaccggggccgagtcccatgagctgcaggacgtcctggaagagaccaatattcctaagcggctgtacaaggccctctccctgctgaagaaggaatttgaactgagcaagctgcagcagcgcctggggcgggaggtggaggagaagatcaagcagacccaccgtaagtacctgctgcaggagcagctaaagatcatcaagaaggagctgggcctggagaaggacgacaaggatgccatcgaggagaagttccgggagcgcctgaaggagctcgtggtccccaagcacgtcatggatgttgtggacgaggagctgagcaagctgggcctgctggacaaccactcctcggagttcaatgtcacccgcaactacctagactggctcacgtccatcccttggggcaagtacagcaacgagaacctggacctggcgcgggcacaggcagtgctggaggaagaccactacggcatggaggacgtcaagaaacgcatcctggagttcattgccgttagccagctccgcggctccacccagggcaagatcctctgcttctatggcccccctggcgtgggtaagaccagcattgctcgctccatcgcccgcgccctgaaccgagagtacttccgcttcagcgtcgggggcatgactgacgtggctgagatcaagggccacaggcggacctacgtgggcgccatgcccgggaagatcatccagtgtttgaagaagaccaagacggagaaccccctgatcctcatcgacgaggtggacaagatcggccgaggctaccagggggacccgtcgtcggcactgctggagctgctggacccagagcagaatgccaacttcctggaccactacctggacgtgcccgtggacttgtccaaggtgctgttcatctgcacggccaacgtcacggacaccatccccgagccgctgcgagaccgtatggagatgatcaacgtgtcgggctacgtggcccaggagaagctggccattgcggagcgctacctggtgccccaggctcgcgccctgtgtggcttggatgagagcaaggccaagctgtcatcggacgtgctgacgctgctcatcaagcagtactgccgcgagagcggtgtccgcaacctgcagaagcaagtggagaaggtgttacggaaatcggcctacaagattgtcagcggcgaggccgagtccgtggaggtgacgcccgagaacctgcaggacttcgtggggaagcccgtgttcaccgtggagcgcatgtatgacgtgacaccgcccggcgtggtcatggggctggcctggaccgcaatgggaggctccacgctgtttgtggagacatccctgagacggccacaggacaaggatgccaagggtgacaaggatggcagcctggaggtgacaggccagctgggggaggtgatgaaggagagcgcccgcatagcctacaccttcgccagagccttcctcatgcagcacgcccccgccaatgactacctggtgacctcacacatccacctgcatgtgcccgagggcgccacccccaaggacggcccaagcgcaggctgcaccatcgtcacggccctgctgtccctggccatgggcaggcctgtccggcagaatctggccatgactggcgaagtctccctcacgggcaagatcctgcctgttggtggcatcaaggagaagaccattgcggccaagcgcgcaggggtgacgtgcatcgtcctgccagccgagaacaagaaggacttctacgacctggcagccttcatcaccgagggcctggaggtgcacttcgtggaacactaccgggagatcttcgacatcgccttcccggacgagcaggcagaggcgctggccgtggaacggtgacggccaccccgggactgcaggcggcggatgtcaggccctgtttgggccagaactggatgtcaggccctgtctgggccagaactgagcgctgtggggagcgcgcccggacctggcagtggagccaccgagcgagcagctcggtccagtgacccagatcccagggacctcagtcggcttaatcagagtgtggcatagaagctatttaatgattaaagtcatttgcagt

SEQ ID NO: 279335 - DNA, 3064 bp, Homo sapiens
cgaactccgccccctcttctccgcgtaggcccagctccctgaagcggctgtttcgagccacgcgcccatcgggtaccgaggcacgcgccgggcgtcacgtgcgtttcgcggcgagcggaaatgacgcgagttgtgtgagccgccagtatggccgggctatggcggcgagcactggctacgtgcgactgtggggagcggcgcggtgctgggtgctgcggcggccgatgctggccgccgccggggggcgggttcccactgcagcaggagcgtggttgctccgaggccagcggacctgcgacgcctctcctccttgggcactgtggggccgaggcccggcaattgggggccaatggcgggggttttgggaagcgagcagccgcggcggaggcgcattctcggggggcgaggacgcctccgagggcggcgcggaggaaggagccggcggcgcggggggcagcgcgggcgccggggaaggcccggtcataacggcgctcacgcccatgacgatccccgatgtgtttccgcacctgccgctcatcgccatcacccgcaacccggtgttcccgcgctttatcaagattatcgaggttaaaaataagaagttggttgagctgctgagaaggaaagttcgtctcgcccagccttatgtcggcgtctttctaaagagagatgacagcaatgagtcggatgtggtcgagagcctggatgaaatctaccacacggggacgtttgcccagatccatgagatgcaggaccttggggacaagctgcgcatgatcgtcatgggacacagaagagtccatatcagcagacagctggaggtggagcccgaggagccggaggcggagaacaagcacaagccccgcaggaagtcaaagcggggcaagaaggaggcggaggacgagctgagcgccaggcacccggcggagctggcgatggagcccacccctgagctcccggctgaggtgctcatggtggaggtagagaacgttgtccacgaggacttccaggtcacggaggaggtgaaagccctgactgcagagatcgtgaagaccatccgggacatcattgccttgaaccctctctacagggagtcagtgctgcagatgatgcaggctggccagcgggtggtggacaaccccatctacctgagcgacatgggcgccgcgctcaccggggccgagtcccatgagctgcaggacgtcctggaagagaccaatattcctaagcggctgtacaaggccctctccctgctgaagaaggaatttgaactgagcaagctgcagcagcgcctggggcgggaggtggaggagaagatcaagcagacccaccgtaagtacctgctgcaggagcagctaaagatcatcaagaaggagctgggcctggagaaggacgacaaggatgccatcgaggagaagttccgggagcgcctgaaggagctcgtggtccccaagcacgtcatggatgttgtggacgaggagctgagcaagctgggcctgctggacaaccactcctcggagttcaatgtcacccgcaactacctagactggctcacgtccatcccttggggcaagtacagcaacgagaacctggacctggcgcgggcacaggcagtgctggaggaagaccactacggcatggaggacgtcaagaaacgcatcctggagttcattgccgttagccagctccgcggctccacccagggcaagatcctctgcttctatggcccccctggcgtgggtaagaccagcattgctcgctccatcgcccgcgccctgaaccgagagtacttccgcttcagcgtcgggggcatgactgacgtggctgagatcaagggccacaggcggacctacgtgggcgccatgcccgggaagatcatccagtgtttgaagaagaccaagacggagaaccccctgatcctcatcgacgaggtggacaagatcggccgaggctaccagggggacccgtcgtcggcactgctggagctgctggacccagagcagaatgccaacttcctggaccactacctggacgtgcccgtggacttgtccaaggtgctgttcatctgcacggccaacgtcacggacaccatccccgagccgctgcgagaccgtatggagatgatcaacgtgtcgggctacgtggcccaggagaagctggccattgcggagcgctacctggtgccccaggctcgcgccctgtgtggcttggatgagagcaaggccaagctgtcatcggacgtgctgacgctgctcatcaagcagtactgccgcgagagcggtgtccgcaacctgcagaagcaagtggagaaggtgttacggaaatcggcctacaagattgtcagcggcgaggccgagtccgtggaggtgacgcccgagaacctgcaggacttcgtggggaagcccgtgttcaccgtggagcgcatgtatgacgtgacaccgcccggcgtggtcatggggctggcctggaccgcaatgggaggctccacgctgtttgtggagacatccctgagacggccacaggacaaggatgccaagggtgacaaggatggcagcctggaggtgacaggccagctgggggaggtgatgaaggagagcgcccgcatagcctacaccttcgccagagccttcctcatgcagcacgcccccgccaatgactacctggtgacctcacacatccacctgcatgtgcccgagggcgccacccccaaggacggcccaagcgcaggctgcaccatcgtcacggccctgctgtccctggccatgggcaggcctgtccggcagaatctggccatgactggcgaagtctccctcacgggcaagatcctgcctgttggtggcatcaaggagaagaccattgcggccaagcgcgcaggggtgacgtgcatcgtcctgccagccgagaacaagaaggacttctacgacctggcagccttcatcaccgagggcctggaggtgcacttcgtggaacactaccgggagatcttcgacatcgccttcccggacgagcaggcagaggcgctggccgtggaacggcgtgatgcagtcgcggcgttgacgcagtc

SEQ ID NO: 279336 - DNA, 3889 bp, Homo sapiens
  misc_feature (3876)..(3876): n is a, c, g, or t
cgaactccgccccctcttctccgcgtaggcccagctccctgaagcggctgtttcgagccacgcgcccatcgggtaccgaggcacgcgccgggcgtcacgtgcgtttcgcggcgagcggaaatgacgcgagttgtgtgagccgccagtatggccgggctatggcggcgagcactggctacgtgcgactgtggggagcggcgcggtgctgggtgctgcggcggccgatgctggccgccgccggggggcgggttcccactgcagcaggagcgtggttgctccgaggccagcggacctgcgacgcctctcctccttgggcactgtggggccgaggcccggcaattgggggccaatggcgggggttttgggaagcgagcagccgcggcggaggcgcattctcggggggcgaggacgcctccgagggcggcgcggaggaaggagccggcggcgcggggggcagcgcgggcgccggggaaggcccggtcataacggcgctcacgcccatgacgatccccgatgtgtttccgcacctgccgctcatcgccatcacccgcaacccggtgttcccgcgctttatcaagattatcgaggttaaaaataagaagttggttgagctgctgagaaggaaagttcgtctcgcccagccttatgtcggcgtctttctaaagagagatgacagcaatgagtcggatgtggtcgagagcctggatgaaatctaccacacggggacgtttgcccagatccatgagatgcaggaccttggggacaagctgcgcatgatcgtcatgggacacagaagagtccatatcagcagacagctggaggtggagcccgaggagccggaggcggagaacaagcacaagccccgcaggaagtcaaagcggggcaagaaggaggcggaggacgagctgagcgccaggcacccggcggagctggcgatggagcccacccctgagctcccggctgaggtgctcatggtggaggtagagaacgttgtccacgaggacttccaggtcacggaggaggtgaaagccctgactgcagagatcgtgaagaccatccgggacatcattgccttgaaccctctctacagggagtcagtgctgcagatgatgcaggctggccagcgggtggtggacaaccccatctacctgagcgacatgggcgccgcgctcaccggggccgagtcccatgagctgcaggacgtcctggaagagaccaatattcctaagcggctgtacaaggccctctccctgctgaagaaggaatttgaactgagcaagctgcagcagcgcctggggcgggaggtggaggagaagatcaagcagacccaccgtaagtacctgctgcaggagcagctaaagatcatcaagaaggagctgggcctggagaaggacgacaaggatgccatcgaggagaagttccgggagcgcctgaaggagctcgtggtccccaagcacgtcatggatgttgtggacgaggagctgagcaagctgggcctgctggacaaccactcctcggagttcaatgtcacccgcaactacctagactggctcacgtccatcccttggggcaagtacagcaacgagaacctggacctggcgcgggcacaggcagtgctggaggaagaccactacggcatggaggacgtcaagaaacgcatcctggagttcattgccgttagccagctccgcggctccacccagggcaagatcctctgcttctatggcccccctggcgtgggtaagaccagcattgctcgctccatcgcccgcgccctgaaccgagagtacttccgcttcagcgtcgggggcatgactgacgtggctgagatcaagggccacaggcggacctacgtgggcgccatgcccgggaagatcatccagtgtttgaagaagaccaagacggagaaccccctgatcctcatcgacgaggtggacaagatcggccgaggctaccagggggacccgtcgtcggcactgctggagctgctggacccagagcagaatgccaacttcctggaccactacctggacgtgcccgtggacttgtccaaggtggggggcctgtctggggcctgggcttgctggggagggtaagcggccagtcccccagcaccttgccgccgcccccaggtgctgttcatctgcacggccaacgtcacggacaccatccccgagccgctgcgagaccgtatggagatgatcaacgtgtcgggctacgtggcccaggagaagctggccattgcggagcgctacctggtgccccaggctcgcgccctgtgtggcttggatgagagcaaggccaagctgtcatcggacgtgctgacgctgctcatcaagcagtactgccgcgagagcggtgtccgcaacctgcagaagcaagtggagaaggtgttacggaaatcggcctacaagattgtcagcggcgaggccgagtccgtggaggtgacgcccgagaacctgcaggacttcgtggggaagcccgtgttcaccgtggagcgcatgtatgacgtgacaccgcccggcgtggtcatggggctggcctggaccgcaatgggaggctccacgctgtttgtggagacatccctgagacggccacaggacaaggatgccaagggtgacaaggatggcagcctggaggtgacaggccagctgggggaggtgatgaaggagagcgcccgcatagcctacaccttcgccagagccttcctcatgcagcacgcccccgccaatgactacctggtgacctcacacatccacctgcatgtgcccgagggcgccacccccaaggacggcccaagcgcaggctgcaccatcgtcacggccctgctgtccctggccatgggcaggcctgtccggcagaatctggccatgactggcgaagtctccctcacgggcaagatcctgcctgttggtggcatcaaggagaagaccattgcggccaagcgcgcaggggtgacgtgcatcgtcctgccagccgagaacaagaaggacttctacgacctggcagccttcatcaccgagggcctggaggtgcacttcgtggaacactaccgggagatcttcgacatcgccttcccggacgagcaggcagaggcgctggccgtggaacggtgacggccaccccgggactgcaggcggcggatgtcaggccctgtctgggccagaactgagcgctgtggggagcgcgcccggacctggcagtggagccaccgagcgagcagctcggtccagtgacccagatcccagggacctcagtcggcttaatcagagtgtggcatagaagctatttaatgattaaagtcatttgcagtacggcggcttcctcacctgctgccccgggaagggtgggcgggccacggcttttgattcacgaccaggcagcacccggagagggtgtggctcagagcgggcaccagacaggggactgcgggcccccgacacacccacacccacccacggacagcaggagagccagggcttctgtcaagctgttctttatttcagggagagggcaggggaggggctcagtctttcttggcagcagctttcctcatggcggccagtacgttgctcagctcctcccgcttcctcttggcgcggatgtgcgtccccaaccttttcttgataaatttgagggcccgtttgtccttggagaccttcagtaactccatggcgcgccgctcgtacggggcaaagccacacacctcccgaatcatgtcccgcacgaacttggtgtgtttggtcagaccccgcggcgtcggctgtgcctgggcttgctcacgttcttggtcactttgtggcccttgttgaggcccacggccatagggtagcgtagggccatggctgctgctctccagagacggccgtggcgganaggctggcgccgc

SEQ ID NO: 279337 - DNA, 3526 bp, Homo sapiens
  misc_feature (22)..(22): n is a, c, g, or t
  misc_feature (30)..(30): n is a, c, g, or t
  misc_feature (36)..(36): n is a, c, g, or t
  misc_feature (3513)..(3513): n is a, c, g, or t
aggctaggtcgaggctgggttnaatcggcngagggnctgcgacgcctctcctccttgggcactgtggggccgaggcccggcaattgggggccaatggcgggggttttgggaagcgagcagccgcggcggaggcgcattctcggggggcgaggacgcctccgagggcggcgcggaggaaggagccggcggcgcggggggcagcgcgggcgccggggaaggcccggtcataacggcgctcacgcccatgacgatccccgatgtgtttccgcacctgccgctcatcgccatcacccgcaacccggtgttcccgcgctttatcaagattatcgaggttaaaaataagaagttggttgagctgctgagaaggaaagttcgtctcgcccagccttatgtcggcgtctttctaaagagagatgacagcaatgagtcggatgtggtcgagagcctggatgaaatctaccacacggggacgtttgcccagatccatgagatgcaggaccttggggacaagctgcgcatgatcgtcatgggacacagaagagtccatatcagcagacagctggaggtggagcccgaggagccggaggcggagaacaagcaagaaggaggcggaggacgagctgagcgccaggcacccggcggagctggcgatggagcccacccctgagctcccggctgaggtgctcatggtggaggtagagaacgttgtccacgaggacttccaggtcacggaggaggtgaaagccctgactgcagagatcgtgaagaccatccgggacatcattgccttgaaccctctctacagggagtcagtgctgcagatgatgcaggctggccagcgggtggtggacaaccccatctacctgagcgacatgggcgccgcgctcaccggggccgagtcccatgagctgcaggacgtcctggaagagaccaatattcctaagcggctgtacaaggccctctccctgctgaagaaggaatttgaactgagcaagctgcagcagcgcctggggcgggaggtggaggagaagatcaagcagacccaccgtaagtacctgctgcaggagcagctaaagatcatcaagaaggagctgggcctggagaaggacgacaaggatgccatcgaggagaagttccgggagcgcctgaaggagctcgtggtccccaagcacgtcatggatgttgtggacgaggagctgagcaagctgggcctgctggacaaccactcctcggagttcaatgtcacccgcaactacctagactggctcacgtccatcccttggggcaagtacagcaacgagaacctggacctggcgcgggcacaggcagtgctggaggaagaccactacggcatggaggacgtcaagaaacgcatcctggagttcattgccgttagccagctccgcggctccacccagggcaagatcctctgcttctatggcccccctggcgtgggtaagaccagcattgctcgctccatcgcccgcgccctgaaccgagagtacttccgcttcagcgtcgggggcatgactgacgtggctgagatcaagggccacaggcggacctacgtgggcgccatgcccgggaagatcatccagtgtttgaagaagaccaagacggagaaccccctgatcctcatcgacgaggtggacaagatcggccgaggctaccagggggacccgtcgtcggcactgctggagctgctggacccagagcagaatgccaacttcctggaccactacctggacgtgcccgtggacttgtccaaggtgctgttcatctgcacggccaacgtcacggacaccatccccgagccgctgcgagaccgtatggagatgatcaacgtgtcgggctacgtggcccaggagaagctggccattgcggagcgctacctggtgccccaggctcgcgccctgtgtggcttggatgagagcaaggccaagctgtcatcggacgtgctgacgctgctcatcaagcagtactgccgcgagagcggtgtccgcaacctgcagaagcaagtggagaaggtgttacggaaatcggcctacaagattgtcagcggcgaggccgagtccgtggaggtgacgcccgagaacctgcaggacttcgtggggaagcccgtgttcaccgtggagcgcatgtatgacgtgacaccgcccggcgtggtcatggggctggcctggaccgcaatgggaggctccacgctgtttgtggagacatccctgagacggccacaggacaaggatgccaagggtgacaaggatggcagcctggaggtgacaggccagctgggggaggtgatgaaggagagcgcccgcatagcctacaccttcgccagagccttcctcatgcagcacgcccccgccaatgactacctggtgacctcacacatccacctgcatgtgcccgagggcgccacccccaaggacggcccaagcgcaggctgcaccatcgtcacggccctgctgtccctggccatgggcaggcctgtccggcagaatctggccatgactggcgaagtctccctcacgggcaagatcctgcctgttggtggcatcaaggagaagaccattgcggccaagcgcgcaggggtgacgtgcatcgtcctgccagccgagaacaagaaggacttctacgacctggcagccttcatcaccgagggcctggaggtgcacttcgtggaacactaccgggagatcttcgacatcgccttcccggacgagcaggcagaggcgctggccgtggaacggtgacggccaccccgggactgcaggcggcggatgtcaggccctgtctgggccagaactgagcgctgtggggagcgcgcccggacctggcagtggagccaccgagcgagcagctcggtccagtgacccagatcccagggacctcagtcggcttaatcagagtgtggcatagaagctatttaatgattaaagtcatttgcagtacggcggcttcctcacctgctgccccgggaagggtgggcgggccacggcttttgattcacgaccaggcagcacccggagagggtgtggctcagagcgggcaccagacaggggactgcgggcccccgacacacccacacccacccacggacagcaggagagccagggcttctgtcaagctgttctttatttcagggagagggcaggggaggggctcagtctttcttggcagcagctttcctcatggcggccagtacgttgctcagctcctcccgcttcctcttggcgcggatgtgcgtccccaaccttttcttgataaatttgagggcccgtttgtccttggagaccttcagtaactccatggcgcgccgctcgtacggggcaaagccacacacctcccgaatcatgtcccgcacgaacttggtgtgtttggtcagaccccgcggcgtcggctgtgcctgggcttgctcacgttcttggtcactttgtggcccttgttgaggcccacggccatagggtagcgtagggccatggctgctgctctccagagacggccgtggcgganaggctggcgccgc

SEQ ID NO: 279338 - DNA, 2965 bp, Homo sapiens
  misc_feature (22)..(22): n is a, c, g, or t
  misc_feature (30)..(30): n is a, c, g, or t
  misc_feature (36)..(36): n is a, c, g, or t
  misc_feature (2952)..(2952): n is a, c, g, or t
aggctaggtcgaggctgggttnaatcggcngagggngcaagaaggaggcggaggacgagctgagcgccaggcacccggcggagctggcgatggagcccacccctgagctcccggctgaggtgctcatggtggaggtagagaacgttgtccacgaggacttccaggtcacggaggaggtgaaagccctgactgcagagatcgtgaagaccatccgggacatcattgccttgaaccctctctacagggagtcagtgctgcagatgatgcaggctggccagcgggtggtggacaaccccatctacctgagcgacatgggcgccgcgctcaccggggccgagtcccatgagctgcaggacgtcctggaagagaccaatattcctaagcggctgtacaaggccctctccctgctgaagaaggaatttgaactgagcaagctgcagcagcgcctggggcgggaggtggaggagaagatcaagcagacccaccgtaagtacctgctgcaggagcagctaaagatcatcaagaaggagctgggcctggagaaggacgacaaggatgccatcgaggagaagttccgggagcgcctgaaggagctcgtggtccccaagcacgtcatggatgttgtggacgaggagctgagcaagctgggcctgctggacaaccactcctcggagttcaatgtcacccgcaactacctagactggctcacgtccatcccttggggcaagtacagcaacgagaacctggacctggcgcgggcacaggcagtgctggaggaagaccactacggcatggaggacgtcaagaaacgcatcctggagttcattgccgttagccagctccgcggctccacccagggcaagatcctctgcttctatggcccccctggcgtgggtaagaccagcattgctcgctccatcgcccgcgccctgaaccgagagtacttccgcttcagcgtcgggggcatgactgacgtggctgagatcaagggccacaggcggacctacgtgggcgccatgcccgggaagatcatccagtgtttgaagaagaccaagacggagaaccccctgatcctcatcgacgaggtggacaagatcggccgaggctaccagggggacccgtcgtcggcactgctggagctgctggacccagagcagaatgccaacttcctggaccactacctggacgtgcccgtggacttgtccaaggtgctgttcatctgcacggccaacgtcacggacaccatccccgagccgctgcgagaccgtatggagatgatcaacgtgtcgggctacgtggcccaggagaagctggccattgcggagcgctacctggtgccccaggctcgcgccctgtgtggcttggatgagagcaaggccaagctgtcatcggacgtgctgacgctgctcatcaagcagtactgccgcgagagcggtgtccgcaacctgcagaagcaagtggagaaggtgttacggaaatcggcctacaagattgtcagcggcgaggccgagtccgtggaggtgacgcccgagaacctgcaggacttcgtggggaagcccgtgttcaccgtggagcgcatgtatgacgtgacaccgcccggcgtggtcatggggctggcctggaccgcaatgggaggctccacgctgtttgtggagacatccctgagacggccacaggacaaggatgccaagggtgacaaggatggcagcctggaggtgacaggccagctgggggaggtgatgaaggagagcgcccgcatagcctacaccttcgccagagccttcctcatgcagcacgcccccgccaatgactacctggtgacctcacacatccacctgcatgtgcccgagggcgccacccccaaggacggcccaagcgcaggctgcaccatcgtcacggccctgctgtccctggccatgggcaggcctgtccggcagaatctggccatgactggcgaagtctccctcacgggcaagatcctgcctgttggtggcatcaaggagaagaccattgcggccaagcgcgcaggggtgacgtgcatcgtcctgccagccgagaacaagaaggacttctacgacctggcagccttcatcaccgagggcctggaggtgcacttcgtggaacactaccgggagatcttcgacatcgccttcccggacgagcaggcagaggcgctggccgtggaacggtgacggccaccccgggactgcaggcggcggatgtcaggccctgtctgggccagaactgagcgctgtggggagcgcgcccggacctggcagtggagccaccgagcgagcagctcggtccagtgacccagatcccagggacctcagtcggcttaatcagagtgtggcatagaagctatttaatgattaaagtcatttgcagtacggcggcttcctcacctgctgccccgggaagggtgggcgggccacggcttttgattcacgaccaggcagcacccggagagggtgtggctcagagcgggcaccagacaggggactgcgggcccccgacacacccacacccacccacggacagcaggagagccagggcttctgtcaagctgttctttatttcagggagagggcaggggaggggctcagtctttcttggcagcagctttcctcatggcggccagtacgttgctcagctcctcccgcttcctcttggcgcggatgtgcgtccccaaccttttcttgataaatttgagggcccgtttgtccttggagaccttcagtaactccatggcgcgccgctcgtacggggcaaagccacacacctcccgaatcatgtcccgcacgaacttggtgtgtttggtcagaccccgcggcgtcggctgtgcctgggcttgctcacgttcttggtcactttgtggcccttgttgaggcccacggccatagggtagcgtagggccatggctgctgctctccagagacggccgtggcgganaggctggcgccgc

SEQ ID NO: 279339 - DNA, 3013 bp, Homo sapiens
  misc_feature (25)..(25): n is a, c, g, or t
  misc_feature (3000)..(3000): n is a, c, g, or t
agagcgtattactataggtcgagtncctggttttactttcgtcacggagggcctaggcctcctgcagtgaaagtaaatgggccggcaagaaggaggcggaggacgagctgagcgccaggcacccggcggagctggcgatggagcccacccctgagctcccggctgaggtgctcatggtggaggtagagaacgttgtccacgaggacttccaggtcacggaggaggtgaaagccctgactgcagagatcgtgaagaccatccgggacatcattgccttgaaccctctctacagggagtcagtgctgcagatgatgcaggctggccagcgggtggtggacaaccccatctacctgagcgacatgggcgccgcgctcaccggggccgagtcccatgagctgcaggacgtcctggaagagaccaatattcctaagcggctgtacaaggccctctccctgctgaagaaggaatttgaactgagcaagctgcagcagcgcctggggcgggaggtggaggagaagatcaagcagacccaccgtaagtacctgctgcaggagcagctaaagatcatcaagaaggagctgggcctggagaaggacgacaaggatgccatcgaggagaagttccgggagcgcctgaaggagctcgtggtccccaagcacgtcatggatgttgtggacgaggagctgagcaagctgggcctgctggacaaccactcctcggagttcaatgtcacccgcaactacctagactggctcacgtccatcccttggggcaagtacagcaacgagaacctggacctggcgcgggcacaggcagtgctggaggaagaccactacggcatggaggacgtcaagaaacgcatcctggagttcattgccgttagccagctccgcggctccacccagggcaagatcctctgcttctatggcccccctggcgtgggtaagaccagcattgctcgctccatcgcccgcgccctgaaccgagagtacttccgcttcagcgtcgggggcatgactgacgtggctgagatcaagggccacaggcggacctacgtgggcgccatgcccgggaagatcatccagtgtttgaagaagaccaagacggagaaccccctgatcctcatcgacgaggtggacaagatcggccgaggctaccagggggacccgtcgtcggcactgctggagctgctggacccagagcagaatgccaacttcctggaccactacctggacgtgcccgtggacttgtccaaggtgctgttcatctgcacggccaacgtcacggacaccatccccgagccgctgcgagaccgtatggagatgatcaacgtgtcgggctacgtggcccaggagaagctggccattgcggagcgctacctggtgccccaggctcgcgccctgtgtggcttggatgagagcaaggccaagctgtcatcggacgtgctgacgctgctcatcaagcagtactgccgcgagagcggtgtccgcaacctgcagaagcaagtggagaaggtgttacggaaatcggcctacaagattgtcagcggcgaggccgagtccgtggaggtgacgcccgagaacctgcaggacttcgtggggaagcccgtgttcaccgtggagcgcatgtatgacgtgacaccgcccggcgtggtcatggggctggcctggaccgcaatgggaggctccacgctgtttgtggagacatccctgagacggccacaggacaaggatgccaagggtgacaaggatggcagcctggaggtgacaggccagctgggggaggtgatgaaggagagcgcccgcatagcctacaccttcgccagagccttcctcatgcagcacgcccccgccaatgactacctggtgacctcacacatccacctgcatgtgcccgagggcgccacccccaaggacggcccaagcgcaggctgcaccatcgtcacggccctgctgtccctggccatgggcaggcctgtccggcagaatctggccatgactggcgaagtctccctcacgggcaagatcctgcctgttggtggcatcaaggagaagaccattgcggccaagcgcgcaggggtgacgtgcatcgtcctgccagccgagaacaagaaggacttctacgacctggcagccttcatcaccgagggcctggaggtgcacttcgtggaacactaccgggagatcttcgacatcgccttcccggacgagcaggcagaggcgctggccgtggaacggtgacggccaccccgggactgcaggcggcggatgtcaggccctgtctgggccagaactgagcgctgtggggagcgcgcccggacctggcagtggagccaccgagcgagcagctcggtccagtgacccagatcccagggacctcagtcggcttaatcagagtgtggcatagaagctatttaatgattaaagtcatttgcagtacggcggcttcctcacctgctgccccgggaagggtgggcgggccacggcttttgattcacgaccaggcagcacccggagagggtgtggctcagagcgggcaccagacaggggactgcgggcccccgacacacccacacccacccacggacagcaggagagccagggcttctgtcaagctgttctttatttcagggagagggcaggggaggggctcagtctttcttggcagcagctttcctcatggcggccagtacgttgctcagctcctcccgcttcctcttggcgcggatgtgcgtccccaaccttttcttgataaatttgagggcccgtttgtccttggagaccttcagtaactccatggcgcgccgctcgtacggggcaaagccacacacctcccgaatcatgtcccgcacgaacttggtgtgtttggtcagaccccgcggcgtcggctgtgcctgggcttgctcacgttcttggtcactttgtggcccttgttgaggcccacggccatagggtagcgtagggccatggctgctgctctccagagacggccgtggcgganaggctggcgccgc

SEQ ID NO: 279340 - DNA, 3009 bp, Homo sapiens
  misc_feature (2996)..(2996): n is a, c, g, or t
ccagcgaactattactagctacgatcaccgcttttatttcagtcacgaggcctaggccccgcagtgaagtaacatgcgcggcaagaaggaggcggaggacgagctgagcgccaggcacccggcggagctggcgatggagcccacccctgagctcccggctgaggtgctcatggtggaggtagagaacgttgtccacgaggacttccaggtcacggaggaggtgaaagccctgactgcagagatcgtgaagaccatccgggacatcattgccttgaaccctctctacagggagtcagtgctgcagatgatgcaggctggccagcgggtggtggacaaccccatctacctgagcgacatgggcgccgcgctcaccggggccgagtcccatgagctgcaggacgtcctggaagagaccaatattcctaagcggctgtacaaggccctctccctgctgaagaaggaatttgaactgagcaagctgcagcagcgcctggggcgggaggtggaggagaagatcaagcagacccaccgtaagtacctgctgcaggagcagctaaagatcatcaagaaggagctgggcctggagaaggacgacaaggatgccatcgaggagaagttccgggagcgcctgaaggagctcgtggtccccaagcacgtcatggatgttgtggacgaggagctgagcaagctgggcctgctggacaaccactcctcggagttcaatgtcacccgcaactacctagactggctcacgtccatcccttggggcaagtacagcaacgagaacctggacctggcgcgggcacaggcagtgctggaggaagaccactacggcatggaggacgtcaagaaacgcatcctggagttcattgccgttagccagctccgcggctccacccagggcaagatcctctgcttctatggcccccctggcgtgggtaagaccagcattgctcgctccatcgcccgcgccctgaaccgagagtacttccgcttcagcgtcgggggcatgactgacgtggctgagatcaagggccacaggcggacctacgtgggcgccatgcccgggaagatcatccagtgtttgaagaagaccaagacggagaaccccctgatcctcatcgacgaggtggacaagatcggccgaggctaccagggggacccgtcgtcggcactgctggagctgctggacccagagcagaatgccaacttcctggaccactacctggacgtgcccgtggacttgtccaaggtgctgttcatctgcacggccaacgtcacggacaccatccccgagccgctgcgagaccgtatggagatgatcaacgtgtcgggctacgtggcccaggagaagctggccattgcggagcgctacctggtgccccaggctcgcgccctgtgtggcttggatgagagcaaggccaagctgtcatcggacgtgctgacgctgctcatcaagcagtactgccgcgagagcggtgtccgcaacctgcagaagcaagtggagaaggtgttacggaaatcggcctacaagattgtcagcggcgaggccgagtccgtggaggtgacgcccgagaacctgcaggacttcgtggggaagcccgtgttcaccgtggagcgcatgtatgacgtgacaccgcccggcgtggtcatggggctggcctggaccgcaatgggaggctccacgctgtttgtggagacatccctgagacggccacaggacaaggatgccaagggtgacaaggatggcagcctggaggtgacaggccagctgggggaggtgatgaaggagagcgcccgcatagcctacaccttcgccagagccttcctcatgcagcacgcccccgccaatgactacctggtgacctcacacatccacctgcatgtgcccgagggcgccacccccaaggacggcccaagcgcaggctgcaccatcgtcacggccctgctgtccctggccatgggcaggcctgtccggcagaatctggccatgactggcgaagtctccctcacgggcaagatcctgcctgttggtggcatcaaggagaagaccattgcggccaagcgcgcaggggtgacgtgcatcgtcctgccagccgagaacaagaaggacttctacgacctggcagccttcatcaccgagggcctggaggtgcacttcgtggaacactaccgggagatcttcgacatcgccttcccggacgagcaggcagaggcgctggccgtggaacggtgacggccaccccgggactgcaggcggcggatgtcaggccctgtctgggccagaactgagcgctgtggggagcgcgcccggacctggcagtggagccaccgagcgagcagctcggtccagtgacccagatcccagggacctcagtcggcttaatcagagtgtggcatagaagctatttaatgattaaagtcatttgcagtacggcggcttcctcacctgctgccccgggaagggtgggcgggccacggcttttgattcacgaccaggcagcacccggagagggtgtggctcagagcgggcaccagacaggggactgcgggcccccgacacacccacacccacccacggacagcaggagagccagggcttctgtcaagctgttctttatttcagggagagggcaggggaggggctcagtctttcttggcagcagctttcctcatggcggccagtacgttgctcagctcctcccgcttcctcttggcgcggatgtgcgtccccaaccttttcttgataaatttgagggcccgtttgtccttggagaccttcagtaactccatggcgcgccgctcgtacggggcaaagccacacacctcccgaatcatgtcccgcacgaacttggtgtgtttggtcagaccccgcggcgtcggctgtgcctgggcttgctcacgttcttggtcactttgtggcccttgttgaggcccacggccatagggtagcgtagggccatggctgctgctctccagagacggccgtggcgganaggctggcgccgc

SEQ ID NO: 279341 - DNA, 4109 bp, Homo sapiens
  misc_feature (4096)..(4096): n is a, c, g, or t
cgaactccgccccctcttctccgcgtaggcccagctccctgaagcggctgtttcgagccacgcgcccatcgggtaccgaggcacgcgccgggcgtcacgtgcgtttcgcggcgagcggaaatgacgcgagttgtgtgagccgccagtatggccgggctatggcggcgagcactggctacgtgcgactgtggggagcggcgcggtgctgggtgctgcggcggccgatgctggccgccgccggggggcgggttcccactgcagcaggagcgtggttgctccgaggccagcggacctgcgacgcctctcctccttgggcactgtggggccgaggcccggcaattgggggccaatggcgggggttttgggaagcgagcagccgcggcggaggcgcattctcggggggcgaggacgcctccgagggcggcgcggaggaaggagccggcggcgcggggggcagcgcgggcgccggggaaggcccggtcataacggcgctcacgcccatgacgatccccgatgtgtttccgcacctgccgctcatcgccatcacccgcaacccggtgttcccgcgctttatcaagattatcgaggttaaaaataagaagttggttgagctgctgagaaggaaagttcgtctcgcccagccttatgtcggcgtctttctaaagagagatgacagcaatgagtcggatgtggtcgagagcctggatgaaatctaccacacggggacgtttgcccagatccatgagatgcaggaccttggggacaagctgcgcatgatcgtcatgggacacagaagagtccatatcagcagacagctggaggtggagcccgaggagccggaggcggagaacaagcacaagccccgcaggaagtcaaagcggggcaagaaggaggcggaggacgagctgagcgccaggcacccggcggagctggcgatggagcccacccctgagctcccggctgaggtgctcatggtggaggtagagaacgttgtccacgaggacttccaggtcacggaggaggtgaaagccctgactgcagagatcgtgaagaccatccgggacatcattgccttgaaccctctctacagggagtcagtgctgcagatgatgcaggctggccagcgggtggtggacaaccccatctacctgagcgacatgggcgccgcgctcaccggggccgagtcccatgagctgcaggacgtcctggaagagaccaatattcctaagcggctgtacaaggccctctccctgctgaagaaggaatttgaactgagcaagctgcagcagcgcctggggcgggaggtggaggagaagatcaagcagacccaccgtaagtacctgctgcaggagcagctaaagatcatcaagaaggagctgggcctggagaaggacgacaaggatgccatcgaggagaagttccgggagcgcctgaaggagctcgtggtccccaagcacgtcatggatgttgtggacgaggagctgagcaagctgggcctgctggacaaccactcctcggagttcaatgtcacccgcaactacctagactggctcacgtccatcccttggggcaagtacagcaacgagaacctggacctggcgcgggcacaggcagtgctggaggaagaccactacggcatggaggacgtcaagaaacgcatcctggagttcattgccgttagccagctccgcggctccacccagggcaagatcctctgcttctatggcccccctggcgtgggtaagaccagcattgctcgctccatcgcccgcgccctgaaccgagagtacttccgcttcagcgtcgggggcatgactgacgtggctgagatcaagggccacaggcggacctacgtgggcgccatgcccgggaagatcatccagtgtttgaagaagaccaagacggagaaccccctgatcctcatcgacgaggtgcgtgcggagaggcccggagaccccctaacccggcaatgccgtgtgcaagatgaagccgagccttccgggtcctaggatccccgagccaactcaggggccatcgccgtgatgctggccctgatggcacggacgggtccctcccacccacagccacgcccagcaggctgcccgtccaaggcagggtgtgggtgccgctctcactcggggtctccccagccctgaccctggggtctccccactgggcgggctggccaggggcacggcgaggggcaccacctgctgtctgctgccccaggtggacaagatcggccgaggctaccagggggacccgtcgtcggcactgctggagctgctggacccagagcagaatgccaacttcctggaccactacctggacgtgcccgtggacttgtccaaggtgctgttcatctgcacggccaacgtcacggacaccatccccgagccgctgcgagaccgtatggagatgatcaacgtgtcgggctacgtggcccaggagaagctggccattgcggagcgctacctggtgccccaggctcgcgccctgtgtggcttggatgagagcaaggccaagctgtcatcggacgtgctgacgctgctcatcaagcagtactgccgcgagagcggtgtccgcaacctgcagaagcaagtggagaaggtgttacggaaatcggcctacaagattgtcagcggcgaggccgagtccgtggaggtgacgcccgagaacctgcaggacttcgtggggaagcccgtgttcaccgtggagcgcatgtatgacgtgacaccgcccggcgtggtcatggggctggcctggaccgcaatgggaggctccacgctgtttgtggagacatccctgagacggccacaggacaaggatgccaagggtgacaaggatggcagcctggaggtgacaggccagctgggggaggtgatgaaggagagcgcccgcatagcctacaccttcgccagagccttcctcatgcagcacgcccccgccaatgactacctggtgacctcacacatccacctgcatgtgcccgagggcgccacccccaaggacggcccaagcgcaggctgcaccatcgtcacggccctgctgtccctggccatgggcaggcctgtccggcagaatctggccatgactggcgaagtctccctcacgggcaagatcctgcctgttggtggcatcaaggagaagaccattgcggccaagcgcgcaggggtgacgtgcatcgtcctgccagccgagaacaagaaggacttctacgacctggcagccttcatcaccgagggcctggaggtgcacttcgtggaacactaccgggagatcttcgacatcgccttcccggacgagcaggcagaggcgctggccgtggaacggtgacggccaccccgggactgcaggcggcggatgtcaggccctgtctgggccagaactgagcgctgtggggagcgcgcccggacctggcagtggagccaccgagcgagcagctcggtccagtgacccagatcccagggacctcagtcggcttaatcagagtgtggcatagaagctatttaatgattaaagtcatttgcagtacggcggcttcctcacctgctgccccgggaagggtgggcgggccacggcttttgattcacgaccaggcagcacccggagagggtgtggctcagagcgggcaccagacaggggactgcgggcccccgacacacccacacccacccacggacagcaggagagccagggcttctgtcaagctgttctttatttcagggagagggcaggggaggggctcagtctttcttggcagcagctttcctcatggcggccagtacgttgctcagctcctcccgcttcctcttggcgcggatgtgcgtccccaaccttttcttgataaatttgagggcccgtttgtccttggagaccttcagtaactccatggcgcgccgctcgtacggggcaaagccacacacctcccgaatcatgtcccgcacgaacttggtgtgtttggtcagaccccgcggcgtcggctgtgcctgggcttgctcacgttcttggtcactttgtggcccttgttgaggcccacggccatagggtagcgtagggccatggctgctgctctccagagacggccgtggcgganaggctggcgccgc

SEQ ID NO: 279342 - DNA, 4187 bp, Homo sapiens
  misc_feature (4174)..(4174): n is a, c, g, or t
cgaactccgccccctcttctccgcgtaggcccagctccctgaagcggctgtttcgagccacgcgcccatcgggtaccgaggcacgcgccgggcgtcacgtgcgtttcgcggcgagcggaaatgacgcgagttgtgtgagccgccagtatggccgggctatggcggcgagcactggctacgtgcgactgtggggagcggcgcggtgctgggtgctgcggcggccgatgctggccgccgccggggggcgggttcccactgcagcaggagcgtggttgctccgaggccagcggacctgcgacgcctctcctccttgggcactgtggggccgaggcccggcaattgggggccaatggcgggggttttgggaagcgagcagccgcggcggaggcgcattctcggggggcgaggacgcctccgagggcggcgcggaggaaggagccggcggcgcggggggcagcgcgggcgccggggaaggcccggtcataacggcgctcacgcccatgacgatccccgatgtgtttccgcacctgccgctcatcgccatcacccgcaacccggtgttcccgcgctttatcaagattatcgaggttaaaaataagaagttggttgagctgctgagaaggaaagttcgtctcgcccagccttatgtcggcgtctttctaaagagagatgacagcaatgagtcggatgtggtcgagagcctggatgaaatctaccacacggggacgtttgcccagatccatgagatgcaggaccttggggacaagctgcgcatgatcgtcatgggacacagaagagtccatatcagcagacagctggaggtggagcccgaggagccggaggcggagaacaagcacaagccccgcaggaagtcaaagcggggcaagaaggaggcggaggacgagctgagcgccaggcacccggcggagctggcgatggagcccacccctgagctcccggctgaggtgctcatggtggaggtagagaacgttgtccacgaggacttccaggtcacggaggaggtgaaagccctgactgcagagatcgtgaagaccatccgggacatcattgccttgaaccctctctacagggagtcagtgctgcagatgatgcaggctggccagcgggtggtggacaaccccatctacctgagcgacatgggcgccgcgctcaccggggccgagtcccatgagctgcaggacgtcctggaagagaccaatattcctaagcggctgtacaaggccctctccctgctgaagaaggaatttgaactgagcaagctgcagcagcgcctggggcgggaggtggaggagaagatcaagcagacccaccgtaagtacctgctgcaggagcagctaaagatcatcaagaaggagctgggcctggagaaggacgacaaggatgccatcgaggagaagttccgggagcgcctgaaggagctcgtggtccccaagcacgtcatggatgttgtggacgaggagctgagcaagctgggcctgctggacaaccactcctcggagttcaatgtcacccgcaactacctagactggctcacgtccatcccttggggcaagtacagcaacgagaacctggacctggcgcgggcacaggcagtgctggaggaagaccactacggcatggaggacgtcaagaaacgcatcctggagttcattgccgttagccagctccgcggctccacccagggcaagatcctctgcttctatggcccccctggcgtgggtaagaccagcattgctcgctccatcgcccgcgccctgaaccgagagtacttccgcttcagcgtcgggggcatgactgacgtggctgagatcaagggccacaggcggacctacgtgggcgccatgcccgggaagatcatccagtgtttgaagaagaccaagacggagaaccccctgatcctcatcgacgaggtgcgtgcggagaggcccggagaccccctaacccggcaatgccgtgtgcaagatgaagccgagccttccgggtcctaggatccccgagccaactcaggggccatcgccgtgatgctggccctgatggcacggacgggtccctcccacccacagccacgcccagcaggctgcccgtccaaggcagggtgtgggtgccgctctcactcggggtctccccagccctgaccctggggtctccccactgggcgggctggccaggggcacggcgaggggcaccacctgctgtctgctgccccaggtggacaagatcggccgaggctaccagggggacccgtcgtcggcactgctggagctgctggacccagagcagaatgccaacttcctggaccactacctggacgtgcccgtggacttgtccaaggtggggggcctgtctggggcctgggcttgctggggagggtaagcggccagtcccccagcaccttgccgccgcccccaggtgctgttcatctgcacggccaacgtcacggacaccatccccgagccgctgcgagaccgtatggagatgatcaacgtgtcgggctacgtggcccaggagaagctggccattgcggagcgctacctggtgccccaggctcgcgccctgtgtggcttggatgagagcaaggccaagctgtcatcggacgtgctgacgctgctcatcaagcagtactgccgcgagagcggtgtccgcaacctgcagaagcaagtggagaaggtgttacggaaatcggcctacaagattgtcagcggcgaggccgagtccgtggaggtgacgcccgagaacctgcaggacttcgtggggaagcccgtgttcaccgtggagcgcatgtatgacgtgacaccgcccggcgtggtcatggggctggcctggaccgcaatgggaggctccacgctgtttgtggagacatccctgagacggccacaggacaaggatgccaagggtgacaaggatggcagcctggaggtgacaggccagctgggggaggtgatgaaggagagcgcccgcatagcctacaccttcgccagagccttcctcatgcagcacgcccccgccaatgactacctggtgacctcacacatccacctgcatgtgcccgagggcgccacccccaaggacggcccaagcgcaggctgcaccatcgtcacggccctgctgtccctggccatgggcaggcctgtccggcagaatctggccatgactggcgaagtctccctcacgggcaagatcctgcctgttggtggcatcaaggagaagaccattgcggccaagcgcgcaggggtgacgtgcatcgtcctgccagccgagaacaagaaggacttctacgacctggcagccttcatcaccgagggcctggaggtgcacttcgtggaacactaccgggagatcttcgacatcgccttcccggacgagcaggcagaggcgctggccgtggaacggtgacggccaccccgggactgcaggcggcggatgtcaggccctgtctgggccagaactgagcgctgtggggagcgcgcccggacctggcagtggagccaccgagcgagcagctcggtccagtgacccagatcccagggacctcagtcggcttaatcagagtgtggcatagaagctatttaatgattaaagtcatttgcagtacggcggcttcctcacctgctgccccgggaagggtgggcgggccacggcttttgattcacgaccaggcagcacccggagagggtgtggctcagagcgggcaccagacaggggactgcgggcccccgacacacccacacccacccacggacagcaggagagccagggcttctgtcaagctgttctttatttcagggagagggcaggggaggggctcagtctttcttggcagcagctttcctcatggcggccagtacgttgctcagctcctcccgcttcctcttggcgcggatgtgcgtccccaaccttttcttgataaatttgagggcccgtttgtccttggagaccttcagtaactccatggcgcgccgctcgtacggggcaaagccacacacctcccgaatcatgtcccgcacgaacttggtgtgtttggtcagaccccgcggcgtcggctgtgcctgggcttgctcacgttcttggtcactttgtggcccttgttgaggcccacggccatagggtagcgtagggccatggctgctgctctccagagacggccgtggcgganaggctggcgccgc

SEQ ID NO: 279343 - DNA, 3321 bp, Homo sapiens
  misc_feature (3308)..(3308): n is a, c, g, or t
tcctgggttcacgccattctcctgcctcagcctcccgagtagctgggactacaggcgcccgccatcacgcccgcctaatttttgtattttttggtagagacggggtttcactgtgttagccaggagggtctcgatctcctgacctcatgatccacccgcctcggcctcccaaagtgcttggattacaggcgtgagccaccacgcccggccaagacttggtctcttaaaaaatggaggaaagaaaacacagtctctttttttcccctgagatagcttatcctaaggacaaggctctgaggggtaaggagacagggtttggttttagttttgactctcttggtcctgtgtccctgggactggtgagtccaccagggactgcactcctccatctcccaggccgtccgtggccagggccagttggcggaggggagggagttgatggagctggtgggtggggctcccagggccatgctcccacccagcccaccccctgctggagcactgctgggccccagcgaccctgccccatacttggcaggccctgactgcagagatcgtgaagaccatccgggacatcattgccttgaaccctctctacagggagtcagtgctgcagatgatgcaggctggccagcgggtggtggacaaccccatctacctgagcgacatgggcgccgcgctcaccggggccgagtcccatgagctgcaggacgtcctggaagagaccaatattcctaagcggctgtacaaggccctctccctgctgaagaaggaatttgaactgagcaagctgcagcagcgcctggggcgggaggtggaggagaagatcaagcagacccaccgtaagtacctgctgcaggagcagctaaagatcatcaagaaggagctgggcctggagaaggacgacaaggatgccatcgaggagaagttccgggagcgcctgaaggagctcgtggtccccaagcacgtcatggatgttgtggacgaggagctgagcaagctgggcctgctggacaaccactcctcggagttcaatgtcacccgcaactacctagactggctcacgtccatcccttggggcaagtacagcaacgagaacctggacctggcgcgggcacaggcagtgctggaggaagaccactacggcatggaggacgtcaagaaacgcatcctggagttcattgccgttagccagctccgcggctccacccagggcaagatcctctgcttctatggcccccctggcgtgggtaagaccagcattgctcgctccatcgcccgcgccctgaaccgagagtacttccgcttcagcgtcgggggcatgactgacgtggctgagatcaagggccacaggcggacctacgtgggcgccatgcccgggaagatcatccagtgtttgaagaagaccaagacggagaaccccctgatcctcatcgacgaggtggacaagatcggccgaggctaccagggggacccgtcgtcggcactgctggagctgctggacccagagcagaatgccaacttcctggaccactacctggacgtgcccgtggacttgtccaaggtgctgttcatctgcacggccaacgtcacggacaccatccccgagccgctgcgagaccgtatggagatgatcaacgtgtcgggctacgtggcccaggagaagctggccattgcggagcgctacctggtgccccaggctcgcgccctgtgtggcttggatgagagcaaggccaagctgtcatcggacgtgctgacgctgctcatcaagcagtactgccgcgagagcggtgtccgcaacctgcagaagcaagtggagaaggtgttacggaaatcggcctacaagattgtcagcggcgaggccgagtccgtggaggtgacgcccgagaacctgcaggacttcgtggggaagcccgtgttcaccgtggagcgcatgtatgacgtgacaccgcccggcgtggtcatggggctggcctggaccgcaatgggaggctccacgctgtttgtggagacatccctgagacggccacaggacaaggatgccaagggtgacaaggatggcagcctggaggtgacaggccagctgggggaggtgatgaaggagagcgcccgcatagcctacaccttcgccagagccttcctcatgcagcacgcccccgccaatgactacctggtgacctcacacatccacctgcatgtgcccgagggcgccacccccaaggacggcccaagcgcaggctgcaccatcgtcacggccctgctgtccctggccatgggcaggcctgtccggcagaatctggccatgactggcgaagtctccctcacgggcaagatcctgcctgttggtggcatcaaggagaagaccattgcggccaagcgcgcaggggtgacgtgcatcgtcctgccagccgagaacaagaaggacttctacgacctggcagccttcatcaccgagggcctggaggtgcacttcgtggaacactaccgggagatcttcgacatcgccttcccggacgagcaggcagaggcgctggccgtggaacggtgacggccaccccgggactgcaggcggcggatgtcaggccctgtctgggccagaactgagcgctgtggggagcgcgcccggacctggcagtggagccaccgagcgagcagctcggtccagtgacccagatcccagggacctcagtcggcttaatcagagtgtggcatagaagctatttaatgattaaagtcatttgcagtacggcggcttcctcacctgctgccccgggaagggtgggcgggccacggcttttgattcacgaccaggcagcacccggagagggtgtggctcagagcgggcaccagacaggggactgcgggcccccgacacacccacacccacccacggacagcaggagagccagggcttctgtcaagctgttctttatttcagggagagggcaggggaggggctcagtctttcttggcagcagctttcctcatggcggccagtacgttgctcagctcctcccgcttcctcttggcgcggatgtgcgtccccaaccttttcttgataaatttgagggcccgtttgtccttggagaccttcagtaactccatggcgcgccgctcgtacggggcaaagccacacacctcccgaatcatgtcccgcacgaacttggtgtgtttggtcagaccccgcggcgtcggctgtgcctgggcttgctcacgttcttggtcactttgtggcccttgttgaggcccacggccatagggtagcgtagggccatggctgctgctctccagagacggccgtggcgganaggctggcgccgc

SEQ ID NO: 279344 - DNA, 3001 bp, Homo sapiens
  misc_feature (2988)..(2988): n is a, c, g, or t
aattttttatttttatgggctttagcgatggaggtaggattggtgctgtgggtgaaagagtatgatggggggcgagttgtgtgagccgccagtatggccgggctatggcggcgagcactggctacgtgcgactgtggggagcggcgcggtgctgggtgctgcggcggccgatgctggccgccgccggggggcgggttcccactgcagcaggagcgtggttgctccgaggccagcggacctgcgacgcctctcctccttgggcactgtggggccgaggcccggcaattgggggccaatggcgggggttttgggaagcgagcagccgcggcggaggcgcattctcggggggcgaggacgcctccgagggcggcgcggaggaaggagccggcggcgcggggggcagcgcgggcgccggggaaggcccggtcataacggcgctcacgcccatgacgatccccgatgtgtttccgcacctgccgctcatcgccatcacccgcaacccggtgttcccgcgctttatcaagattatcgaggtgcaggagcagctaaagatcatcaagaaggagctgggcctggagaaggacgacaaggatgccatcgaggagaagttccgggagcgcctgaaggagctcgtggtccccaagcacgtcatggatgttgtggacgaggagctgagcaagctgggcctgctggacaaccactcctcggagttcaatgtcacccgcaactacctagactggctcacgtccatcccttggggcaagtacagcaacgagaacctggacctggcgcgggcacaggcagtgctggaggaagaccactacggcatggaggacgtcaagaaacgcatcctggagttcattgccgttagccagctccgcggctccacccagggcaagatcctctgcttctatggcccccctggcgtgggtaagaccagcattgctcgctccatcgcccgcgccctgaaccgagagtacttccgcttcagcgtcgggggcatgactgacgtggctgagatcaagggccacaggcggacctacgtgggcgccatgcccgggaagatcatccagtgtttgaagaagaccaagacggagaaccccctgatcctcatcgacgaggtggacaagatcggccgaggctaccagggggacccgtcgtcggcactgctggagctgctggacccagagcagaatgccaacttcctggaccactacctggacgtgcccgtggacttgtccaaggtgctgttcatctgcacggccaacgtcacggacaccatccccgagccgctgcgagaccgtatggagatgatcaacgtgtcgggctacgtggcccaggagaagctggccattgcggagcgctacctggtgccccaggctcgcgccctgtgtggcttggatgagagcaaggccaagctgtcatcggacgtgctgacgctgctcatcaagcagtactgccgcgagagcggtgtccgcaacctgcagaagcaagtggagaaggtgttacggaaatcggcctacaagattgtcagcggcgaggccgagtccgtggaggtgacgcccgagaacctgcaggacttcgtggggaagcccgtgttcaccgtggagcgcatgtatgacgtgacaccgcccggcgtggtcatggggctggcctggaccgcaatgggaggctccacgctgtttgtggagacatccctgagacggccacaggacaaggatgccaagggtgacaaggatggcagcctggaggtgacaggccagctgggggaggtgatgaaggagagcgcccgcatagcctacaccttcgccagagccttcctcatgcagcacgcccccgccaatgactacctggtgacctcacacatccacctgcatgtgcccgagggcgccacccccaaggacggcccaagcgcaggctgcaccatcgtcacggccctgctgtccctggccatgggcaggcctgtccggcagaatctggccatgactggcgaagtctccctcacgggcaagatcctgcctgttggtggcatcaaggagaagaccattgcggccaagcgcgcaggggtgacgtgcatcgtcctgccagccgagaacaagaaggacttctacgacctggcagccttcatcaccgagggcctggaggtgcacttcgtggaacactaccgggagatcttcgacatcgccttcccggacgagcaggcagaggcgctggccgtggaacggtgacggccaccccgggactgcaggcggcggatgtcaggccctgtctgggccagaactgagcgctgtggggagcgcgcccggacctggcagtggagccaccgagcgagcagctcggtccagtgacccagatcccagggacctcagtcggcttaatcagagtgtggcatagaagctatttaatgattaaagtcatttgcagtacggcggcttcctcacctgctgccccgggaagggtgggcgggccacggcttttgattcacgaccaggcagcacccggagagggtgtggctcagagcgggcaccagacaggggactgcgggcccccgacacacccacacccacccacggacagcaggagagccagggcttctgtcaagctgttctttatttcagggagagggcaggggaggggctcagtctttcttggcagcagctttcctcatggcggccagtacgttgctcagctcctcccgcttcctcttggcgcggatgtgcgtccccaaccttttcttgataaatttgagggcccgtttgtccttggagaccttcagtaactccatggcgcgccgctcgtacggggcaaagccacacacctcccgaatcatgtcccgcacgaacttggtgtgtttggtcagaccccgcggcgtcggctgtgcctgggcttgctcacgttcttggtcactttgtggcccttgttgaggcccacggccatagggtagcgtagggccatggctgctgctctccagagacggccgtggcgganaggctggcgccgc

SEQ ID NO: 279345 - DNA, 2500 bp, Homo sapiens
  misc_feature (2487)..(2487): n is a, c, g, or t
ggacgcgtgggtcccccacgacttcgaccttgctgcaggagcagctaaagatcatcaagaaggagctgggcctggagaaggacgacaaggatgccatcgaggagaagttccgggagcgcctgaaggagctcgtggtccccaagcacgtcatggatgttgtggacgaggagctgagcaagctgggcctgctggacaaccactcctcggagttcaatgtcacccgcaactacctagactggctcacgtccatcccttggggcaagtacagcaacgagaacctggacctggcgcgggcacaggcagtgctggaggaagaccactacggcatggaggacgtcaagaaacgcatcctggagttcattgccgttagccagctccgcggctccacccagggcaagatcctctgcttctatggcccccctggcgtgggtaagaccagcattgctcgctccatcgcccgcgccctgaaccgagagtacttccgcttcagcgtcgggggcatgactgacgtggctgagatcaagggccacaggcggacctacgtgggcgccatgcccgggaagatcatccagtgtttgaagaagaccaagacggagaaccccctgatcctcatcgacgaggtggacaagatcggccgaggctaccagggggacccgtcgtcggcactgctggagctgctggacccagagcagaatgccaacttcctggaccactacctggacgtgcccgtggacttgtccaaggtgctgttcatctgcacggccaacgtcacggacaccatccccgagccgctgcgagaccgtatggagatgatcaacgtgtcgggctacgtggcccaggagaagctggccattgcggagcgctacctggtgccccaggctcgcgccctgtgtggcttggatgagagcaaggccaagctgtcatcggacgtgctgacgctgctcatcaagcagtactgccgcgagagcggtgtccgcaacctgcagaagcaagtggagaaggtgttacggaaatcggcctacaagattgtcagcggcgaggccgagtccgtggaggtgacgcccgagaacctgcaggacttcgtggggaagcccgtgttcaccgtggagcgcatgtatgacgtgacaccgcccggcgtggtcatggggctggcctggaccgcaatgggaggctccacgctgtttgtggagacatccctgagacggccacaggacaaggatgccaagggtgacaaggatggcagcctggaggtgacaggccagctgggggaggtgatgaaggagagcgcccgcatagcctacaccttcgccagagccttcctcatgcagcacgcccccgccaatgactacctggtgacctcacacatccacctgcatgtgcccgagggcgccacccccaaggacggcccaagcgcaggctgcaccatcgtcacggccctgctgtccctggccatgggcaggcctgtccggcagaatctggccatgactggcgaagtctccctcacgggcaagatcctgcctgttggtggcatcaaggagaagaccattgcggccaagcgcgcaggggtgacgtgcatcgtcctgccagccgagaacaagaaggacttctacgacctggcagccttcatcaccgagggcctggaggtgcacttcgtggaacactaccgggagatcttcgacatcgccttcccggacgagcaggcagaggcgctggccgtggaacggtgacggccaccccgggactgcaggcggcggatgtcaggccctgtctgggccagaactgagcgctgtggggagcgcgcccggacctggcagtggagccaccgagcgagcagctcggtccagtgacccagatcccagggacctcagtcggcttaatcagagtgtggcatagaagctatttaatgattaaagtcatttgcagtacggcggcttcctcacctgctgccccgggaagggtgggcgggccacggcttttgattcacgaccaggcagcacccggagagggtgtggctcagagcgggcaccagacaggggactgcgggcccccgacacacccacacccacccacggacagcaggagagccagggcttctgtcaagctgttctttatttcagggagagggcaggggaggggctcagtctttcttggcagcagctttcctcatggcggccagtacgttgctcagctcctcccgcttcctcttggcgcggatgtgcgtccccaaccttttcttgataaatttgagggcccgtttgtccttggagaccttcagtaactccatggcgcgccgctcgtacggggcaaagccacacacctcccgaatcatgtcccgcacgaacttggtgtgtttggtcagaccccgcggcgtcggctgtgcctgggcttgctcacgttcttggtcactttgtggcccttgttgaggcccacggccatagggtagcgtagggccatggctgctgctctccagagacggccgtggcgganaggctggcgccgc

SEQ ID NO: 279346 - DNA, 3299 bp, Homo sapiens
cgaactccgccccctcttctccgcgtaggcccagctccctgaagcggctgtttcgagccacgcgcccatcgggtaccgaggcacgcgccgggcgtcacgtgcgtttcgcggcgagcggaaatgacgcgagttgtgtgagccgccagtatggccgggctatggcggcgagcactggctacgtgcgactgtggggagcggcgcggtgctgggtgctgcggcggccgatgctggccgccgccggggggcgggttcccactgcagcaggagcgtggttgctccgaggccagcggacctgcgacgcctctcctccttgggcactgtggggccgaggcccggcaattgggggccaatggcgggggttttgggaagcgagcagccgcggcggaggcgcattctcggggggcgaggacgcctccgagggcggcgcggaggaaggagccggcggcgcggggggcagcgcgggcgccggggaaggcccggtcataacggcgctcacgcccatgacgatccccgatgtgtttccgcacctgccgctcatcgccatcacccgcaacccggtgttcccgcgctttatcaagattatcgaggttaaaaataagaagttggttgagctgctgagaaggaaagttcgtctcgcccagccttatgtcggcgtctttctaaagagagatgacagcaatgagtcggatgtggtcgagagcctggatgaaatctaccacacggggacgtttgcccagatccatgagatgcaggaccttggggacaagctgcgcatgatcgtcatgggacacagagccctgactgcagagatcgtgaagaccatccgggacatcattgccttgaaccctctctacagggagtcagtgctgcagatgatgcaggctggccagcgggtggtggacaaccccatctacctgagcgacatgggcgccgcgctcaccggggccgagtcccatgagctgcaggacgtcctggaagagaccaatattcctaagcggctgtacaaggccctctccctgctgaagaaggaatttgaactgagcaagctgcagcagcgcctggggcgggaggtggaggagaagatcaagcagacccaccgtaagtacctgctgcaggagcagctaaagatcatcaagaaggagctgggcctggagaaggacgacaaggatgccatcgaggagaagttccgggagcgcctgaaggagctcgtggtccccaagcacgtcatggatgttgtggacgaggagctgagcaagctgggcctgctggacaaccactcctcggagttcaatgtcacccgcaactacctagactggctcacgtccatcccttggggcaagtacagcaacgagaacctggacctggcgcgggcacaggcagtgctggaggaagaccactacggcatggaggacgtcaagaaacgcatcctggagttcattgccgttagccagctccgcggctccacccagggcaagatcctctgcttctatggcccccctggcgtgggtaagaccagcattgctcgctccatcgcccgcgccctgaaccgagagtacttccgcttcagcgtcgggggcatgactgacgtggctgagatcaagggccacaggcggacctacgtgggcgccatgcccgggaagatcatccagtgtttgaagaagaccaagacggagaaccccctgatcctcatcgacgaggtgcgtgcggagaggcccggagaccccctaacccggcaatgccgtgtgcaagatgaagccgagccttccgggtcctaggatccccgagccaactcaggggccatcgccgtgatgctggccctgatggcacggacgggtccctcccacccacagccacgcccagcaggctgcccgtccaaggcagggtgtgggtgccgctctcactcggggtctccccagccctgaccctggggtctccccactgggcgggctggccaggggcacggcgaggggcaccacctgctgtctgctgccccaggtggacaagatcggccgaggctaccagggggacccgtcgtcggcactgctggagctgctggacccagagcagaatgccaacttcctggaccactacctggacgtgcccgtggacttgtccaaggtgctgttcatctgcacggccaacgtcacggacaccatccccgagccgctgcgagaccgtatggagatgatcaacgtgtcgggctacgtggcccaggagaagctggccattgcggagcgctacctggtgccccaggctcgcgccctgtgtggcttggatgagagcaaggccaagctgtcatcggacgtgctgacgctgctcatcaagcagtactgccgcgagagcggtgtccgcaacctgcagaagcaagtggagaaggtgttacggaaatcggcctacaagattgtcagcggcgaggccgagtccgtggaggtgacgcccgagaacctgcaggacttcgtggggaagcccgtgttcaccgtggagcgcatgtatgacgtgacaccgcccggcgtggtcatggggctggcctggaccgcaatgggaggctccacgctgtttgtggagacatccctgagacggccacaggacaaggatgccaagggtgacaaggatggcagcctggaggtgacaggccagctgggggaggtgatgaaggagagcgcccgcatagcctacaccttcgccagagccttcctcatgcagcacgcccccgccaatgactacctggtgacctcacacatccacctgcatgtgcccgagggcgccacccccaaggacggcccaagcgcaggctgcaccatcgtcacggccctgctgtccctggccatgggcaggcctgtccggcagaatctggccatgactggcgaagtctccctcacgggcaagatcctgcctgttggtggcatcaaggagaagaccattgcggccaagcgcgcaggggtgacgtgcatcgtcctgccagccgagaacaagaaggacttctacgacctggcagccttcatcaccgagggcctggaggtgcacttcgtggaacactaccgggagatcttcgacatcgccttcccggacgagcaggcagaggcgctggccgtggaacggtgacggccaccccgggactgcaggcggcggatgtcaggccctgtctgggccagaactgagcgctgtggggagcgcgcccggacctggcagtggagccaccgagcgagcagctcggtccagtgacccagatcccagggacctcagtcggcttaatcagagtgtggcatagaagctatttaatgattaaagtcatttgcagt

SEQ ID NO: 279347 - DNA, 1675 bp, Homo sapiens
  misc_feature (1608)..(1608): n is a, c, g, or t
  misc_feature (1623)..(1623): n is a, c, g, or t
  misc_feature (1662)..(1662): n is a, c, g, or t
cgaactccgccccctcttctccgcgtaggcccagctccctgaagcggctgtttcgagccacgcgcccatcgggtaccgaggcacgcgccgggcgtcacgtgcgtttcgcggcgagcggaaatgacgcgagttgtgtgagccgccagtatggccgggctatggcggcgagcactggctacgtgcgactgtggggagcggcgcggtgctgggtgctgcggcggccgatgctggccgccgccggggggcgggttcccactgcagcaggagcgtggttgctccgaggccagcggacctgcgacgcctctcctccttgggcactgtggggccgaggcccggcaattgggggccaatggcgggggttttgggaagcgagcagccgcggcggaggcgcattctcggggggcgaggacgcctccgagggcggcgcggaggaaggagccggcggcgcggggggcagcgcgggcgccggggaaggcccggtcataacggcgctcacgcccatgacgatccccgatgtgtttccgcacctgccgctcatcgccatcacccgcaacccggtgttcccgcgctttatcaagattatcgaggttaaaaataagaagttggttgagctgctgagaaggaaagttcgtctcgcccagccttatgtcggcgtctttctaaagagagatgacagcaatgagtcggatgtggtcgagagcctggatgaaatctaccacacggggacgtttgcccagatccatgagatgcaggaccttggggacaagctgcgcatgatcgtcatgggacacagaagagtccatatcagcagacagctggaggtggagcccgaggagccggaggcggagaacaagcacaagccccgcaggaagtcaaagcggggcaagaaggaggcggaggacgagctgagcgccaggcacccggcggagctggcgatggagcccacccctgagctcccggctgaggtgctcatggtggaggtagagaacgttgtccacgaggacttccaggtcacggaggaggtgaaagccctgactgcagagatcgtgaagaccatccgggacatcattgccttgaaccctctctacagggagtcagtgctgcagatgatgcaggctggccagcgggtggtggacaaccccatctacctgagcgacatgggcgccgcgctcaccggggccgagtcccatgagctgcaggacgtcctggaagagaccaatattcctaagcggctgtacaaggccctctccctgctgaagaaggaatttgaactgagcaagctgcagcagcgcctggggcgggaggtggaggagaagatcaagcagacccaccgtaagtacctgctgcaggagcagctaaagatcatcaagaaggagctgggcctggagaaggacgacaaggatgccatcgaggagaagttccgggagcgcctgaaggagctcgtggtccccaagcacgtcatggatgttgtggacgaggagctgagcaagctgggcctgctggacaaccactcctcggagttcaatgtcacccgcaactacctagactggctcacgtccatcccttggggcaagtacagcaacgagaacctgactgcgcgccaggcangctgagaaacctcgnatgagctcagaacctctgagtatgcgtgcagtcgggtcncaggagacttgtt

SEQ ID NO: 279348 - DNA, 1561 bp, Homo sapiens
  misc_feature (1548)..(1548): n is a, c, g, or t
tgtggctggcagctgctgggggctgccctgtggggcgtacagagccaggaacccgcaacgcagcaaacgtagaggccagcgttggctcacgatgggacaccaacccctgcccaggggcaccaagatgctaaactggggcaggagcggtcagagtggccccgaggggtggagtgagcaccggcctgggctccgaggcctcccgtgttcacagctccacacctgtttcaggaggctccacgctgtttgtggagacatccctgagacggccacaggacaaggatgccaagggtgacaaggatggcagcctggaggtgacaggccagctgggggaggtgatgaaggagagcgcccgcatagcctacaccttcgccagagccttcctcatgcagcacgcccccgccaatgactacctggtgacctcacacatccacctgcatgtgcccgagggcgccacccccaaggacggcccaagcgcaggctgcaccatcgtcacggccctgctgtccctggccatgggcaggcctgtccggcagaatctggccatgactggcgaagtctccctcacgggcaagatcctgcctgttggtggcatcaaggagaagaccattgcggccaagcgcgcaggggtgacgtgcatcgtcctgccagccgagaacaagaaggacttctacgacctggcagccttcatcaccgagggcctggaggtgcacttcgtggaacactaccgggagatcttcgacatcgccttcccggacgagcaggcagaggcgctggccgtggaacggtgacggccaccccgggactgcaggcggcggatgtcaggccctgtctgggccagaactgagcgctgtggggagcgcgcccggacctggcagtggagccaccgagcgagcagctcggtccagtgacccagatcccagggacctcagtcggcttaatcagagtgtggcatagaagctatttaatgattaaagtcatttgcagtacggcggcttcctcacctgctgccccgggaagggtgggcgggccacggcttttgattcacgaccaggcagcacccggagagggtgtggctcagagcgggcaccagacaggggactgcgggcccccgacacacccacacccacccacggacagcaggagagccagggcttctgtcaagctgttctttatttcagggagagggcaggggaggggctcagtctttcttggcagcagctttcctcatggcggccagtacgttgctcagctcctcccgcttcctcttggcgcggatgtgcgtccccaaccttttcttgataaatttgagggcccgtttgtccttggagaccttcagtaactccatggcgcgccgctcgtacggggcaaagccacacacctcccgaatcatgtcccgcacgaacttggtgtgtttggtcagaccccgcggcgtcggctgtgcctgggcttgctcacgttcttggtcactttgtggcccttgttgaggcccacggccatagggtagcgtagggccatggctgctgctctccagagacggccgtggcgganaggctggcgccgc

SEQ ID NO: 279349 - DNA, 1096 bp, Homo sapiens
gtcccccgcgcgggcgcgggtggatctctcgggctctgacttgttttcgggtcaccttcaggcttcagccaggcacctgacgcctctttcccctcacggtgccaggccgggccgaactacatttcccaggaggctccgcggccaggtgcaaacagcgccgtgctgactacatttcccagacagccttgcggcggcccgggccttaaagcgtccatttcccagcggccctccgctgcgagaccgcagcccttctctggagtctcagagccgcaagacaccacgactcccagaggaccttgcgtcgggcaagaaagactacaccttccagaggcctctgcggcgccgcgacaggaagcggcgggcgagccgagtgtccttgcgcgtggatccgagcgaccatggtggcccgggtgtggtcgctgatgcgagcccttggcgttcagttcgcggtgtcagcctccgcctccgagcctcagttgtcttctctgtgaggtgggaatgccggtgaatcctgccgctggcgtggatgagaagtgaatgcgtgctcggagctgcgagtgacagcgggcaggaggcgcccagggacacttggtttctccagggctggaaggcttctagaaggttcctcatcaagggaagtgtggctgggggcgccgtctacctggtgtacgaccaggagctgctggggcccagcgacaagagccaggcagccctacagaaggctggggaggtggtcccccccgccatgtaccagttcagccagtacgtgtgtcagcagacaggcctgcagataccccagctcccagcccctccaaagatttactttcccatccgtgactcctggaatgcaggcatcatgacggtgatgtcagctctgtcggtggccccctccaaggcccgcgagtactccaaggagggctgggagtatgtgaaggcgcgcaccaagtagcgagtcagcaggggccgcctgccccggccagaacgggcagggctgccactgacctgaagactccggactgggaccccactccgagggcagctcccggccttgccggcccaataaaggacttcagaagtgaaaaaaaaaaaaaaaaaa

SEQ ID NO: 279350 - DNA, 1361 bp, Homo sapiens
gtcccccgcgcgggcgcgggtggatctctcgggctctgacttgttttcgggtcaccttcaggcttcagccaggcacctgacgcctctttcccctcacggtgccaggccgggccgaactacatttcccaggaggctccgcggccaggtgcaaacagcgccgtgctgactacatttcccagacagccttgcggcggcccgggccttaaagcgtccatttcccagcggccctccgctgcgagaccgcagcccttctctggagtctcagagccgcaagacaccacgactcccagaggaccttgcgtcgggcaagaaagactacaccttccagaggcctctgcggcgccgcgacaggaagcggcgggcgagccgagtgtccttgcgcgtggatccgagcgaccatggtggcccgggtgtggtcgctgatgaggttcctcatcaagggaagtgtggctgggggcgccgtctacctggtgtacgaccaggagctgctggggcccagcgacaagagccaggcagccctacagaaggctggggaggtggtcccccccgccatgtaccagttcagccagtacgtgtgtcagcagacaggcctgcagataccccagctcccagcccctccaaagatttactttcccatccgtgactcctggaatgcaggagggatctaaaagggaaaggaggccgagcacagtggctcacgcctgtaatcccagcactttgggaggctgaggtgggcggatcatctgaagtcaggagttcgagaccagcctgggcaacatggtgaaaccccatctctactaaaaatacaaaaattaaccgtgcgtggtggtgcacacctgtaatcccagctgctgcttgagaggctgaagcaggagaattgcttgaacccaggaggcagaggttgcagtgagccgaggttgcaccactgcactccagcctgggcgacagggcgagactccatctcaaaaaaataaaatacaaaaattagcctggtatggtggcgcacttgtagtcccagctacttgggaggctgaggcaagagaatcgcttgaacccaggaggcgaaggttgcagtgagccgagattgcactactgcactccagcctgggagacagagcatcatgacggtgatgtcagctctgtcggtggccccctccaaggcccgcgagtactccaaggagggctgggagtatgtgaaggcgcgcaccaagtagcgagtcagcaggggccgcctgccccggccagaacgggcagggctgccactgacctgaagactccggactgggaccccactccgagggcagctcccggccttgccggcccaataaaggacttcagaagtgaaaaaaaaaaaaaaaaaa

SEQ ID NO: 279351 - DNA, 1661 bp, Homo sapiens
gtcccccgcgcgggcgcgggtggatctctcgggctctgacttgttttcgggtcaccttcaggcttcagccaggcacctgacgcctctttcccctcacggtgccaggccgggccgaactacatttcccaggaggctccgcggccaggtgcaaacagcgccgtgctgactacatttcccagacagccttgcggcggcccgggccttaaagcgtccatttcccagcggccctccgctgcgagaccgcagcccttctctggagtctcagagccgcaagacaccacgactcccagaggaccttgcgtcgggcaagaaagactacaccttccagaggcctctgcggcgccgcgacaggaagcggcgggcgagccgagtgtccttgcgcgtggatccgagcgaccatggtggcccgggtgtggtcgctgatgaggttcctcatcaagggaagtgtggctgggggcgccgtctacctggtgtacgaccaggagctgctggggcccagcgacaagagccaggcagccctacagaaggctggggaggtggtcccccccgccatgtaccagttcagccagtacgtgtgtcagcagacaggcctgcagataccccaggtactacgggccgggaacgaggccagggtttggcgggtggtcagctctgggaggtccctccagccctgcacgatgttgtcctccatattgatgctgacctgattctccggcctgtcctcctccctccgcctctggggatgggctgctgagccttttcaccagttctttctgcccatctctttttcccagctcccagcccctccaaagatttactttcccatccgtgactcctggaatgcaggtaaggcacccagtttctttgcttggagggagacaccccagtctagcccctctccccacttcctggccattcctttctgtccatcctccttcctgcccgacacgtgtctcttagggatctaaaagggaaaggaggccgagcacagtggctcacgcctgtaatcccagcactttgggaggctgaggtgggcggatcatctgaagtcaggagttcgagaccagcctgggcaacatggtgaaaccccatctctactaaaaatacaaaaattaaccgtgcgtggtggtgcacacctgtaatcccagctgctgcttgagaggctgaagcaggagaattgcttgaacccaggaggcagaggttgcagtgagccgaggttgcaccactgcactccagcctgggcgacagggcgagactccatctcaaaaaaataaaatacaaaaattagcctggtatggtggcgcacttgtagtcccagctacttgggaggctgaggcaagagaatcgcttgaacccaggaggcgaaggttgcagtgagccgagattgcactactgcactccagcctgggagacagagcatcatgacggtgatgtcagctctgtcggtggccccctccaaggcccgcgagtactccaaggagggctgggagtatgtgaaggcgcgcaccaagtagcgagtcagcaggggccgcctgccccggccagaacgggcagggctgccactgacctgaagactccggactgggaccccactccgagggcagctcccggccttgccggcccaataaaggacttcagaagtgaaaaaaaaaaaaaaaaaa

SEQ ID NO: 279352 - DNA, 748 bp, Homo sapiens
gtcccccgcgcgggcgcgggtggatctctcgggctctgacttgttttcgggtcaccttcaggcttcagccaggcacctgacgcctctttcccctcacggtgccaggccgggccgaactacatttcccaggaggctccgcggccaggtgcaaacagcgccgtgctgactacatttcccagacagccttgcggcggcccgggccttaaagcgtccatttcccagcggccctccgctgcgagaccgcagcccttctctggagtctcagagccgcaagacaccacgactcccagaggaccttgcgtcgggcaagaaagactacaccttccagaggcctctgcggcgccgcgacaggaagcggcgggcgagccgagtgtccttgcgcgtggatccgagcgaccatggtggcccgggtgtggtcgctgatgcgagcccttggcgttcagttcgcggtgtcagcctccgcctccgagcctcagttgtcttctctgtgaggtgggaatgccggtgaatcctgccgctggcgtggatgagaagtgaatgcgtgctcggagctgcgagtgacagcgggcaggaggcgcccagggacacttggtttctccagggctggaaggcttctagaggattgattttgaagcaaaccctgcaactgctgtactctgggtaaccagggtgagtttctctgcctctgacctttttagttgatcttgtaggtcctgggtatccaagctgcacaggtctctgtcgccct

SEQ ID NO: 279353 - DNA, 323 bp, Homo sapiens
cgccattacattccagccagggcaacagaatgagactctgtctcaaaaaaaaaatctactctgcatttcactttggggtcattgtcatgctaggttaaaaataagaagttggttgagctgctgagaaggaaagttcgtctcgcccagccttatgtcggcgtctttctaaagagagatgacaggtaagtgtgatttttccttcattcccttgttgacggtgccctagagtccagctcaccacaagtcctactctgtactttgcacctttgacccctgaccccgaggaaaccagggaagacctccagaataaaggccagaagcca

SEQ ID NO: 279354 - DNA, 344 bp, Homo sapiens
ctgcacgtgaggatgctgcatgcctttccagcccaggacgggtgggccctgaactctggagaacaagcagcagagctggctcccagcgagcacccctagaccgtgcccatagctacaggggacagggaccctgaggaccgggtccccgtttgggggctgcactgcagcagagcgtgaggccctggccaccgaggcagctccctttgtcccccagggagtcagtgctgcagatgatgcaggctggccagcgggtggtggacaaccccatctacctgagcgacatgggcgccgcgctcaccggggccgagtcccatgagctgcaggacgtcctggaagagaccaat

SEQ ID NO: 279355 - DNA, 516 bp, Homo sapiens
tggtgggttttgggacttactgcttagaacccggcatcactgtgtatcgccggtccccaggaagccctttcgttcctggaggttagcacacctgctgccctcccacaggcccaggcagggctgaccctgactctgcccccaggccaagcgcgcaggggtgacgtgcatcgtcctgccagccgagaacaagaaggacttctacgacctggcagccttcatcaccgagggcctggaggtgcacttcgtggaacactaccgggagatcttcgacatcgccttcccggacgagcaggcagaggcgctggccgtggaacggtgacggccaccccgggactgcaggcggcggatgtcaggccctgtctgggccagaactgagcgctgtggggagcgcgcccggacctggcagtggagccaccgagcgagcagctcggtccagtgacccagatcccagggacctcagtcggcttaatcagagtgtggcatagaagctatttaatgattaaagtcatttgcagt

SEQ ID NO: 279356 - DNA, 3181 bp, Homo sapiens
aattttttatttttatgggctttagcgatggaggtaggattggtgctgtgggtgaaagagtatgatggggggcgagttgtgtgagccgccagtatggccgggctatggcggcgagcactggctacgtgcgactgtggggagcggcgcggtgctgggtgctgcggcggccgatgctggccgccgccggggggcgggttcccactgcagcaggagcgtggttgctccgaggccagcggacctgcgacgcctctcctccttgggcactgtggggccgaggcccggcaattgggggccaatggcgggggttttgggaagcgagcagccgcggcggaggcgcattctcggggggcgaggacgcctccgagggcggcgcggaggaaggagccggcggcgcggggggcagcgcgggcgccggggaaggcccggtcataacggcgctcacgcccatgacgatccccgatgtgtttccgcacctgccgctcatcgccatcacccgcaacccggtgttcccgcgctttatcaagattatcgaggttaaaaataagaagttggttgagctgctgagaaggaaagttcgtctcgcccagccttatgtcggcgtctttctaaagagagatgacagcaatgagtcggatgtggtcgagagcctggatgaaatctaccacacggggacgtttgcccagatccatgagatgcaggaccttggggacaagctgcgcatgatcgtcatgggacacagaagagtccatatcagcagacagctggaggtggagcccgaggagccggaggcggagaacaagcacaagccccgcaggaagtcaaagcggggcaagaaggaggcggaggacgagctgagcgccaggcacccggcggagctggcgatggagcccacccctgagctcccggctgaggtgctcatggtggaggtagagaacgttgtccacgaggacttccaggtcacggaggaggtgaaagccctgactgcagagatcgtgaagaccatccgggacatcattgccttgaaccctctctacagggagtcagtgctgcagatgatgcaggctggccagcgggtggtggacaaccccatctacctgagcgacatgggcgccgcgctcaccggggccgagtcccatgagctgcaggacgtcctggaagagaccaatattcctaagcggctgtacaaggccctctccctgctgaagaaggaatttgaactgagcaagctgcagcagcgcctggggcgggaggtggaggagaagatcaagcagacccaccgtaagtacctgctgcaggagcagctaaagatcatcaagaaggagctgggcctggagaaggacgacaaggatgccatcgaggagaagttccgggagcgcctgaaggagctcgtggtccccaagcacgtcatggatgttgtggacgaggagctgagcaagctgggcctgctggacaaccactcctcggagttcaatgtcacccgcaactacctagactggctcacgtccatcccttggggcaagtacagcaacgagaacctggacctggcgcgggcacaggcagtgctggaggaagaccactacggcatggaggacgtcaagaaacgcatcctggagttcattgccgttagccagctccgcggctccacccagggcaagatcctctgcttctatggcccccctggcgtgggtaagaccagcattgctcgctccatcgcccgcgccctgaaccgagagtacttccgcttcagcgtcgggggcatgactgacgtggctgagatcaagggccacaggcggacctacgtgggcgccatgcccgggaagatcatccagtgtttgaagaagaccaagacggagaaccccctgatcctcatcgacgaggtggacaagatcggccgaggctaccagggggacccgtcgtcggcactgctggagctgctggacccagagcagaatgccaacttcctggaccactacctggacgtgcccgtggacttgtccaaggtgctgttcatctgcacggccaacgtcacggacaccatccccgagccgctgcgagaccgtatggagatgatcaacgtgtcgggctacgtggcccaggagaagctggccattgcggagcgctacctggtgccccaggctcgcgccctgtgtggcttggatgagagcaaggccaagctgtcatcggacgtgctgacgctgctcatcaagcagtactgccgcgagagcggtgtccgcaacctgcagaagcaagtggagaaggtgttacggaaatcggcctacaagattgtcagcggcgaggccgagtccgtggaggtgacgcccgagaacctgcaggacttcgtggggaagcccgtgttcaccgtggagcgcatgtatgacgtgacaccgcccggcgtggtcatggggctggcctggaccgcaatgggaggctccacgctgtttgtggagacatccctgagacggccacaggacaaggatgccaagggtgacaaggatggcagcctggaggtgacaggccagctgggggaggtgatgaaggagagcgcccgcatagcctacaccttcgccagagccttcctcatgcagcacgcccccgccaatgactacctggtgacctcacacatccacctgcatgtgcccgagggcgccacccccaaggacggcccaagcgcaggctgcaccatcgtcacggccctgctgtccctggccatgggcaggcctgtccggcagaatctggccatgactggcgaagtctccctcacgggcaagatcctgcctgttggtggcatcaaggagaagaccattgcggccaagcgcgcaggggtgacgtgcatcgtcctgccagccgagaacaagaaggacttctacgacctggcagccttcatcaccgagggcctggaggtgcacttcgtggaacactaccgggagatcttcgacatcgccttcccggacgagcaggcagaggcgctggccgtggaacggtgacggccaccccgggactgcaggcggcggatgtcaggccctgtctgggccagaactgagcgctgtggggagcgcgcccggacctggcagtggagccaccgagcgagcagctcggtccagtgacccagatcccagggacctcagtcggcttaatcagagtgtggcatagaagctatttaatgattaaagtcatttgcagt

SEQ ID NO: 279357 - DNA, 1058 bp, Homo sapiens
gtcccccgcgcgggcgcgggtggatctctcgggctctgacttgttttcgggtcaccttcaggcttcagccaggcacctgacgcctctttcccctcacggtgccaggccgggccgaactacatttcccaggaggctccgcggccaggtgcaaacagcgccgtgctgactacatttcccagacagccttgcggcggcccgggccttaaagcgtccatttcccagcggccctccgctgcgagaccgcagcccttctctggagtctcagagccgcaagacaccacgactcccagaggaccttgcgtcgggcaagaaagactacaccttccagaggcctctgcggcgccgcgacaggaagcggcgggcgagccgagtgtccttgcgcgtggatccgagcgaccatggtggcccgggtgtggtcgctgatgaggttcctcatcaagggaagtgtggctgggggcgccgtctacctggtgtacgaccaggagctgctggggcccagcgacaagagccaggcagccctacagaaggctggggaggtggtcccccccgccatgtaccagttcagccagtacgtgtgtcagcagacaggcctgcagataccccagctcccagcccctccaaagatttactttcccatccgtgactcctggaatgcaggcatcatgacggtgatgtcagctctgtcggtggccccctccaaggcccgcgagtactccaaggagggctgggagtatgtgaaggcgcgcaccaagtagcgagtcagcaggggccgcctgccccggccagaacgggcagggctgccactgacctgaagactccggactgggaccccactccgagggcagctcccggccttgccggcccaataaaggacttcagaagtgaaaaaaaaaaaaaaaaaacttcgagactagttctctctctcctccaccattttacccagaaaaccttttgccaagacatttttctccaataaggtatggcgatagaattgaacccgggggccatagattttgtcccgcaggggaaggatgtaaattttttccagcgtatattag

SEQ ID NO: 279358 - DNA, 546 bp, Homo sapiens
aggaagggagaaaggagaggagagagagggtcgaagaggaggatgagacagagtgcaaaaagaggataagagagagagaaggaataaggagaggagaagagaggatgataagagaagaggagagtagaagagaaagggggaagtgaaatgtagaagggaggacgacaggcagactggcggtagtgcgagagaaggcgaggggaagggatgagtccgtggcaacagcatgcctcatgacgaccagagccatggtcaagcggctgacgctgcgacagcgcggatgtgcgtcggcaccttttcttgataaatttgagggcccgtttgtccttggagaccttcagtaactccatggcgcgccgctcgtacggggcaaagccacacacctcccgaatcatgtcccgcacgaacttggtgtgtttggtcagaccccgcggcgtcggctgtgcctgggcttgctcacgttcttggtcactttgtggcccttgttgaggcccacggccatagggtagcgtagggccatggctgctgctctccgaagacggccgt

SEQ ID NO: 279359 - DNA, 3925 bp, Homo sapiens
cgaactccgccccctcttctccgcgtaggcccagctccctgaagcggctgtttcgagccacgcgcccatcgggtaccgaggcacgcgccgggcgtcacgtgcgtttcgcggcgagcggaaatgacgcgagttgtgtgagccgccagtatggccgggctatggcggcgagcactggctacgtgcgactgtggggagcggcgcggtgctgggtgctgcggcggccgatgctggccgccgccggggggcgggttcccactgcagcaggagcgtggttgctccgaggccagcggacctgcgacgcctctcctccttgggcactgtggggccgaggcccggcaattgggggccaatggcgggggttttgggaagcgagcagccgcggcggaggcgcattctcggggggcgaggacgcctccgagggcggcgcggaggaaggagccggcggcgcggggggcagcgcgggcgccggggaaggcccggtcataacggcgctcacgcccatgacgatccccgatgtgtttccgcacctgccgctcatcgccatcacccgcaacccggtgttcccgcgctttatcaagattatcgaggttaaaaataagaagttggttgagctgctgagaaggaaagttcgtctcgcccagccttatgtcggcgtctttctaaagagagatgacagcaatgagtcggatgtggtcgagagcctggatgaaatctaccacacggggacgtttgcccagatccatgagatgcaggaccttggggacaagctgcgcatgatcgtcatgggacacagaagagtccatatcagcagacagctggaggtggagcccgaggagccggaggcggagaacaagcacaagccccgcaggaagtcaaagcggggcaagaaggaggcggaggacgagctgagcgccaggcacccggcggagctggcgatggagcccacccctgagctcccggctgaggtgctcatggtggaggtagagaacgttgtccacgaggacttccaggtcacggaggaggtgaaagccctgactgcagagatcgtgaagaccatccgggacatcattgccttgaaccctctctacagggagtcagtgctgcagatgatgcaggctggccagcgggtggtggacaaccccatctacctgagcgacatgggcgccgcgctcaccggggccgagtcccatgagctgcaggacgtcctggaagagaccaatattcctaagcggctgtacaaggccctctccctgctgaagaaggaatttgaactgagcaagctgcagcagcgcctggggcgggaggtggaggagaagatcaagcagacccaccgtaagtacctgctgcaggagcagctaaagatcatcaagaaggagctgggcctggagaaggacgacaaggatgccatcgaggagaagttccgggagcgcctgaaggagctcgtggtccccaagcacgtcatggatgttgtggacgaggagctgagcaagctgggcctgctggacaaccactcctcggagttcaatgtcacccgcaactacctagactggctcacgtccatcccttggggcaagtacagcaacgagaacctggacctggcgcgggcacaggcagtgctggaggaagaccactacggcatggaggacgtcaagaaacgcatcctggagttcattgccgttagccagctccgcggctccacccagggcaagatcctctgcttctatggcccccctggcgtgggtaagaccagcattgctcgctccatcgcccgcgccctgaaccgagagtacttccgcttcagcgtcgggggcatgactgacgtggctgagatcaagggccacaggcggacctacgtgggcgccatgcccgggaagatcatccagtgtttgaagaagaccaagacggagaaccccctgatcctcatcgacgaggtggacaagatcggccgaggctaccagggggacccgtcgtcggcactgctggagctgctggacccagagcagaatgccaacttcctggaccactacctggacgtgcccgtggacttgtccaaggtgctgttcatctgcacggccaacgtcacggacaccatccccgagccgctgcgagaccgtatggagatgatcaacgtgtcgggctacgtggcccaggagaagctggccattgcggagcgctacctggtgccccaggctcgcgccctgtgtggcttggatgagagcaaggccaagctgtcatcggacgtgctgacgctgctcatcaagcagtactgccgcgagagcggtgtccgcaacctgcagaagcaagtggagaaggtgttacggaaatcggcctacaagattgtcagcggcgaggccgagtccgtggaggtgacgcccgagaacctgcaggacttcgtggggaagcccgtgttcaccgtggagcgcatgtatgacgtgacaccgcccggcgtggtcatggggctggcctggaccgcaatgggaggctccacgctgtttgtggagacatccctgagacggccacaggacaaggatgccaagggtgacaaggatggcagcctggaggtgacaggccagctgggggaggtgatgaaggagagcgcccgcatagcctacaccttcgccagagccttcctcatgcagcacgcccccgccaatgactacctggtgacctcacacatccacctgcatgtgcccgagggcgccacccccaaggacggcccaagcgcaggctgcaccatcgtcacggccctgctgtccctggccatgggcaggcctgtccggcagaatctggccatgactggcgaagtctccctcacgggcaagatcctgcctgttggtggcatcaaggagaagaccattgcggccaagcgcgcaggggtgacgtgcatcgtcctgccagccgagaacaagaaggacttctacgacctggcagccttcatcaccgagggcctggaggtgcacttcgtggaacactaccgggagatcttcgacatcgccttcccggacgagcaggcagaggcgctggccgtggaacggtgacggccaccccgggactgcaggcggcggatgtcaggccctgtctgggccagaactgagcgctgtggggagcgcgcccggacctggcagtggagccaccgagcgagcagctcggtccagtgacccagatcccagggacctcagtcggcttaatcagagtgtggcatagaagctatttaatgattaaagtcatttgcagtacggcggcttcctcacctgctgccccgggaagggtgggcgggccacggcttttgattcacgaccaggcagcacccggagagggtgtggctcagagcgggcaccagacaggggactgcgggcccccgacacacccacacccacccacggacagcaggagagccagggcttctgtcaagctgttctttatttcagggagagggcaggggaggggctcagtctttcttggcagcagctttcctcatggcggccagtacgttgctcagctcctcccgcttcctcttggcgcggatgtgcgtccccaaccttttcttgataaatttgagggcccgtttgtccttggagaccttcagtaactccatggcgcgccgctcgtacggggcaaagccacacacctcccgaatcatgtcccgcacgaacttggtgtgtttggtcagaccccgcggcgtcggctgtgcctgggcttgctcacgttcttggtcactttgtggcccttgttgaggcccacggccatagggtagcgtagggccatggctgcggacagcgacggggagaaggggcggaggtgagtaccggctcagttcccgaggcccagagccccgcgtcccggctccttcagcctcgctcgccacaaccaaccatcctccaacctgcacagaggacccgggagtccggatggcggcggataccgg

SEQ ID NO: 279360 - DNA, 3688 bp, Homo sapiens
cgaactccgccccctcttctccgcgtaggcccagctccctgaagcggctgtttcgagccacgcgcccatcgggtaccgaggcacgcgccgggcgtcacgtgcgtttcgcggcgagcggaaatgacgcgagttgtgtgagccgccagtatggccgggctatggcggcgagcactggctacgtgcgactgtggggagcggcgcggtgctgggtgctgcggcggccgatgctggccgccgccggggggcgggttcccactgcagcaggagcgtggttgctccgaggccagcggacctgcgacgcctctcctccttgggcactgtggggccgaggcccggcaattgggggccaatggcgggggttttgggaagcgagcagccgcggcggaggcgcattctcggggggcgaggacgcctccgagggcggcgcggaggaaggagccggcggcgcggggggcagcgcgggcgccggggaaggcccggtcataacggcgctcacgcccatgacgatccccgatgtgtttccgcacctgccgctcatcgccatcacccgcaacccggtgttcccgcgctttatcaagattatcgaggttaaaaataagaagttggttgagctgctgagaaggaaagttcgtctcgcccagccttatgtcggcgtctttctaaagagagatgacagcaatgagtcggatgtggtcgagagcctggatgaaatctaccacacggggacgtttgcccagatccatgagatgcaggaccttggggacaagctgcgcatgatcgtcatgggacacagaagagtccatatcagcagacagctggaggtggagcccgaggagccggaggcggagaacaagcacaagccccgcaggaagtcaaagcggggcaagaaggaggcggaggacgagctgagcgccaggcacccggcggagctggcgatggagcccacccctgagctcccggctgaggtgctcatggtggaggtagagaacgttgtccacgaggacttccaggtcacggaggaggtgaaagccctgactgcagagatcgtgaagaccatccgggacatcattgccttgaaccctctctacagggagtcagtgctgcagatgatgcaggctggccagcgggtggtggacaaccccatctacctgagcgacatgggcgccgcgctcaccggggccgagtcccatgagctgcaggacgtcctggaagagaccaatattcctaagcggctgtacaaggccctctccctgctgaagaaggaatttgaactgagcaagctgcagcagcgcctggggcgggaggtggaggagaagatcaagcagacccaccgtaagtacctgctgcaggagcagctaaagatcatcaagaaggagctgggcctggagaaggacgacaaggatgccatcgaggagaagttccgggagcgcctgaaggagctcgtggtccccaagcacgtcatggatgttgtggacgaggagctgagcaagctgggcctgctggacaaccactcctcggagttcaatgtcacccgcaactacctagactggctcacgtccatcccttggggcaagtacagcaacgagaacctggacctggcgcgggcacaggcagtgctggaggaagaccactacggcatggaggacgtcaagaaacgcatcctggagttcattgccgttagccagctccgcggctccacccagggcaagatcctctgcttctatggcccccctggcgtgggtaagaccagcattgctcgctccatcgcccgcgccctgaaccgagagtacttccgcttcagcgtcgggggcatgactgacgtggctgagatcaagggccacaggcggacctacgtgggcgccatgcccgggaagatcatccagtgtttgaagaagaccaagacggagaaccccctgatcctcatcgacgaggtggacaagatcggccgaggctaccagggggacccgtcgtcggcactgctggagctgctggacccagagcagaatgccaacttcctggaccactacctggacgtgcccgtggacttgtccaaggtgctgttcatctgcacggccaacgtcacggacaccatccccgagccgctgcgagaccgtatggagatgatcaacgtgtcgggctacgtggcccaggagaagctggccattgcggagcgctacctggtgccccaggctcgcgccctgtgtggcttggatgagagcaaggccaagctgtcatcggacgtgctgacgctgctcatcaagcagtactgccgcgagagcggtgtccgcaacctgcagaagcaagtggagaaggtgttacggaaatcggcctacaagattgtcagcggcgaggccgagtccgtggaggtgacgcccgagaacctgcaggacttcgtggggaagcccgtgttcaccgtggagcgcatgtatgacgtgacaccgcccggcgtggtcatggggctggcctggaccgcaatgggaggctccacgctgtttgtggagacatccctgagacggccacaggacaaggatgccaagggtgacaaggatggcagcctggaggtgacaggccagctgggggaggtgatgaaggagagcgcccgcatagcctacaccttcgccagagccttcctcatgcagcacgcccccgccaatgactacctggtgacctcacacatccacctgcatgtgcccgagggcgccacccccaaggacggcccaagcgcaggctgcaccatcgtcacggccctgctgtccctggccatgggcaggcctgtccggcagaatctggccatgactggcgaagtctccctcacgggcaagatcctgcctgttggtggcatcaaggagaagaccattgcggccaagcgcgcaggggtgacgtgcatcgtcctgccagccgagaacaagaaggacttctacgacctggcagccttcatcaccgagggcctggaggtgcacttcgtggaacactaccgggagatcttcgacatcgccttcccggacgagcaggcagaggcgctggccgtggaacggtgacggccaccccgggactgcaggcggcggatgtcaggccctgtctgggccagaactgagcgctgtggggagcgcgcccggacctggcagtggagccaccgagcgagcagctcggtccagtgacccagatcccagggacctcagtcggcttaatcagagtgtggcatagaagctatttaatgattaaagtcatttgcagtaaaaaaaaaaaaaaaaaaaaaaaaaaaaaaaaaaaaaaaaaaaaaaaacgagactagttctctcttacccttcagtaagttctccccattttagttttctaggactgaaaggattcttttctacattatacatgtgtgttgtcatatttggcttttgctatatactttaacttcattgttaaatttttgtattgtatagtttctttggtgtatcttaaaacctatttttgaaaaacaaacttggcttgataatcatttgggcagcttgggtaagtacgcaacttacttttccaccaaagaactgtcagcagctgcctgcttttctgtgatgtatgtatcctgttgacttttccagaaattttttaagagtttgagttactattgaatttaatcagactttctgattaaagggttttctttcttttttaataaaacacatctgtctggtatggt

SEQ ID NO: 279361 - DNA, 3290 bp, Homo sapiens
  misc_feature (3277)..(3277): n is a, c, g, or t
cggctagtacgaggccggtgttaatcggccgaggcggtgttcccgcgctttatcaagattatcgaggttaaaaataagaagttggttgagctgctgagaaggaaagttcgtctcgcccagccttatgtcggcgtctttctaaagagagatgacagcaatgagtcggatgtggtcgagagcctggatgaaatctaccacacggggacgtttgcccagatccatgagatgcaggaccttggggacaagctgcgcatgatcgtcatgggacacagaagagtccatatcagcagacagctggaggtggagcccgaggagccggaggcggagaacaagcacaagccccgcaggaagtcaaagcggggcaagaaggaggcggaggacgagctgagcgccaggcacccggcggagctggcgatggagcccacccctgagctcccggctgaggtgctcatggtggaggtagagaacgttgtccacgaggacttccaggtcacggaggaggtgaaagccctgactgcagagatcgtgaagaccatccgggacatcattgccttgaaccctctctacagggagtcagtgctgcagatgatgcaggctggccagcgggtggtggacaaccccatctacctgagcgacatgggcgccgcgctcaccggggccgagtcccatgagctgcaggacgtcctggaagagaccaatattcctaagcggctgtacaaggccctctccctgctgaagaaggaatttgaactgagcaagctgcagcagcgcctggggcgggaggtggaggagaagatcaagcagacccaccgtaagtacctgctgcaggagcagctaaagatcatcaagaaggagctgggcctggagaaggacgacaaggatgccatcgaggagaagttccgggagcgcctgaaggagctcgtggtccccaagcacgtcatggatgttgtggacgaggagctgagcaagctgggcctgctggacaaccactcctcggagttcaatgtcacccgcaactacctagactggctcacgtccatcccttggggcaagtacagcaacgagaacctggacctggcgcgggcacaggcagtgctggaggaagaccactacggcatggaggacgtcaagaaacgcatcctggagttcattgccgttagccagctccgcggctccacccagggcaagatcctctgcttctatggcccccctggcgtgggtaagaccagcattgctcgctccatcgcccgcgccctgaaccgagagtacttccgcttcagcgtcgggggcatgactgacgtggctgagatcaagggccacaggcggacctacgtgggcgccatgcccgggaagatcatccagtgtttgaagaagaccaagacggagaaccccctgatcctcatcgacgaggtggacaagatcggccgaggctaccagggggacccgtcgtcggcactgctggagctgctggacccagagcagaatgccaacttcctggaccactacctggacgtgcccgtggacttgtccaaggtgctgttcatctgcacggccaacgtcacggacaccatccccgagccgctgcgagaccgtatggagatgatcaacgtgtcgggctacgtggcccaggagaagctggccattgcggagcgctacctggtgccccaggctcgcgccctgtgtggcttggatgagagcaaggccaagctgtcatcggacgtgctgacgctgctcatcaagcagtactgccgcgagagcggtgtccgcaacctgcagaagcaagtggagaaggtgttacggaaatcggcctacaagattgtcagcggcgaggccgagtccgtggaggtgacgcccgagaacctgcaggacttcgtggggaagcccgtgttcaccgtggagcgcatgtatgacgtgacaccgcccggcgtggtcatggggctggcctggaccgcaatgggaggctccacgctgtttgtggagacatccctgagacggccacaggacaaggatgccaagggtgacaaggatggcagcctggaggtgacaggccagctgggggaggtgatgaaggagagcgcccgcatagcctacaccttcgccagagccttcctcatgcagcacgcccccgccaatgactacctggtgacctcacacatccacctgcatgtgcccgagggcgccacccccaaggacggcccaagcgcaggctgcaccatcgtcacggccctgctgtccctggccatgggcaggcctgtccggcagaatctggccatgactggcgaagtctccctcacgggcaagatcctgcctgttggtggcatcaaggagaagaccattgcggccaagcgcgcaggggtgacgtgcatcgtcctgccagccgagaacaagaaggacttctacgacctggcagccttcatcaccgagggcctggaggtgcacttcgtggaacactaccgggagatcttcgacatcgccttcccggacgagcaggcagaggcgctggccgtggaacggtgacggccaccccgggactgcaggcggcggatgtcaggccctgtctgggccagaactgagcgctgtggggagcgcgcccggacctggcagtggagccaccgagcgagcagctcggtccagtgacccagatcccagggacctcagtcggcttaatcagagtgtggcatagaagctatttaatgattaaagtcatttgcagtacggcggcttcctcacctgctgccccgggaagggtgggcgggccacggcttttgattcacgaccaggcagcacccggagagggtgtggctcagagcgggcaccagacaggggactgcgggcccccgacacacccacacccacccacggacagcaggagagccagggcttctgtcaagctgttctttatttcagggagagggcaggggaggggctcagtctttcttggcagcagctttcctcatggcggccagtacgttgctcagctcctcccgcttcctcttggcgcggatgtgcgtccccaaccttttcttgataaatttgagggcccgtttgtccttggagaccttcagtaactccatggcgcgccgctcgtacggggcaaagccacacacctcccgaatcatgtcccgcacgaacttggtgtgtttggtcagaccccgcggcgtcggctgtgcctgggcttgctcacgttcttggtcactttgtggcccttgttgaggcccacggccatagggtagcgtagggccatggctgctgctctccagagacggccgtggcgganaggctggcgccgc

SEQ ID NO: 279362 - DNA, 2786 bp, Homo sapiens
  misc_feature (2773)..(2773): n is a, c, g, or t
gctaggagcaggctgggtttgaatcggccgaggcgggacatcattgccttgaaccctctctacagggagtcagtgctgcagatgatgcaggctggccagcgggtggtggacaaccccatctacctgagcgacatgggcgccgcgctcaccggggccgagtcccatgagctgcaggacgtcctggaagagaccaatattcctaagcggctgtacaaggccctctccctgctgaagaaggaatttgaactgagcaagctgcagcagcgcctggggcgggaggtggaggagaagatcaagcagacccaccgtaagtacctgctgcaggagcagctaaagatcatcaagaaggagctgggcctggagaaggacgacaaggatgccatcgaggagaagttccgggagcgcctgaaggagctcgtggtccccaagcacgtcatggatgttgtggacgaggagctgagcaagctgggcctgctggacaaccactcctcggagttcaatgtcacccgcaactacctagactggctcacgtccatcccttggggcaagtacagcaacgagaacctggacctggcgcgggcacaggcagtgctggaggaagaccactacggcatggaggacgtcaagaaacgcatcctggagttcattgccgttagccagctccgcggctccacccagggcaagatcctctgcttctatggcccccctggcgtgggtaagaccagcattgctcgctccatcgcccgcgccctgaaccgagagtacttccgcttcagcgtcgggggcatgactgacgtggctgagatcaagggccacaggcggacctacgtgggcgccatgcccgggaagatcatccagtgtttgaagaagaccaagacggagaaccccctgatcctcatcgacgaggtggacaagatcggccgaggctaccagggggacccgtcgtcggcactgctggagctgctggacccagagcagaatgccaacttcctggaccactacctggacgtgcccgtggacttgtccaaggtgctgttcatctgcacggccaacgtcacggacaccatccccgagccgctgcgagaccgtatggagatgatcaacgtgtcgggctacgtggcccaggagaagctggccattgcggagcgctacctggtgccccaggctcgcgccctgtgtggcttggatgagagcaaggccaagctgtcatcggacgtgctgacgctgctcatcaagcagtactgccgcgagagcggtgtccgcaacctgcagaagcaagtggagaaggtgttacggaaatcggcctacaagattgtcagcggcgaggccgagtccgtggaggtgacgcccgagaacctgcaggacttcgtggggaagcccgtgttcaccgtggagcgcatgtatgacgtgacaccgcccggcgtggtcatggggctggcctggaccgcaatgggaggctccacgctgtttgtggagacatccctgagacggccacaggacaaggatgccaagggtgacaaggatggcagcctggaggtgacaggccagctgggggaggtgatgaaggagagcgcccgcatagcctacaccttcgccagagccttcctcatgcagcacgcccccgccaatgactacctggtgacctcacacatccacctgcatgtgcccgagggcgccacccccaaggacggcccaagcgcaggctgcaccatcgtcacggccctgctgtccctggccatgggcaggcctgtccggcagaatctggccatgactggcgaagtctccctcacgggcaagatcctgcctgttggtggcatcaaggagaagaccattgcggccaagcgcgcaggggtgacgtgcatcgtcctgccagccgagaacaagaaggacttctacgacctggcagccttcatcaccgagggcctggaggtgcacttcgtggaacactaccgggagatcttcgacatcgccttcccggacgagcaggcagaggcgctggccgtggaacggtgacggccaccccgggactgcaggcggcggatgtcaggccctgtctgggccagaactgagcgctgtggggagcgcgcccggacctggcagtggagccaccgagcgagcagctcggtccagtgacccagatcccagggacctcagtcggcttaatcagagtgtggcatagaagctatttaatgattaaagtcatttgcagtacggcggcttcctcacctgctgccccgggaagggtgggcgggccacggcttttgattcacgaccaggcagcacccggagagggtgtggctcagagcgggcaccagacaggggactgcgggcccccgacacacccacacccacccacggacagcaggagagccagggcttctgtcaagctgttctttatttcagggagagggcaggggaggggctcagtctttcttggcagcagctttcctcatggcggccagtacgttgctcagctcctcccgcttcctcttggcgcggatgtgcgtccccaaccttttcttgataaatttgagggcccgtttgtccttggagaccttcagtaactccatggcgcgccgctcgtacggggcaaagccacacacctcccgaatcatgtcccgcacgaacttggtgtgtttggtcagaccccgcggcgtcggctgtgcctgggcttgctcacgttcttggtcactttgtggcccttgttgaggcccacggccatagggtagcgtagggccatggctgctgctctccagagacggccgtggcgganaggctggcgccgc

SEQ ID NO: 279363 - DNA, 2714 bp, Homo sapiens
cgaactccgccccctcttctccgcgtaggcccagctccctgaagcggctgtttcgagccacgcgcccatcgggtaccgaggcacgcgccgggcgtcacgtgcgtttcgcggcgagcggaaatgacgcgagttgtgtgagccgccagtatggccgggctatggcggcgagcactggctacgtgcgactgtggggagcggcgcggtgctgggtgctgcggcggccgatgctggccgccgccggggggcgggttcccactgcagcaggagcgtggttgctccgaggccagcggacctgcgacgcctctcctccttgggcactgtggggccgaggcccggcaattgggggccaatggcgggggttttgggaagcgagcagccgcggcggaggcgcattctcggggggcgaggacgcctccgagggcggcgcggaggaaggagccggcggcgcggggggcagcgcgggcgccggggaaggcccggtcataacggcgctcacgcccatgacgatccccgatgtgtttccgcacctgccgctcatcgccatcacccgcaacccggtgttcccgcgctttatcaagattatcgaggttaaaaataagaagttggttgagctgctgagaaggaaagttcgtctcgcccagccttatgtcggcgtctttctaaagagagatgacagcaatgagtcggatgtggtcgagagcctggatgaaatctaccacacggggacgtttgcccagatccatgagatgcaggaccttggggacaagctgcgcatgatcgtcatgggacacagaagagtccatatcagcagacagctggaggtggagcccgaggagccggaggcggagaacaagcacaagccccgcaggaagtcaaagcggggcaagaaggaggcggaggacgagctgagcgccaggcacccggcggagctggcgatggagcccacccctgagctcccggctgaggtgctcatggtggaggtagagaacgttgtccacgaggacttccaggtcacggaggaggtgaaagccctgactgcagagatcgtgaagaccatccgggacatcattgccttgaaccctctctacagggagtcagtgctgcagatgatgcaggctggccagcgggtggtggacaaccccatctacctgagcgacatgggcgccgcgctcaccggggccgagtcccatgagctgcaggacgtcctggaagagaccaatattcctaagcggctgtacaaggccctctccctgctgaagaaggaatttgaactgagcaagctgcagcagcgcctggggcgggaggtggaggagaagatcaagcagacccaccgtaagtacctgctgcaggagcagctaaagatcatcaagaaggagctgggcctggagaaggacgacaaggatgccatcgaggagaagttccgggagcgcctgaaggagctcgtggtccccaagcacgtcatggatgttgtggacgaggagctgagcaagctgggcctgctggacaaccactcctcggagttcaatgtcacccgcaactacctagactggctcacgtccatcccttggggcaagtacagcaacgagaacctggacctggcgcgggcacaggcagtgctggaggaagaccactacggcatggaggacgtcaagaaacgcatcctggagttcattgccgttagccagctccgcggctccacccagggcaagatcctctgcttctatggcccccctggcgtgggtaagaccagcattgctcgctccatcgcccgcgccctgaaccgagagtacttccgcttcagcgtcgggggcatgactgacgtggctgagatcaagggccacaggcggacctacgtgggcgccatgcccgggaagatcatccagtgtttgaagaagaccaagacggagaaccccctgatcctcatcgacgaggtggacaagatcggccgaggctaccagggggacccgtcgtcggcactgctggagctgctggacccagagcagaatgccaacttcctggaccactacctggacgtgcccgtggacttgtccaaggtgctgttcatctgcacggccaacgtcacggacaccatccccgagccgctgcgagaccgtatggagatgatcaacgtgtcgggctacgtggcccaggagaagctggccattgcggagcgctacctggtgccccaggctcgcgccctgtgtggcttggatgagagcaaggccaagctgtcatcggacgtgctgacgctgctcatcaagcagtactgccgcgagagcggtgtccgcaacctgcagaagcaagtggagaaggtgttacggaaatcggcctacaagattgtcagcggcgaggccgagtccgtggaggtgacgcccgagaacctgcaggacttcgtggggaagcccgtgttcaccgtggagcgcatgtatgacgtgacaccgcccggcgtggtcatggggctggcctggaccgcaatgggtgagcgtggtggcgggagaagaccccaaagccattcccatttctacccgagaacaagcaggtcccaccttgtacacctgtgcagtgggcctcaggtggctctgaacggcctctggcggggggtggtgtgctgggagcccagggggtctgggctgagggaggggaaggctgtgacacatgggggtggcagcacaccatgggccttatggatttgggtgccactttgataggcttac

SEQ ID NO: 279364 - DNA, 2359 bp, Homo sapiens
cgaactccgccccctcttctccgcgtaggcccagctccctgaagcggctgtttcgagccacgcgcccatcgggtaccgaggcacgcgccgggcgtcacgtgcgtttcgcggcgagcggaaatgacgcgagttgtgtgagccgccagtatggccgggctatggcggcgagcactggctacgtgcgactgtggggagcggcgcggtgctgggtgctgcggcggccgatgctggccgccgccggggggcgggttcccactgcagcaggagcgtggttgctccgaggccagcggacctgcgacgcctctcctccttgggcactgtggggccgaggcccggcaattgggggccaatggcgggggttttgggaagcgagcagccgcggcggaggcgcattctcggggggcgaggacgcctccgagggcggcgcggaggaaggagccggcggcgcggggggcagcgcgggcgccggggaaggcccggtcataacggcgctcacgcccatgacgatccccgatgtgtttccgcacctgccgctcatcgccatcacccgcaacccggtgttcccgcgctttatcaagattatcgaggttaaaaataagaagttggttgagctgctgagaaggaaagttcgtctcgcccagccttatgtcggcgtctttctaaagagagatgacagcaatgagtcggatgtggtcgagagcctggatgaaatctaccacacggggacgtttgcccagatccatgagatgcaggaccttggggacaagctgcgcatgatcgtcatgggacacagaagagtccatatcagcagacagctggaggtggagcccgaggagccggaggcggagaacaagcacaagccccgcaggaagtcaaagcggggcaagaaggaggcggaggacgagctgagcgccaggcacccggcggagctggcgatggagcccacccctgagctcccggctgaggtgctcatggtggaggtagagaacgttgtccacgaggacttccaggtcacggaggaggtgaaagccctgactgcagagatcgtgaagaccatccgggacatcattgccttgaaccctctctacagggagtcagtgctgcagatgatgcaggctggccagcgggtggtggacaaccccatctacctgagcgacatgggcgccgcgctcaccggggccgagtcccatgagctgcaggacgtcctggaagagaccaatattcctaagcggctgtacaaggccctctccctgctgaagaaggaatttgaactgagcaagctgcagcagcgcctggggcgggaggtggaggagaagatcaagcagacccaccgtaagtacctgctgcaggagcagctaaagatcatcaagaaggagctgggcctggagaaggacgacaaggatgccatcgaggagaagttccgggagcgcctgaaggagctcgtggtccccaagcacgtcatggatgttgtggacgaggagctgagcaagctgggcctgctggacaaccactcctcggagttcaatgtcacccgcaactacctagactggctcacgtccatcccttggggcaagtacagcaacgagaacctggacctggcgcgggcacaggcagtgctggaggaagaccactacggcatggaggacgtcaagaaacgcatcctggagttcattgccgttagccagctccgcggctccacccagggcaagatcctctgcttctatggcccccctggcgtgggtaagaccagcattgctcgctccatcgcccgcgccctgaaccgagagtacttccgcttcagcgtcgggggcatgactgacgtggctgagatcaagggccacaggcggacctacgtgggcgccatgcccgggaagatcatccagtgtttgaagaagaccaagacggagaaccccctgatcctcatcgacgaggtggacaagatcggccgaggctaccagggggacccgtcgtcggcactgctggagctgctggacccagagcagaatgccaacttcctggaccactacctggacgtgcccgtggacttgtccaaggtgctgttcatctgcacggccaacgtcacggacaccatccccgagccgctgcgagaccgtatggagatgatcaacgtgtcgggctacgtggcccaggagaagctggccattgcggagcgctacctggtgccccaggctcgcgccctgtgtggcttggatgagagcaaggccaagctgtcatcggacgtgctgacgctgctcatcaagcagtactgccgcgagagcggtgtccgcaacctgcagaagcaagtggagatggcaggcctctggatttgggcagcctctggattggcagctctgatttt

SEQ ID NO: 279365 - DNA, 1330 bp, Homo sapiens
  misc_feature (1249)..(1249): n is a, c, g, or t
  misc_feature (1262)..(1262): n is a, c, g, or t
cgaactccgccccctcttctccgcgtaggcccagctccctgaagcggctgtttcgagccacgcgcccatcgggtaccgaggcacgcgccgggcgtcacgtgcgtttcgcggcgagcggaaatgacgcgagttgtgtgagccgccagtatggccgggctatggcggcgagcactggctacgtgcgactgtggggagcggcgcggtgctgggtgctgcggcggccgatgctggccgccgccggggggcgggttcccactgcagcaggagcgtggttgctccgaggccagcggacctgcgacgcctctcctccttgggcactgtggggccgaggcccggcaattgggggccaatggcgggggttttgggaagcgagcagccgcggcggaggcgcattctcggggggcgaggacgcctccgagggcggcgcggaggaaggagccggcggcgcggggggcagcgcgggcgccggggaaggcccggtcataacggcgctcacgcccatgacgatccccgatgtgtttccgcacctgccgctcatcgccatcacccgcaacccggtgttcccgcgctttatcaagattatcgaggttaaaaataagaagttggttgagctgctgagaaggaaagttcgtctcgcccagccttatgtcggcgtctttctaaagagagatgacagcaatgagtcggatgtggtcgagagcctggatgaaatctaccacacggggacgtttgcccagatccatgagatgcaggaccttggggacaagctgcgcatgatcgtcatgggacacagaagagtccatatcagcagacagctggaggtggagcccgaggagccggaggcggagaacaagcacaagccccgcaggaagtcaaagcggggcaagaaggaggcggaggacgagctgagcgccaggcacccggcggagctggcgatggagcccacccctgagctcccggctgaggtgctcatggtggaggtagagaacgttgtccacgaggacttccaggtcacggaggaggtgaaagccctgactgcagagatcgtgaagaccatccgggacatcattgccttgaaccctctctacagggagtcagtgctgcagatgatgcaggctggccagcgggtggtggacaaccccatctacctgagcgacatgggcgccgcgctcaccggggccgagtcccatgagctgcaggacgtcctggaagagaccaatattcctaagcggctgaaagcctctcctgngagaagattgacngagcagtgaaggccgggcggggggggggaaaacacagcaccccggtctgtgggcctcctctctccggc

SEQ ID NO: 279366 - DNA, 1050 bp, Homo sapiens
cgaactccgccccctcttctccgcgtaggcccagctccctgaagcggctgtttcgagccacgcgcccatcgggtaccgaggcacgcgccgggcgtcacgtgcgtttcgcggcgagcggaaatgacgcgagttgtgtgagccgccagtatggccgggctatggcggcgagcactggctacgtgcgactgtggggagcggcgcggtgctgggtgctgcggcggccgatgctggccgccgccggggggcgggttcccactgcagcaggagcgtggttgctccgaggccagcggacctgcgacgcctctcctccttgggcactgtggggccgaggcccggcaattgggggccaatggcgggggttttgggaagcgagcagccgcggcggaggcgcattctcggggggcgaggacgcctccgagggcggcgcggaggaaggagccggcggcgcggggggcagcgcgggcgccggggaaggcccggtcataacggcgctcacgcccatgacgatccccgatgtgtttccgcacctgccgctcatcgccatcacccgcaacccggtgttcccgcgctttatcaagattatcgaggttaaaaataagaagttggttgagctgctgagaaggaaagttcgtctcgcccagccttatgtcggcgtctttctaaagagagatgacagcaatgagtcggatgtggtcgagagcctggatgaaatctaccacacggggacgtttgcccagatccatgagatgcaggaccttggggacaagctgcgcatgatcgtcatgggacacagaagagtccatatcagcagacagctggaggtggagcccgaggagccggaggcggagaacaagcacaagccccgcaggaagtcaaagcggggcaagaaggaggcggaggacgagctgagcgccaggcacccggcggagctggcgatggagcccacccctgagctcccggctgaggtgctcatggtggaggtagagaacgttgtccacgaggacttccaggtcacggaggaggtgaaatgagtccgtgcgtcacgcaggg

SEQ ID NO: 279367 - DNA, 1555 bp, Homo sapiens
gtcccccgcgcgggcgcgggtggatctctcgggctctgacttgttttcgggtcaccttcaggcttcagccaggcacctgacgcctctttcccctcacggtgccaggccgggccgaactacatttcccaggaggctccgcggccaggtgcaaacagcgccgtgctgactacatttcccagacagccttgcggcggcccgggccttaaagcgtccatttcccagcggccctccgctgcgagaccgcagcccttctctggagtctcagagccgcaagacaccacgactcccagaggaccttgcgtcgggcaagaaagactacaccttccagaggcctctgcggcgccgcgacaggaagcggcgggcgagccgagtgtccttgcgcgtggatccgagcgaccatggtggcccgggtgtggtcgctgatgcgagcccttggcgttcagttcgcggtgtcagcctccgcctccgagcctcagttgtcttctctgtgaggtgggaatgccggtgaatcctgccgctggcgtggatgagaagtgaatgcgtgctcggagctgcgagtgacagcgggcaggaggcgcccagggacacttggtttctccagggctggaaggcttctagaaggttcctcatcaagggaagtgtggctgggggcgccgtctacctggtgtacgaccaggagctgctggggcccagcgacaagagccaggcagccctacagaaggctggggaggtggtcccccccgccatgtaccagttcagccagtacgtgtgtcagcagacaggcctgcagataccccagctcccagcccctccaaagatttactttcccatccgtgactcctggaatgcaggagggatctaaaagggaaaggaggccgagcacagtggctcacgcctgtaatcccagcactttgggaggctgaggtgggcggatcatctgaagtcaggagttcgagaccagcctgggcaacatggtgaaaccccatctctactaaaaatacaaaaattaaccgtgcgtggtggtgcacacctgtaatcccagctgctgcttgagaggctgaagcaggagaattgcttgaacccaggaggcagaggttgcagtgagccgaggttgcaccactgcactccagcctgggcgacagggcgagactccatctcaaaaaaataaaatacaaaaattagcctggtatggtggcgcacttgtagtcccagctacttgggaggctgaggcaagagaatcgcttgaacccaggaggcgaaggttgcagtgagccgagattgcactactgcactccagcctgggagacagagcatcatgacggtgatgtcagctctgtcggtggccccctccaaggcccgcgagtactccaaggagggctgggagtatgtgaaggcgcgcaccaagtagcgagtcagcaggggccgcctgccccggccagaacgggcagggctgccactgacctgaagactccggactgggaccccactccgagggcagctcccggccttgccggcccaataaaggacttcagaagtgaaaaaaaaaaaaaaaaaa

SEQ ID NO: 279368 - DNA, 800 bp, Homo sapiens
aattttttatttttatgggctttagcgatggaggtaggattggtgctgtgggtgaaagagtatgatggggggcgagttgtgtgagccgccagtatggccgggctatggcggcgagcactggctacgtgcgactgtggggagcggcgcggtgctgggtgctgcggcggccgatgctggccgccgccggggggcgggttcccactgcagcaggagcgtggttgctccgaggccagcggacctgcgacgcctctcctccttgggcactgtggggccgaggcccggcaattgggggccaatggcgggggttttgggaagcgagcagccgcggcggaggcgcattctcggggggcgaggacgcctccgagggcggcgcggaggaaggagccggcggcgcggggggcagcgcgggcgccggggaaggcccggtcataacggcgctcacgcccatgacgatccccgatgtgtttccgcacctgccgctcatcgccatcacccgcaacccggtgttcccgcgctttatcaagattatcgaggaggtttctgggcccaggatggtgttcatcaggcctggtcccctccgttctgcagagcgacagatgccccttgctcccggtgcctgagcagagagatgattcttctaagagagttcagacggcccacgtggagctagccaggagagttaaatgagtggctgcagatagtatttgggagactggcaggtggttctcattgtatttctggttgatgatgcattgtaaatcataaaaatggatcctgccaaggccaggaggcagatgcca

SEQ ID NO: 279369 - DNA, 4033 bp, Homo sapiens
tccgccggctcacgtgaccgtctttgggccggcgcgaaccatggccggcatggtggacttccaggatgaggagcaggtcaagtcctttttggagaacatggaggtggagtgcaactaccactgctaccacgagaaggacccggacggttgctatcggctggtggactatttggaagggatccggaagaattttgatgaggctgccaaggtgttgaagtttaactgtgaagagaaccagcacagtgatagctgctacaaactgggggcctactatgtgactggaaaaggtggtctgacccaggacctgaaagctgccgccaggtgctttttgatggcgtgtgagaagcctggaaagaagtcaatagcagcatgtcacaacgttggcctcctggcacatgatggacaggttaatgaggatggccagcctgacttgggaaaggccagggactactacacaagggcctgtgatggtggctatacttccagttgcttcaacctcagtgccatgttcctgcagggtgccccaggctttcccaaggacatggacctggcatgtaaatactccatgaaagcctgtgacctgggtcatatctgggcctgtgccaatgccagtcgcatgtacaagctgggggatggtgttgataaggatgaggccaaggccgaggtgctaaaaaatcgagcccagcagctacacaaagaacagcagaaaggtgtccaacccttaacatttgggtaatgtggtccaccctccctcccaggcaacaaactgcttgaggctggcagctcctgtttctgaagactgatgcagcccttgaaggtcaacctgctggagcaaaaaaacttgggacttgaatttgtagctccatttacatggatccattgccccagctactggagtatagcctacaatgtttatttcagtcaatattcctttatctgggtgttctgtacaatgtttattacagtcaatattccttcatctggatgttctgtgaagatagccatgtttatgggggtcttagttttcaaactctggcaactctgtgaaaaataggagcaaactagagagccctggagattggtagtagggaagggaggatagcaggaagtttgaaaaattagcagccccggggcctaaaggaatcagctgtcatcattttcatcattattattttggttaggatggcttgaaaatcagaacgtatcttggtttacgtaattgaggtcttaaagaactaagaacagttaaatagtcacaactaccaccctctgacttacataatcattggtgtgggcttcgttttgcctttagagtcacatctttcagtaaattcacagagatcaagagggacgtgcaacatacagcttaaaggctgttatgcttcagggttgctgaagaagatgaaacatcagcctgccatcgtctagaagagacattggcagttaaaaattagcacctccagtgtagtcgcctggcactgcccatcatgctgagggagcagattcttcccaaggcagcttcagctaggagtttgtaagcaaggactttgtgacacatttgtcccctggaactgagcctttttaactgtccctgtgaatgaacaattttgagtgacctacggtttgtgttaattagtgttctttccagattccaggtaccgtagagagtatgttctttgtggtggttgtgccttttaagaacatttgtggccgggcacggtggctcacgcctgtaaccccagcactttgggtggccaaggcgggtggatcacgagatcaggagatcatgaccatcctggctaacacggggaaaccccatctctactaaaaaatacaaaaaattagccgggcgtggtggcaggcgcctgtagtcccagctactggggaggctgaggcaggagaattgcttgaacccgggaggcggagcttgcagtgagctgagattgcgccactgccctccagcctgggcgatagagtgagactccgtctcaaaaaaaaaaaaaaatttgctttttctgttgtctccccagcttgtcaccagggggcgagcttgccatttccctgctggtaacaataccattctgtcaccatctactgttttaggcttccgttttgcagccgtcctgaaaggaaggcttgctgtgtaaatgaaggcttgtgagcacagcagccagcctctcaagttgatagaggacagggacttccccaagtgcacagaggagatttcaaaagacatcaaattcactttttaaaaatgtaaagtagcttttggtgtgcttaaactaggtcaggccaggcgtggtggctcatgcctgtaatcctagcattttgggaggccaaggcaggtggatcacttgaggtcaggagttcgagatcagcctggccaacatgacgaaacccctttctctactaaaaatataaaaattagctgggcgtggtgatgcatacctgtaatcccagctacttcggaggctgaggcaggagaatcacttgaacctgggaggcagaggttgcagtaaactgagactgtgccactgcactccagcctgggcaacacagcaagactctgtctcaaaaacaaaaacaaaactaggccaggtgcagtggctcacgcttgcaatcccagcactttgggaggccgaggcaggcggatcacgaggtcaggatttcgagaacagcctggccaacatagtgaaacctcgtatctactaaaaatacaaaaattatctgggtgtggtggtgggcacctgttgtcccagctattcaggaggctgaggcaggagaatcgcttgaacccaggaggtggaggttgcagtgagccaagaccatgccattgcactccagccaggtaacagagtgagactctgtctcaaaaaaacacacacacacacacacacaaaactgtaggtcaaaaaacatgaaaatatgttcaacatcactaattagggaaatgtaaatcaaaaaccacaatgaactcttaaaattcaacagtaagaaaacaacctgattaaaaacaggccaaaacccttaacatatctcagcaaagaagatagacaggtggcaaataagcatatgaaaagatgttccatataacatgtcatcaggaaaatgcaagttagaacaacagaccactatacaactattagaatggccaaaatccaaagcaccgacagcatgaaatgctgggaaagttggagcaaccagaactcttattccttgctggtgggaacgcaagatggcacagccactttggaagacagttaagcagtttcttacaaaaactaggtaagctcttaccatgtgatccagcaatcttgctctttagtatttacctgaaggaactgaaaacatgtccacacaaaaaccagcacatggatgtttatagcagctttatctataattgccaaaactcaacccaaaatgtctttcagtaggtaaatgggtaaataaattgtggtgcatgtagtcattattcagtgcttaaatcaagctatgacaaattatgagttatcaagctataagaagtcacagaggaacttaaatgaatgctactaaatgaagccagtctgaaaaggcttcatattaaatgatgccaactatatgacactgggatgtattctggaaaaggcaaaactatggagacagtaaaaagcagtgggtgggggaggggagggaggaataattggagcacagaagatttttagggcagcgaaactactctgtatgatactataattataaatacctgtcattgtacatatgtccaaccccctaaaatgtacaacaccaagagtgaaccctaatgtaaactgtggactttgagtgataatgatgtgtcagtgtaggttcatcaattactgcaaatgtacctctttggtgggagatgttgaaaatggtggagactatgcatgtgtggggacaacaactatatgggaaatctctgtaccctctcaattttgctgtaaacctaaaattgctctaaaatataaagtctattaaaaccacaatgatattgcctcatatcccattagga

SEQ ID NO: 279370 - DNA, 3979 bp, Homo sapiens
tccgccggctcacgtgaccgtctttgggccggcgcgaaccatggccggcatggtggacttccaggatgaggagcaggtcaagtcctttttggagaacatggaggtggagtgcaactaccactgctaccacgagaaggacccggacggttgctatcggctggtggactatttggaagggatccggaagaattttgatgaggctgccaaggtgttgaagtttaactgtgaagagaaccagcacagtgatagctgctacaaactgggggcctactatgtgactggaaaaggtggtctgacccaggacctgaaagctgccgccaggtgctttttgatggcgtgtgagaagcctggaaagaagtcaatagcagcatgtcacaacgttggcctcctggcacatgatggacaggttaatgaggatggccagcctgacttgggaaaggccagggactactacacaagggcctgtgatggtggctatacttccagttgcttcaacctcagtgccatgttcctgcagggtgccccaggctttcccaaggacatggacctggcatgtaaatactccatgaaagcctgtgacctgggtcatatctgggcctgtgccaatgccagtcgcatgtacaagctgggggatggtgttgataaggatgaggccaaggccgaggtgctaaaaaatcgagcccagcagctacacaaagaacagcagaaaggtgtccaacccttaacatttgggtaatgtggtccaccctccctcccaggcaacaaactgcttgaggctggcagctcctgtttctgaagactgatgcagcccttgaaggtcaacctgctggagcaaaaaaacttgggacttgaatttgtagctccatttacatggatccattgccccagctactggagtatagcctacaatgtttatttcagtcaatattcctttatctgggtgttctgtacaatgtttattacagtcaatattccttcatctggatgttctgtgaagatagccatgtttatgggggtcttagttttcaaactctggcaactctgtgaaaaataggagcaaactagagagccctggagattggtagtagggaagggaggatagcaggaagtttgaaaaattagcagccccggggcctaaaggaatcagctgtcatcattttcatcattattattttggttaggatggcttgaaaatcagaacgtatcttggtttacgtaattgaggtcttaaagaactaagaacagttaaatagtcacaactaccaccctctgacttacataatcattggtgtgggcttcgttttgcctttagagtcacatctttcagtaaattcacagagatcaagagggacgtgcaacatacagcttaaaggctgttatgcttcagggttgctgaagaagatgaaacatcagcctgccatcgtctagaagagacattggcagttaagattcttcccaaggcagcttcagctaggagtttgtaagcaaggactttgtgacacatttgtcccctggaactgagcctttttaactgtccctgtgaatgaacaattttgagtgacctacggtttgtgttaattagtgttctttccagattccaggtaccgtagagagtatgttctttgtggtggttgtgccttttaagaacatttgtggccgggcacggtggctcacgcctgtaaccccagcactttgggtggccaaggcgggtggatcacgagatcaggagatcatgaccatcctggctaacacggggaaaccccatctctactaaaaaatacaaaaaattagccgggcgtggtggcaggcgcctgtagtcccagctactggggaggctgaggcaggagaattgcttgaacccgggaggcggagcttgcagtgagctgagattgcgccactgccctccagcctgggcgatagagtgagactccgtctcaaaaaaaaaaaaaaatttgctttttctgttgtctccccagcttgtcaccagggggcgagcttgccatttccctgctggtaacaataccattctgtcaccatctactgttttaggcttccgttttgcagccgtcctgaaaggaaggcttgctgtgtaaatgaaggcttgtgagcacagcagccagcctctcaagttgatagaggacagggacttccccaagtgcacagaggagatttcaaaagacatcaaattcactttttaaaaatgtaaagtagcttttggtgtgcttaaactaggtcaggccaggcgtggtggctcatgcctgtaatcctagcattttgggaggccaaggcaggtggatcacttgaggtcaggagttcgagatcagcctggccaacatgacgaaacccctttctctactaaaaatataaaaattagctgggcgtggtgatgcatacctgtaatcccagctacttcggaggctgaggcaggagaatcacttgaacctgggaggcagaggttgcagtaaactgagactgtgccactgcactccagcctgggcaacacagcaagactctgtctcaaaaacaaaaacaaaactaggccaggtgcagtggctcacgcttgcaatcccagcactttgggaggccgaggcaggcggatcacgaggtcaggatttcgagaacagcctggccaacatagtgaaacctcgtatctactaaaaatacaaaaattatctgggtgtggtggtgggcacctgttgtcccagctattcaggaggctgaggcaggagaatcgcttgaacccaggaggtggaggttgcagtgagccaagaccatgccattgcactccagccaggtaacagagtgagactctgtctcaaaaaaacacacacacacacacacacaaaactgtaggtcaaaaaacatgaaaatatgttcaacatcactaattagggaaatgtaaatcaaaaaccacaatgaactcttaaaattcaacagtaagaaaacaacctgattaaaaacaggccaaaacccttaacatatctcagcaaagaagatagacaggtggcaaataagcatatgaaaagatgttccatataacatgtcatcaggaaaatgcaagttagaacaacagaccactatacaactattagaatggccaaaatccaaagcaccgacagcatgaaatgctgggaaagttggagcaaccagaactcttattccttgctggtgggaacgcaagatggcacagccactttggaagacagttaagcagtttcttacaaaaactaggtaagctcttaccatgtgatccagcaatcttgctctttagtatttacctgaaggaactgaaaacatgtccacacaaaaaccagcacatggatgtttatagcagctttatctataattgccaaaactcaacccaaaatgtctttcagtaggtaaatgggtaaataaattgtggtgcatgtagtcattattcagtgcttaaatcaagctatgacaaattatgagttatcaagctataagaagtcacagaggaacttaaatgaatgctactaaatgaagccagtctgaaaaggcttcatattaaatgatgccaactatatgacactgggatgtattctggaaaaggcaaaactatggagacagtaaaaagcagtgggtgggggaggggagggaggaataattggagcacagaagatttttagggcagcgaaactactctgtatgatactataattataaatacctgtcattgtacatatgtccaaccccctaaaatgtacaacaccaagagtgaaccctaatgtaaactgtggactttgagtgataatgatgtgtcagtgtaggttcatcaattactgcaaatgtacctctttggtgggagatgttgaaaatggtggagactatgcatgtgtggggacaacaactatatgggaaatctctgtaccctctcaattttgctgtaaacctaaaattgctctaaaatataaagtctattaaaaccacaatgatattgcctcatatcccattagga

SEQ ID NO: 279371 - DNA, 3979 bp, Homo sapiens
tccgccggctcacgtgaccgtctttgggccggcgcgaaccatggccggcatggtggacttccaggatgaggagcaggtcaagtcctttttggagaacatggaggtggagtgcaactaccactgctaccacgagaaggacccggacggttgctatcggctggtggactatttggaagggatccggaagaattttgatgaggctgccaaggtgttgaagtttaactgtgaagagaaccagcacagtgatagctgctacaaactgggggcctactatgtgactggaaaaggtggtctgacccaggacctgaaagctgccgccaggtgctttttgatggcgtgtgagaagcctggaaagaagtcaatagcagcatgtcacaacgttggcctcctggcacatgatggacaggttaatgaggatggccagcctgacttgggaaaggccagggactactacacaagggcctgtgatggtggctatacttccagttgcttcaacctcagtgccatgttcctgcagggtgccccaggctttcccaaggacatggacctggcatgtaaatactccatgaaagcctgtgacctgggtcatatctgggcctgtgccaatgccagtcgcatgtacaagctgggggatggtgttgataaggatgaggccaaggccgaggtgctaaaaaatcgagcccagcagctacacaaagaacagcagaaaggtgtccaacccttaacatttgggtaatgtggtccaccctccctcccaggcaacaaactgcttgaggctggcagctcctgtttctgaagactgatgcagcccttgaaggtcaacctgctggagcaaaaaaacttgggacttgaatttgtagctccatttacatggatccattgccccagctactggagtatagcctacaatgtttatttcagtcaatattcctttatctgggtgttctgtacaatgtttattacagtcaatattccttcatctggatgttctgtgaagatagccatgtttatgggggtcttagttttcaaactctggcaactctgtgaaaaataggagcaaactagagagccctggagattggtagtagggaagggaggatagcaggaagtttgaaaaattagcagccccggggcctaaaggaatcagctgtcatcattttcatcattattattttggttaggatggcttgattaaatagtcacaactaccaccctctgacttacataatcattggtgtgggcttcgttttgcctttagagtcacatctttcagtaaattcacagagatcaagagggacgtgcaacatacagcttaaaggctgttatgcttcagggttgctgaagaagatgaaacatcagcctgccatcgtctagaagagacattggcagttaaaaattagcacctccagtgtagtcgcctggcactgcccatcatgctgagggagcagattcttcccaaggcagcttcagctaggagtttgtaagcaaggactttgtgacacatttgtcccctggaactgagcctttttaactgtccctgtgaatgaacaattttgagtgacctacggtttgtgttaattagtgttctttccagattccaggtaccgtagagagtatgttctttgtggtggttgtgccttttaagaacatttgtggccgggcacggtggctcacgcctgtaaccccagcactttgggtggccaaggcgggtggatcacgagatcaggagatcatgaccatcctggctaacacggggaaaccccatctctactaaaaaatacaaaaaattagccgggcgtggtggcaggcgcctgtagtcccagctactggggaggctgaggcaggagaattgcttgaacccgggaggcggagcttgcagtgagctgagattgcgccactgccctccagcctgggcgatagagtgagactccgtctcaaaaaaaaaaaaaaatttgctttttctgttgtctccccagcttgtcaccagggggcgagcttgccatttccctgctggtaacaataccattctgtcaccatctactgttttaggcttccgttttgcagccgtcctgaaaggaaggcttgctgtgtaaatgaaggcttgtgagcacagcagccagcctctcaagttgatagaggacagggacttccccaagtgcacagaggagatttcaaaagacatcaaattcactttttaaaaatgtaaagtagcttttggtgtgcttaaactaggtcaggccaggcgtggtggctcatgcctgtaatcctagcattttgggaggccaaggcaggtggatcacttgaggtcaggagttcgagatcagcctggccaacatgacgaaacccctttctctactaaaaatataaaaattagctgggcgtggtgatgcatacctgtaatcccagctacttcggaggctgaggcaggagaatcacttgaacctgggaggcagaggttgcagtaaactgagactgtgccactgcactccagcctgggcaacacagcaagactctgtctcaaaaacaaaaacaaaactaggccaggtgcagtggctcacgcttgcaatcccagcactttgggaggccgaggcaggcggatcacgaggtcaggatttcgagaacagcctggccaacatagtgaaacctcgtatctactaaaaatacaaaaattatctgggtgtggtggtgggcacctgttgtcccagctattcaggaggctgaggcaggagaatcgcttgaacccaggaggtggaggttgcagtgagccaagaccatgccattgcactccagccaggtaacagagtgagactctgtctcaaaaaaacacacacacacacacacacaaaactgtaggtcaaaaaacatgaaaatatgttcaacatcactaattagggaaatgtaaatcaaaaaccacaatgaactcttaaaattcaacagtaagaaaacaacctgattaaaaacaggccaaaacccttaacatatctcagcaaagaagatagacaggtggcaaataagcatatgaaaagatgttccatataacatgtcatcaggaaaatgcaagttagaacaacagaccactatacaactattagaatggccaaaatccaaagcaccgacagcatgaaatgctgggaaagttggagcaaccagaactcttattccttgctggtgggaacgcaagatggcacagccactttggaagacagttaagcagtttcttacaaaaactaggtaagctcttaccatgtgatccagcaatcttgctctttagtatttacctgaaggaactgaaaacatgtccacacaaaaaccagcacatggatgtttatagcagctttatctataattgccaaaactcaacccaaaatgtctttcagtaggtaaatgggtaaataaattgtggtgcatgtagtcattattcagtgcttaaatcaagctatgacaaattatgagttatcaagctataagaagtcacagaggaacttaaatgaatgctactaaatgaagccagtctgaaaaggcttcatattaaatgatgccaactatatgacactgggatgtattctggaaaaggcaaaactatggagacagtaaaaagcagtgggtgggggaggggagggaggaataattggagcacagaagatttttagggcagcgaaactactctgtatgatactataattataaatacctgtcattgtacatatgtccaaccccctaaaatgtacaacaccaagagtgaaccctaatgtaaactgtggactttgagtgataatgatgtgtcagtgtaggttcatcaattactgcaaatgtacctctttggtgggagatgttgaaaatggtggagactatgcatgtgtggggacaacaactatatgggaaatctctgtaccctctcaattttgctgtaaacctaaaattgctctaaaatataaagtctattaaaaccacaatgatattgcctcatatcccattagga

SEQ ID NO: 279372 - DNA, 1713 bp, Homo sapiens
tccgccggctcacgtgaccgtctttgggccggcgcgaaccatggccggcatggtggacttccaggatgaggagcaggtcaagtcctttttggagaacatggaggtggagtgcaactaccactgctaccacgagaaggacccggacggttgctatcggctggtggactatttggaagggatccggaagaattttgatgaggctgccaaggtgttgaagtttaactgtgaagagaaccagcacagtgatagctgctacaaactgggggcctactatgtgactggaaaaggtggtctgacccaggacctgaaagctgccgccaggtgctttttgatggcgtgtgagaagcctggaaagaagtcaatagcagcatgtcacaacgttggcctcctggcacatgatggacaggttaatgaggatggccagcctgacttgggaaaggccagggactactacacaagggcctgtgatggtggctatacttccagttgcttcaacctcagtgccatgttcctgcagggtgccccaggctttcccaaggacatggacctggcatgtaaatactccatgaaagcctgtgacctgggtcatatctgggcctgtgccaatgccagtcgcatgtacaagctgggggatggtgttgataaggatgaggccaaggccgaggtgctaaaaaatcgagcccagcagctacacaaagaacagcagaaaggtgtccaacccttaacatttgggtaatgtggtccaccctccctcccaggcaacaaactgcttgaggctggcagctcctgtttctgaagactgatgcagcccttgaaggtcaacctgctggagcaaaaaaacttgggacttgaatttgtagctccatttacatggatccattgccccagctactggagtatagcctacaatgtttatttcagtcaatattcctttatctgggtgttctgtacaatgtttattacagtcaatattccttcatctggatgttctgtgaagatagccatgtttatgggggtcttagttttcaaactctggcaactctgtgaaaaataggagcaaactagagagccctggagattggtagtagggaagggaggatagcaggaagtttgaaaaattagcagccccggggcctaaaggaatcagctgtcatcattttcatcattattattttggttaggatggcttgaaaatcagaacgtatcttggtttacgtaattgaggtcttaaagaactaagaacagttaaatagtcacaactaccaccctctgacttacataatcattggtgtgggcttcgttttgcctttagagtcacatctttcagtaaattcacagagatcaagagggacgtgcaacatacagcttaaaggctgttatgcttcagggttgctgaagaagatgaaacatcagcctgccatcgtctagaagagacattggcagttaaaaattagcacctccagtgtagtcgcctggcactgcccatcatgctgagggagcagattcttcccaaggcagcttcagctaggagtttgtaatgcaaatgtacctctttggtgggagatgttgaaaatggtggagactatgcatgtgtggggacaacaactatatgggaaatctctgtaccctctcaattttgctgtaaacctaaaattgctctaaaatataaagtctattaaaaccacaatgatattgcctcatatcccattagga

SEQ ID NO: 279373 - DNA, 752 bp, Homo sapiens
gacaggccctgccggggcagcagctgggaggaaggagagcatctcggggcctctgctgagccactggccatcctgcagcgagatgaggatgggcccaacattgacaacatgaccatggaagctgagaggccagaccctgagctcttcgaccccagcagctgtcctggagaatggctgagtgagccagactgcaccctggagagcgtcaggggcccacgggctcaggggctcccaccccgccgctcccaccagcatggtccaccccggggggccaccagcttcctccagcatgtcaccgggcaccactgatggtgattccacccctgcccatcactgggggctgcgctagctgggctggcattccctcccaacctgaactgctcctcagagccatctcctgaacccacaaattattcttacagaaagatagttatccagaaattctcattccccgtctgcggtgcggtgcgtgcctgcacacctctcctaaacacagcagggctttggagtctggcccatgctccttggccagaaggacagcaggaaagggggctgcaccccgctggccctgcgctcgcccttggccctgctgcctctgtctatttcaatatagaactgttcagcagtcctgcttcaagcctgctctcactgcctggggcttggactggccctggggggaatgggggctccaggctggcacccagtgacttgctctgcgatgctgggcccagttgaccactggcttaggcggg

SEQ ID NO: 279374 - DNA, 2112 bp, Homo sapiens
cccgcgaggaaacgcgctcttagaccatggcgacccaggcgaagcgtccacgggtggcggggcccgtggacggcggcgacctggatcctgtggcctgcttcctgagctggtgccggcgggtggggctggagctgagtcccaaggtggcggtcagccggcagggcacggtggccggctacggcatggtggcccgggagagcgtgcaggccggagagctgctgttcgtggtgccgcgggccgcgctcctgtcgcagcacacctgctccatcggcggcctgctggagcgagagcgagttgcgctgcagagccagtcgggctgggtgccactgctgctggcgctgctccacgagctgcaggccccggcctcacgctggaggccctactttgcgctctggcccgagctgggccgcttggagcacccgatgttctggccagaggaggagcgccggtgcctgctccagggcacaggcgtacctgaggccgtggagaaggatttggccaacatccgcagcgagtaccagtccatcgtgctgcccttcatggaagcccaccccgatctcttcagcctcagggttcgctccctagaactctaccaccagctggtggcccttgtgatggcctatagctttcaggaaccactggaggaagaagaggatgaaaaggagcccaactcccccgtgatggtgcctgctgcagacatactaaaccacttagccaatcacaacgccaatctagaatactctgcgaattgtcttcggatggtagccactcagcccattcctaaaggccatgagattttcaacacttatgggcaaatggctaactggcaactgattcatatgtacggttttgttgaaccatatcctgacaacacagatgacacagctgacattcagatggtgacagttcgtgaggcagcattacagggaacaaaaactgaagctgaaaggcacctagtgtacgagcgctgggatttcctatgcaaactggagatggtaggggaagagggagcctttgtgatagggagggaggaggtgctgactgaagaggagctgaccaccacactaaaggtactgtgcatgcctgctgaggagttcagagagcttaaagaccaggatggagggggagatgataaaagggaagagggcagcctgacgatcacaaatattcccaagctcaaagcatcgtggagacagctgcttcaaaacagtgttctactgactttgcagacctatgccacagacttaaaaactgaccaaggtttactcagtaataaggaagtctatgcgaaactcagctggagggaacagcaagccttacaggttcgctatggtcagaagatgatcttacatcagttgttggaactgacaagttagcagtttccctgttccctgaaggaacagcaataagaactttattctaagctaatactcattgatgtttgaaaaagaggaaaatttggatctttcttttgcttactaaacaccaagaggaaaagtagcaaagttggtgtgctaggattaactcaggtaagggtgatgtgttttaggattgagaacagcagacttgggaatcactgctaattgttacttaaagcatgttacagctgttttgttctcagttttaaccaaagccagtggacatacggtagtaataagtaagtcttgttgtgtttcagcatttaataatagactttggaggtagacccctggtttaaatctaagtctagtttgaggaagtcacttaacctttattgaaaagactctggatttaataagctgtgtaactggtactcgatagttacccaaagttcagtctagatggcacaaaccacctctcagggaataaaccctaagacatcactcaaggaggacttcaattatttaattttgaactgttttgtcctctctggccataaaacttgacagtcatgaaaggtaaggcaaattttaagtgggttaagtttttaaatacgtatctactcattttctttaaaaaaaaaaaaaatacctgggggaaaaggatattaaaactgggtattttaaactcagcttaaccagataaacctgctccagcatttgtccagtgttgaaataaataggaagaaaaata

SEQ ID NO: 279375 - DNA, 3403 bp, Homo sapiens
cccgcgaggaaacgcgctcttagaccatggcgacccaggcgaagcgtccacgggtggcggggcccgtggacggcggcgacctggatcctgtggcctgcttcctgagctggtgccggcgggtggggctggagctgagtcccaaggtggcggtcagccggcagggcacggtggccggctacggcatggtggcccgggagagcgtgcaggccggagagctgctgttcgtggtgccgcgggccgcgctcctgtcgcagcacacctgctccatcggcggcctgctggagcgagagcgagttgcgctgcagagccagtcgggctgggtgccactgctgctggcgctgctccacgagctgcaggccccggcctcacgctggaggccctactttgcgctctggcccgagctgggccgcttggagcacccgatgttctggccagaggaggagcgccggtgcctgctccagggcacaggcgtacctgaggccgtggagaaggatttggccaacatccgcagcgagtaccagtccatcgtgctgcccttcatggaagcccaccccgatctcttcagcctcagggttcgctccctagaactctaccaccagctggtggcccttgtgatggcctatagctttcaggaaccactggaggaagaagaggatgaaaaggagcccaactcccccgtgatggtgcctgctgcagacatactaaaccacttagccaatcacaacgccaatctagaatactctgcggtgagtggagtttctcttggtgcactgattgagcatgattcaagccattgtgtcttaggctccattctcttactagtgctacaaaatgagtaggtgaaatcagctcctcctgtatgtccttttagtatgcatattactgtagaatcatttgaatgcgaaacattttaaagtcctcaaagtaagttgtggttaatcctctgataaactatactaccatcatttatttagtgctagacattgagtggtctgcatagccatgtttcattcctttctggctgatcacatcagtgagcccagactgtgtgtggctctgtggatagcagcctggaacagtgatagtctccgtgttttggagggatgaggacattcacaggccaaaggtctaagacgatcctagaactgatataaagctgtgtttataccagctctattctatataaaaagtagcctgaaaagatggcacatttataggatcagaaattagtaagtatggttatttcttaatccttgcctccattttcctttcccactttgatctgcgaaagttccattttttcccccccgaggcggagtctcactgtgtcgcccaggctggagtgcagtggcgtgatctcggctcactgcaactgccgcctcctgggttcaagcaattctccctgcctcagcctcccgagtagttggaattacaggctcctgccaccatgcccggctaatttttgtattttttagtagggatggggtttctccgtgttggccaggctggtcttgaactcctgatctcaggtcatctgcccactttgacctccctaagtgctgggattacaggtgtgagccactgcgcctggccgaaaatttcgtttttaaagctagcaactttttaagtgctgaagaggactgtgcagaaatccacccagttaaacatgaagctggccttttaaagttagcccaacccttttttgtttcacagtttagggtctaacaggaactaaaggtagaactttggtagttaacagcatcagtcatggctgaactacacctgctgaaggctcttcttaagtggaaataatcttcatggggctggcccgtgaaaggcatggccccagcttctccctttcacctcagaattgtcttcggatggtagccactcagcccattcctaaaggccatgagattttcaacacttatgggcaaatggctaactggcaactgattcatatgtacggttttgttgaaccatatcctgacaacacagatgacacagctgacattcagatggtgacagttcgtgaggcagcattacagggtgagtgtatcattaactcaatatttgacactgatggtgtgtctatacccatgcctcaggttaaatagctttgctaaatagcagttgactttgtagactgggtggcagactaaagaagaaatgaacccttgggtgtactgagactttcacattgctgtttcatctacaggaacaaaaactgaagctgaaaggcacctagtgtacgagcgctgggatttcctatgcaaactggagatggtaggggaagagggagcctttgtgatagggagggaggaggtgctgactgaagaggagctgaccaccacactaaaggtactgtgcatgcctgctgaggagttcagagagcttaaagaccaggatggagggggagatgataaaagggaagagggcagcctgacgatcacaaatattcccaagctcaaagcatcgtggagacagctgcttcaaaacagtgttctactgactttgcagacctatgccacagacttaaaaactgaccaaggtttactcagtaataaggaagtctatgcgaaactcagctggagggaacagcaagccttacaggttcgctatggtcagaagatgatcttacatcagttgttggaactgacaagttagcagtttccctgttccctgaaggaacagcaataagaactttattctaagctaatactcattgatgtttgaaaaagaggaaaatttggatctttcttttgcttactaaacaccaagaggaaaagtagcaaagttggtgtgctaggattaactcaggtaagggtgatgtgttttaggattgagaacagcagacttgggaatcactgctaattgttacttaaagcatgttacagctgttttgttctcagttttaaccaaagccagtggacatacggtagtaataagtaagtcttgttgtgtttcagcatttaataatagactttggaggtagacccctggtttaaatctaagtctagtttgaggaagtcacttaacctttattgaaaagactctggatttaataagctgtgtaactggtactcgatagttacccaaagttcagtctagatggcacaaaccacctctcagggaataaaccctaagacatcactcaaggaggacttcaattatttaattttgaactgttttgtcctctctggccataaaacttgacagtcatgaaaggtaaggcaaattttaagtgggttaagtttttaaatacgtatctactcattttctttaaaaaaaaaaaaaatacctgggggaaaaggatattaaaactgggtattttaaactcagcttaaccagataaacctgctccagcatttgtccagtgttgaaataaataggaagaaaaata

SEQ ID NO: 279376 - DNA, 1982 bp, Homo sapiens
cccgcgaggaaacgcgctcttagaccatggcgacccaggcgaagcgtccacgggtggcggggcccgtggacggcggcgacctggatcctgtggcctgcttcctgagctggtgccggcgggtggggctggagctgagtcccaaggtggcggtcagccggcagggcacggtggccggctacggcatggtggcccgggagagcgtgcaggccggagagctgctgttcgtggtgccgcgggccgcgctcctgtcgcagcacacctgctccatcggcggcctgctggagcgagagcgagttgcgctgcagagccagtcgggctgggtgccactgctgctggcgctgctccacgagctgcaggccccggcctcacgctggaggccctactttgcgctctggcccgagctgggccgcttggagcacccgatgttctggccagaggaggagcgccggtgcctgctccagggcacaggcgtacctgaggccgtggagaaggatttggccaacatccgcagcgagtaccagtccatcgtgctgcccttcatggaagcccaccccgatctcttcagcctcagggttcgctccctagaactctaccaccagctggtggcccttgtgatggcctatagctttcaggaaccactggaggaagaagaggatgaaaaggagcccaactcccccgtgatggtgcctgctgcagacatactaaaccacttagccaatcacaacgccaatctagaatactctgcgatgacacagctgacattcagatggtgacagttcgtgaggcagcattacagggaacaaaaactgaagctgaaaggcacctagtgtacgagcgctgggatttcctatgcaaactggagatggtaggggaagagggagcctttgtgatagggagggaggaggtgctgactgaagaggagctgaccaccacactaaaggtactgtgcatgcctgctgaggagttcagagagcttaaagaccaggatggagggggagatgataaaagggaagagggcagcctgacgatcacaaatattcccaagctcaaagcatcgtggagacagctgcttcaaaacagtgttctactgactttgcagacctatgccacagacttaaaaactgaccaaggtttactcagtaataaggaagtctatgcgaaactcagctggagggaacagcaagccttacaggttcgctatggtcagaagatgatcttacatcagttgttggaactgacaagttagcagtttccctgttccctgaaggaacagcaataagaactttattctaagctaatactcattgatgtttgaaaaagaggaaaatttggatctttcttttgcttactaaacaccaagaggaaaagtagcaaagttggtgtgctaggattaactcaggtaagggtgatgtgttttaggattgagaacagcagacttgggaatcactgctaattgttacttaaagcatgttacagctgttttgttctcagttttaaccaaagccagtggacatacggtagtaataagtaagtcttgttgtgtttcagcatttaataatagactttggaggtagacccctggtttaaatctaagtctagtttgaggaagtcacttaacctttattgaaaagactctggatttaataagctgtgtaactggtactcgatagttacccaaagttcagtctagatggcacaaaccacctctcagggaataaaccctaagacatcactcaaggaggacttcaattatttaattttgaactgttttgtcctctctggccataaaacttgacagtcatgaaaggtaaggcaaattttaagtgggttaagtttttaaatacgtatctactcattttctttaaaaaaaaaaaaaatacctgggggaaaaggatattaaaactgggtattttaaactcagcttaaccagataaacctgctccagcatttgtccagtgttgaaataaataggaagaaaaata

SEQ ID NO: 279377 - DNA, 194 bp, Homo sapiens
cgccggggcgctcacacctgtgtcttcctcagagcgagttgcgctgcagagccagtcgggctgggtgccactgctgctggcgctgctccacgagctgcaggccccggcctcacgctggaggccctactttgcgctctggcccgagctgggccgcttggagcacccgatgttctggtgagagccttgggaggggt

SEQ ID NO: 279378 - DNA, 3234 bp, Homo sapiens
cccgcgaggaaacgcgctcttagaccatggcgacccaggcgaagcgtccacgggtggcggggcccgtggacggcggcgacctggatcctgtggcctgcttcctgagctggtgccggcgggtggggctggagctgagtcccaaggtggcggtcagccggcagggcacggtggccggctacggcatggtggcccgggagagcgtgcaggccggagagctgctgttcgtggtgccgcgggccgcgctcctgtcgcagcacacctgctccatcggcggcctgctggagcgagagcgagttgcgctgcagagccagtcgggctgggtgccactgctgctggcgctgctccacgagctgcaggccccggcctcacgctggaggccctactttgcgctctggcccgagctgggccgcttggagcacccgatgttctggccagaggaggagcgccggtgcctgctccagggcacaggcgtacctgaggccgtggagaaggatttggccaacatccgcagcgagtaccagtccatcgtgctgcccttcatggaagcccaccccgatctcttcagcctcagggttcgctccctagaactctaccaccagctggtggcccttgtgatggcctatagctttcaggaaccactggaggaagaagaggatgaaaaggagcccaactcccccgtgatggtgcctgctgcagacatactaaaccacttagccaatcacaacgccaatctagaatactctgcggtgagtggagtttctcttggtgcactgattgagcatgattcaagccattgtgtcttaggctccattctcttactagtgctacaaaatgagtaggtgaaatcagctcctcctgtatgtccttttagtatgcatattactgtagaatcatttgaatgcgaaacattttaaagtcctcaaagtaagttgtggttaatcctctgataaactatactaccatcatttatttagtgctagacattgagtggtctgcatagccatgtttcattcctttctggctgatcacatcagtgagcccagactgtgtgtggctctgtggatagcagcctggaacagtgatagtctccgtgttttggagggatgaggacattcacaggccaaaggtctaagacgatcctagaactgatataaagctgtgtttataccagctctattctatataaaaagtagcctgaaaagatggcacatttataggatcagaaattagtaagtatggttatttcttaatccttgcctccattttcctttcccactttgatctgcgaaagttccattttttcccccccgaggcggagtctcactgtgtcgcccaggctggagtgcagtggcgtgatctcggctcactgcaactgccgcctcctgggttcaagcaattctccctgcctcagcctcccgagtagttggaattacaggctcctgccaccatgcccggctaatttttgtattttttagtagggatggggtttctccgtgttggccaggctggtcttgaactcctgatctcaggtcatctgcccactttgacctccctaagtgctgggattacaggtgtgagccactgcgcctggccgaaaatttcgtttttaaagctagcaactttttaagtgctgaagaggactgtgcagaaatccacccagttaaacatgaagctggccttttaaagttagcccaacccttttttgtttcacagtttagggtctaacaggaactaaaggtagaactttggtagttaacagcatcagtcatggctgaactacacctgctgaaggctcttcttaagtggaaataatcttcatggggctggcccgtgaaaggcatggccccagcttctccctttcacctcagaattgtcttcggatggtagccactcagcccattcctaaaggccatgagattttcaacacttatgggcaaatggctaactggcaactgattcatatgtacggttttgttgaaccatatcctgacaacacagatgacacagctgacattcagatggtgacagttcgtgaggcagcattacagggaacaaaaactgaagctgaaaggcacctagtgtacgagcgctgggatttcctatgcaaactggagatggtaggggaagagggagcctttgtgatagggagggaggaggtgctgactgaagaggagctgaccaccacactaaaggtactgtgcatgcctgctgaggagttcagagagcttaaagaccaggatggagggggagatgataaaagggaagagggcagcctgacgatcacaaatattcccaagctcaaagcatcgtggagacagctgcttcaaaacagtgttctactgactttgcagacctatgccacagacttaaaaactgaccaaggtttactcagtaataaggaagtctatgcgaaactcagctggagggaacagcaagccttacaggttcgctatggtcagaagatgatcttacatcagttgttggaactgacaagttagcagtttccctgttccctgaaggaacagcaataagaactttattctaagctaatactcattgatgtttgaaaaagaggaaaatttggatctttcttttgcttactaaacaccaagaggaaaagtagcaaagttggtgtgctaggattaactcaggtaagggtgatgtgttttaggattgagaacagcagacttgggaatcactgctaattgttacttaaagcatgttacagctgttttgttctcagttttaaccaaagccagtggacatacggtagtaataagtaagtcttgttgtgtttcagcatttaataatagactttggaggtagacccctggtttaaatctaagtctagtttgaggaagtcacttaacctttattgaaaagactctggatttaataagctgtgtaactggtactcgatagttacccaaagttcagtctagatggcacaaaccacctctcagggaataaaccctaagacatcactcaaggaggacttcaattatttaattttgaactgttttgtcctctctggccataaaacttgacagtcatgaaaggtaaggcaaattttaagtgggttaagtttttaaatacgtatctactcattttctttaaaaaaaaaaaaaatacctgggggaaaaggatattaaaactgggtattttaaactcagcttaaccagataaacctgctccagcatttgtccagtgttgaaataaataggaagaaaaata

SEQ ID NO: 279379 - DNA, 3306 bp, Homo sapiens
cccgcgaggaaacgcgctcttagaccatggcgacccaggcgaagcgtccacgggtggcggggcccgtggacggcggcgacctggatcctgtggcctgcttcctgagctggtgccggcgggtggggctggagctgagtcccaaggtgagcgagcgagccggcgggcggaggacccgcggcggggcgcgggctgccctgaccagccctcctgctcaggtggcggtcagccggcagggcacggtggccggctacggcatggtggcccgggagagcgtgcaggccggagagctgctgttcgtggtgccgcgggccgcgctcctgtcgcagcacacctgctccatcggcggcctgctggagcgagagcgagttgcgctgcagagccagtcgggctgggtgccactgctgctggcgctgctccacgagctgcaggccccggcctcacgctggaggccctactttgcgctctggcccgagctgggccgcttggagcacccgatgttctggccagaggaggagcgccggtgcctgctccagggcacaggcgtacctgaggccgtggagaaggatttggccaacatccgcagcgagtaccagtccatcgtgctgcccttcatggaagcccaccccgatctcttcagcctcagggttcgctccctagaactctaccaccagctggtggcccttgtgatggcctatagctttcaggaaccactggaggaagaagaggatgaaaaggagcccaactcccccgtgatggtgcctgctgcagacatactaaaccacttagccaatcacaacgccaatctagaatactctgcggtgagtggagtttctcttggtgcactgattgagcatgattcaagccattgtgtcttaggctccattctcttactagtgctacaaaatgagtaggtgaaatcagctcctcctgtatgtccttttagtatgcatattactgtagaatcatttgaatgcgaaacattttaaagtcctcaaagtaagttgtggttaatcctctgataaactatactaccatcatttatttagtgctagacattgagtggtctgcatagccatgtttcattcctttctggctgatcacatcagtgagcccagactgtgtgtggctctgtggatagcagcctggaacagtgatagtctccgtgttttggagggatgaggacattcacaggccaaaggtctaagacgatcctagaactgatataaagctgtgtttataccagctctattctatataaaaagtagcctgaaaagatggcacatttataggatcagaaattagtaagtatggttatttcttaatccttgcctccattttcctttcccactttgatctgcgaaagttccattttttcccccccgaggcggagtctcactgtgtcgcccaggctggagtgcagtggcgtgatctcggctcactgcaactgccgcctcctgggttcaagcaattctccctgcctcagcctcccgagtagttggaattacaggctcctgccaccatgcccggctaatttttgtattttttagtagggatggggtttctccgtgttggccaggctggtcttgaactcctgatctcaggtcatctgcccactttgacctccctaagtgctgggattacaggtgtgagccactgcgcctggccgaaaatttcgtttttaaagctagcaactttttaagtgctgaagaggactgtgcagaaatccacccagttaaacatgaagctggccttttaaagttagcccaacccttttttgtttcacagtttagggtctaacaggaactaaaggtagaactttggtagttaacagcatcagtcatggctgaactacacctgctgaaggctcttcttaagtggaaataatcttcatggggctggcccgtgaaaggcatggccccagcttctccctttcacctcagaattgtcttcggatggtagccactcagcccattcctaaaggccatgagattttcaacacttatgggcaaatggctaactggcaactgattcatatgtacggttttgttgaaccatatcctgacaacacagatgacacagctgacattcagatggtgacagttcgtgaggcagcattacagggaacaaaaactgaagctgaaaggcacctagtgtacgagcgctgggatttcctatgcaaactggagatggtaggggaagagggagcctttgtgatagggagggaggaggtgctgactgaagaggagctgaccaccacactaaaggtactgtgcatgcctgctgaggagttcagagagcttaaagaccaggatggagggggagatgataaaagggaagagggcagcctgacgatcacaaatattcccaagctcaaagcatcgtggagacagctgcttcaaaacagtgttctactgactttgcagacctatgccacagacttaaaaactgaccaaggtttactcagtaataaggaagtctatgcgaaactcagctggagggaacagcaagccttacaggttcgctatggtcagaagatgatcttacatcagttgttggaactgacaagttagcagtttccctgttccctgaaggaacagcaataagaactttattctaagctaatactcattgatgtttgaaaaagaggaaaatttggatctttcttttgcttactaaacaccaagaggaaaagtagcaaagttggtgtgctaggattaactcaggtaagggtgatgtgttttaggattgagaacagcagacttgggaatcactgctaattgttacttaaagcatgttacagctgttttgttctcagttttaaccaaagccagtggacatacggtagtaataagtaagtcttgttgtgtttcagcatttaataatagactttggaggtagacccctggtttaaatctaagtctagtttgaggaagtcacttaacctttattgaaaagactctggatttaataagctgtgtaactggtactcgatagttacccaaagttcagtctagatggcacaaaccacctctcagggaataaaccctaagacatcactcaaggaggacttcaattatttaattttgaactgttttgtcctctctggccataaaacttgacagtcatgaaaggtaaggcaaattttaagtgggttaagtttttaaatacgtatctactcattttctttaaaaaaaaaaaaaatacctgggggaaaaggatattaaaactgggtattttaaactcagcttaaccagataaacctgctccagcatttgtccagtgttgaaataaataggaagaaaaata

SEQ ID NO: 279380 - DNA, 3308 bp, Homo sapiens
taggctagtacgaggctcgtttgaatcggcaacgaggccaggcgaagcgtcacgggtggcggggcccgtggacggcggcgacctggatcctgtggcctgcttcctgagctggtgccggcgggtggggctggagctgagtcccaaggtgagcgagcgagccggcgggcggaggacccgcggcggggcgcgggctgccctgaccagccctcctgctcaggtggcggtcagccggcagggcacggtggccggctacggcatggtggcccgggagagcgtgcaggccggagagctgctgttcgtggtgccgcgggccgcgctcctgtcgcagcacacctgctccatcggcggcctgctggagcgagagcgagttgcgctgcagagccagtcgggctgggtgccactgctgctggcgctgctccacgagctgcaggccccggcctcacgctggaggccctactttgcgctctggcccgagctgggccgcttggagcacccgatgttctggccagaggaggagcgccggtgcctgctccagggcacaggcgtacctgaggccgtggagaaggatttggccaacatccgcagcgagtaccagtccatcgtgctgcccttcatggaagcccaccccgatctcttcagcctcagggttcgctccctagaactctaccaccagctggtggcccttgtgatggcctatagctttcaggaaccactggaggaagaagaggatgaaaaggagcccaactcccccgtgatggtgcctgctgcagacatactaaaccacttagccaatcacaacgccaatctagaatactctgcggtgagtggagtttctcttggtgcactgattgagcatgattcaagccattgtgtcttaggctccattctcttactagtgctacaaaatgagtaggtgaaatcagctcctcctgtatgtccttttagtatgcatattactgtagaatcatttgaatgcgaaacattttaaagtcctcaaagtaagttgtggttaatcctctgataaactatactaccatcatttatttagtgctagacattgagtggtctgcatagccatgtttcattcctttctggctgatcacatcagtgagcccagactgtgtgtggctctgtggatagcagcctggaacagtgatagtctccgtgttttggagggatgaggacattcacaggccaaaggtctaagacgatcctagaactgatataaagctgtgtttataccagctctattctatataaaaagtagcctgaaaagatggcacatttataggatcagaaattagtaagtatggttatttcttaatccttgcctccattttcctttcccactttgatctgcgaaagttccattttttcccccccgaggcggagtctcactgtgtcgcccaggctggagtgcagtggcgtgatctcggctcactgcaactgccgcctcctgggttcaagcaattctccctgcctcagcctcccgagtagttggaattacaggctcctgccaccatgcccggctaatttttgtattttttagtagggatggggtttctccgtgttggccaggctggtcttgaactcctgatctcaggtcatctgcccactttgacctccctaagtgctgggattacaggtgtgagccactgcgcctggccgaaaatttcgtttttaaagctagcaactttttaagtgctgaagaggactgtgcagaaatccacccagttaaacatgaagctggccttttaaagttagcccaacccttttttgtttcacagtttagggtctaacaggaactaaaggtagaactttggtagttaacagcatcagtcatggctgaactacacctgctgaaggctcttcttaagtggaaataatcttcatggggctggcccgtgaaaggcatggccccagcttctccctttcacctcagaattgtcttcggatggtagccactcagcccattcctaaaggccatgagattttcaacacttatgggcaaatggctaactggcaactgattcatatgtacggttttgttgaaccatatcctgacaacacagatgacacagctgacattcagatggtgacagttcgtgaggcagcattacagggaacaaaaactgaagctgaaaggcacctagtgtacgagcgctgggatttcctatgcaaactggagatggtaggggaagagggagcctttgtgatagggagggaggaggtgctgactgaagaggagctgaccaccacactaaaggtactgtgcatgcctgctgaggagttcagagagcttaaagaccaggatggagggggagatgataaaagggaagagggcagcctgacgatcacaaatattcccaagctcaaagcatcgtggagacagctgcttcaaaacagtgttctactgactttgcagacctatgccacagacttaaaaactgaccaaggtttactcagtaataaggaagtctatgcgaaactcagctggagggaacagcaagccttacaggttcgctatggtcagaagatgatcttacatcagttgttggaactgacaagttagcagtttccctgttccctgaaggaacagcaataagaactttattctaagctaatactcattgatgtttgaaaaagaggaaaatttggatctttcttttgcttactaaacaccaagaggaaaagtagcaaagttggtgtgctaggattaactcaggtaagggtgatgtgttttaggattgagaacagcagacttgggaatcactgctaattgttacttaaagcatgttacagctgttttgttctcagttttaaccaaagccagtggacatacggtagtaataagtaagtcttgttgtgtttcagcatttaataatagactttggaggtagacccctggtttaaatctaagtctagtttgaggaagtcacttaacctttattgaaaagactctggatttaataagctgtgtaactggtactcgatagttacccaaagttcagtctagatggcacaaaccacctctcagggaataaaccctaagacatcactcaaggaggacttcaattatttaattttgaactgttttgtcctctctggccataaaacttgacagtcatgaaaggtaaggcaaattttaagtgggttaagtttttaaatacgtatctactcattttctttaaaaaaaaaaaaaatacctgggggaaaaggatattaaaactgggtattttaaactcagcttaaccagataaacctgctccagcatttgtccagtgttgaaataaataggaagaaaaata

SEQ ID NO: 279381 - DNA, 564 bp, Homo sapiens
aggacactatcacaagatccaaatcaatgtccttccgggagaatttcttaaaatcttgttttctctcgttgtcttcggaagaagcccgacatttcttataggaaatggaactcttcataagtctggccatggaggcatggtatccgtaacatcccccaaaggagctaaagaagaaatccacaatttaccatgagcatttctcgtctgaagattgccaagcgattcctccaggacattcctcaagatcaatttctgttcatccaccttgtcctgggagggacatcaatgggtttccatgtcctttggcttctggttgagttcactcagtggagaaccctggcaagaggcaggaaaaggggaggaaggtgaaaaccatccatttcttggagaagtgccacggtggggttgcaagtcccaggatcaagatttcgatgtgtctctttttcccgtaaagtggctgaaatctgaagctgaatctgcaagtgtcatggagtcattgaatctcacagtctcaactgataaaagttattaaaggtcgtctggttcagccttctaaaaaaaaag

SEQ ID NO: 279382 - DNA, 541 bp, Homo sapiens
gtttaccacctgtaggttccagagagctcggatggtggtggtgattgtgctaagtttcaaattcagtatttaggtttggtttttagcttataggcaacaaattggctgactatggggtgaaaaggaagcacctcctttatcaagattggcttcaaaagatgtctgcctccccttctggtgggtcctgtgtccattcacagtgtgagaaatggaaaggaggtcactaagagacttgcaatggatgtaataactggatgcagaaactctggatctgaagggaatgttcatgactatttcatccctcctgctgccttggagaaccaaacgcaggagccacccaaggtgaaaaccatccatttcttggagaagtgccacggtggggttgcaagtcccaggatcaagatttcgatgtgtctctttttcccgtaaagtggctgaaatctgaagctgaatctgcaagtgtcatggagtcattgaatctcacagtctcaactgataaaagttattaaaggtcgtctggttcagccttctaaaaaaaaag

SEQ ID NO: 279383 - DNA, 886 bp, Homo sapiens
aggacactatcacaagatccaaatcaatgtccttccgggagaatttcttaaaatcttgttttctctcgttgtcttcggaagaagcccgacatttcttataggaaatggaactcttcataagtctggccatggaggcatggtatccgtaacatcccccaaaggagctaaagaagaaatccacaatttaccatgagcatttctcgtctgaagattgccaagcgattcctccaggacattcctcaagatcaatttctgttcatccaccttgtcctgggagggacatcaatgggtttccatgtcctttggcttctggttgagttcactcagtggagaaccctggcaagaggcaggaaaaggggaggaagcagcctgaccggtttgaatttcaccttctgttcaccttggatgagagcagtaatcatcacgatcccagggaacagccaaaggaagagaaaaggcaaaagatttggacaagactcatgaagactaacagctcttggataattgagagaaggcagctgcgtgaacagttttgatgcaatcatgaaggcagggcccagtgcctgtggcatctgcctttttctggaaccaatccatatttccttgtggttttctaaggtgcagagagggcacattgggaactttgcttggggtctttttcacatcttagagggaaggtccctcaacatctgcattggcggagtgtgatcctcatgtccctctgaatgatctggacttgaggtaaccagccccttccaggaagctgtcccatgagtgaagcctcagcagcagcctctgtcagtccctcccccacagaacctttggcttccatttgaccagccttgacatccagtgtccaaacaccgataaaattgattccactaag

SEQ ID NO: 279384 - DNA, 980 bp, Homo sapiens
catattcatatgctcttgttccttctcaaataattccatcactaatacacattccttgctgctgcttcctgctttcgcttttgaagtgcccttccatccactcctcagctctattccctgcatatctctaggaggctgtgaggggaaggaattattctctttgttttccacctaaagaaacagaagctctggcaatagtcggctgcttgctcaaggtgacacagttaatggagaggcagatctctggatgcggcgtctcaggggccacgcctgcctcccccgccccgcgcgcatacacagaattcctcatgctgctgctatcacggaactcagggttcatctcaaagatctctctttgcataatgtgtgtgtggacctgcctacagatacattgggtggaagccctaggagcctcaagcaagtctgaagattggccctgagaaccactgttctcattatcagcaaggattttatccagagacctctaggaatacattcactaaaatgtgactgtggtcctgtggttgtatgaactctggctcttctcgtgaattacatttcactggagtcaggtgttttctgtaaacatcgttaaaccacgagaccaactgcattgaacattttttgcactacattgttttatttcttgctcgtcttttccttgcagagctggggctggggtgaggtgtgtggtgtacctagcactcaaaatgtaaggattctcagagtcatacaggtgcacggtcagcacctgagagtgagccaccctttaacattttgccttctaggtgcttcacttgccttgcccaagcactagccctagattaaataatatgtttctattagttttttaaaattataatattaacaataactagcacttattgagcactcccttatgtgccagcaaatgtgacttacatgtatctgcttatttttccttacatgaaaccctctgaagtagatacaatgggtatcat

SEQ ID NO: 279385 - DNA, 390 bp, Homo sapiens
aggacactatcacaagatccaaatcaatgtccttccgggagaatttcttaaaatcttgttttctctcgttgtcttcggaagaagcccgacatttcttataggaaatggaactcttcataaggtcgccccgacccctcctccctgacctgggaagacgcgcgcagtccccgaccagaggacctcagacacaggtgaaaaccatccatttcttggagaagtgccacggtggggttgcaagtcccaggatcaagatttcgatgtgtctctttttcccgtaaagtggctgaaatctgaagctgaatctgcaagtgtcatggagtcattgaatctcacagtctcaactgataaaagttattaaaggtcgtctggttcagccttctaaaaaaaaag

SEQ ID NO: 279386 - DNA, 257 bp, Homo sapiens
gtgacctatcctaccttcgctttaaacccacacctatattaaccacacaaaactctaagtgaaaaccatccatttcttggagaagtgccacggtggggttgcaagtcccaggatcaagatttcgatgtgtctctttttcccgtaaagtggctgaaatctgaagctgaatctgcaagtgtcatggagtcattgaatctcacagtctcaactgataaaagttattaaaggtcgtctggttcagccttctaaaaaaaaag

SEQ ID NO: 279387 - DNA, 577 bp, Homo sapiens
agaaagactttttcctttttgagcacctctttggaccatttacattcattgacagctcagaagaatccaacagttcctggagtttggcaacatttcatggtggagagaaaagcatcccaaggatctgtacataaatagctggtgcacatcggtctcaggtgtaaacagaaggaagtccaaggaagccaagtgggaagatccttgctggtttctccctctgaggaagaaggaaaatgccatgactcccactatggcctctcttggaaccatattttgaggtaccctacttccttcttgagtgtcagcagagcaactgtgggactggcatgagatttggtcatttctaggagagcgaatgccttttgcctctttgatgagaaaactagacgagacattgtttagaaattcttgagctcagactttggcattatgacaacgtgcattcaaatctgccccagccacttgcgagctgggacctaaagccgtgagcttctggttgtttatctataacaagcggatcccagtacctacctcatagggctgctgcgaggattaaaataaaatgcatctatcagcc

SEQ ID NO: 279388 - DNA, 397 bp, Homo sapiens
catattcatatgctcttgttccttctcaaataattccatcactaatacacattccttgctgctgcttcctgctttcgcttttgaagtgcccttccatccactcctcagctctattccctgcatatctctaggaggctgtgaggggaaggaattattctctttgttttccacctaaagaaacagaagctctggcaatagtcggctgcttgctcaaggtgacacagttaatggagaggcagatctctggatgcggcgtctcaggggccacgcctgcctcccccgccccgcgcgcatacacagaattcctcatgctgctgctatcacggaactcaggggtttggctgactttgtctactaggagcagagaacaaagtgtgacttgaaccatgcacatcaa

SEQ ID NO: 279389 - DNA, 767 bp, Homo sapiens
aggacactatcacaagatccaaatcaatgtccttccgggagaatttcttaaaatcttgttttctctcgttgtcttcggaagaagcccgacatttcttataggaaatggaactcttcataaggttcatctcaaagatctctctttgcataatgtgtgtgtggacctgcctacagatacattgggtggaagccctaggagcctcaagcaagtctgaagattggccctgagaaccactgttctcattatcagcaaggattttatccagagacctctaggaatacattcactaaaatgtgactgtggtcctgtggttgtatgaactctggctcttctcgtgaattacatttcactggagtcaggtgttttctgtaaacatcgttaaaccacgagaccaactgcattgaacattttttgcactacattgttttatttcttgctcgtcttttccttgcagagctggggctggggtgaggtgtgtggtgtacctagcactcaaaatgtaaggattctcagagtcatacaggtgcacggtcagcacctgagagtgagccaccctttaacattttgccttctaggtgcttcacttgccttgcccaagcactagccctagattaaataatatgtttctattagttttttaaaattataatattaacaataactagcacttattgagcactcccttatgtgccagcaaatgtgacttacatgtatctgcttatttttccttacatgaaaccctctgaagtagatacaatgggtatcat

SEQ ID NO: 279390 - DNA, 625 bp, Homo sapiens
ctgattttggtagcatcctttggtctcttctagtctgggagtcagagaaagtttgcatcaaaatgtcatcagggattcatttccatcatttcaagcagggtcatcttggaacaggacacaggatagccaaaaacaatccattgatacacttggtgacattaattgagaaaaaaacaatatggtctggccatggaggcatggtatccgtaacatcccccaaaggagctaaagaagaaatccacaatttaccatgagcatttctcgtctgaagattgccaagcgattcctccaggacattcctcaagatcaatttctgttcatccaccttgtcctgggagggacatcaatgggtttccatgtcctttggcttctggttgagttcactcagtggagaaccctggcaagaggcaggaaaaggggaggaaggtgaaaaccatccatttcttggagaagtgccacggtggggttgcaagtcccaggatcaagatttcgatgtgtctctttttcccgtaaagtggctgaaatctgaagctgaatctgcaagtgtcatggagtcattgaatctcacagtctcaactgataaaagttattaaaggtcgtctggttcagccttctaaaaaaaaag

SEQ ID NO: 279391 - DNA, 924 bp, Homo sapiens
agaaagactttttcctttttgagcacctctttggaccatttacattcattgacagctcagaagaatccaacagttcctggagtttggcaacatttcatggtggagagaaaagcatcccaaggatctgtacataaatagctggtgcacatcggtctcaggtgtaaacagaaggaagtccaaggaagccaagtgggaagatccttgctggtttctccctctgaggaagaaggaaaatgccatgactcccactatggcctctcttggaaccatattttgaggttcatctcaaagatctctctttgcataatgtgtgtgtggacctgcctacagatacattgggtggaagccctaggagcctcaagcaagtctgaagattggccctgagaaccactgttctcattatcagcaaggattttatccagagacctctaggaatacattcactaaaatgtgactgtggtcctgtggttgtatgaactctggctcttctcgtgaattacatttcactggagtcaggtgttttctgtaaacatcgttaaaccacgagaccaactgcattgaacattttttgcactacattgttttatttcttgctcgtcttttccttgcagagctggggctggggtgaggtgtgtggtgtacctagcactcaaaatgtaaggattctcagagtcatacaggtgcacggtcagcacctgagagtgagccaccctttaacattttgccttctaggtgcttcacttgccttgcccaagcactagccctagattaaataatatgtttctattagttttttaaaattataatattaacaataactagcacttattgagcactcccttatgtgccagcaaatgtgacttacatgtatctgcttatttttccttacatgaaaccctctgaagtagatacaatgggtatcat

SEQ ID NO: 279392 - DNA, 285 bp, Homo sapiens
taagtcttaggccgtctaggttataatcactgctagatgatccttctcttttttcccattgttaaaaaccttcatacttactttatttcccacaggtgaaaaccatccatttcttggagaagtgccacggtggggttgcaagtcccaggatcaagatttcgatgtgtctctttttcccgtaaagtggctgaaatctgaagctgaatctgcaagtgtcatggagtcattgaatctcacagtctcaactgataaaagttattaaaggtcgtctggttcagccttcta

SEQ ID NO: 279393 - DNA, 479 bp, Homo sapiens
acatgggcgcccacccagcgtcgggccgcgtttaagccacctgcccacccccggggctctcgctgaccttcaaagttgagattggccccatgccgcaagagaacgtcggccgcccgcgtcagccccagctcagccatcttgagcagggcgttgctgacgccttcctggtaaaagggagagtgggctttcctctccagcagctcagtgagaacaaggattcggctctcctcgctggcgacataactgggcctgggacaggagagaggctgaggaaagcccttccatcctcaaacccgcaggaccccagccccggcaacacctgcagccaggacagcaacacagcctcctccctcccctcacattgagaccttcagctgatattgatgaagaaagcctacgtttccaccagagtccctggatggcgagactcatcattaccacgtgttggaaataccaactgacaaccccctcaacacctg

SEQ ID NO: 279394 - DNA, 452 bp, Homo sapiens
acatgggcgcccacccagcgtcgggccgcgtttaagccacctgcccacccccggggctctcgctgaccttcaaagttgagattggccccatgccgcaagagaacgtcggccgcccgcgtcagccccagctcagccatcttgagcagggcgttgctgacgccttcctggtaaaagggagagtgggctttcctctccagcagctcagtgagaacaaggattcggctctcctcgctggcgacataactgggcctgggacaggagagaggctgagggaccccagccccggcaacacctgcagccaggacagcaacacagcctcctccctcccctcacattgagaccttcagctgatattgatgaagaaagcctacgtttccaccagagtccctggatggcgagactcatcattaccacgtgttggaaataccaactgacaaccccctcaacacctg

SEQ ID NO: 279395 - DNA, 1811 bp, Homo sapiens
agcaaagagccgaggccgggcgcgcgaccctcgtccttctgcccctggccgcacactttgcgcacatctctttttctgcatggtggatattatttttcattatccttttctgggtgctatgggtgatcattccaagaagaagcccgggacggccatgtgcgtgggctgcgggagtcagatccacgaccagtttatcctgcgggtgtcgcccgacctcgagtggcacgcggcctgcctcaagtgtgccgagtgcagccagtacctggacgagacgtgcacgtgcttcgtgagagacgggaagacctactgcaagcgggactacgtcaggctgttcggcatcaagtgcgccaagtgccaggtgggcttcagcagcagcgacctggtgatgagggcgcgggacagcgtgtaccacatcgagtgcttccgctgctccgtgtgcagccgccagctgctgcctggggacgagttctcgctgcgggagcacgagctgctctgccgcgccgaccacggcctcctgctcgagcgcgccgcggccggcagcccgcgcagccccggcccgcttcccggcgcccgcggcctgcatctgcccgacgctgggtcgggccggcagcccgcgttgcgcccgcacgtgcacaagcagacggagaagacgacccgcgtgcggactgtgctgaacgagaagcagctgcacactctgcggacctgctacgccgccaacccgcggcccgacgctctcatgaaggagcagctggtggagatgaccggcctgagcccgcgggtcatccgcgtctggttccagaacaagcgctgcaaggacaagaagaaatccattctcatgaagcagctgcagcagcagcagcacagcgacaagacgagccttcagggactgactgggacgcccctggtggcgggcagtcccatccgccatgagaacgccgtgcagggcagcgcagtggaggtgcagacgtaccagccgccgtggaaggcgctcagcgagtttgccctccagagcgacctggaccaacccgccttccaacagctggtctccttctccgagtccggctccctaggcaactcctccggcagcgacgtgacctccctgtcctcgcagctcccggacacccccaacagtatggtgccgagtcccgtggagacgtgagggggacccctccctgccagcccgcggacctcgcatgctccctgcatgagactcacccatgctcaggccattccagttccgaaagctctctcgccttcgtaattattctattgttatttatgagagagtaccgagagacacggtctggacagcccaaggcgccaggatgcaacctgctttcaccagactgcagacccctgctccgaggactcttagtttttcaaaaccagaatctgggacttaccagggttagctctgccctctcctctcctctctacgtggccgccgctctgtctctccacgccccacctgtgtccccatctcggccggcccggagctcgcccacgcggacccccgccctgccccagctcagcgctccctggcggcttcgcccgggctcctagcggggaaaaggaaggggataactcagaggaacagacactcaaactcccaaagcgcatgattgctgggaaacagtagaaaccagacttgccttgaaagtgtttaagttattcgacggaggacagagtatgtgagcctttgccgaacaaacaaacgtaagttattgttatttattgtgagaacagccagttcatagtgggacttgtattttgatcttaataaaaaataataacccggggaaaaaaaaatc

SEQ ID NO: 279396 - DNA, 648 bp, Homo sapiens
gcggccgcaggcccagcgctgacaccgccgcaccttgggcccgcaggctgttcggcatcaagtgcgccaagtgccaggtgggcttcagcagcagcgacctggtgatgagggcgcgggacagcgtgtaccacatcgagtgcttccgctgctccgtgtgcagccgccagctgctgcctggggacgagttctcgctgcgggagcacgagctgctctgccgcgccgaccacggcctcctgctcgagcgcgccgcggccggcagcccgcgcagccccggcccgcttcccggcgcccgcggcctgcatctgcccggtaagcgcgccggggcctgtgccggggtgagcggggtgtatgtgcgtgcgtgtgtgtaggggtacgcttgtgtccctaacgagaagttgtcagttgtgtgtggttccgtctgccgggatagtgtttttctgtatcagtgcggaactgtgtgctgggaacaaggctgtgtgtgttctcgtgtgctcgggagaaactgcgtgtgtatgagtgtgtgagcacggagaattgtgcagaatcgtgttctccatgaccaggaacatgcagggcacagtgctaggagcagaagagtggatgacaacagggaatcttaagtggtgtccgtcttggggcttgtattag

SEQ ID NO: 279397 - DNA, 427 bp, Homo sapiens
cagtaaaggtcgtatctcctcttagtttatatttcccaggaatttccactgcaacagcagagttggtcatgggctcacagagctagagtgagagtcaggaaaactcaacagtggtagctactgtggtctgtccttgaagattctgagcagtgcaaatgtaatatcctgcatcaatcgtctcgaagtcttccactgtaatgacactctgggagattctcgtggtgtgtcccagtcctctgtggatcaacctccaagtgtcttggatcgtcacaggcctttcatcctgtttaacgacacccacaaagactgaagcaagagggacaagctgctataaagagctcccactcacccaacactgttgagcgttcctttcagagagcaaagcacatgcttataaaagactgtttagtatgcgtagctcataagc

SEQ ID NO: 279398 - DNA, 428 bp, Homo sapiens
cagtaaaggtcgtatctcctcttagtttatatttcccaggaatttccactgcaacagcagagttggtcatgggctcacagagctagagtgagagtcaggaaaactcaacagtggtagctactgtggtctgtccttgaagattctgagcagtgcaaatgtaatatcctgcatcaatcgtctcgaagtcttccactgtaatgacactctgggagattctcgtggtgtgtcccagtcctctgtggatcaacctccaagtgtcttggatcgtcacaggcctttcatccttctgccctgggaagatccaggtgaactccacctccacatcgggctcccccaggacagtgcagagcacactgatgtcgtccccacttttcactttgtttgaagaagccaagatggttgttgagggagggccactgggaactgga

SEQ ID NO: 279399 - DNA, 885 bp, Homo sapiens
ttagcagaagtgcagctgggggccattttgtcaagaagtgcttatttggaaaaacaaaacaaaacaaaaaatgaaaaaaaaaaaaaaatctatacaggtgcatgccagtcccccggtaatgaaatgtaacaaaggaagcacttaagttcagtgagggaaatacagctttaaattacagattgtacccagagcactttataaacggtaatgtgtgataatgtattatccttacttctgtgaaattgtggactgcaacttctgccggggccacttaaagggccaggagatggagagggttgcgtgaatgccattcaagaaaagggcaacagaggctaaggggttaaactccccagaaaaccaatttatgcaaagggctggatcctgaccggcattctgcactaaagatctgaattacaaatttagagaatttgctgctcgacaacgaatgcaggaaggacctcactggctgctgggaacaactgcccttttgaatgaattcttttatggttaccagtcaaaaagtcaccgtcagctggaactggaagggaggggcatttcttatctgggcaaaaagcccctgtacccagcgaggtgaaacttgcaaatgatactgtcaccttcctcaatggactgcagctcaggagctcaccaaaggttgcagcagacaacccccacggtgtttggagacaaaggaatagcagctgcctggtttccttgaatcaccccgtgctctgacgatggcagtgatgggcctcccaccaatggcttccccaagtgctgttttcctgcttcatgccaagttaagcattctgatactaagcggcacgagatagttctcaactgggtgaggcacaggtgtgagtaatctcgaggtatggtcaggag

SEQ ID NO: 279400 - DNA, 494 bp, Homo sapiens
gttcagtgagggaaatacagctttaaattacagattgtacccagagcactttataaacggtaatgtgtgataatgtattatccttacttctgtgaaattgtggactgcaacttctgccggggccacttaaagggccaggagatggagagggttgcgtgaatgccattcaagaaaagggcaacagaggctaaggggttaaactccccagaaaaccaatttatgcaaagggctggatcctgaccggcattctgcactaaagatctgaattacaaatttagagaatttgctgctcggtaagtaatttcttttcttcctaatggagactataatttccagtgggccggtgccacttaatttgcactgatagagtgaacaaaatcttgaccacggagaagcctaattctactcaccgtgcaaaattgccctttaaaaaggcttaaagagggacattcaaaggatggttaaaaccaacccctataatcttacattgctgc

SEQ ID NO: 279401 - DNA, 1287 bp, Homo sapiens
cttctatcttcttcacggccgactcagtggtcagcggaaacttgatgatagcatagtggccaagcttgtttctcctgggggtgctcttctgaggctatctgggctgcctccggagtcacagtgtcttgggccgcctgaagatattatttccccctgatgctttcctgaaagctcctgcaatcaactacaggtcagaatgttcgtctccaagacaggactccctctgagactcacagaaaagactatgacaggtactctggttataggcttctgatgatattgcttaaataactttaagaccatacacttgactcagttaaggtctccagaagtccggttgggaacctgatgggttcatgacactgctaactcaagatccacaagactggaattgattacatggcactgaatgaactgatgaaaattgattataattgtatagctttttggagcattgctggttaatattctagtttctggatttaagaaatctctttctcttactctaactgtaacttacaacaatttagtagattatacttttgtaaacagaaattaagcgtttatctttttttcttgcctgatttttccagaattttgaaatccttactgaatactcttatttccacgatgatatagttgttagcaaaagtccaataagaatctattcaccttataacaggacataattggaaattttggttatattatcaaggtttttactggaatatcatatttaggaagtgtacctaagatcagttatgaccagcaattttaaggaagtaaggttgacttttatggagacaatgcttacaaagcactgtgggaaactttgaggaaagttcttcctcaaagattataaagtcacaactacccactatttttatatgtgtgtgtgtgtgtgtgtgtgtgtgtgtgtgtgtgtgttccaaatcacttgtcctagcttgctccagcatgcctggacagaactagacaagccccagcccatagtgcatgccattccttatttggagatgcttccttaactatccctgggcaacttccttttctttctttcttctattccccttacctaattaagaaagttttaaactaacagccaatcgggtaaagtgtaaaatgggaggtcctattccagccaatggaaactggacacagcagtagggtaaacacgtcaggttataagtaactctgtctcctttgtttggtgtgctcttgtagctggacagctattgagtagcaccctttgtgcagaaaaataaagctcgccttgctaagagatca

SEQ ID NO: 279402 - DNA, 796 bp, Homo sapiens
tgccaccgctgctgccactatcgctgtcactgtcgctgctgcctctgtccagctgaaatgaccgtggggaggcctgagggagcccccggaggcgcggaggggagccgtcagatatttccccccgagtccttcgcagacacagaggcaggagaggagctgtccggggatgggctggttttgcccagggccagcaaacttgacgagttcctcagcccagaggaggagatagattctacttctgactcaactgggagcatttaccagaacttacaggaactgaagcagaaagggagatggtgtctgttggagtctctctttcagtctgacccagagagtgatgaaaacctctctgaagatgaggaggacctggagagtttcttccaagacaaggacagggggatggtgcaggtccagtgcccgcaggctctgaggtgtggctccacaaggcgctgcagctccctgaacaaccttccctccaacattcccaggcctcagacccagccaccctcaggctcccggcctccctcccagcacagaagcgtcagctcctgggcatcatccattactgtccctcggccattccgcatgacgctgcgcgaggcccggaagaaggccgagtggctgggctcacctgcctcctttgagcaggagaggcagcgggcccagaggcagggtgaggaagaggccgagtgccacaggcagttccgggcacagcctgtgcctgcacatgtctacctgcccctctaccaagagatcatggagcgcagcgaggcccgaaggcaggcagggatccaga

SEQ ID NO: 279403 - DNA, 399 bp, Homo sapiens
gctttactgggagccagtggtcgtttaggtctctgttccctcacctgcaaaattaagttgactctaaggtcaactttggtcacctcctagttcacattgtctaacagtagcccgtactccccaatctggtatcctttgtctcctgaaaggacccagcagtccaaggtccaagggaggaattcagaagcaacactgtttaatctagaaaaatacgttaaattgctgggctgagactgacagtcaaaggtcccaaagcaaaaacaactgagagtcccatgatactggcctagctgcttttctaatatttgccttactcagcggacacagcagaaagaaagaaggaattaaaaactgctggacttggagcacaatggtcaaggccacacatgacacgtcact

SEQ ID NO: 279404 - DNA, 558 bp, Homo sapiens
atttttttgaagtacactttttgtttaattccatgcatttgtttgctttgatagtcattcttgttcccattgccgttcaatacagagagggagccggcatcagaaaacaacactgggagctggggactgacagtacaggagaccagaggggagccaggtaaggaggttcattcggagacctaaccacaaaagagaaattcattcgctccaagtcgataggagctcaaattactgtaataaagcgtcaaagagggtcttcccacttccagagtctgggaagtggtcactctgaaggtgaagagccactggggtgatatgggcaagatgggacatcttcctaatagcttgcacatgctggctggggttcccttggcctgcagtcactggaggaccctgtccacctggtcactggacagcagcctagggccgggagccagcgatccctgagtgctgtgaagtggctctggagagcagacctgggatgctgccgggagcttccttacagtggccttgccatctgcttagggctctgctctgtgaagtcctgccatcgtaccc

SEQ ID NO: 279405 - DNA, 812 bp, Homo sapiens
tctcctgcagaacgtgcgactgagcggatgggactacaggcgcgtgcacatgcccggataattttttgtatttttggtagagacagggtttcactgtgttggccaggatggtttggatctcctgaccttgtgatccatctgcctcggcctcccaaagtgctgggattacaggcatgagccactgcgcccggtggtaagtactttattaatacatctgttaatccatttagtcctcatgataacactatgagacagatgctattatcatccccattttacagagaggttaagtggcttgccaggtcccacagtaagtggaatgctacaatttgcattcaggcagtcagattcccggctttacacttagaaccactatgctagcctgcctctccaaaggcagtcctgaatatgaaataaagtgctatatgtcctatgatggcatcatccagggaagagtcagggtatggagtggggaggctcagacctttaaaataatttttttttttcagagacagggtctcactgttgctcaggctggagtgcagtggtgtgatcatagctcactgcagcctcaaactcctgggcttaagagaaccttccacctcaagcctcccgagtagctgggactgcaggcatgtaccatcaaactcagctaattaaattttgttgttgttgttgttgtagaggcaaggtcttgctatgttgctcagactgatcttgaactcctgacccctaaagtgatcctcctgcctcagcctcccaaagtgctgggattgcaggtatgagctaccacacctgacctgggctcagac

SEQ ID NO: 279406 - DNA, 1032 bp, Homo sapiens
cgcgggctcagtccgcccgccgctgcgtcccggagtgcaagtgagcttctcggctgccccgcgggccggggtgcggagccgacatgcgcccgcttctcggcctccttctggtcttcgccggctgcaccttcgccttgtacttgctgtcgacgcgactgccccgcgggcggagactgggctccaccgaggaggctggaggcaggtcgctgtggttcccctccgacctggcagagctgcgggagctctctgaggtccttcgagagtaccggaaggagcaccaggcctacgtgttcctgctcttctgcggcgcctacctctacaaacagggctttgccatccccggctccagcttcctgaatgttttagctggtgccttgtttgggccatggctggggcttctgctgtgctgtgtgttgacctcggtgggtgccacatgctgctacctgctctccagtatttttggcaaacagttggtggtgtcctactttcctgataaagtggccctgctgcagagaaaggtggaggagaacagaaacagcttgttttttttcttattgtttttgagacttttccccatgacaccaaactggttcttgaacctctcggccccaattctgaacattcccatcgtgcagttcttcttctcagttcttatcgaggcaaggtcttgctatgttgctcagactgatcttgaactcctgacccctaaagtgatcctcctgcctcagcctcccaaagtgctgggattgcagcttgcccagagacatctgagtcttcacacggcgcacggcacactccttgtcagagagcccatccgagtgtgaggatatgtcaatgggaatctctggcgtctgggacagcaggtcgtctagcttctctgccaagcggtcttcaagtttatcagctaactcatcaggactgtttgagtggtcactggtatttccctcttctccatcagacacagagaaattctcagagctaaaggttgaatatgactggcagctgctgatacagcgatggggcctagaacca

SEQ ID NO: 279407 - DNA, 460 bp, Homo sapiens
atttttttgaagtacactttttgtttaattccatgcatttgtttgctttgatagtcattcttgttcccattgccgttcaatacagagagggagccggcatcagaaaacaacactgggagctggggactgacagtacaggagaccagaggggagccaggtaaggaggttcattcggagacctaaccacaaaagagaaattcatacctggtcccctgttcaagcagcaataatacctcccggccccacaaattcccaaggatgttgctcttaaattccacttatttctttttttctgttctttcttttatctctttttttttttgcaagaaattattgtctctctatctcatatatagttcactctttgcagtacaaagtgttaaaatgtcaaacaaaaataaatatcaatgttacagtagctagaatattcaataaaatagatccctgccattcttgattg

SEQ ID NO: 279408 - DNA, 3128 bp, Homo sapiens
cgcgggctcagtccgcccgccgctgcgtcccggagtgcaagtgagcttctcggctgccccgcgggccggggtgcggagccgacatgcgcccgcttctcggcctccttctggtcttcgccggctgcaccttcgccttgtacttgctgtcgacgcgactgccccgcgggcggagactgggctccaccgaggaggctggaggcaggtcgctgtggttcccctccgacctggcagagctgcgggagctctctgaggtccttcgagagtaccggaaggagcaccaggcctacgtgttcctgctcttctgcggcgcctacctctacaaacagggctttgccatccccggctccagcttcctgaatgttttagctggtgccttgtttgggccatggctggggcttctgctgtgctgtgtgttgacctcggtgggtgccacatgctgctacctgctctccagtatttttggcaaacagttggtggtgtcctactttcctgataaagtggccctgctgcagagaaaggtggaggagaacagaaacagcttgttttttttcttattgtttttgagacttttccccatgacaccaaactggttcttgaacctctcggccccaattctgaacattcccatcgtgcagttcttcttctcagttcttatcggtttgatcccatataatttcatctgtgtgcagacagggtccatcctgtcaaccctaacctctctggatgctcttttctcctgggacactgtctttaagctgttggccattgccatggtggcattaattcctggaaccctcattaaaaaatttagtcagaaacatctgcaattgaatgaaacaagtactgctaatcatatacacagtagaaaagacacatgatctggattttctgtttgccacatccctggactcagttgcttatttgtgtaatggatgtggtcctctaaagcccctcattgtttttgattgccttctataggtgatgtggacactgtgcatcaatgtgcagtgtcttttcagaaaggacactctgctcttgaaggtgtattacatcaggttttcaaaccagccctggtgtagcagacactgcaacagatgcctcctagaaaatgctgtttgtggccgggcgcggtggctcacgcctgtaatcccagcactttgggaggccgaggccggtgattcacaaggtcaggagttcaagaccagcctggccaagatggtgaaatcctgtctctaataaaaatacaaaaattagccaggcgtggtggcaggcacctgtaatcccagctactcgggaggctgaggcaggagaattgcttgaaccaaggtggcagaggttgcagtaagccaagatcacaccactgcactccagcctgggtgatagagtgagacactgtcttgacaaaaaaaaaaaaaaaaaagagaaaaaaagaaaatgctgtttgtattttgtggtctaataaggagttcgggatagcctgttgtatttgcctcatgccagcccctgagctgccttgggagaagatgctgattgtccttgtccagagtactgcttttgcagagtgacaggctgctgggacagatgtcctcctgttgcatctttgtggatgtttagtaccaatgatgacacgggaactcacatcactgacaccgctcttcatcttctgttagtctcttgaagagcatttttttgtacttctttgctgatgacctacctcttcataagccaagtgaaacaagttgacgaactgcctaggacttccacgtgttgctcacatacatgatgatttctgtcacgctcttgtgttcagacacactgacattaccatgtatgtcagacctccttatgatcgcatgtcctgacagttaagctgattgcaaacagactattaaatatgaatggagcaaacgctgtatgtcatggatatgttctggagaaattcttacccatctggatggggcagggcccttgactcacctgaatcatgaccaggcaaacattttatctgtcctttctgcaggaatccgttctgtgtcatgctaggagaatgggttcagtatatggggccatcaggcagtataccctctgaatgtttttcattgttgtatttgcttagagtaactaaacaattgtatcttttaatttatcttttaattcaaagaggaaaccttggcttctgataactttgttgtgttgtatcttaatggcctatagctgtcattacttcctgtagctgcagtacagaattgttacagacctggattaatgcttccaaagacagaaggaccttggcacctaaactgaccagccctgtgatcctgcaccccacaggagtaactcatcaggacttaccagactgctgcttttgggcatcatctgctgggttgatgatttggtttggccaagagtcttgccaagactttaatctatgcctcttgttctacatgaattcttgggaattactcacgttccataggaagagtgcatccccagagagggagccggcatcagaaaacaacactgggagctggggactgacagtacaggagaccagaggggagccaggaagtggtcagcaggcagaaaggaaatgagctacaaggaaatggcacttgagtatgaaagatcaacacgttgggtcaaggtagcacatttgccaagaggaagcacatgcccttgaagacattgggtgcaagtatctggtcaccagacttttgtaggtcatttccgtaagccacctggacaagctggttgaagtgaatatggtctgttcacaagttgcctggaattgcttttcttttgctgtgctttgtgttctaaaatgttcaatgtcttgctctggctcttctttagtcacttatggccaaaagacctggtcccctgttcaagcagcaataatacctcccggccccacaaattcccaaggatgttgctcttaaattccacttatttctttttttctgttctttcttttatctctttttttttttgcaagaaattattgtctctctatctcatatatagttcactctttgcagtacaaagtgttaaaatgtcaaacaaaaataaatatcaatgttacagtagctagaatattcaataaaatagatccctgccattcttgattg

SEQ ID NO: 279409 - DNA, 2318 bp, Homo sapiens
cgcgggctcagtccgcccgccgctgcgtcccggagtgcaagtgagcttctcggctgccccgcgggccggggtgcggagccgacatgcgcccgcttctcggcctccttctggtcttcgccggctgcaccttcgccttgtacttgctgtcgacgcgactgccccgcgggcggagactgggctccaccgaggaggctggaggcaggtcgctgtggttcccctccgacctggcagagctgcgggagctctctgaggtccttcgagagtaccggaaggagcaccaggcctacgtgttcctgctcttctgcggcgcctacctctacaaacagggctttgccatccccggctccagcttcctggtttgatcccatataatttcatctgtgtgcagacagggtccatcctgtcaaccctaacctctctggatgctcttttctcctgggacactgtctttaagctgttggccattgccatggtggcattaattcctggaaccctcattaaaaaatttagtcagaaacatctgcaattgaatgaaacaagtactgctaatcatatacacagtagaaaagacacatgatctggattttctgtttgccacatccctggactcagttgcttatttgtgtaatggatgtggtcctctaaagcccctcattgtttttgattgccttctataggtgatgtggacactgtgcatcaatgtgcagtgtcttttcagaaaggacactctgctcttgaaggtgtattacatcaggttttcaaaccagccctggtgtagcagacactgcaacagatgcctcctagaaaatgctgtttgtggccgggcgcggtggctcacgcctgtaatcccagcactttgggaggccgaggccggtgattcacaaggtcaggagttcaagaccagcctggccaagatggtgaaatcctgtctctaataaaaatacaaaaattagccaggcgtggtggcaggcacctgtaatcccagctactcgggaggctgaggcaggagaattgcttgaaccaaggtggcagaggttgcagtaagccaagatcacaccactgcactccagcctgggtgatagagtgagacactgtcttgacaaaaaaaaaaaaaaaaaagagaaaaaaagaaaatgctgtttgtattttgtggtctaataaggagttcgggatagcctgttgtatttgcctcatgccagcccctgagctgccttgggagaagatgctgattgtccttgtccagagtactgcttttgcagagtgacaggctgctgggacagatgtcctcctgttgcatctttgtggatgtttagtaccaatgatgacacgggaactcacatcactgacaccgctcttcatcttctgttagtctcttgaagagcatttttttgtacttctttgctgatgacctacctcttcataagccaagtgaaacaagttgacgaactgcctaggacttccacgtgttgctcacatacatgatgatttctgtcacgctcttgtgttcagacacactgacattaccatgtatgtcagacctccttatgatcgcatgtcctgacagttaagctgattgcaaacagactattaaatatgaatggagcaaacgctgtatgtcatggatatgttctggagaaattcttacccatctggatggggcagggcccttgactcacctgaatcatgaccaggcaaacattttatctgtcctttctgcaggaatccgttctgtgtcatgctaggagaatgggttcagtatatggggccatcaggcagtataccctctgaatgtttttcattgttgtatttgcttagagtaactaaacaattgtatcttttaatttatcttttaattcaaagaggaaaccttggcttctgataactttgttgtgttgtatcttaatggcctatagctgtcattacttcctgtagctgcagtacagaattgttacagacctggattaatgcttccaaagacagaaggaccttggcacctaaactgaccagccctgtgatcctgcaccccacaggagtaactcatcaggacttaccagactgctgcttttgggcatcatctgctgggttgatgatttggtttggccaagagtcttgccaagactttaatctatgcctcttgttctacatgaattcttgggaattactcacgttccataggaagagtgcatccccaggtgatggtttttggttatggtatgatcctttcacaccgaggatttcattgtttaaaacgtgtttctttaaaagaagccttgataacgagagtgggggaaggaggcagcagactttgaagactgtgg

SEQ ID NO: 279410 - DNA, 2186 bp, Homo sapiens
aatatctcaagttcttttgttgaacaagacaggcatatatgggaagtgaggaaaggagggaaaataatagaaaagaaggaaagaagggaaagagttaatatgtataagggtcaagagtcaagcaaaaaaaaaccgtagtcactgttcctggtgacattctgaattattattttcttaattttgctgctgcttgtaacaggtgctttgtccttttcttcttccaggtttgatcccatataatttcatctgtgtgcagacagggtccatcctgtcaaccctaacctctctggatgctcttttctcctgggacactgtctttaagctgttggccattgccatggtggcattaattcctggaaccctcattaaaaaatttagtcagaaacatctgcaattgaatgaaacaagtactgctaatcatatacacagtagaaaagacacatgatctggattttctgtttgccacatccctggactcagttgcttatttgtgtaatggatgtggtcctctaaagcccctcattgtttttgattgccttctataggtgatgtggacactgtgcatcaatgtgcagtgtcttttcagaaaggacactctgctcttgaaggtgtattacatcaggttttcaaaccagccctggtgtagcagacactgcaacagatgcctcctagaaaatgctgtttgtggccgggcgcggtggctcacgcctgtaatcccagcactttgggaggccgaggccggtgattcacaaggtcaggagttcaagaccagcctggccaagatggtgaaatcctgtctctaataaaaatacaaaaattagccaggcgtggtggcaggcacctgtaatcccagctactcgggaggctgaggcaggagaattgcttgaaccaaggtggcagaggttgcagtaagccaagatcacaccactgcactccagcctgggtgatagagtgagacactgtcttgacaaaaaaaaaaaaaaaaaagagaaaaaaagaaaatgctgtttgtattttgtggtctaataaggagttcgggatagcctgttgtatttgcctcatgccagcccctgagctgccttgggagaagatgctgattgtccttgtccagagtactgcttttgcagagtgacaggctgctgggacagatgtcctcctgttgcatctttgtggatgtttagtaccaatgatgacacgggaactcacatcactgacaccgctcttcatcttctgttagtctcttgaagagcatttttttgtacttctttgctgatgacctacctcttcataagccaagtgaaacaagttgacgaactgcctaggacttccacgtgttgctcacatacatgatgatttctgtcacgctcttgtgttcagacacactgacattaccatgtatgtcagacctccttatgatcgcatgtcctgacagttaagctgattgcaaacagactattaaatatgaatggagcaaacgctgtatgtcatggatatgttctggagaaattcttacccatctggatggggcagggcccttgactcacctgaatcatgaccaggcaaacattttatctgtcctttctgcaggaatccgttctgtgtcatgctaggagaatgggttcagtatatggggccatcaggcagtataccctctgaatgtttttcattgttgtatttgcttagagtaactaaacaattgtatcttttaatttatcttttaattcaaagaggaaaccttggcttctgataactttgttgtgttgtatcttaatggcctatagctgtcattacttcctgtagctgcagtacagaattgttacagacctggattaatgcttccaaagacagaaggaccttggcacctaaactgaccagccctgtgatcctgcaccccacaggagtaactcatcaggacttaccagactgctgcttttgggcatcatctgctgggttgatgatttggtttggccaagagtcttgccaagactttaatctatgcctcttgttctacatgaattcttgggaattactcacgttccataggaagagtgcatccccaggtgatggtttttggttatggtatgatcctttcacaccgaggatttcattgtttaaaacgtgtttctttaaaagaagccttgataacgagagtgggggaaggaggcagcagactttgaagactgtgg

SEQ ID NO: 279411 - DNA, 956 bp, Homo sapiens
gcggcggacatctagaggacccgcgatgagtaaacttgggtgatgacctacctcttcataagccaagtgaaacaagttgacgaactgcctaggacttccacgtgttgctcacatacatgatgatttctgtcacgctcttgtgttcagacacactgacattaccatgtatgtcagacctccttatgatcgcatgtcctgacagttaagctgattgcaaacagactattaaatatgaatggagcaaacgctgtatgtcatggatatgttctggagaaattcttacccatctggatggggcagggcccttgactcacctgaatcatgaccaggcaaacattttatctgtcctttctgcaggaatccgttctgtgtcatgctaggagaatgggttcagtatatggggccatcaggcagtataccctctgaatgtttttcattgttgtatttgcttagagtaactaaacaattgtatcttttaatttatcttttaattcaaagaggaaaccttggcttctgataactttgttgtgttgtatcttaatggcctatagctgtcattacttcctgtagctgcagtacagaattgttacagacctggattaatgcttccaaagacagaaggaccttggcacctaaactgaccagccctgtgatcctgcaccccacaggagtaactcatcaggacttaccagactgctgcttttgggcatcatctgctgggttgatgatttggtttggccaagagtcttgccaagactttaatctatgcctcttgttctacatgaattcttgggaattactcacgttccataggaagagtgcatccccaggtgatggtttttggttatggtatgatcctttcacaccgaggatttcattgtttaaaacgtgtttctttaaaagaagccttgataacgagagtgggggaaggaggcagcagactttgaagactgtgg

SEQ ID NO: 279412 - DNA, 624 bp, Homo sapiens
tgacagtgacagcactaaaaagggacgtatttgccaaaaacaagatttgacactatctgtaaacctcactaccaactgctgcttaaacatttaaaaatgaaaccagcttccacatacacaggtttgtttgtttgtttgtttgtctgtttttccctcctagaggaagcacatgcccttgaagacattgggtgcaagtatctggtcaccagacttttgtaggtcatttccgtaagccacctggacaagctggttgaagtgaatatggtctgttcacaagttgcctggaattgcttttcttttgctgtgctttgtgttctaaaatgttcaatgtcttgctctggctcttctttagtcacttatggccaaaagacctggtcccctgttcaagcagcaataatacctcccggccccacaaattcccaaggatgttgctcttaaattccacttatttctttttttctgttctttcttttatctctttttttttttgcaagaaattattgtctctctatctcatatatagttcactctttgcagtacaaagtgttaaaatgtcaaacaaaaataaatatcaatgttacagtagctagaatattcaataaaatagatccctgccattcttga

SEQ ID NO: 279413 - DNA, 2619 bp, Homo sapiens
cgcgggctcagtccgcccgccgctgcgtcccggagtgcaagtgagcttctcggctgccccgcgggccggggtgcggagccgacatgcgcccgcttctcggcctccttctggtcttcgccggctgcaccttcgccttgtacttgctgtcgacgcgactgccccgcgggcggagactgggctccaccgaggaggctggaggcaggtcgctgtggttcccctccgacctggcagagctgcgggagctctctgaggtccttcgagagtaccggaaggagcaccaggcctacgtgttcctgctcttctgcggcgcctacctctacaaacagggctttgccatccccggctccagcttcctgaatgttttagctggtgccttgtttgggccatggctggggcttctgctgtgctgtgtgttgacctcggtgggtgccacatgctgctacctgctctccagtatttttggcaaacagttggtggtgtcctactttcctgataaagtggccctgctgcagagaaaggtggaggagaacagaaacagcttgttttttttcttattgtttttgagacttttccccatgacaccaaactggttcttgaacctctcggccccaattctgaacattcccatcgtgcagttcttcttctcagttcttatcggtttgatcccatataatttcatctgtgtgcagacagggtccatcctgtcaaccctaacctctctggatgctcttttctcctgggacactgtctttaagctgttggccattgccatggtggcattaattcctggaaccctcattaaaaaatttagtcagaaacatctgcaattgaatgaaacaagtactgctaatcatatacacagtagaaaagacacatgatctggattttctgtttgccacatccctggactcagttgcttatttgtgtaatggatgtggtcctctaaagcccctcattgtttttgattgccttctataggtgatgtggacactgtgcatcaatgtgcagtgtcttttcagaaaggacactctgctcttgaaggtgtattacatcaggttttcaaaccagccctggtgtagcagacactgcaacagatgcctcctagaaaatgctgtttgtggccgggcgcggtggctcacgcctgtaatcccagcactttgggaggccgaggccggtgattcacaaggtcaggagttcaagaccagcctggccaagatggtgaaatcctgtctctaataaaaatacaaaaattagccaggcgtggtggcaggcacctgtaatcccagctactcgggaggctgaggcaggagaattgcttgaaccaaggtggcagaggttgcagtaagccaagatcacaccactgcactccagcctgggtgatagagtgagacactgtcttgacaaaaaaaaaaaaaaaaaagagaaaaaaagaaaatgctgtttgtattttgtggtctaataaggagttcgggatagcctgttgtatttgcctcatgccagcccctgagctgccttgggagaagatgctgattgtccttgtccagagtactgcttttgcagagtgacaggctgctgggacagatgtcctcctgttgcatctttgtggatgtttagtaccaatgatgacacgggaactcacatcactgacaccgctcttcatcttctgttagtctcttgaagagcatttttttgtacttctttgctgatgacctacctcttcataagccaagtgaaacaagttgacgaactgcctaggacttccacgtgttgctcacatacatgatgatttctgtcacgctcttgtgttcagacacactgacattaccatgtatgtcagacctccttatgatcgcatgtcctgacagttaagctgattgcaaacagactattaaatatgaatggagcaaacgctgtatgtcatggatatgttctggagaaattcttacccatctggatggggcagggcccttgactcacctgaatcatgaccaggcaaacattttatctgtcctttctgcaggaatccgttctgtgtcatgctaggagaatgggttcagtatatggggccatcaggcagtataccctctgaatgtttttcattgttgtatttgcttagagtaactaaacaattgtatcttttaatttatcttttaattcaaagaggaaaccttggcttctgataactttgttgtgttgtatcttaatggcctatagctgtcattacttcctgtagctgcagtacagaattgttacagacctggattaatgcttccaaagacagaaggaccttggcacctaaactgaccagccctgtgatcctgcaccccacaggagtaactcatcaggacttaccagactgctgcttttgggcatcatctgctgggttgatgatttggtttggccaagagtcttgccaagactttaatctatgcctcttgttctacatgaattcttgggaattactcacgttccataggaagagtgcatccccaggtgatggtttttggttatggtatgatcctttcacaccgaggatttcattgtttaaaacgtgtttctttaaaagaagccttgataacgagagtgggggaaggaggcagcagactttgaagactgtgg

SEQ ID NO: 279414 - DNA, 2966 bp, Homo sapiens
cgcgggctcagtccgcccgccgctgcgtcccggagtgcaagtgagcttctcggctgccccgcgggccggggtgcggagccgacatgcgcccgcttctcggcctccttctggtcttcgccggctgcaccttcgccttgtacttgctgtcgacgcgactgccccgcgggcggagactgggctccaccgaggaggctggaggcaggtcgctgtggttcccctccgacctggcagagctgcgggagctctctgaggtccttcgagagtaccggaaggagcaccaggcctacgtgttcctgctcttctgcggcgcctacctctacaaacagggctttgccatccccggctccagcttcctgaatgttttagctggtgccttgtttgggccatggctggggcttctgctgtgctgtgtgttgacctcggtgggtgccacatgctgctacctgctctccagtatttttggcaaacagttggtggtgtcctactttcctgataaagtggccctgctgcagagaaaggtggaggagaacagaaacagcttgttttttttcttattgtttttgagacttttccccatgacaccaaactggttcttgaacctctcggccccaattctgaacattcccatcgtgcagttcttcttctcagttcttatcggtttgatcccatataatttcatctgtgtgcagacagggtccatcctgtcaaccctaacctctctggatgctcttttctcctgggacactgtctttaagctgttggccattgccatggtggcattaattcctggaaccctcattaaaaaatttagtcagaaacatctgcaattgaatgaaacaagtactgctaatcatatacacagtagaaaagacacatgatctggattttctgtttgccacatccctggactcagttgcttatttgtgtaatggatgtggtcctctaaagcccctcattgtttttgattgccttctataggtgatgtggacactgtgcatcaatgtgcagtgtcttttcagaaaggacactctgctcttgaaggtgtattacatcaggttttcaaaccagccctggtgtagcagacactgcaacagatgcctcctagaaaatgctgtttgtggccgggcgcggtggctcacgcctgtaatcccagcactttgggaggccgaggccggtgattcacaaggtcaggagttcaagaccagcctggccaagatggtgaaatcctgtctctaataaaaatacaaaaattagccaggcgtggtggcaggcacctgtaatcccagctactcgggaggctgaggcaggagaattgcttgaaccaaggtggcagaggttgcagtaagccaagatcacaccactgcactccagcctgggtgatagagtgagacactgtcttgacaaaaaaaaaaaaaaaaaagagaaaaaaagaaaatgctgtttgtattttgtggtctaataaggagttcgggatagcctgttgtatttgcctcatgccagcccctgagctgccttgggagaagatgctgattgtccttgtccagagtactgcttttgcagagtgacaggctgctgggacagatgtcctcctgttgcatctttgtggatgtttagtaccaatgatgacacgggaactcacatcactgacaccgctcttcatcttctgttagtctcttgaagagcatttttttgtacttctttgctgatgacctacctcttcataagccaagtgaaacaagttgacgaactgcctaggacttccacgtgttgctcacatacatgatgatttctgtcacgctcttgtgttcagacacactgacattaccatgtatgtcagacctccttatgatcgcatgtcctgacagttaagctgattgcaaacagactattaaatatgaatggagcaaacgctgtatgtcatggatatgttctggagaaattcttacccatctggatggggcagggcccttgactcacctgaatcatgaccaggcaaacattttatctgtcctttctgcaggaatccgttctgtgtcatgctaggagaatgggttcagtatatggggccatcaggcagtataccctctgaatgtttttcattgttgtatttgcttagagtaactaaacaattgtatcttttaatttatcttttaattcaaagaggaaaccttggcttctgataactttgttgtgttgtatcttaatggcctatagctgtcattacttcctgtagctgcagtacagaattgttacagacctggattaatgcttccaaagacagaaggaccttggcacctaaactgaccagccctgtgatcctgcaccccacaggagtaactcatcaggacttaccagactgctgcttttgggcatcatctgctgggttgatgatttggtttggccaagagtcttgccaagactttaatctatgcctcttgttctacatgaattcttgggaattactcacgttccataggaagagtgcatccccagagagggagccggcatcagaaaacaacactgggagctggggactgacagtacaggagaccagaggggagccaggtaaggaggttcattcggagacctaaccacaaaagagaaattcattcgctccaagtcgataggagctcaaattactgtaataaagcgtcaaagagggtcttcccacttccagagtctgggaagtggtcactctgaaggtgaagagccactggggtgatatgggcaagatgggacatcttcctaatagcttgcacatgctggctggggttcccttggcctgcagtcactggaggaccctgtccacctggtcactggacagcagcctagggccgggagccagcgatccctgagtgctgtgaagtggctctggagagcagacctgggatgctgccgggagcttccttacagtggccttgccatctgcttagggctctgctctgtgaagtcctgccatcgtaccc

SEQ ID NO: 279415 - DNA, 862 bp, Homo sapiens
cagaaatcatcctgtatccttatgcaattcttccggcaggctccaacagataaataaagcccaccaccctccatgggtctacctttcccagcagagcacctgggttggtcccgaagcctccaaccacctgcacgcctgccagggcctctctggggcagccatgaagtccctcgtcctgctcctttgtcttgctcagctctggggctgccactcagccccacatggcccagggctgatttatagacaaccgaactgcgatgatccagaaactgaggaagcagctctggtggctatagactacatcaatcaaaaccttccttggggatacaaacacaccttgaaccagattgatgaagtaaaggtgtggcctcagcagccctccggagagctgtttgagattgaaatagacaccctggaaaccacctgccatgtgctggaccccacccctgtggcaagatgcagcgtgaggcagctgaaggagcatgctgtcgaaggagactgtgatttccagctgttgaaactagatggcaagttttccgtggtatacgcctgccccctgctggccccgctgaacgacaccagggtggtgcacgccgcgaaagctgccctggccgccttcaacgctcagaacaacggctccaattttcagctggaggaaatttcccgggctcagcttgtgatagtgcctcccacttctactatgtggggttacctgtttgcgacgatgtgtggtaagaggcactaggaggcattgtacctggggtgaaagatatggtttgtatgcgctcacgctatgggcacgtgtggctgagggtcacagcggaccaccactaggtttattccaccgggggaaccccggggt

SEQ ID NO: 279416 - DNA, 803 bp, Homo sapiens
tgcaaatcccctctccctgtggatcacggcaagccttcttttagggtgtcacctcatccctttaagagctgtcatcaaatcatctcacccactggaagcacatgaagttaggagaaagagagaggctatttgctaatgaagccaagtcacgcccacccactgggaatgtgaagtgcacattttctagacatataactctgatacaaaagctttcaagtccttgagccaataatgtacacttctaggattttagtctaaagaagtcatcagtggccaggcatgatggctcatgcctgtaattccagcactttgggaggccaagacgggtggatcgggaggtcaggagatcgagaccatcctggctaacatggtgaaaccccgtctctactaaaaatacaaaaaaattagccaggcttggtggtgagcgcctgtagtcccagctactcgggaggctgaggcaggagaatggtgtgaacccaggaggcagatgttgcagtaaactaagatcgtgccactgcactccagcctgggcaacagaacgagactctgtctcaagaaaaaaagaaagcgccatcacgaggtgctcatcccaggcacctttgccagtcccacagctgccggcaggtacatccccactccctccgttccagctccaaagctcagtgtcagctggtagagttgcccacgtcggccagaagcactcactgttttgctgggctccagtaccacccatctccgctgaacatctgccacagactcgtaattaatactcacttgtgctgacaagcttataatggcgtctt

SEQ ID NO: 279417 - DNA, 721 bp, Homo sapiens
tcaaaataagccttgtgcttgttattccctacccaatgggtgccattgaaccagtcctgcaccccgggtgaaccagatgctcttcagtcccttccacttggagcacctggactcctctatagggctaaccccaaacttctaatgtgttaagacagttcttcagggactcaagtggcgccggggcactagttcgtgaaccacacttcatgggtgtggtctcattggggtcaccctcaggagaagtgtcgcacccccggaaaacacgcacagtggtgcagcctagtgttggtgctgctgctgggccagtggttcctccatgtccggggaggatcagacacttcaaggtctaggctagacatggcagagatgaggaggtttggcacagaaaacatagccaccattttgtccaagcctgggcatgggtggggggccttgtctgctggccacgcaagtgtcacatgcgatctacattaatatcaagtcttgactccctacttcccgtcattcctcacaggacagaagcagagtgggtggtggttatgtttgacagaaggcattaggttgacaacttgtcatgattttgacggtaagccaccatgattgtgttctctgcctctggttgaccttacaaaaaccattggaactgtgactttgaaaggtgctcttgctaagcttatatgtgcctgttaatgaaagtgcctgaaagaccttccttaataaa

SEQ ID NO: 279418 - DNA, 1635 bp, Homo sapiens
cagaaatcatcctgtatccttatgcaattcttccggcaggctccaacagataaataaagcccaccaccctccatgggtctacctttcccagcagagcacctgggttggtcccgaagcctccaaccacctgcacgcctgccagggcctctctggggcagccatgaagtccctcgtcctgctcctttgtcttgctcagctctggggctgccactcagccccacatggcccagggctgatttatagacaaccgaactgcgatgatccagaaactgaggaagcagctctggtggctatagactacatcaatcaaaaccttccttggggatacaaacacaccttgaaccagattgatgaagtaaaggtgtggcctcagcagccctccggagagctgtttgagattgaaatagacaccctggaaaccacctgccatgtgctggaccccacccctgtggcaagatgcagcgtgaggcagctgaaggagcatgctgtcgaaggagactgtgatttccagctgttgaaactagatggcaagttttccgtggtatacgcaaaatgtgattccagtccagactcagccgaggacgtgcgcaaggtgtgccaagactgccccctgctggccccgctgaacgacaccagggtggtgcacgccgcgaaagctgccctggccgccttcaacgctcagaacaacggctccaattttcagctggaggaaatttcccgggctcagcttgtgcccctcccaccttctacctatgtggagtttacagtgtctggcactgactgtgttgctaaagaggccacagaggcagccaagtgtaacctgctggcagaaaagcaatatggcttttgtaaggcaacactcagtgagaagcttggtggggcagaggttgcagtgacctgcacggtgttccaaacacagcccgtgacctcacagccccaaccagaaggtgccaatgaagcagtccccacccccgtggtggacccagatgcacctccgtcccctccacttggcgcacctggactccctccagctggctcacccccagactcccatgtgttactggcagctcctccaggacaccagttgcaccgggcgcactacgacctgcgccacaccttcatgggtgtggtctcattggggtcaccctcaggagaagtgtcgcacccccggaaaacacgcacagtggtgcagcctagtgttggtgctgctgctgggccagtggttcctccatgtccggggaggatcagacacttcaaggtctaggctagacatggcagagatgaggaggtttggcacagaaaacatagccaccattttgtccaagcctgggcatgggtggggggccttgtctgctggccacgcaagtgtcacatgcgatctacattaatatcaagtcttgactccctacttcccgtcattcctcacaggacagaagcagagtgggtggtggttatgtttgacagaaggcattaggttgacaacttgtcatgattttgacggtaagccaccatgattgtgttctctgcctctggttgaccttacaaaaaccattggaactgtgactttgaaaggtgctcttgctaagcttatatgtgcctgttaatgaaagtgcctgaaagaccttccttaataaa

SEQ ID NO: 279419 - DNA, 2821 bp, Homo sapiens
cagaaatcatcctgtatccttatgcaattcttccggcaggctccaacagataaataaagcccaccaccctccatgggtctacctttcccagcagagcacctgggttggtcccgaagcctccaaccacctgcacgcctgccagggcctctctggggcagccatgaagtccctcgtcctgctcctttgtcttgctcagctctggggctgccactcagccccacatggcccagggctgatttatagacaaccgaactgcgatgatccagaaactgaggaagcagctctggtggctatagactacatcaatcaaaaccttccttggggatacaaacacaccttgaaccagattgatgaagtaaaggtgtggcctcagcagccctccggagagctgtttgagattgaaatagacaccctggaaaccacctgccatgtgctggaccccacccctgtggcaagatgcagcgtgaggcagctgaaggagcatgctgtcgaaggagactgtgatttccagctgttgaaactagatggcaagttttccgtggtatacgcaaaatgtgattccagtccagactcagccgaggacgtgcgcaaggtgtgccaagactgccccctgctggccccgctgaacgacaccagggtggtgcacgccgcgaaagctgccctggccgccttcaacgctcagaacaacggctccaattttcagctggaggaaatttcccgggctcagcttgtgggtaaagactgagattcttttgacaggttgggcagttcggtggcacttcgggaatgtactgtacgtggtggagcgggaggcagggaagaacaggcgcaggggcagcgatgagaaagcaaggagagggttgtttggaaagggaagaaagcatcctaagggggtatgaggctcctgagtgtcatgaggaccccaacaccctcagcgcctcccccatgctgagccactgtaacgtccagcagccacagctgccggcaggtacatccccactccctccgttccagctaaaaccaaagctcagtgtcagctggtagagttgcccacgtcggccagaagcactcactgtaaatttgctgggctccagtaccacccatctccgctgaacatctgccacagactcgtaattaatactcacttgtgctgacaagcttataatggcaagatcttaaaatgcctttcgagtcactggagaaaacatctcattgtactgtgggtggtttagcacattggaattcaacagaattcaaatgtttaagaaaatgtattctggatatcagccatggccatacttggaaatacgctagtatagacggcaattctattaatcagaatatgtgattctcagaacatccccaccccagactacaccaaataacagatattttattgtgtccatatgctccaactactttaaaaaagaaaagctcaagtgatatcttccatactttcatctaaatcttttcatttgagcctgctctatgaaacaggtggaagaggtattaatctcttcactttcccaccctattttggaataacctgaaccttgggtatcaagtgcagcccaagagtgagggctggggggaggcagggttcccactcctatcagtctaatgctggccttctgattccggtttcctatctgcaaactcacctccaccctgaaggaccggtgatggatacttgcccctcctacaaggaagacacaacccctacctctaaagcacaagcacttgagaacacaaccccatagcaactgccctatgtaagccattgagggacatgtcttctgggccgacgcatggtctgcatgaatggtgctccccgaaggaggctacttcccgctctccttctctgcccttttcattgtaagtcatctttcctcaagagcattttcatgtactcttctcagcccctcccaccttctacctatgtggagtttacagtgtctggcactgactgtgttgctaaagaggccacagaggcagccaagtgtaacctgctggcagaaaagcaatatggcttttgtaaggcaacactcagtgagaagcttggtggggcagaggttgcagtgacctgcacggtgttccaaacacagcccgtgacctcacagccccaaccagaaggtgccaatgaagcagtccccacccccgtggtggacccagatgcacctccgtcccctccacttggcgcacctggactccctccagctggctcacccccagactcccatgtgttactggcagctcctccaggacaccagttgcaccgggcgcactacgacctgcgccacaccttcatgggtgtggtctcattggggtcaccctcaggagaagtgtcgcacccccggaaaacacgcacagtggtgcagcctagtgttggtgctgctgctgggccagtggttcctccatgtccggggaggatcagacacttcaaggtctaggctagacatggcagagatgaggaggtttggcacagaaaacatagccaccattttgtccaagcctgggcatgggtggggggccttgtctgctggccacgcaagtgtcacatgcgatctacattaatatcaagtcttgactccctacttcccgtcattcctcacaggacagaagcagagtgggtggtggttatgtttgacagaaggcattaggttgacaacttgtcatgattttgacggtaagccaccatgattgtgttctctgcctctggttgaccttacaaaaaccattggaactgtgactttgaaaggtgctcttgctaagcttatatgtgcctgttaatgaaagtgcctgaaagaccttccttaataaa

SEQ ID NO: 279420 - DNA, 2766 bp, Homo sapiens
cagaaatcatcctgtatccttatgcaattcttccggcaggctccaacagataaataaagcccaccaccctccatgggtctacctttcccagcagagcacctgggttggtcccgaagcctccaaccacctgcacgcctgccagggcctctctggggcagccatgaagtccctcgtcctgctcctttgtcttgctcagctctggggctgccactcagccccacatggcccagggctgatttatagacaaccgaactgcgatgatccagaaactgaggaagcagctctggtggctatagactacatcaatcaaaaccttccttggggatacaaacacaccttgaaccagattgatgaagtaaaggtgtggcctcagcagccctccggagagctgtttgagattgaaatagacaccctggaaaccacctgccatgtgctggaccccacccctgtggcaagatgcagcgtgaggcagctgaaggagcatgctgtcgaaggagactgtgatttccagctgttgaaactagatggcaagttttccgtggtatacgcaaaatgtgattccagtccagactcagccgaggacgtgcgcaaggtgtgccaagactgccccctgctggccccgctgaacgacaccagggtggtgcacgccgcgaaagctgccctggccgccttcaacgctcagaacaacggctccaattttcagctggaggaaatttcccgggctcagcttgtgggtaaagactgagattcttttgacaggttgggcagttcggtggcacttcgggaatgtactgtacgtggtggagcgggaggcagggaagaacaggcgcaggggcagcgatgagaaagcaaggagagggttgtttggaaagggaagaaagcatcctaagggggtatgaggctcctgagtgtcatgaggaccccaacaccctcagcgcctcccccatgctgagccactgtaacgtccagcagccacagctgccggcaggtacatccccactccctccgttccagtcactgtaaatttgctgggctccagtaccacccatctccgctgaacatctgccacagactcgtaattaatactcacttgtgctgacaagcttataatggcaagatcttaaaatgcctttcgagtcactggagaaaacatctcattgtactgtgggtggtttagcacattggaattcaacagaattcaaatgtttaagaaaatgtattctggatatcagccatggccatacttggaaatacgctagtatagacggcaattctattaatcagaatatgtgattctcagaacatccccaccccagactacaccaaataacagatattttattgtgtccatatgctccaactactttaaaaaagaaaagctcaagtgatatcttccatactttcatctaaatcttttcatttgagcctgctctatgaaacaggtggaagaggtattaatctcttcactttcccaccctattttggaataacctgaaccttgggtatcaagtgcagcccaagagtgagggctggggggaggcagggttcccactcctatcagtctaatgctggccttctgattccggtttcctatctgcaaactcacctccaccctgaaggaccggtgatggatacttgcccctcctacaaggaagacacaacccctacctctaaagcacaagcacttgagaacacaaccccatagcaactgccctatgtaagccattgagggacatgtcttctgggccgacgcatggtctgcatgaatggtgctccccgaaggaggctacttcccgctctccttctctgcccttttcattgtaagtcatctttcctcaagagcattttcatgtactcttctcagcccctcccaccttctacctatgtggagtttacagtgtctggcactgactgtgttgctaaagaggccacagaggcagccaagtgtaacctgctggcagaaaagcaatatggcttttgtaaggcaacactcagtgagaagcttggtggggcagaggttgcagtgacctgcacggtgttccaaacacagcccgtgacctcacagccccaaccagaaggtgccaatgaagcagtccccacccccgtggtggacccagatgcacctccgtcccctccacttggcgcacctggactccctccagctggctcacccccagactcccatgtgttactggcagctcctccaggacaccagttgcaccgggcgcactacgacctgcgccacaccttcatgggtgtggtctcattggggtcaccctcaggagaagtgtcgcacccccggaaaacacgcacagtggtgcagcctagtgttggtgctgctgctgggccagtggttcctccatgtccggggaggatcagacacttcaaggtctaggctagacatggcagagatgaggaggtttggcacagaaaacatagccaccattttgtccaagcctgggcatgggtggggggccttgtctgctggccacgcaagtgtcacatgcgatctacattaatatcaagtcttgactccctacttcccgtcattcctcacaggacagaagcagagtgggtggtggttatgtttgacagaaggcattaggttgacaacttgtcatgattttgacggtaagccaccatgattgtgttctctgcctctggttgaccttacaaaaaccattggaactgtgactttgaaaggtgctcttgctaagcttatatgtgcctgttaatgaaagtgcctgaaagaccttccttaataaa

SEQ ID NO: 279421 - DNA, 1573 bp, Homo sapiens
cagaaatcatcctgtatccttatgcaattcttccggcaggctccaacagataaataaagcccaccaccctccatgggtctacctttcccagcagagcacctgggttggtcccgaagcctccaaccacctgcacgcctgccagggcctctctggggcagccatgaagtccctcgtcctgctcctttgtcttgctcagctctggggctgccactcagccccacatggcccagggctgatttatagacaaccgaactgcgatgatccagaaactgaggaagcagctctggtggctatagactacatcaatcaaacagccctccggagagctgtttgagattgaaatagacaccctggaaaccacctgccatgtgctggaccccacccctgtggcaagatgcagcgtgaggcagctgaaggagcatgctgtcgaaggagactgtgatttccagctgttgaaactagatggcaagttttccgtggtatacgcaaaatgtgattccagtccagactcagccgaggacgtgcgcaaggtgtgccaagactgccccctgctggccccgctgaacgacaccagggtggtgcacgccgcgaaagctgccctggccgccttcaacgctcagaacaacggctccaattttcagctggaggaaatttcccgggctcagcttgtgcccctcccaccttctacctatgtggagtttacagtgtctggcactgactgtgttgctaaagaggccacagaggcagccaagtgtaacctgctggcagaaaagcaatatggcttttgtaaggcaacactcagtgagaagcttggtggggcagaggttgcagtgacctgcacggtgttccaaacacagcccgtgacctcacagccccaaccagaaggtgccaatgaagcagtccccacccccgtggtggacccagatgcacctccgtcccctccacttggcgcacctggactccctccagctggctcacccccagactcccatgtgttactggcagctcctccaggacaccagttgcaccgggcgcactacgacctgcgccacaccttcatgggtgtggtctcattggggtcaccctcaggagaagtgtcgcacccccggaaaacacgcacagtggtgcagcctagtgttggtgctgctgctgggccagtggttcctccatgtccggggaggatcagacacttcaaggtctaggctagacatggcagagatgaggaggtttggcacagaaaacatagccaccattttgtccaagcctgggcatgggtggggggccttgtctgctggccacgcaagtgtcacatgcgatctacattaatatcaagtcttgactccctacttcccgtcattcctcacaggacagaagcagagtgggtggtggttatgtttgacagaaggcattaggttgacaacttgtcatgattttgacggtaagccaccatgattgtgttctctgcctctggttgaccttacaaaaaccattggaactgtgactttgaaaggtgctcttgctaagcttatatgtgcctgttaatgaaagtgcctgaaagaccttccttaataaa

SEQ ID NO: 279422 - DNA, 2800 bp, Homo sapiens
cagaaatcatcctgtatccttatgcaattcttccggcaggctccaacagataaataaagcccaccaccctccatgggtctacctttcccagcagagcacctgggttggtcccgaagcctccaaccacctgcacgcctgccagggcctctctggggcagccatgaagtccctcgtcctgctcctttgtcttgctcagctctggggctgccactcagccccacatggcccagggctgatttatagacaaccgaactgcgatgatccagaaactgaggaagcagctctggtggctatagactacatcaatcaaaaccttccttggggatacaaacacaccttgaaccagattgatgaagtaaaggtgtggcctcagcagccctccggagagctgtttgagattgaaatagacaccctggaaaccacccctgtggcaagatgcagcgtgaggcagctgaaggagcatgctgtcgaaggagactgtgatttccagctgttgaaactagatggcaagttttccgtggtatacgcaaaatgtgattccagtccagactcagccgaggacgtgcgcaaggtgtgccaagactgccccctgctggccccgctgaacgacaccagggtggtgcacgccgcgaaagctgccctggccgccttcaacgctcagaacaacggctccaattttcagctggaggaaatttcccgggctcagcttgtgggtaaagactgagattcttttgacaggttgggcagttcggtggcacttcgggaatgtactgtacgtggtggagcgggaggcagggaagaacaggcgcaggggcagcgatgagaaagcaaggagagggttgtttggaaagggaagaaagcatcctaagggggtatgaggctcctgagtgtcatgaggaccccaacaccctcagcgcctcccccatgctgagccactgtaacgtccagcagccacagctgccggcaggtacatccccactccctccgttccagctaaaaccaaagctcagtgtcagctggtagagttgcccacgtcggccagaagcactcactgtaaatttgctgggctccagtaccacccatctccgctgaacatctgccacagactcgtaattaatactcacttgtgctgacaagcttataatggcaagatcttaaaatgcctttcgagtcactggagaaaacatctcattgtactgtgggtggtttagcacattggaattcaacagaattcaaatgtttaagaaaatgtattctggatatcagccatggccatacttggaaatacgctagtatagacggcaattctattaatcagaatatgtgattctcagaacatccccaccccagactacaccaaataacagatattttattgtgtccatatgctccaactactttaaaaaagaaaagctcaagtgatatcttccatactttcatctaaatcttttcatttgagcctgctctatgaaacaggtggaagaggtattaatctcttcactttcccaccctattttggaataacctgaaccttgggtatcaagtgcagcccaagagtgagggctggggggaggcagggttcccactcctatcagtctaatgctggccttctgattccggtttcctatctgcaaactcacctccaccctgaaggaccggtgatggatacttgcccctcctacaaggaagacacaacccctacctctaaagcacaagcacttgagaacacaaccccatagcaactgccctatgtaagccattgagggacatgtcttctgggccgacgcatggtctgcatgaatggtgctccccgaaggaggctacttcccgctctccttctctgcccttttcattgtaagtcatctttcctcaagagcattttcatgtactcttctcagcccctcccaccttctacctatgtggagtttacagtgtctggcactgactgtgttgctaaagaggccacagaggcagccaagtgtaacctgctggcagaaaagcaatatggcttttgtaaggcaacactcagtgagaagcttggtggggcagaggttgcagtgacctgcacggtgttccaaacacagcccgtgacctcacagccccaaccagaaggtgccaatgaagcagtccccacccccgtggtggacccagatgcacctccgtcccctccacttggcgcacctggactccctccagctggctcacccccagactcccatgtgttactggcagctcctccaggacaccagttgcaccgggcgcactacgacctgcgccacaccttcatgggtgtggtctcattggggtcaccctcaggagaagtgtcgcacccccggaaaacacgcacagtggtgcagcctagtgttggtgctgctgctgggccagtggttcctccatgtccggggaggatcagacacttcaaggtctaggctagacatggcagagatgaggaggtttggcacagaaaacatagccaccattttgtccaagcctgggcatgggtggggggccttgtctgctggccacgcaagtgtcacatgcgatctacattaatatcaagtcttgactccctacttcccgtcattcctcacaggacagaagcagagtgggtggtggttatgtttgacagaaggcattaggttgacaacttgtcatgattttgacggtaagccaccatgattgtgttctctgcctctggttgaccttacaaaaaccattggaactgtgactttgaaaggtgctcttgctaagcttatatgtgcctgttaatgaaagtgcctgaaagaccttccttaataaa

SEQ ID NO: 279423 - DNA, 1826 bp, Homo sapiens
cagaaatcatcctgtatccttatgcaattcttccggcaggctccaacagataaataaagcccaccaccctccatgggtctacctttcccagcagagcacctgggttggtcccgaagcctccaaccacctgcacgcctgccagggcctctctggggcagccatgaagtccctcgtcctgctcctttgtcttgctcagctctggggctgccactcagccccacatggcccagggctgatttatagacaaccgaactgcgatgatccagaaactgaggaagcagctctggtggctatagactacatcaatcaaaaccttccttggggatacaaacacaccttgaaccagattgatgaagtaaaggtgtggcctcagcagccctccggagagctgtttgagattgaaatagacaccctggaaaccacctgccatgtgctggaccccacccctgtggcaagatgcagcgtgaggcagctgaaggagcatgctgtcgaaggagactgtgatttccagctgttgaaactagatggcaagttttccgtggtatacgcctgccccctgctggccccgctgaacgacaccagggtggtgcacgccgcgaaagctgccctggccgccttcaacgctcagaacaacggctccaattttcagctggaggaaatttcccgggctcagcttgtggaccggtgatggatacttgcccctcctacaaggaagacacaacccctacctctaaagcacaagcacttgagaacacaaccccatagcaactgccctatgtaagccattgagggacatgtcttctgggccgacgcatggtctgcatgaatggtgctccccgaaggaggctacttcccgctctccttctctgcccttttcattgtaagtcatctttcctcaagagcattttcatgtactcttctcagcccctcccaccttctacctatgtggagtttacagtgtctggcactgactgtgttgctaaagaggccacagaggcagccaagtgtaacctgctggcagaaaagcaatatggcttttgtaaggcaacactcagtgagaagcttggtggggcagaggttgcagtgacctgcacggtgttccaaacacagcccgtgacctcacagccccaaccagaaggtgccaatgaagcagtccccacccccgtggtggacccagatgcacctccgtcccctccacttggcgcacctggactccctccagctggctcacccccagactcccatgtgttactggcagctcctccaggacaccagttgcaccgggcgcactacgacctgcgccacaccttcatgggtgtggtctcattggggtcaccctcaggagaagtgtcgcacccccggaaaacacgcacagtggtgcagcctagtgttggtgctgctgctgggccagtggttcctccatgtccggggaggatcagacacttcaaggtctaggctagacatggcagagatgaggaggtttggcacagaaaacatagccaccattttgtccaagcctgggcatgggtggggggccttgtctgctggccacgcaagtgtcacatgcgatctacattaatatcaagtcttgactccctacttcccgtcattcctcacaggacagaagcagagtgggtggtggttatgtttgacagaaggcattaggttgacaacttgtcatgattttgacggtaagccaccatgattgtgttctctgcctctggttgaccttacaaaaaccattggaactgtgactttgaaaggtgctcttgctaagcttatatgtgcctgttaatgaaagtgcctgaaagaccttccttaataaa

SEQ ID NO: 279424 - DNA, 1639 bp, Homo sapiens
tgcaaatcccctctccctgtggatcacggcaagccttcttttagggtgtcacctcatccctttaagagctgtcatcaaatcatctcacccactggaagcacatgaagttaggagaaagagagaggctatttgctaatgaagccaagtcacgcccacccactgggaatgtgaagtgcacattttctagacatataactctgatacaaaagctttcaagtccttgagccaataatgtacacttctaggattttagtctaaagaagtcatcagtggccaggcatgatggctcatgcctgtaattccagcactttgggaggccaagacgggtggatcgggaggtcaggagatcgagaccatcctggctaacatggtgaaaccccgtctctactaaaaatacaaaaaaattagccaggcttggtggtgagcgcctgtagtcccagctactcgggaggctgaggcaggagaatggtgtgaacccaggaggcagatgttgcagtaaactaagatcgtgccactgcactccagcctgggcaacagaacgagactctgtctcaagaaaaaaagaaaaagaaaaagaattcatcagtgacatttgacagaatatatctataaaaatgatttattatggatataaagagaccaaaaaagagagatctgtatgtccaacaggaaggtgtcattgaataatccatgcacatcagtaaatagaaaattgtgcagacactaaaaattgtgttttcaaggaataatgaatgatatgagaaaatgctattatggcaagtgaaaacacacaggatacaacatcgtatagtcacaatgatctcaatttttaaatcatatttaatagtattttaaaataagaaagaaatgcatcaatgttaacagtccttctttctaggccaccaccagaaagggattatgggtaatctctctcactctcaaagtatttctgtatttccatgttatatatagaatcatatacctcccacaagcagaaactataactttaagaaaaatggtttttcaaactaatttaaggttggcgcgtcaatgaaattgggggggatccatttttgaaattagttaaaataaatcctctttctctgtgggcagcaatatggcttttgtaaggcaacactcagtgagaagcttggtggggcagaggttgcagtgacctgcacggtgttccaaacacaggtaacagctccgtgaatattcttgcctacaccttcagaatacaatgaccccttcacatttatgcagtgcagtagtgatgacaggacatttgctaatgaagccaagtcacgcccacccactgggaatgtgaagtgcacattttctagacatataactctgatacaaaagctttcaagtccttgagccaataatgtacacttctaggattttagtctaaagaagtcatcagtcgccggtcgtggtggctcatgcctgtaatcccaacactttgggaggctgaggacggcggatcacgaggacaagagattgagaccatcctggccaacatggtgaaaccccatctctactaaaaatacaaaaaattagctgtgcatggtggcgcacacctgtagtcccagctactcaggaggtggaggcaggagaatcgcttgaacctaggagg

SEQ ID NO: 279425 - DNA, 1586 bp, Homo sapiens
tgcaaatcccctctccctgtggatcacggcaagccttcttttagggtgtcacctcatccctttaagagctgtcatcaaatcatctcacccactggaagcacatgaagttaggagaaagagagaggctatttgctaatgaagccaagtcacgcccacccactgggaatgtgaagtgcacattttctagacatataactctgatacaaaagctttcaagtccttgagccaataatgtacacttctaggattttagtctaaagaagtcatcagtggccaggcatgatggctcatgcctgtaattccagcactttgggaggccaagacgggtggatcgggaggtcaggagatcgagaccatcctggctaacatggtgaaaccccgtctctactaaaaatacaaaaaaattagccaggcttggtggtgagcgcctgtagtcccagctactcgggaggctgaggcaggagaatggtgtgaacccaggaggcagatgttgcagtaaactaagatcgtgccactgcactccagcctgggcaacagaacgagactctgtctcaagaaaaaaagaaaaagaaaaagaattcatcagtgacatttgacagaatatatctataaaaatgatttattatggatataaagagaccaaaaaagagagatctgtatgtccaacaggaaggtgtcattgaataatccatgcacatcagtaaatagaaaattgtgcagacactaaaaattgtgttttcaaggaataatgaatgatatgagaaaatgctattatggcaagtgaaaacacacaggatacaacatcgtatagtcacaatgatctcaatttttaaatcatatttaatagtattttcagaaagggattatgggtaatctctctcactctcaaagtatttctgtatttccatgttatatatagaatcatatacctcccacaagcagaaactataactttaagaaaaatggtttttcaaactaatttaaggttggcgcgtcaatgaaattgggggggatccatttttgaaattagttaaaataaatcctctttctctgtgggcagcaatatggcttttgtaaggcaacactcagtgagaagcttggtggggcagaggttgcagtgacctgcacggtgttccaaacacaggtaacagctccgtgaatattcttgcctacaccttcagaatacaatgaccccttcacatttatgcagtgcagtagtgatgacaggacatttgctaatgaagccaagtcacgcccacccactgggaatgtgaagtgcacattttctagacatataactctgatacaaaagctttcaagtccttgagccaataatgtacacttctaggattttagtctaaagaagtcatcagtcgccggtcgtggtggctcatgcctgtaatcccaacactttgggaggctgaggacggcggatcacgaggacaagagattgagaccatcctggccaacatggtgaaaccccatctctactaaaaatacaaaaaattagctgtgcatggtggcgcacacctgtagtcccagctactcaggaggtggaggcaggagaatcgcttgaacctaggagg

SEQ ID NO: 279426 - DNA, 1804 bp, Homo sapiens
tgcaaatcccctctccctgtggatcacggcaagccttcttttagggtgtcacctcatccctttaagagctgtcatcaaatcatctcacccactggaagcacatgaagttaggagaaagagagaggctatttgctaatgaagccaagtcacgcccacccactgggaatgtgaagtgcacattttctagacatataactctgatacaaaagctttcaagtccttgagccaataatgtacacttctaggattttagtctaaagaagtcatcagtggccaggcatgatggctcatgcctgtaattccagcactttgggaggccaagacgggtggatcgggaggtcaggagatcgagaccatcctggctaacatggtgaaaccccgtctctactaaaaatacaaaaaaattagccaggcttggtggtgagcgcctgtagtcccagctactcgggaggctgaggcaggagaatggtgtgaacccaggaggcagatgttgcagtaaactaagatcgtgccactgcactccagcctgggcaacagaacgagactctgtctcaagaaaaaaagaaaaagaaaaagaattcatcagtgacatttgacagaatatatctataaaaatgatttattatggatataaagagaccaaaaaagagagatctgtatgtccaacaggaaggtgtcattgaataatccatgcacatcagtaaatagaaaattgtgcagacactaaaaattgtgttttcaaggaataatgaatgatatgagaaaatgctattatggcaagtgaaaacacacaggatacaacatcgtatagtcacaatgatctcaatttttaaatcatatttaatagtattttaaaataagaaagaaatgcatcaatgttaacagtccttctttctaggccaccaccagaaagggattatgggtaatctctctcactctcaaagtatttctgtatttccatgttatatatagaatcatatacctcccacaagcagaaactataactttaagaaaaatggtttttcaaactaatttaaggttggcgcgtcaatgaaattgggggggatccatttttgaaattagttcagtgagaagcttggtggggcagaggttgcagtgacctgcacggtgttccaaacacagcccgtgacctcacagccccaaccagaaggtgccaatgaagcagtccccacccccgtggtggacccagatgcacctccgtcccctccacttggcgcacctggactccctccagctggctcacccccagactcccatgtgttactggcagctcctccaggacaccagttgcaccgggcgcactacgacctgcgccacacctttcatggtgtggtctcattggggtcacctcaggagaagttgttgtatcccggcctccatgtccggggaggatcagacacttcaaggtctaggctagacatggcagagatgaggaggtttggcacagaaaacatagccaccattttgtccaagcctgggcatgggtggggggccttgtctgctggccacgcaagtgtcacatgcgatctacattaatatcaagtcttgactccctacttcccgtcattcctcacaggacagaagcagagtgggtggtggttatgtttgacagaaggcattaggttgacaacttgtcatgattttgacggtaagccaccatgattgtgttctctgcctctggttgaccttacaaaaaccattggaactgtgactttgaaaggtgctcttgctaagcttatatgtgcctgttaatgaaagtgcctgaaagaccttccttaataaa

SEQ ID NO: 279427 - DNA, 883 bp, Homo sapiens
  misc_feature (883)..(883): n is a, c, g, or t
cagaaatcatcctgtatccttatgcaattcttccggcaggctccaacagataaataaagcccaccaccctccatgggtctacctttcccagcagagcacctgggttggtcccgaagcctccaaccacctgcacgcctgccagggcctctctggggcagccatgaagtccctcgtcctgctcctttgtcttgctcagctctggggctgccactcagccccacatggcccagggctgatttatagacaaccgaactgcgatgatccagaaactgaggaagcagctctggtggctatagactacatcaatcaaaaccttccttggggatacaaacacaccttgaaccagattgatgaagtaaaggtgtggcctcagcagccctccggagagctgtttgagattgaaatagacaccctggaaaccacctgccatgtgctggaccccacccctgtggcaagatgcagcgtgaggcagctgaaggagcatgctgtcgaaggagactgtgatttccagctgttgaaactagatggcaagttttccgtggtatacgcctgccccctgctggccccgctgaacgacaccagggtggtgcacgccgcgaaagctgccctggccgccttcaacgctcagaacaacggctccaattttcagctggaggaaatttcccgggctcagcttgtgcccctcccaccttctacctatgtggagtttacagtgtctggcactgactgtgttgctaaagaggccacagaggcgcagtgtactgtggggaaacattgcttgtaggacacataaagctggggcagtgcgacgtcggtccgcggccagcacagttgagacccgtgggcccgggaccggcccctgctctggtgccttcgggggtgn

SEQ ID NO: 279428 - DNA, 474 bp, Homo sapiens
cagaaatcatcctgtatccttatgcaattcttccggcaggctccaacagataaataaagcccaccaccctccatgggtctacctttcccagcagagcacctgggttggtcccgaagcctccaaccacctgcacgcctgccagggcctctctggggcagccatgaagtccctcgtcctgctcctttgtcttgctcagctctggggctgccactcagccccacatggcccagggctgatttatagacaaccgaactgcgatgatccagaaactgaggaagcagctctggtggctatagactacatcaatcaaacagccctccggagagctgtttgagattgaaatagacaccctggaaaccacctgccatgtgctggaccccacccctgtggcaagatgcagcgtgaggcagctgaaggagcatgctgtcgagacactgagattcacctctggagactctatagcgcggttccgcg

SEQ ID NO: 279429 - DNA, 1580 bp, Homo sapiens
cagaaatcatcctgtatccttatgcaattcttccggcaggctccaacagataaataaagcccaccaccctccatgggtctacctttcccagcagagcacctgggttggtcccgaagcctccaaccacctgcacgcctgccagggcctctctggggcagccatgaagtccctcgtcctgctcctttgtcttgctcagctctggggctgccactcagccccacatggcccagggctgatttatagacaaccgaactgcgatgatccagaaactgaggaagcagctctggtggctatagactacatcaatcaaaaccttccttggggatacaaacacaccttgaaccagattgatgaagtaaaggtgtggcctcagcagccctccggagagctgtttgagattgaaatagacaccctggaaaccacctgccatgtgctggaccccacccctgtggcaagatgcagcgtgaggcagctgaaggagcatgctgtcgaaggagactgtgatttccagctgttgaaactagatggcaagttttccgtggtatacgcaaaatgtgattccagtccagactcagccgaggacgtgcgcaaggtgtgccaagactgccccctgctggccccgctgaacgacaccagggtggtgcacgccgcgaaagctgccctggccgccttcaacgctcagaacaacggctccaattttcagctggaggaaatttcccgggctcagcttgtgcccctcccaccttctacctatgtggagtttacagtgtctggcactgactgtgttgctaaagaggccacagaggcagccaagtgtaacctgctggcagaaaagcaatatggcttttgtaaggcaacactcagtgagaagcttggtggggcagaggttgcagtgacctgcacggtgttccaaacacagcccgtgacctcacagccccaaccagaaggtgccaatgaagcagtccccacccccgtggtggacccagatgcacctccgtcccctccacttggcgcacctggactccctccagctggctcacccccagactcccatgtgttactggcagctcctccaggacaccagttgcaccgggcgcactacgacctgcgccacacctttcatggtgtggtctcattggggtcacctcaggagaagttgttgtatcccggcctccatgtccggggaggatcagacacttcaaggtctaggctagacatggcagagatgaggaggtttggcacagaaaacatagccaccattttgtccaagcctgggcatgggtggggggccttgtctgctggccacgcaagtgtcacatgcgatctacattaatatcaagtcttgactccctacttcccgtcattcctcacaggacagaagcagagtgggtggtggttatgtttgacagaaggcattaggttgacaacttgtcatgattttgacggtaagccaccatgattgtgttctctgcctctggttgaccttacaaaaaccattggaactgtgactttgaaaggtgctcttgctaagcttatatgtgcctgttaatgaaagtgcctgaaagaccttccttaataaa

SEQ ID NO: 279430 - DNA, 1531 bp, Homo sapiens
cagaaatcatcctgtatccttatgcaattcttccggcaggctccaacagataaataaagcccaccaccctccatgggtctacctttcccagcagagcacctgggttggtcccgaagcctccaaccacctgcacgcctgccagggcctctctggggcagccatgaagtccctcgtcctgctcctttgtcttgctcagctctggggctgccactcagccccacatggcccagggctgatttatagacaaccgaactgcgatgatccagaaactgaggaagcagctctggtggctatagactacatcaatcaaaaccttccttggggatacaaacacaccttgaaccagattgatgaagtaaaggtgtggcctcagcagccctccggagagctgtttgagattgaaatagacaccctggaaaccacctgccatgtgctggaccccacccctgtggcaagatgcagcgtgaggcagctgaaggagcatgctgtcgaaggagactgtgatttccagctgttgaaactagatggcaagttttccgtggtatacgcaaaatgtgattccagtccagactcagccgaggacgtgcgcaaggtgtgccaagactgccccctgctggccccgctgaacgacaccagggtggtgcacgccgcgaaagctgccctggccgccttcaacgctcagaacaacggctccaattttcagctggaggaaatttcccgggctcagcttgtgcccctcccaccttctacctatgtggagtttacagtgtctggcactgactgtgttgctaaagaggccacagaggcagccaagtgtaacctgctggcagaaaagaggttgcagtgacctgcacggtgttccaaacacagcccgtgacctcacagccccaaccagaaggtgccaatgaagcagtccccacccccgtggtggacccagatgcacctccgtcccctccacttggcgcacctggactccctccagctggctcacccccagactcccatgtgttactggcagctcctccaggacaccagttgcaccgggcgcactacgacctgcgccacacctttcatggtgtggtctcattggggtcacctcaggagaagttgttgtatcccggcctccatgtccggggaggatcagacacttcaaggtctaggctagacatggcagagatgaggaggtttggcacagaaaacatagccaccattttgtccaagcctgggcatgggtggggggccttgtctgctggccacgcaagtgtcacatgcgatctacattaatatcaagtcttgactccctacttcccgtcattcctcacaggacagaagcagagtgggtggtggttatgtttgacagaaggcattaggttgacaacttgtcatgattttgacggtaagccaccatgattgtgttctctgcctctggttgaccttacaaaaaccattggaactgtgactttgaaaggtgctcttgctaagcttatatgtgcctgttaatgaaagtgcctgaaagaccttccttaataaa

SEQ ID NO: 279431 - DNA, 2767 bp, Homo sapiens
cagaaatcatcctgtatccttatgcaattcttccggcaggctccaacagataaataaagcccaccaccctccatgggtctacctttcccagcagagcacctgggttggtcccgaagcctccaaccacctgcacgcctgccagggcctctctggggcagccatgaagtccctcgtcctgctcctttgtcttgctcagctctggggctgccactcagccccacatggcccagggctgatttatagacaaccgaactgcgatgatccagaaactgaggaagcagctctggtggctatagactacatcaatcaaaaccttccttggggatacaaacacaccttgaaccagattgatgaagtaaaggtgtggcctcagcagccctccggagagctgtttgagattgaaatagacaccctggaaaccacctgccatgtgctggaccccacccctgtggcaagatgcagcgtgaggcagctgaaggagcatgctgtcgaaggagactgtgatttccagctgttgaaactagatggcaagttttccgtggtatacgcctgccccctgctggccccgctgaacgacaccagggtggtgcacgccgcgaaagctgccctggccgccttcaacgctcagaacaacggctccaattttcagctggaggaaatttcccgggctcagcttgtgggtaaagactgagattcttttgacaggttgggcagttcggtggcacttcgggaatgtactgtacgtggtggagcgggaggcagggaagaacaggcgcaggggcagcgatgagaaagcaaggagagggttgtttggaaagggaagaaagcatcctaagggggtatgaggctcctgagtgtcatgaggaccccaacaccctcagcgcctcccccatgctgagccactgtaacgtccagcagccacagctgccggcaggtacatccccactccctccgttccagctaaaaccaaagctcagtgtcagctggtagagttgcccacgtcggccagaagcactcactgtaaatttgctgggctccagtaccacccatctccgctgaacatctgccacagactcgtaattaatactcacttgtgctgacaagcttataatggcaagatcttaaaatgcctttcgagtcactggagaaaacatctcattgtactgtgggtggtttagcacattggaattcaacagaattcaaatgtttaagaaaatgtattctggatatcagccatggccatacttggaaatacgctagtatagacggcaattctattaatcagaatatgtgattctcagaacatccccaccccagactacaccaaataacagatattttattgtgtccatatgctccaactactttaaaaaagaaaagctcaagtgatatcttccatactttcatctaaatcttttcatttgagcctgctctatgaaacaggtggaagaggtattaatctcttcactttcccaccctattttggaataacctgaaccttgggtatcaagtgcagcccaagagtgagggctggggggaggcagggttcccactcctatcagtctaatgctggccttctgattccggtttcctatctgcaaactcacctccaccctgaaggaccggtgatggatacttgcccctcctacaaggaagacacaacccctacctctaaagcacaagcacttgagaacacaaccccatagcaactgccctatgtaagccattgagggacatgtcttctgggccgacgcatggtctgcatgaatggtgctccccgaaggaggctacttcccgctctccttctctgcccttttcattgtaagtcatctttcctcaagagcattttcatgtactcttctcagcccctcccaccttctacctatgtggagtttacagtgtctggcactgactgtgttgctaaagaggccacagaggcagccaagtgtaacctgctggcagaaaagcaatatggcttttgtaaggcaacactcagtgagaagcttggtggggcagaggttgcagtgacctgcacggtgttccaaacacagcccgtgacctcacagccccaaccagaaggtgccaatgaagcagtccccacccccgtggtggacccagatgcacctccgtcccctccacttggcgcacctggactccctccagctggctcacccccagactcccatgtgttactggcagctcctccaggacaccagttgcaccgggcgcactacgacctgcgccacaccttcatgggtgtggtctcattggggtcaccctcaggagaagtgtcgcacccccggaaaacacgcacagtggtgcagcctagtgttggtgctgctgctgggccagtggttcctccatgtccggggaggatcagacacttcaaggtctaggctagacatggcagagatgaggaggtttggcacagaaaacatagccaccattttgtccaagcctgggcatgggtggggggccttgtctgctggccacgcaagtgtcacatgcgatctacattaatatcaagtcttgactccctacttcccgtcattcctcacaggacagaagcagagtgggtggtggttatgtttgacagaaggcattaggttgacaacttgtcatgattttgacggtaagccaccatgattgtgttctctgcctctggttgaccttacaaaaaccattggaactgtgactttgaaaggtgctcttgctaagcttatatgtgcctgttaatgaaagtgcctgaaagaccttccttaataaa

SEQ ID NO: 279432 - DNA, 1581 bp, Homo sapiens
cagaaatcatcctgtatccttatgcaattcttccggcaggctccaacagataaataaagcccaccaccctccatgggtctacctttcccagcagagcacctgggttggtcccgaagcctccaaccacctgcacgcctgccagggcctctctggggcagccatgaagtccctcgtcctgctcctttgtcttgctcagctctggggctgccactcagccccacatggcccagggctgatttatagacaaccgaactgcgatgatccagaaactgaggaagcagctctggtggctatagactacatcaatcaaaaccttccttggggatacaaacacaccttgaaccagattgatgaagtaaaggtgtggcctcagcagccctccggagagctgtttgagattgaaatagacaccctggaaaccacctgccatgtgctggaccccacccctgtggcaagatgcagcgtgaggcagctgaaggagcatgctgtcgaaggagactgtgatttccagctgttgaaactagatggcaagttttccgtggtatacgcctgccccctgctggccccgctgaacgacaccagggtggtgcacgccgcgaaagctgccctggccgccttcaacgctcagaacaacggctccaattttcagctggaggaaatttcccgggctcagcttgtgcccctcccaccttctacctatgtggagtttacagtgtctggcactgactgtgttgctaaagaggccacagaggcagccaagtgtaacctgctggcagaaaagcaatatggcttttgtaaggcaacactcagtgagaagcttggtggggcagaggttgcagtgacctgcacggtgttccaaacacagcccgtgacctcacagccccaaccagaaggtgccaatgaagcagtccccacccccgtggtggacccagatgcacctccgtcccctccacttggcgcacctggactccctccagctggctcacccccagactcccatgtgttactggcagctcctccaggacaccagttgcaccgggcgcactacgacctgcgccacaccttcatgggtgtggtctcattggggtcaccctcaggagaagtgtcgcacccccggaaaacacgcacagtggtgcagcctagtgttggtgctgctgctgggccagtggttcctccatgtccggggaggatcagacacttcaaggtctaggctagacatggcagagatgaggaggtttggcacagaaaacatagccaccattttgtccaagcctgggcatgggtggggggccttgtctgctggccacgcaagtgtcacatgcgatctacattaatatcaagtcttgactccctacttcccgtcattcctcacaggacagaagcagagtgggtggtggttatgtttgacagaaggcattaggttgacaacttgtcatgattttgacggtaagccaccatgattgtgttctctgcctctggttgaccttacaaaaaccattggaactgtgactttgaaaggtgctcttgctaagcttatatgtgcctgttaatgaaagtgcctgaaagaccttccttaataaa

SEQ ID NO: 279433 - DNA, 5431 bp, Homo sapiens
  misc_feature (3282)..(3282): n is a, c, g, or t
  misc_feature (3621)..(3621): n is a, c, g, or t
gcggccgcctctgctgcggccggaaacaatagtggaggaacccgagccgcacggaacggcggtggtggcccgcggagccggacggggcactatgaacgaagaggagcagtttgtaaacattgatttgaatgatgacaacatttgcagtgtttgtaaactgggaacagacaaagaaacactctccttctgccacatttgttttgagctaaatattgagggggtaccaaagtctgatctcttgcacaccaaatcattaaggggccataaagactgctttgaaaaataccatttaattgcaaaccagggttgtcctcgatctaagctttcaaaaagtacttatgaagaagttaaaaccattttgagtaagaagataaactggattgtgcagtatgcacaaaataaggatctggattcagattctgaatgttctaaaaacccccagcatcatctgtttaatttcaggcataagccagaagaaaaattactcccacagtttgactcccaagtaccaaaatattctgcaaaatggatagatggaagtgcaggtggcatctctaactgtacacaaagaattttggagcagagggaaaatacagactttggactttctatgttacaagattcaggtgccactttatgtcgtaacagtgtattgtggcctcatagtcacaaccaggcacagaaaaaagaagagacaatctctagtccagaggctaatgtccagacccagcatccacattacagcagagaggaattgaattcgatgactcttggtgaggtagagcaactgaatgcaaagctcctacagcaaatccaggaagtttttgaagagttaactcaccaagtgcaagaaaaagattctttggcctcacagctccatgtccgccacgttgccatcgaacagcttctgaagaactgttctaagttaccatgtctgcaagtagggcgaacaggaatgaagtcgcacctacccataaacaactgacctaaacagacttacttcgtatgccctgccctttattggtctcccagacatgcaaactttgaagaagtttgaagaaagttgtggtccgtttttttatggtcattaaatttgccaaacataaggcagtatttaacatctttgtcaaataaagcagatcattatactctagtcttctagggctaatcattttggctcatttggggactcttttttcccagaattactaaacaaattttatcacatgtgactacttaaatatactgttacagtgtcattttattaaacattttaattcacctgtcaaaacaacagattaactccttagtgtaaactactagagataatttttaagagggaaatggaattcatatcacctcttatttattatgagcaatattttaatataaaaattttatatgtgaaaatgctattttaggtactttgccattctctttataaatgtgtatttgagtggttctgtatatttatttacattatcatgtgtgaatatgttcacccatatttcaggtcactgcattttattctcttaatacaatgttttcacaacggttaccttgctttccaaagataaatatattttggattagaaatctgagttgttttaatttctaatacctcttataaaagaagaattaataactttttaaagcagtattcaggtaaatacaatacattattttgttttctaacaaaagcagttcttagttcaggaagaaaagactaatctggcttctatgtcaatttgtctccatagaaatgaaagcctcctcttgcttctttcattattagcttcacaccaatgactgtgatgcattagaatttggacagagtaagtcaagcctcacttccaattcaaatataatgtctatcttcaaattgagtgtgctgtgaaattgttctgtctttgaaaaaaaaaagtaagattattttgtgtgccactttgggtaaagtttcaagaatacttaaactgtccaaattgtattatcaccatcattgaacttagtgctcaaagaaagcattgtgaggtatttttctaaactttagactctatagagaaatataggattgttctacagaagaaaagcaaaactcctaattaaaaaaaaataaacctatgtattaagagaatgttctcgtaagttgcctatgatgcttccaaagagtttttatctaacagattgtgccaaacagctagataaattttaataatgtattacagtaaaggctataaccaatgcagaattaaaatgggctctaaattctgtttttaactcatgtttagaatgtacttatgaggtagatccttgcttgaaagtatctgctgaaaagcccagtaacgtggcagcttcatgcataaagatataaatgacatttgccttaaatttggcagcctaccctggcttgggtcagattttgttgttgaacacaagaaagtatttaagcaaagaaacacttcagtttaattgaaaacaactttttgtaatgctgacgtgttaaattggcctgagggtattaattgatatctgttgattttgtttttctttgaagtataacattactttttggagggaatttttgaaagatgctttcgatttctctcaattctttaagtcatgcaaaatgaatttaaaatccagggagtatggatgcattgccttagttttgatgagctttaaattaaatgtgtgcaatatcaaaatattcaaacttacaagctgggtaaatacatttcctgattaatatcttagtgcttaattgttcccacattttcaaatttgactttactcttttttggcgtaattcagtaagattgttaccagccagtgtgtttgcacacatttgggtttgtgtttagatgagttagggacagtcataaaagttggggatatgttgcatttgatatcaatagtagcatatttccagaatatgagccataagttgcagtcctgaatacaacagtgttatccaaagaaaggagttttctgacaaatatacatagctttgctaatgagtacggaacaagtggatgaacgtgtgcatgtgctaaggtcttaagtgggactctgatttattccatttagatatttctacttaagctctaaaaaggagaggtgctcttaaaaaaaactttgtggtgctggtactcacactactttatttggatgagttcctagtaaaaaaaactttttgttgaagtattttgcacagcagtttatccaaatgtttggtaaacttataatttagtcctatgttagttttcttaatcaaatatgcanttactgtgtatgcaaatataagtatcaggtacagagttctaacaagagaacatgaaatatcacaaatattgttttccacacttggctattctctacagttgttagtaatttttgagaatgttttgaagcatatctcatgtactactgtttaaaaagtggcaaaacagactgccagtcatccattactaaattttcagagcttatatgattaaggggagtgagataagacaaatctttttcacgttcagttttataatttgacacgttaaattgagttttaaaaattagaaaagtgtttttgaccacacaggttgttctctttaaagttcagccttatantgaagctaaaaatcaattatgttttactttgagattatcatcttatcctttgatcctcatattaatatctaaattagtcttttttaaaaggcatgcacttgagactccagtaatagatgattcaggcagcagaatagtgttttgttgtgtcgttgactatgcacaatggtggagcaaagacacattcttagtttttcaaaacacatgttcattttaccacaaagtgcccatttttatatacatttaaggattattttttcaatgtcaagttcatgttagtgatttcagaaatatagtcaaaatatatagtcaaatatatcttgacaggcatcttgagatttggtttttcattttactatatttatgactgaaaatggttttgtgttttctttatgttgtttatatattttttaccttagtgtttacactggtaaggcttgttagtccatttttgtagtttttttaaagtaagcttttagatctatttgtgttttaatgtttcccagtttgggttttgttttgttttggaagaatctgctttcattattaaattataaaatgtaaatgctctaaagtaggaatttttaaagagtaaattatttgtgtagcttattaggaggttcaggttagtgaccataaagtgggttacttgtacatgaaaatttgaaatggtaccatgtaaaattcttctattgtcaactttttctgatgtatgccagttcatttactgacaaatgttgttactaagtgcttattaagaagtgtaatacgctataaaaaagttaatactttttgttcagatgtaaggcaaagataattgatgccgtttcagtgtatgattgtatttttaacttttacgttggtgggagtaactatttgaggaaatttgtggtgagaattagtaagagataaaacccccaacagtttattcttaccaagtaaagttttgtggtcatggggcagggaagagtttatttaccagaatactagagccctcacacaaaataaaggtaacttggaggagggctataatgcttgcatctcagtattttcatttcacttcatcctttcataattgccttgattatggtgcagtctaacctattaagcaacttctggctatggtaacattgatatgaaccatattatatcaagtctccaaaacatctagtttgttaacatacactttccctgttctttttagtttgagtccacattactaatacattttaataatatttaattatttcacaattttaagtttaccaaagtaaacaaaaattcatgaagatgagtattgccctctcccaaaaaaggtttaaagattagttgaacttccctcaactacacctaaagcaaaggggaattttagtaagtgtgtgtaccttgtttctttcagacgcatctagaatgtttttctttcaccgtacctccaaaagaggcaatttagaaagtattaagtagtgacttttgttcagttccattttgtgtgtgtgtgtgtgtgtgtgtgtgtgtgtgtgaaccttgctttaaaacagtagcatatactatggtcattgaacttaatctctctggtgttagaaatttactttacaaaattgtgttaagacttttggaaaaagaaaatgaaactgctgtggtaaaaaccaagtttgtttcaaaaaagtaggcaattatttggctgttatattttctttgaaaactgcaataatttatatatttgtattgctctgcttgggaactgtatatatgcttgtctactatttttaattttacaacaataaaataagtattttgttaaaaaaaaaaa

SEQ ID NO: 279434 - DNA, 605 bp, Homo sapiens
ctgggggcggccgcgcgcccccaacgccgaaggccgggccaggacccggctccccgagacgctgaggctgggcggaccggccgccgtggccctcggacgctttcttccctctgggaggaatcccggagcgatgggacgagactctcccgcccgccgggctccaggatgccgcggctctcccagctccggcttgggcccctccggcggtgcccggccggtaccgtgaagccgccgctcggccttcggtgtagttgccccggacacggcgggacgccctccccgggtattcggtacccacgtgcattttgctgccgccgatctccgttcgatgcgaagcttcgcaactccgagttcgcgaggcgcatctgaggttcccccaatgaagttagcaaagcagtgtcccgtgcaggtcgtttttcctgtttctcacagcgttaactaggttgacagaacctggtagctgaaaaggcctcgctgctaagccctctgattattcgaggttgggggacgaaggaggaggactagaatgccggcaaatctctttccttcaggtgccactaacccaatcaactataggacaaaaaagacacggacatagtgtcacc

SEQ ID NO: 279435 - DNA, 5509 bp, Homo sapiens
  misc_feature (3360)..(3360): n is a, c, g, or t
  misc_feature (3699)..(3699): n is a, c, g, or t
cccggagcgatgggacgaggctctcccgcccgccgggctccaggatgccgcggctctcccagctccggcttgggcccctccggcggtgcccggccggtaccgtgaagccgccgctcggccttcggtgtagttgccccggacacggcgggacgccctccccgggggcactatgaacgaagaggagcagtttgtaaacattgatttgaatgatgacaacatttgcagtgtttgtaaactgggaacagacaaagaaacactctccttctgccacatttgttttgagctaaatattgagggggtaccaaagtctgatctcttgcacaccaaatcattaaggggccataaagactgctttgaaaaataccatttaattgcaaaccagggttgtcctcgatctaagctttcaaaaagtacttatgaagaagttaaaaccattttgagtaagaagataaactggattgtgcagtatgcacaaaataaggatctggattcagattctgaatgttctaaaaacccccagcatcatctgtttaatttcaggcataagccagaagaaaaattactcccacagtttgactcccaagtaccaaaatattctgcaaaatggatagatggaagtgcaggtggcatctctaactgtacacaaagaattttggagcagagggaaaatacagactttggactttctatgttacaagattcaggtgccactttatgtcgtaacagtgtattgtggcctcatagtcacaaccaggcacagaaaaaagaagagacaatctctagtccagaggctaatgtccagacccagcatccacattacagcagagaggaattgaattcgatgactcttggtgaggtagagcaactgaatgcaaagctcctacagcaaatccaggaagtttttgaagagttaactcaccaagtgcaagaaaaagattctttggcctcacagctccatgtccgccacgttgccatcgaacagcttctgaagaactgttctaagttaccatgtctgcaagtagggcgaacaggaatgaagtcgcacctacccataaacaactgacctaaacagacttacttcgtatgccctgccctttattggtctcccagacatgcaaactttgaagaagtttgaagaaagttgtggtccgtttttttatggtcattaaatttgccaaacataaggcagtatttaacatctttgtcaaataaagcagatcattatactctagtcttctagggctaatcattttggctcatttggggactcttttttcccagaattactaaacaaattttatcacatgtgactacttaaatatactgttacagtgtcattttattaaacattttaattcacctgtcaaaacaacagattaactccttagtgtaaactactagagataatttttaagagggaaatggaattcatatcacctcttatttattatgagcaatattttaatataaaaattttatatgtgaaaatgctattttaggtactttgccattctctttataaatgtgtatttgagtggttctgtatatttatttacattatcatgtgtgaatatgttcacccatatttcaggtcactgcattttattctcttaatacaatgttttcacaacggttaccttgctttccaaagataaatatattttggattagaaatctgagttgttttaatttctaatacctcttataaaagaagaattaataactttttaaagcagtattcaggtaaatacaatacattattttgttttctaacaaaagcagttcttagttcaggaagaaaagactaatctggcttctatgtcaatttgtctccatagaaatgaaagcctcctcttgcttctttcattattagcttcacaccaatgactgtgatgcattagaatttggacagagtaagtcaagcctcacttccaattcaaatataatgtctatcttcaaattgagtgtgctgtgaaattgttctgtctttgaaaaaaaaaagtaagattattttgtgtgccactttgggtaaagtttcaagaatacttaaactgtccaaattgtattatcaccatcattgaacttagtgctcaaagaaagcattgtgaggtatttttctaaactttagactctatagagaaatataggattgttctacagaagaaaagcaaaactcctaattaaaaaaaaataaacctatgtattaagagaatgttctcgtaagttgcctatgatgcttccaaagagtttttatctaacagattgtgccaaacagctagataaattttaataatgtattacagtaaaggctataaccaatgcagaattaaaatgggctctaaattctgtttttaactcatgtttagaatgtacttatgaggtagatccttgcttgaaagtatctgctgaaaagcccagtaacgtggcagcttcatgcataaagatataaatgacatttgccttaaatttggcagcctaccctggcttgggtcagattttgttgttgaacacaagaaagtatttaagcaaagaaacacttcagtttaattgaaaacaactttttgtaatgctgacgtgttaaattggcctgagggtattaattgatatctgttgattttgtttttctttgaagtataacattactttttggagggaatttttgaaagatgctttcgatttctctcaattctttaagtcatgcaaaatgaatttaaaatccagggagtatggatgcattgccttagttttgatgagctttaaattaaatgtgtgcaatatcaaaatattcaaacttacaagctgggtaaatacatttcctgattaatatcttagtgcttaattgttcccacattttcaaatttgactttactcttttttggcgtaattcagtaagattgttaccagccagtgtgtttgcacacatttgggtttgtgtttagatgagttagggacagtcataaaagttggggatatgttgcatttgatatcaatagtagcatatttccagaatatgagccataagttgcagtcctgaatacaacagtgttatccaaagaaaggagttttctgacaaatatacatagctttgctaatgagtacggaacaagtggatgaacgtgtgcatgtgctaaggtcttaagtgggactctgatttattccatttagatatttctacttaagctctaaaaaggagaggtgctcttaaaaaaaactttgtggtgctggtactcacactactttatttggatgagttcctagtaaaaaaaactttttgttgaagtattttgcacagcagtttatccaaatgtttggtaaacttataatttagtcctatgttagttttcttaatcaaatatgcanttactgtgtatgcaaatataagtatcaggtacagagttctaacaagagaacatgaaatatcacaaatattgttttccacacttggctattctctacagttgttagtaatttttgagaatgttttgaagcatatctcatgtactactgtttaaaaagtggcaaaacagactgccagtcatccattactaaattttcagagcttatatgattaaggggagtgagataagacaaatctttttcacgttcagttttataatttgacacgttaaattgagttttaaaaattagaaaagtgtttttgaccacacaggttgttctctttaaagttcagccttatantgaagctaaaaatcaattatgttttactttgagattatcatcttatcctttgatcctcatattaatatctaaattagtcttttttaaaaggcatgcacttgagactccagtaatagatgattcaggcagcagaatagtgttttgttgtgtcgttgactatgcacaatggtggagcaaagacacattcttagtttttcaaaacacatgttcattttaccacaaagtgcccatttttatatacatttaaggattattttttcaatgtcaagttcatgttagtgatttcagaaatatagtcaaaatatatagtcaaatatatcttgacaggcatcttgagatttggtttttcattttactatatttatgactgaaaatggttttgtgttttctttatgttgtttatatattttttaccttagtgtttacactggtaaggcttgttagtccatttttgtagtttttttaaagtaagcttttagatctatttgtgttttaatgtttcccagtttgggttttgttttgttttggaagaatctgctttcattattaaattataaaatgtaaatgctctaaagtaggaatttttaaagagtaaattatttgtgtagcttattaggaggttcaggttagtgaccataaagtgggttacttgtacatgaaaatttgaaatggtaccatgtaaaattcttctattgtcaactttttctgatgtatgccagttcatttactgacaaatgttgttactaagtgcttattaagaagtgtaatacgctataaaaaagttaatactttttgttcagatgtaaggcaaagataattgatgccgtttcagtgtatgattgtatttttaacttttacgttggtgggagtaactatttgaggaaatttgtggtgagaattagtaagagataaaacccccaacagtttattcttaccaagtaaagttttgtggtcatggggcagggaagagtttatttaccagaatactagagccctcacacaaaataaaggtaacttggaggagggctataatgcttgcatctcagtattttcatttcacttcatcctttcataattgccttgattatggtgcagtctaacctattaagcaacttctggctatggtaacattgatatgaaccatattatatcaagtctccaaaacatctagtttgttaacatacactttccctgttctttttagtttgagtccacattactaatacattttaataatatttaattatttcacaattttaagtttaccaaagtaaacaaaaattcatgaagatgagtattgccctctcccaaaaaaggtttaaagattagttgaacttccctcaactacacctaaagcaaaggggaattttagtaagtgtgtgtaccttgtttctttcagacgcatctagaatgtttttctttcaccgtacctccaaaagaggcaatttagaaagtattaagtagtgacttttgttcagttccattttgtgtgtgtgtgtgtgtgtgtgtgtgtgtgtgtgaaccttgctttaaaacagtagcatatactatggtcattgaacttaatctctctggtgttagaaatttactttacaaaattgtgttaagacttttggaaaaagaaaatgaaactgctgtggtaaaaaccaagtttgtttcaaaaaagtaggcaattatttggctgttatattttctttgaaaactgcaataatttatatatttgtattgctctgcttgggaactgtatatatgcttgtctactatttttaattttacaacaataaaataagtattttgttaaaaaaaaaaa

SEQ ID NO: 279436 - DNA, 4938 bp, Homo sapiens
  misc_feature (2789)..(2789): n is a, c, g, or t
  misc_feature (3128)..(3128): n is a, c, g, or t
ccctatgaattttaacacaaagtgtactcaatgtagtagtttactaattctacttttgtcatatactggcaacctttttaacatcgactagacgtaaattaggactcctatgtccgcttatatacactatatacacagcacagtaaatgaaaatgcagacataagggacaatggtcaatgtgcctcctcataaacacactggacactttgcatccagaggctaatgtccagacccagcatccacattacagcagagaggaattgaattcgatgactcttggtgaggtagagcaactgaatgcaaagctcctacagcaaatccaggaagtttttgaagagttaactcaccaagtgcaagaaaaagattctttggcctcacagctccatgtccgccacgttgccatcgaacagcttctgaagaactgttctaagttaccatgtctgcaagtagggcgaacaggaatgaagtcgcacctacccataaacaactgacctaaacagacttacttcgtatgccctgccctttattggtctcccagacatgcaaactttgaagaagtttgaagaaagttgtggtccgtttttttatggtcattaaatttgccaaacataaggcagtatttaacatctttgtcaaataaagcagatcattatactctagtcttctagggctaatcattttggctcatttggggactcttttttcccagaattactaaacaaattttatcacatgtgactacttaaatatactgttacagtgtcattttattaaacattttaattcacctgtcaaaacaacagattaactccttagtgtaaactactagagataatttttaagagggaaatggaattcatatcacctcttatttattatgagcaatattttaatataaaaattttatatgtgaaaatgctattttaggtactttgccattctctttataaatgtgtatttgagtggttctgtatatttatttacattatcatgtgtgaatatgttcacccatatttcaggtcactgcattttattctcttaatacaatgttttcacaacggttaccttgctttccaaagataaatatattttggattagaaatctgagttgttttaatttctaatacctcttataaaagaagaattaataactttttaaagcagtattcaggtaaatacaatacattattttgttttctaacaaaagcagttcttagttcaggaagaaaagactaatctggcttctatgtcaatttgtctccatagaaatgaaagcctcctcttgcttctttcattattagcttcacaccaatgactgtgatgcattagaatttggacagagtaagtcaagcctcacttccaattcaaatataatgtctatcttcaaattgagtgtgctgtgaaattgttctgtctttgaaaaaaaaaagtaagattattttgtgtgccactttgggtaaagtttcaagaatacttaaactgtccaaattgtattatcaccatcattgaacttagtgctcaaagaaagcattgtgaggtatttttctaaactttagactctatagagaaatataggattgttctacagaagaaaagcaaaactcctaattaaaaaaaaataaacctatgtattaagagaatgttctcgtaagttgcctatgatgcttccaaagagtttttatctaacagattgtgccaaacagctagataaattttaataatgtattacagtaaaggctataaccaatgcagaattaaaatgggctctaaattctgtttttaactcatgtttagaatgtacttatgaggtagatccttgcttgaaagtatctgctgaaaagcccagtaacgtggcagcttcatgcataaagatataaatgacatttgccttaaatttggcagcctaccctggcttgggtcagattttgttgttgaacacaagaaagtatttaagcaaagaaacacttcagtttaattgaaaacaactttttgtaatgctgacgtgttaaattggcctgagggtattaattgatatctgttgattttgtttttctttgaagtataacattactttttggagggaatttttgaaagatgctttcgatttctctcaattctttaagtcatgcaaaatgaatttaaaatccagggagtatggatgcattgccttagttttgatgagctttaaattaaatgtgtgcaatatcaaaatattcaaacttacaagctgggtaaatacatttcctgattaatatcttagtgcttaattgttcccacattttcaaatttgactttactcttttttggcgtaattcagtaagattgttaccagccagtgtgtttgcacacatttgggtttgtgtttagatgagttagggacagtcataaaagttggggatatgttgcatttgatatcaatagtagcatatttccagaatatgagccataagttgcagtcctgaatacaacagtgttatccaaagaaaggagttttctgacaaatatacatagctttgctaatgagtacggaacaagtggatgaacgtgtgcatgtgctaaggtcttaagtgggactctgatttattccatttagatatttctacttaagctctaaaaaggagaggtgctcttaaaaaaaactttgtggtgctggtactcacactactttatttggatgagttcctagtaaaaaaaactttttgttgaagtattttgcacagcagtttatccaaatgtttggtaaacttataatttagtcctatgttagttttcttaatcaaatatgcanttactgtgtatgcaaatataagtatcaggtacagagttctaacaagagaacatgaaatatcacaaatattgttttccacacttggctattctctacagttgttagtaatttttgagaatgttttgaagcatatctcatgtactactgtttaaaaagtggcaaaacagactgccagtcatccattactaaattttcagagcttatatgattaaggggagtgagataagacaaatctttttcacgttcagttttataatttgacacgttaaattgagttttaaaaattagaaaagtgtttttgaccacacaggttgttctctttaaagttcagccttatantgaagctaaaaatcaattatgttttactttgagattatcatcttatcctttgatcctcatattaatatctaaattagtcttttttaaaaggcatgcacttgagactccagtaatagatgattcaggcagcagaatagtgttttgttgtgtcgttgactatgcacaatggtggagcaaagacacattcttagtttttcaaaacacatgttcattttaccacaaagtgcccatttttatatacatttaaggattattttttcaatgtcaagttcatgttagtgatttcagaaatatagtcaaaatatatagtcaaatatatcttgacaggcatcttgagatttggtttttcattttactatatttatgactgaaaatggttttgtgttttctttatgttgtttatatattttttaccttagtgtttacactggtaaggcttgttagtccatttttgtagtttttttaaagtaagcttttagatctatttgtgttttaatgtttcccagtttgggttttgttttgttttggaagaatctgctttcattattaaattataaaatgtaaatgctctaaagtaggaatttttaaagagtaaattatttgtgtagcttattaggaggttcaggttagtgaccataaagtgggttacttgtacatgaaaatttgaaatggtaccatgtaaaattcttctattgtcaactttttctgatgtatgccagttcatttactgacaaatgttgttactaagtgcttattaagaagtgtaatacgctataaaaaagttaatactttttgttcagatgtaaggcaaagataattgatgccgtttcagtgtatgattgtatttttaacttttacgttggtgggagtaactatttgaggaaatttgtggtgagaattagtaagagataaaacccccaacagtttattcttaccaagtaaagttttgtggtcatggggcagggaagagtttatttaccagaatactagagccctcacacaaaataaaggtaacttggaggagggctataatgcttgcatctcagtattttcatttcacttcatcctttcataattgccttgattatggtgcagtctaacctattaagcaacttctggctatggtaacattgatatgaaccatattatatcaagtctccaaaacatctagtttgttaacatacactttccctgttctttttagtttgagtccacattactaatacattttaataatatttaattatttcacaattttaagtttaccaaagtaaacaaaaattcatgaagatgagtattgccctctcccaaaaaaggtttaaagattagttgaacttccctcaactacacctaaagcaaaggggaattttagtaagtgtgtgtaccttgtttctttcagacgcatctagaatgtttttctttcaccgtacctccaaaagaggcaatttagaaagtattaagtagtgacttttgttcagttccattttgtgtgtgtgtgtgtgtgtgtgtgtgtgtgtgtgaaccttgctttaaaacagtagcatatactatggtcattgaacttaatctctctggtgttagaaatttactttacaaaattgtgttaagacttttggaaaaagaaaatgaaactgctgtggtaaaaaccaagtttgtttcaaaaaagtaggcaattatttggctgttatattttctttgaaaactgcaataatttatatatttgtattgctctgcttgggaactgtatatatgcttgtctactatttttaattttacaacaataaaataagtattttgttaaaaaaaaaaa

SEQ ID NO: 279437 - DNA, 4109 bp, Homo sapiens
  misc_feature (3219)..(3219): n is a, c, g, or t
  misc_feature (3558)..(3558): n is a, c, g, or t
gcggccgcctctgctgcggccggaaacaatagtggaggaacccgagccgcacggaacggcggtggtggcccgcggagccggacggggcactatgaacgaagaggagcagtttgtaaacattgatttgaatgatgacaacatttgcagtgtttgtaaactgggaacagacaaagaaacactctccttctgccacatttgttttgagctaaatattgagggggtaccaaagtctgatctcttgcacaccaaatcattaaggggccataaagactgctttgaaaaataccatttaattgcaaaccagggttgtcctcgatctaagctttcaaaaagtacttatgaagaagttaaaaccattttgagtaagaagataaactggattgtgcagtatgcacaaaataaggatctggattcagattctgaatgttctaaaaacccccagcatcatctgtttaatttcaggcataagccagaagaaaaattactcccacagtttgactcccaagtaccaaaatattctgcaaaatggatagatggaagtgcaggtggcatctctaactgtacacaaagaattttggagcagagggaaaatacagactttggactttctatgttacaagattcaggtgccactttatgtcgtaacagtgtattgtggcctcatagtcacaaccaggcacagaaaaaagaagagacaatctctagtccagaggctaatgtccagacccagcatccacattacagcagagaggaataagtttttgaagagttaactcaccaagtgcaagaaaaagattctttggcctcacagctccatgtccgccacgttgccatcgaacagcttctgaagaactgttctaagttaccatgtctgcaagtagggcgaacaggaatgaagtcgcacctacccataaacaactgacctaaacagacttacttcgtatgccctgccctttattggtctcccagacatgcaaactttgaagaagtttgaagaaagttgtggtccgtttttttatggtcattaaatttgccaaacataaggcagtatttaacatctttgtcaaataaagcagatcattatactctagtcttctagggctaatcattttggctcatttggggactcttttttcccagaattactaaacaaattttatcacatgtgactacttaaatatactgttacagtgtcattttattaaacattttaattcacctgtcaaaacaacagattaactccttagtgtaaactactagagataatttttaagagggaaatggaattcatatcacctcttatttattatgagcaatattttaatataaaaattttatatgtgaaaatgctattttaggtactttgccattctctttataaatgtgtatttgagtggttctgtatatttatttacattatcatgtgtgaatatgttcacccatatttcaggtcactgcattttattctcttaatacaatgttttcacaacggttaccttgctttccaaagataaatatattttggattagaaatctgagttgttttaatttctaatacctcttataaaagaagaattaataactttttaaagcagtattcaggtaaatacaatacattattttgttttctaacaaaagcagttcttagttcaggaagaaaagactaatctggcttctatgtcaatttgtctccatagaaatgaaagcctcctcttgcttctttcattattagcttcacaccaatgactgtgatgcattagaatttggacagagtaagtcaagcctcacttccaattcaaatataatgtctatcttcaaattgagtgtgctgtgaaattgttctgtctttgaaaaaaaaaagtaagattattttgtgtgccactttgggtaaagtttcaagaatacttaaactgtccaaattgtattatcaccatcattgaacttagtgctcaaagaaagcattgtgaggtatttttctaaactttagactctatagagaaatataggattgttctacagaagaaaagcaaaactcctaattaaaaaaaaataaacctatgtattaagagaatgttctcgtaagttgcctatgatgcttccaaagagtttttatctaacagattgtgccaaacagctagataaattttaataatgtattacagtaaaggctataaccaatgcagaattaaaatgggctctaaattctgtttttaactcatgtttagaatgtacttatgaggtagatccttgcttgaaagtatctgctgaaaagcccagtaacgtggcagcttcatgcataaagatataaatgacatttgccttaaatttggcagcctaccctggcttgggtcagattttgttgttgaacacaagaaagtatttaagcaaagaaacacttcagtttaattgaaaacaactttttgtaatgctgacgtgttaaattggcctgagggtattaattgatatctgttgattttgtttttctttgaagtataacattactttttggagggaatttttgaaagatgctttcgatttctctcaattctttaagtcatgcaaaatgaatttaaaatccagggagtatggatgcattgccttagttttgatgagctttaaattaaatgtgtgcaatatcaaaatattcaaacttacaagctgggtaaatacatttcctgattaatatcttagtgcttaattgttcccacattttcaaatttgactttactcttttttggcgtaattcagtaagattgttaccagccagtgtgtttgcacacatttgggtttgtgtttagatgagttagggacagtcataaaagttggggatatgttgcatttgatatcaatagtagcatatttccagaatatgagccataagttgcagtcctgaatacaacagtgttatccaaagaaaggagttttctgacaaatatacatagctttgctaatgagtacggaacaagtggatgaacgtgtgcatgtgctaaggtcttaagtgggactctgatttattccatttagatatttctacttaagctctaaaaaggagaggtgctcttaaaaaaaactttgtggtgctggtactcacactactttatttggatgagttcctagtaaaaaaaactttttgttgaagtattttgcacagcagtttatccaaatgtttggtaaacttataatttagtcctatgttagttttcttaatcaaatatgcanttactgtgtatgcaaatataagtatcaggtacagagttctaacaagagaacatgaaatatcacaaatattgttttccacacttggctattctctacagttgttagtaatttttgagaatgttttgaagcatatctcatgtactactgtttaaaaagtggcaaaacagactgccagtcatccattactaaattttcagagcttatatgattaaggggagtgagataagacaaatctttttcacgttcagttttataatttgacacgttaaattgagttttaaaaattagaaaagtgtttttgaccacacaggttgttctctttaaagttcagccttatantgaagctaaaaatcaattatgttttactttgagattatcatcttatcctttgatcctcatattaatatctaaattagtcttttttaaaaggcatgcacttgagactccagtaatagatgattcaggcagcagaatagtgttttgttgtgtcgttgactatgcacaatggtggagcaaagacacattcttagtttttcaaaacacatgttcattttaccacaaagtgcccatttttatatacatttaaggattattttttcaatgtcaagttcatgttagtgatttcagaaatatagtcaaaatatatagtcaaatatatcttgacaggcatcttgagatttggtttttcattttactatatttatgactgaaaatggttttgtgttttctttaaagtgatttggttaggaaacttaaactctgagagcttccaaaattcaccatgaatggtaacttcatggttccgggaagccagagccaacagggaagtaatgtgctgcctagctcttcttgtctgataacagccagagtaatgcgctttgtggggaaca

SEQ ID NO: 279438 - DNA, 4927 bp, Homo sapiens
  misc_feature (2778)..(2778): n is a, c, g, or t
  misc_feature (3117)..(3117): n is a, c, g, or t
ctaattgaatctgtttatagattctaattgagaaaagtagctcagctacagtagcaaccaccatttttgctgtgtatctctgtagtcacttgatggagaagagccaaattccatttggctatgtaaagtatacagatgcctaggatgatcagaactgatatgctttgtagagaacagaactgtttccttggtatcaaatcagtttcattgtgacactttgcccaatgcatagatttcagttagagttcttgaaatataaatcatagcaccggctttctgcatactaaaaatgaaagtttttaaatcttttacagaagtttttgaagagttaactcaccaagtgcaagaaaaagattctttggcctcacagctccatgtccgccacgttgccatcgaacagcttctgaagaactgttctaagttaccatgtctgcaagtagggcgaacaggaatgaagtcgcacctacccataaacaactgacctaaacagacttacttcgtatgccctgccctttattggtctcccagacatgcaaactttgaagaagtttgaagaaagttgtggtccgtttttttatggtcattaaatttgccaaacataaggcagtatttaacatctttgtcaaataaagcagatcattatactctagtcttctagggctaatcattttggctcatttggggactcttttttcccagaattactaaacaaattttatcacatgtgactacttaaatatactgttacagtgtcattttattaaacattttaattcacctgtcaaaacaacagattaactccttagtgtaaactactagagataatttttaagagggaaatggaattcatatcacctcttatttattatgagcaatattttaatataaaaattttatatgtgaaaatgctattttaggtactttgccattctctttataaatgtgtatttgagtggttctgtatatttatttacattatcatgtgtgaatatgttcacccatatttcaggtcactgcattttattctcttaatacaatgttttcacaacggttaccttgctttccaaagataaatatattttggattagaaatctgagttgttttaatttctaatacctcttataaaagaagaattaataactttttaaagcagtattcaggtaaatacaatacattattttgttttctaacaaaagcagttcttagttcaggaagaaaagactaatctggcttctatgtcaatttgtctccatagaaatgaaagcctcctcttgcttctttcattattagcttcacaccaatgactgtgatgcattagaatttggacagagtaagtcaagcctcacttccaattcaaatataatgtctatcttcaaattgagtgtgctgtgaaattgttctgtctttgaaaaaaaaaagtaagattattttgtgtgccactttgggtaaagtttcaagaatacttaaactgtccaaattgtattatcaccatcattgaacttagtgctcaaagaaagcattgtgaggtatttttctaaactttagactctatagagaaatataggattgttctacagaagaaaagcaaaactcctaattaaaaaaaaataaacctatgtattaagagaatgttctcgtaagttgcctatgatgcttccaaagagtttttatctaacagattgtgccaaacagctagataaattttaataatgtattacagtaaaggctataaccaatgcagaattaaaatgggctctaaattctgtttttaactcatgtttagaatgtacttatgaggtagatccttgcttgaaagtatctgctgaaaagcccagtaacgtggcagcttcatgcataaagatataaatgacatttgccttaaatttggcagcctaccctggcttgggtcagattttgttgttgaacacaagaaagtatttaagcaaagaaacacttcagtttaattgaaaacaactttttgtaatgctgacgtgttaaattggcctgagggtattaattgatatctgttgattttgtttttctttgaagtataacattactttttggagggaatttttgaaagatgctttcgatttctctcaattctttaagtcatgcaaaatgaatttaaaatccagggagtatggatgcattgccttagttttgatgagctttaaattaaatgtgtgcaatatcaaaatattcaaacttacaagctgggtaaatacatttcctgattaatatcttagtgcttaattgttcccacattttcaaatttgactttactcttttttggcgtaattcagtaagattgttaccagccagtgtgtttgcacacatttgggtttgtgtttagatgagttagggacagtcataaaagttggggatatgttgcatttgatatcaatagtagcatatttccagaatatgagccataagttgcagtcctgaatacaacagtgttatccaaagaaaggagttttctgacaaatatacatagctttgctaatgagtacggaacaagtggatgaacgtgtgcatgtgctaaggtcttaagtgggactctgatttattccatttagatatttctacttaagctctaaaaaggagaggtgctcttaaaaaaaactttgtggtgctggtactcacactactttatttggatgagttcctagtaaaaaaaactttttgttgaagtattttgcacagcagtttatccaaatgtttggtaaacttataatttagtcctatgttagttttcttaatcaaatatgcanttactgtgtatgcaaatataagtatcaggtacagagttctaacaagagaacatgaaatatcacaaatattgttttccacacttggctattctctacagttgttagtaatttttgagaatgttttgaagcatatctcatgtactactgtttaaaaagtggcaaaacagactgccagtcatccattactaaattttcagagcttatatgattaaggggagtgagataagacaaatctttttcacgttcagttttataatttgacacgttaaattgagttttaaaaattagaaaagtgtttttgaccacacaggttgttctctttaaagttcagccttatantgaagctaaaaatcaattatgttttactttgagattatcatcttatcctttgatcctcatattaatatctaaattagtcttttttaaaaggcatgcacttgagactccagtaatagatgattcaggcagcagaatagtgttttgttgtgtcgttgactatgcacaatggtggagcaaagacacattcttagtttttcaaaacacatgttcattttaccacaaagtgcccatttttatatacatttaaggattattttttcaatgtcaagttcatgttagtgatttcagaaatatagtcaaaatatatagtcaaatatatcttgacaggcatcttgagatttggtttttcattttactatatttatgactgaaaatggttttgtgttttctttatgttgtttatatattttttaccttagtgtttacactggtaaggcttgttagtccatttttgtagtttttttaaagtaagcttttagatctatttgtgttttaatgtttcccagtttgggttttgttttgttttggaagaatctgctttcattattaaattataaaatgtaaatgctctaaagtaggaatttttaaagagtaaattatttgtgtagcttattaggaggttcaggttagtgaccataaagtgggttacttgtacatgaaaatttgaaatggtaccatgtaaaattcttctattgtcaactttttctgatgtatgccagttcatttactgacaaatgttgttactaagtgcttattaagaagtgtaatacgctataaaaaagttaatactttttgttcagatgtaaggcaaagataattgatgccgtttcagtgtatgattgtatttttaacttttacgttggtgggagtaactatttgaggaaatttgtggtgagaattagtaagagataaaacccccaacagtttattcttaccaagtaaagttttgtggtcatggggcagggaagagtttatttaccagaatactagagccctcacacaaaataaaggtaacttggaggagggctataatgcttgcatctcagtattttcatttcacttcatcctttcataattgccttgattatggtgcagtctaacctattaagcaacttctggctatggtaacattgatatgaaccatattatatcaagtctccaaaacatctagtttgttaacatacactttccctgttctttttagtttgagtccacattactaatacattttaataatatttaattatttcacaattttaagtttaccaaagtaaacaaaaattcatgaagatgagtattgccctctcccaaaaaaggtttaaagattagttgaacttccctcaactacacctaaagcaaaggggaattttagtaagtgtgtgtaccttgtttctttcagacgcatctagaatgtttttctttcaccgtacctccaaaagaggcaatttagaaagtattaagtagtgacttttgttcagttccattttgtgtgtgtgtgtgtgtgtgtgtgtgtgtgtgtgaaccttgctttaaaacagtagcatatactatggtcattgaacttaatctctctggtgttagaaatttactttacaaaattgtgttaagacttttggaaaaagaaaatgaaactgctgtggtaaaaaccaagtttgtttcaaaaaagtaggcaattatttggctgttatattttctttgaaaactgcaataatttatatatttgtattgctctgcttgggaactgtatatatgcttgtctactatttttaattttacaacaataaaataagtattttgttaaaaaaaaaaa

SEQ ID NO: 279439 - DNA, 504 bp, Homo sapiens
aagtgcaatgttggagtgcaagtatggcgatgcttgtttgatggagcttttgctttaaatgagctgaacagcatccttatttcctagaagttcccagtaaagggaactaccccaaaggcaggttcatgaaattgtgtaactttccttttctgtttcttaataggggcactatgaacgaagaggagcagtttgtaaacattgatttgaatgatgacaacatttgcagtgtttgtaaactgggaacagacaaagaaacactctccttctgccacatttgttttgagctaaatattgagggtaaggacacagtatagttttgatcttatggaatgaatttaacacagctgctttgtactgattgtaaggtaaaactaaaatgtcttcaatgattggaaattgtgctaagtatgaatagtgtagagatttgttaaagataaggtttctggaaatgaaggtgcagttaacagagttacgaatttaagagaaatctttttttttaaagac

SEQ ID NO: 279440 - DNA, 1593 bp, Homo sapiens
gcggccgcctctgctgcggccggaaacaatagtggaggaacccgagccgcacggaacggcggtggtggcccgcggagccggacggggcactatgaacgaagaggagcagtttgtaaacattgatttgaatgatgacaacatttgcagtgtttgtaaactgggaacagacaaagaaacactctccttctgccacatttgttttgagctaaatattgagggggtaccaaagtctgatctcttgcacaccaaatcattaaggggccataaagactgctttgaaaaataccatttaattgcaaaccagggttgtcctcgatctaagctttcaaaaagtacttatgaagaagttaaaaccattttgagtaagaagataaactggattgtgcagtatgcacaaaataaggatctggattcagattctgaatgttctaaaaacccccagcatcatctgtttaatttcaggcataagccagaagaaaaattactcccacagtttgactcccaagtaccaaaatattctgcaaaatggatagatggaagtgcaggtggcatctctaactgtacacaaagaattttggagcagagggaaaatacagactttggactttctatgttacaagattcaggtgccactttatgtcgtaacagtgtattgtggcctcatagtcacaaccaggcacagaaaaaagaagagacaatctctagtccagaggctaatgtccagacccagcatccacattacagcagagaggaattgaattcgatgactcttggtgaggtagagcaactgaatgcaaagctcctacagcaaatccaggaagtttttgaagagttaactcaccaagtgcaagaaaaagattctttggcctcacagctccatgtccgccacgttgccatcgaacagcttctgaagaactgttctaagttaccatgtctgcaagtagggcgaacaggaatgaagtcgcacctacccataaacaactgacctaaacagacttacttcgtatgccctgccctttattggtctcccagacatgcaaactttgaagaagtttgaagaaagttgtggtccgtttttttatggtcattaaatttgccaaacataaggcagtatttaacatctttgtcaaataaagcagatcattatactctagtcttctagggctaatcattttggctcatttggggactcttttttcccagaattactaaacaaattttatcacatgtgactacttaaatatactgttacagtgtcattttattaaacattttaattcacctgtcaaaacaacagattaactccttagtgtaaactactagagataatttttaagagggaaatggaattcatatcacctcttatttattatgagcaatattttaatataaaaattttatatgtgaaaatgctattttaggtactttgccattctctttataaatgtgtatttgagtggttctgtatatttatttacattatcatgtgtgaatatgttcacccatatttcaggtcactgcattttattctcttaatacaatgttttcacaacggttaccttgctttccaaagataaatatattttggattag

SEQ ID NO: 279441 - DNA, 5368 bp, Homo sapiens
  misc_feature (3219)..(3219): n is a, c, g, or t
  misc_feature (3558)..(3558): n is a, c, g, or t
gcggccgcctctgctgcggccggaaacaatagtggaggaacccgagccgcacggaacggcggtggtggcccgcggagccggacggggcactatgaacgaagaggagcagtttgtaaacattgatttgaatgatgacaacatttgcagtgtttgtaaactgggaacagacaaagaaacactctccttctgccacatttgttttgagctaaatattgagggggtaccaaagtctgatctcttgcacaccaaatcattaaggggccataaagactgctttgaaaaataccatttaattgcaaaccagggttgtcctcgatctaagctttcaaaaagtacttatgaagaagttaaaaccattttgagtaagaagataaactggattgtgcagtatgcacaaaataaggatctggattcagattctgaatgttctaaaaacccccagcatcatctgtttaatttcaggcataagccagaagaaaaattactcccacagtttgactcccaagtaccaaaatattctgcaaaatggatagatggaagtgcaggtggcatctctaactgtacacaaagaattttggagcagagggaaaatacagactttggactttctatgttacaagattcaggtgccactttatgtcgtaacagtgtattgtggcctcatagtcacaaccaggcacagaaaaaagaagagacaatctctagtccagaggctaatgtccagacccagcatccacattacagcagagaggaataagtttttgaagagttaactcaccaagtgcaagaaaaagattctttggcctcacagctccatgtccgccacgttgccatcgaacagcttctgaagaactgttctaagttaccatgtctgcaagtagggcgaacaggaatgaagtcgcacctacccataaacaactgacctaaacagacttacttcgtatgccctgccctttattggtctcccagacatgcaaactttgaagaagtttgaagaaagttgtggtccgtttttttatggtcattaaatttgccaaacataaggcagtatttaacatctttgtcaaataaagcagatcattatactctagtcttctagggctaatcattttggctcatttggggactcttttttcccagaattactaaacaaattttatcacatgtgactacttaaatatactgttacagtgtcattttattaaacattttaattcacctgtcaaaacaacagattaactccttagtgtaaactactagagataatttttaagagggaaatggaattcatatcacctcttatttattatgagcaatattttaatataaaaattttatatgtgaaaatgctattttaggtactttgccattctctttataaatgtgtatttgagtggttctgtatatttatttacattatcatgtgtgaatatgttcacccatatttcaggtcactgcattttattctcttaatacaatgttttcacaacggttaccttgctttccaaagataaatatattttggattagaaatctgagttgttttaatttctaatacctcttataaaagaagaattaataactttttaaagcagtattcaggtaaatacaatacattattttgttttctaacaaaagcagttcttagttcaggaagaaaagactaatctggcttctatgtcaatttgtctccatagaaatgaaagcctcctcttgcttctttcattattagcttcacaccaatgactgtgatgcattagaatttggacagagtaagtcaagcctcacttccaattcaaatataatgtctatcttcaaattgagtgtgctgtgaaattgttctgtctttgaaaaaaaaaagtaagattattttgtgtgccactttgggtaaagtttcaagaatacttaaactgtccaaattgtattatcaccatcattgaacttagtgctcaaagaaagcattgtgaggtatttttctaaactttagactctatagagaaatataggattgttctacagaagaaaagcaaaactcctaattaaaaaaaaataaacctatgtattaagagaatgttctcgtaagttgcctatgatgcttccaaagagtttttatctaacagattgtgccaaacagctagataaattttaataatgtattacagtaaaggctataaccaatgcagaattaaaatgggctctaaattctgtttttaactcatgtttagaatgtacttatgaggtagatccttgcttgaaagtatctgctgaaaagcccagtaacgtggcagcttcatgcataaagatataaatgacatttgccttaaatttggcagcctaccctggcttgggtcagattttgttgttgaacacaagaaagtatttaagcaaagaaacacttcagtttaattgaaaacaactttttgtaatgctgacgtgttaaattggcctgagggtattaattgatatctgttgattttgtttttctttgaagtataacattactttttggagggaatttttgaaagatgctttcgatttctctcaattctttaagtcatgcaaaatgaatttaaaatccagggagtatggatgcattgccttagttttgatgagctttaaattaaatgtgtgcaatatcaaaatattcaaacttacaagctgggtaaatacatttcctgattaatatcttagtgcttaattgttcccacattttcaaatttgactttactcttttttggcgtaattcagtaagattgttaccagccagtgtgtttgcacacatttgggtttgtgtttagatgagttagggacagtcataaaagttggggatatgttgcatttgatatcaatagtagcatatttccagaatatgagccataagttgcagtcctgaatacaacagtgttatccaaagaaaggagttttctgacaaatatacatagctttgctaatgagtacggaacaagtggatgaacgtgtgcatgtgctaaggtcttaagtgggactctgatttattccatttagatatttctacttaagctctaaaaaggagaggtgctcttaaaaaaaactttgtggtgctggtactcacactactttatttggatgagttcctagtaaaaaaaactttttgttgaagtattttgcacagcagtttatccaaatgtttggtaaacttataatttagtcctatgttagttttcttaatcaaatatgcanttactgtgtatgcaaatataagtatcaggtacagagttctaacaagagaacatgaaatatcacaaatattgttttccacacttggctattctctacagttgttagtaatttttgagaatgttttgaagcatatctcatgtactactgtttaaaaagtggcaaaacagactgccagtcatccattactaaattttcagagcttatatgattaaggggagtgagataagacaaatctttttcacgttcagttttataatttgacacgttaaattgagttttaaaaattagaaaagtgtttttgaccacacaggttgttctctttaaagttcagccttatantgaagctaaaaatcaattatgttttactttgagattatcatcttatcctttgatcctcatattaatatctaaattagtcttttttaaaaggcatgcacttgagactccagtaatagatgattcaggcagcagaatagtgttttgttgtgtcgttgactatgcacaatggtggagcaaagacacattcttagtttttcaaaacacatgttcattttaccacaaagtgcccatttttatatacatttaaggattattttttcaatgtcaagttcatgttagtgatttcagaaatatagtcaaaatatatagtcaaatatatcttgacaggcatcttgagatttggtttttcattttactatatttatgactgaaaatggttttgtgttttctttatgttgtttatatattttttaccttagtgtttacactggtaaggcttgttagtccatttttgtagtttttttaaagtaagcttttagatctatttgtgttttaatgtttcccagtttgggttttgttttgttttggaagaatctgctttcattattaaattataaaatgtaaatgctctaaagtaggaatttttaaagagtaaattatttgtgtagcttattaggaggttcaggttagtgaccataaagtgggttacttgtacatgaaaatttgaaatggtaccatgtaaaattcttctattgtcaactttttctgatgtatgccagttcatttactgacaaatgttgttactaagtgcttattaagaagtgtaatacgctataaaaaagttaatactttttgttcagatgtaaggcaaagataattgatgccgtttcagtgtatgattgtatttttaacttttacgttggtgggagtaactatttgaggaaatttgtggtgagaattagtaagagataaaacccccaacagtttattcttaccaagtaaagttttgtggtcatggggcagggaagagtttatttaccagaatactagagccctcacacaaaataaaggtaacttggaggagggctataatgcttgcatctcagtattttcatttcacttcatcctttcataattgccttgattatggtgcagtctaacctattaagcaacttctggctatggtaacattgatatgaaccatattatatcaagtctccaaaacatctagtttgttaacatacactttccctgttctttttagtttgagtccacattactaatacattttaataatatttaattatttcacaattttaagtttaccaaagtaaacaaaaattcatgaagatgagtattgccctctcccaaaaaaggtttaaagattagttgaacttccctcaactacacctaaagcaaaggggaattttagtaagtgtgtgtaccttgtttctttcagacgcatctagaatgtttttctttcaccgtacctccaaaagaggcaatttagaaagtattaagtagtgacttttgttcagttccattttgtgtgtgtgtgtgtgtgtgtgtgtgtgtgtgtgaaccttgctttaaaacagtagcatatactatggtcattgaacttaatctctctggtgttagaaatttactttacaaaattgtgttaagacttttggaaaaagaaaatgaaactgctgtggtaaaaaccaagtttgtttcaaaaaagtaggcaattatttggctgttatattttctttgaaaactgcaataatttatatatttgtattgctctgcttgggaactgtatatatgcttgtctactatttttaattttacaacaataaaataagtattttgttaaaaaaaaaaa

SEQ ID NO: 279442 - DNA, 1677 bp, Homo sapiens
aagaatcatggatgagaaaacagcaagtgagttgaagattttgtatggtcacagtgggcctgtctacggagccagcttcagtccggataggaactatctgctttcctcttcagaggacggaactgttagattgtggagccttcaaacatttacttgtttggtgggatataaaggacacaactatccagtatgggacacacaattttctccatatggatattattttgtgtcagggggccatgaccgagtagctcggctctgggctacagaccactatcagcctttaagaatatttgccggccatcttgctgatgtgaattgtaccagattccatccaaattctaattatgttgctacgggctctgcagacagaactgtgcggctctgggacgtcctgaatggtaactgtgtaaggatcttcactggacacaagggaccaattcattccttgacattttctcccaatgggagattcctggctacaggagcaacagatggcagagtgcttctttgggatattggacatggtttgatggttggagaattaaaaggccacactgatacagtctgttcacttaggtttagtagagatggtgaaattttggcatcaggttcaatggataatacagttcgattatgggatgctatcaaagcctttgaagatttagagaccgatgactttactacagccactgggcatataaatttacctgagaattcacaggagttattgttgggaacatatatgaccaaatcaacaccagttgtacaccttcattttactcgaagaaacctggttctagctgcaggagcttatagtccacaataaaccatcggtattaaagaccttttggaagctactgtttttaaaaagggagactaaaagcaaatacctcagtgattaatatttaagctacagagaatgtttttgtctatatggatctggaagtatgctgcttggaaaaatctgaacaggacagttccacgtttctatagcaaccacatttgactaatttccgttagttgaataagaggtattatgatcatggaggggacatttatggtgctttggattgtgtggaaactatgcattttctgttcaaatgctattttaatttattacattagaaaaaaagttgatttcaataattcatcctgcttcaagattcaaattcagaaatatactatcatcttgaattttagctgaagaatcctatgagcatgtatgtttctgctgtaaaaacgtagttactgtatggcactcaaaaactatgttaaatgatccactaactttttttttcttggcccatgattaatggaatgtatgtaactaggtagggttcctttcttagatctagaggaagtacagccacccactgacatctgaatttatatacctgttgagttttgagtgcacccaaacactcgataaaccaggtgaagaaatttagcttccatgttctacttcagctaaaacagctacatacaacctagtacacttgaagtcagacagacatttcagttgcttacctccagtactgagccttgctttgggaaactaaaagatttagaccaagtcactgccagtttttgcctttgttgcattttgtacagtttttatatttttgatatcttgtaaataaagacaaccagcttttccaggttcataatttattg

SEQ ID NO: 279443 - DNA, 3261 bp, Homo sapiens
agctgtgtctcttagcaactaagcccccggctcctccagaagcccctcttcgcacatgcgcaaactgcggacgggaaactgggctccctagccctggcggtttttggtgttgctgtcccagccagaatcgcgtctggccggtgggaagccgggaactccagccccctgtaggagaggagaaaggagcgagatcatgatacatggtgatggcttgcagagtcgtaaacaaaagaagacacatgggacttcaacaactttcatcattcgcggaaacaggaagaactttcctaggcccactaaaatcatccaaatttattatagatgaagaatgtcatgaaagtgtattaatcagttcaacagtaaggcttcttgaaagtttggatttaaccagtgcagtgggacaacttctcaatgaagcagttcaagcacaaaacaacacatatagaactggaatcagtactcttttgtttcttgttggtgcttggagcagtgcagttgaagaatgtcttcatcttggtgtccccatttccataatagtatcagtaatgtcagaaggcttaaacttttgtagtgaagaggtagtttctcttcatgtacctgttcacaatatatttgactgtatggacagcacaaaaacattttctcaacttgaaacatttagtgtaagtttgtgtccttttctacaggtcccttcagatactgatttgatagaggaattgcatggtctcaaagatgttgcctctcaaacactgaccatttccaacctttctgggagaacctcttaaatcatatgaattatttaaacctcagacaaaggttgaagcagataacaacacatcacgaactctgaaaaacagcctgcttgcagatacctgctgcagacagtcaatactaatccacagtaggcattttaataggacagataatactgaaggggtaagcaaaccagatggatttcaagaacatgttacagctactcacaaaacttacagatgtaatgatttggtagagttggcagtaggcttgagtcatggagatcacagcagcatgaagttagtagaagaagcagtacagctgcaatatcagaatgcttgtgtgcaacaaggcaactgtacaaaaccatttatgtttgacatttcaagaattttcacttgctgtctaccaggcttacctgaaacttcttcttgtgtttgtccaggatatatcactgttgtgtcagtatctaataatcctgtgatcaaggaattgcagaatcagcctgtgcgaatagttctcattgagggtgacctcacagagaattaccgccacctgggatttaataagtctgcaaatattaaaacagtattagatagcatgcggcttcaagaagacagctcagaagaactgtgggcaaatcacgtgttacaggtgttaatccagttcaaggtgaaccttgtcctggtacaaggaaatgtgtccgaacgcttaattgaaaaatgtataaacagtaagcggttggtaatcggctcagtgaatggcagtgtgatgcaggcttttgcagaggctgcaggagcagtacaggtggcctacattacacaagtgaatgaagattgtgtgggcgacggggtctgcgtgaccttctggagaagcagccctttggatgttgtagataggaacaacagaatcgcaatcttattaaaaacagaaggaattaatttggttacggccgtgctcactaacccagttactgcacagatgcaaatcaaagaagataggttctggacatgtgcctatcgtttgtattatgctctaaaagaggaaaaggtcttccttggaggtggtgcagttgaatttttgtgtcttagctgtcttcatattcttgcagagcaatctctgaaaaaagaaaaccatgcctgctcagggtggctgcataatacttcctcttggctggcttcatctctggcaatatacagaccaactgtgcttaaattcctggcaaatggatggcagaaatacctttcaactctcctatataacactgccaattactcatcagaatttgaagccagcacatacattcaacatcatctgcaaaatgccacagactctggctctccttcatcttacatcttgaatgaatatagtaaactaaatagtagaatttttaattcagacatttcaaataaactggagcagattccgagagtttatgacgttgttacaccaaagattgaggcgtggcgccgagcattggatttagtattgttagtacttcagacagacagtgaaataattactggacatggacacacacagataaattcacaggaattaacgggctttctatttttgtagtgttactggctaagtctttggaaaataatttttcataatatgtcatgctaataataaatatattgatagccaagtcatggtgcctaaaatgccagctattgccaagaagaaaatagttgatgtctgtcaataactgtgcatggtctgagattttaccctacttataagctaacaagttagcctgttactgtttcgtgggatgctacagaatgcataagacacctgggtcagaaacaaaggacttatcgctcacagcaaaagctgtagccagagcttcatgttggttttattcagttcctcatttttctagttcccacaggaggaacacaaagggcccatgatgaaagcctgcacacagtgggttatgttgtaagcttgggttattaactgcttttatagtaagcaaaaaaatcctggtctttgtccaaagggagttattaccccatacttgaagatagcttagtgtaaacacaagcctaggacatggactaggtaaagacaaagtccttgcattcttgacatacccagtaagtatgcagggacactcagagcccatagtggatagtctcttccaacagtctgctcctcagcctgagatgttcttggccaaacttgaattttcacatgagtatgccactctatcagctactctgattaacctgacagtcgggttgtttagtcagtaccaaatttgttcatttggtctcatatagcaattaatgcaggctattatcagacacagcagcaggatgaagccaacctgcagtattaacctcagtcctgtcccccaaggtcttgactcaatcaactctaagttccaagggaggaccaataggtctttttattaggcagccagaatgtagtgaaggacaatttattatactttatgacccaataaagggagctttgactgacgtaatgatatgt

SEQ ID NO: 279444 - DNA, 3449 bp, Homo sapiens
agctgtgtctcttagcaactaagcccccggctcctccagaagcccctcttcgcacatgcgcaaactgcggacgggaaactgggctccctagccctggcggtttttggtgttgctgtcccagccagaatcgcgtctggccggtgggaagccgggaactccagccccctgtaggagaggagaaaggagcgaggcaggagaggaaaacaagtgcaaagtgcattcttgaagcactctgtcaaatcacttttcatgcttcattgagtagaaacatggcacattttccaaagccatcagcctgtcttgttcatattatatcccagacagacacgcaagtattgtaatcattgataaaaatctcattaggcttctggaaaatagatcatgatacatggtgatggcttgcagagtcgtaaacaaaagaagacacatgggacttcaacaactttcatcattcgcggaaacaggaagaactttcctaggcccactaaaatcatccaaatttattatagatgaagaatgtcatgaaagtgtattaatcagttcaacagtaaggcttcttgaaagtttggatttaaccagtgcagtgggacaacttctcaatgaagcagttcaagcacaaaacaacacatatagaactggaatcagtactcttttgtttcttgttggtgcttggagcagtgcagttgaagaatgtcttcatcttggtgtccccatttccataatagtatcagtaatgtcagaaggcttaaacttttgtagtgaagaggtagtttctcttcatgtacctgttcacaatatatttgactgtatggacagcacaaaaacattttctcaacttgaaacatttagtgtaagtttgtgtccttttctacaggtcccttcagatactgatttgatagaggaattgcatggtctcaaagatgttgcctctcaaacactgaccatttccaacctttctgggagaacctcttaaatcatatgaattatttaaacctcagacaaaggttgaagcagataacaacacatcacgaactctgaaaaacagcctgcttgcagatacctgctgcagacagtcaatactaatccacagtaggcattttaataggacagataatactgaaggggtaagcaaaccagatggatttcaagaacatgttacagctactcacaaaacttacagatgtaatgatttggtagagttggcagtaggcttgagtcatggagatcacagcagcatgaagttagtagaagaagcagtacagctgcaatatcagaatgcttgtgtgcaacaaggcaactgtacaaaaccatttatgtttgacatttcaagaattttcacttgctgtctaccaggcttacctgaaacttcttcttgtgtttgtccaggatatatcactgttgtgtcagtatctaataatcctgtgatcaaggaattgcagaatcagcctgtgcgaatagttctcattgagggtgacctcacagagaattaccgccacctgggatttaataagtctgcaaatattaaaacagtattagatagcatgcggcttcaagaagacagctcagaagaactgtgggcaaatcacgtgttacaggtgttaatccagttcaaggtgaaccttgtcctggtacaaggaaatgtgtccgaacgcttaattgaaaaatgtataaacagtaagcggttggtaatcggctcagtgaatggcagtgtgatgcaggcttttgcagaggctgcaggagcagtacaggtggcctacattacacaagtgaatgaagattgtgtgggcgacggggtctgcgtgaccttctggagaagcagccctttggatgttgtagataggaacaacagaatcgcaatcttattaaaaacagaaggaattaatttggttacggccgtgctcactaacccagttactgcacagatgcaaatcaaagaagataggttctggacatgtgcctatcgtttgtattatgctctaaaagaggaaaaggtcttccttggaggtggtgcagttgaatttttgtgtcttagctgtcttcatattcttgcagagcaatctctgaaaaaagaaaaccatgcctgctcagggtggctgcataatacttcctcttggctggcttcatctctggcaatatacagaccaactgtgcttaaattcctggcaaatggatggcagaaatacctttcaactctcctatataacactgccaattactcatcagaatttgaagccagcacatacattcaacatcatctgcaaaatgccacagactctggctctccttcatcttacatcttgaatgaatatagtaaactaaatagtagaatttttaattcagacatttcaaataaactggagcagattccgagagtttatgacgttgttacaccaaagattgaggcgtggcgccgagcattggatttagtattgttagtacttcagacagacagtgaaataattactggacatggacacacacagataaattcacaggaattaacgggctttctatttttgtagtgttactggctaagtctttggaaaataatttttcataatatgtcatgctaataataaatatattgatagccaagtcatggtgcctaaaatgccagctattgccaagaagaaaatagttgatgtctgtcaataactgtgcatggtctgagattttaccctacttataagctaacaagttagcctgttactgtttcgtgggatgctacagaatgcataagacacctgggtcagaaacaaaggacttatcgctcacagcaaaagctgtagccagagcttcatgttggttttattcagttcctcatttttctagttcccacaggaggaacacaaagggcccatgatgaaagcctgcacacagtgggttatgttgtaagcttgggttattaactgcttttatagtaagcaaaaaaatcctggtctttgtccaaagggagttattaccccatacttgaagatagcttagtgtaaacacaagcctaggacatggactaggtaaagacaaagtccttgcattcttgacatacccagtaagtatgcagggacactcagagcccatagtggatagtctcttccaacagtctgctcctcagcctgagatgttcttggccaaacttgaattttcacatgagtatgccactctatcagctactctgattaacctgacagtcgggttgtttagtcagtaccaaatttgttcatttggtctcatatagcaattaatgcaggctattatcagacacagcagcaggatgaagccaacctgcagtattaacctcagtcctgtcccccaaggtcttgactcaatcaactctaagttccaagggaggaccaataggtctttttattaggcagccagaatgtagtgaaggacaatttattatactttatgacccaataaagggagctttgactgacgtaatgatatgt

SEQ ID NO: 279445 - DNA, 411 bp, Homo sapiens
ttatttagctcttccttaagaggatcgatcattgtatttccagttttagagcttctcaacattctcttaaaatgagtcagaactatctttcaggctcacttaaaatgttaccatggggagttttatgggaagaaaggctaagagaaggtcaaattagcaaatataatactaaattttccaggatttcagatacgatcctgcttggtcgtgtcctatttttggttagatgtgagaaagataagtgtcttcttttcagccattagtacccatataagaatgagaaaatattttcttaatgagtcacttcctgttttaagagattatgtaattgtcctgtacttctggttttggtcagttttgtttcattcatcagtagatgttgtacgtatatctgttgtatgagagaatcat

SEQ ID NO: 279446 - DNA, 379 bp, Homo sapiens
  misc_feature (213)..(213): n is a, c, g, or t
ggtgaaattctaggaatagtcagttacctgggctagcgatacaggagctcggaatatctagcatccccaggtccaaaggcatcaagcaaggaagtagttatcagaatccattaggagagccctatagagcaggatgccttcaaagaactcatgatttttcataaaaggacacatagattgaggcaatcataagacagagctaaccagggtttnaaaagacaccttgatctcactcaattctctccctctcatctctgccgggaatttctgttggccaaatccaggtggaagcagaggacatgggggcctactgatgttcattcacatcagccatctgtagccaaagtaaggtgaagaaggatgaggagtacatctaggg

SEQ ID NO: 279447 - DNA, 1125 bp, Homo sapiens
aacctgtcttacagaaatactccattttatgcccatgcaaaggaaatagctgctacccagctaaaaactgtgtgtgttttattaaaaccacactaggtttgagatcctacagacaatgaagccctggctgataaacagccttctgctagtgtgaacagttcacttccaaaaaattaatactacagtcagggagatacgtcctttttatgtcaatagaagtgttatttgaagattttttctaccatctcatcagaaaccatcctcataaaagaccccaagctgtggaaggtcactcaccgagctgaagctaaaaccaattgagtgaatattcactttgccataaatgcccagagtgtctattttctctgggccgatcctgtggccatagagcagagtatgttttccatttacagccacctagagagatacagaagacagagccccccccgccaccaaaaaaaaacagttaataaattaacttattatccaaatttaaatgtttccttgcgtccaattttatacctgttcccacaggtctccacacacgtgaccaaatggtaaccgaaagcacccaaaacaccagcagtgcttccgaacttcttttgagttcctgatttgattaagcaccaggaactgtctctccccagacaaacaggcagtcataagtatatgtgcgtgtgcttgtgtgcgcctctgcatacatgtgagacatctgggttcgaaggtcgcctggaagcccaggcacaggtgccctggagattgtgaacccaggttaaagatctgcctgcgagctccccacaacactgtccctggagaccacccatgtggcagacactcaaaatctgttgtatttgctaaataaattaatatggacaagttacccaacatatttgaattcggttttcttattctgaagtaggaacagtctctacctcaacagactacagtaagatgacgagaaagtagcttctgcaggtcctcggcacgctacgaggctcctcctccctccctctcaaatgccaggtaccacgttaggttataggcagaaaacgcgagcagcatacaatatagtctctgactcagggagcttaaaatcccattgtggaggcaaaataaacacgtaaa

SEQ ID NO: 279448 - DNA, 732 bp, Homo sapiens
acacgctgcttctaaaacagctcacacctggctgctcacacagagggcccagaaacactgggtggcacgaggaagctcctccaggattcagaatgaacccagttccattggtggttaactaagaactacttgtctaagaaagtctccacacacgtgaccaaatggtaaccgaaagcacccaaaacaccagcagtgcttccgaacttcttttgagttcctgatttgattaagcaccaggaactgtctctccccagacaaacaggcagtcataagtatatgtgcgtgtgcttgtgtgcgcctctgcatacatgtgagacatctgggttcgaaggtcgcctggaagcccaggcacaggtgccctggagattgtgaacccaggttaaagatctgcctgcgagctccccacaacactgtccctggagaccacccatgtggcagacactcaaaatctgttgtatttgctaaataaattaatatggacaagttacccaacatatttgaattcggttttcttattctgaagtaggaacagtctctacctcaacagactacagtaagatgacgagaaagtagcttctgcaggtcctcggcacgctacgaggctcctcctccctccctctcaaatgccaggtaccacgttaggttataggcagaaaacgcgagcagcatacaatatagtctctgactcagggagcttaaaatcccattgtggaggcaaaataaacacgtaaa

SEQ ID NO: 279449 - DNA, 847 bp, Homo sapiens
gggggtgctgctcatcctggctcccagggattgcgccgtagccagctgtaatgggtgggactggcgctcactgctggtgcaggctgtggccatctgggaggtcctttctagaatctggaccttggctgtcctgagagtgacactcctcatctcaagtactgggggcatgaagttaggcttggcaggtggccccgtgtggggggcatgctgttcccaggagcccccagtggaggtcagagtacccactgctccttcttgattcaaccccttgcaggtgggataggagcatgccaggtgctgcgagggtttaatcgggctcttctgctggccttgaatatggtggacaggacaggacattctcattgctcaggagccactggcgctgcctttgggaatgaagttccacagccccccactcattgctttggctgtctgctgcatttgaaactgtacgagggtcaggaagaaggctgcggggatgaatggctctaccggcttgccacggatggggaactggagcagccagtggccccaagaggaggaaggaagggaggcacggcagacccaacaccagctgtgccaggctttggggggtgaacccatgaggcatcgtcacacactgacattttcatccctcctcagcagctgcttccggctccctgagacccagccatggaaggcatagaaaggcatgtgacaagaaactcatggcttttaatcctggcaggacaaggaaaaccccgtcaaagatttgcataaattttgctgctctcctgctgggggggggggggggcagttcgtcacatttaataaaattctctccctcccttctcccgactgcattatc

SEQ ID NO: 279450 - DNA, 362 bp, Homo sapiens
gctcggcatggcggcagtcactgccgtcacttagtcgccgatcaaggcttggactaagggcccacggtcactcgagtaggacttggatcggatgctgaataaaactcaccgtgaagcaagtcccactgaacgaaaagttggtcgtagcatttctcagcagctgcttccggctccctgagacccagccatggaaggcatagaaaggcatgtgacaagaaactcatggcttttaatcctggcaggacaaggaaaaccccgtcaaagatttgcataaattttgctgctctcctgctgggggggggggggggcagttcgtcacatttaataaaattctctccctcccttctcccgactgcattatc

SEQ ID NO: 279451 - DNA, 402 bp, Homo sapiens
agcgctgcttgggaaagggcaccttggactacctggtgggggcgttgtgcttcgttaccgaccgccgggacgccaacccacggtgcccacccgtgcgtcattccgctgtggatcagccctttggcggcccccctccaaagtctacaaggtcacacggatgtctgcaggcagaggtggggctgctggggccctgccagcagctgcttccggctccctgagacccagccatggaaggcatagaaaggcatgtgacaagaaactcatggcttttaatcctggcaggacaaggaaaaccccgtcaaagatttgcataaattttgctgctctcctgctgggggggggggggggcagttcgtcacatttaataaaattctctccctcccttctcccgactgcattatc

SEQ ID NO: 279452 - DNA, 378 bp, Homo sapiens
agcgctgcttgggaaagggcaccttggactacctggtgggggcgttgtgcttcgttaccgaccgccgggacgccaacccacggtgcccacccgtgcgtcattccgctgtggatcagccctttggcggcccccctccaaagtctacaaggtcacacggatgtctgcaggcagagcagctgcttccggctccctgagacccagccatggaaggcatagaaaggcatgtgacaagaaactcatggcttttaatcctggcaggacaaggaaaaccccgtcaaagatttgcataaattttgctgctctcctgctgggggggggggggggcagttcgtcacatttaataaaattctctccctcccttctcccgactgcattatc

SEQ ID NO: 279453 - DNA, 760 bp, Homo sapiens
  misc_feature (33)..(33): n is a, c, g, or t
  misc_feature (71)..(71): n is a, c, g, or t
gccaccctgccggacggtcaactaaggacgctncattaatagggcgcacctggggcagtttacaaccgcgnggtggcgttcgttactctatcgattgtcagcatcgcgactcatccgtcaacgggtcgtgcacgcggttcactagaagaccaccagcgacgtcccgcgcgcctcggaatccctgtatcggccgacccgtcgtggacagacagggctcgaggctcacacccggacagtcacggggggactcggcgtgaggcgctgtcggtctgatggtcccccatcagggagctaccccacaagcagaggagcagcgggatgggagcaggccaacgtcctgcggcctggttgagctcgcactgacaatcgcagctcaggcgctcaggactgccaggacccagaggattcacacgccagccccggctgaagcccagctcctcatcaaccggtgagccgcctgccagctcctgctccagctgctgagaggcctgaagagaccaagacagagacacagccccgcagcaccacagggaggccccagttaccccatgcggatgagtttcatggccatctctaactaaggacaggacatcgatgtcatctgtaacttccggtgcactggggcacacagctgcatctccccatgctcacctcctgcctcttgctctgcccagtgtgaggactcagcctggatcacctcctccaggacaagaacaacctaccatcatctgtccgtccaatctacccacccatccatctc

SEQ ID NO: 279454 - DNA, 420 bp, Homo sapiens
gcaggcactctcagaacacagcctgccggccccagcacccggccttgctcccagcctcttccctctgtattcagctcaggcgctcaggactgccaggacccagaggattcacacgccagccccggctgaagcccagctcctcatcaaccggtgagccgcctgccagctcctgctccagctgctgagaggcctgaagagaccaagacagagacacagccccgcagcaccacagggaggccccagttaccccatgcggatgagtttcatggccatctctaactaaggacaggacatcgatgtcatctgtaacttccggtgcactggggcacacagctgcatctccccatgctcacctcctgcctcttgctctgcccagtaagctcgccaacccccgaggactgctgggtctcaacgcggccg

SEQ ID NO: 279455 - DNA, 235 bp, Homo sapiens
ttggcccggaggcgttgatatggcccggaggcgttgaatggcactctcgtaactaaggacaggacatcgatgtcatctgtaacttccggtgcactggggcacacagctgcatctccccatgctcacctcctgcctcttgctctgcccagtgtgaggactcagcctggatcacctcctccaggacaagaacaacctaccatcatctgtccgtccaatctacccacccatccatctc

SEQ ID NO: 279456 - DNA, 1478 bp, Homo sapiens
ccagctgccggtcctggaacacccagaactggggccctgcagggtggaggccgggaggtcaggggtgggctccccgcgccggccccagcgcgccccgccgccggccccactcaccgctaaagaggaggattcggccgtctcggtgccgagcataggcggcctgcaccaccctcacttgggcgggcagcccctcccagaagcggtgcagccgtgcgggtcgcggggacaccagctgtccggagggctggaggcgccagaaccaggggcctgcaggggacaaaggggttcgcaggaaggcatgagacagcaggaggtctcctcccccagggtgtgtggctgggtggggaggggtcccatctggaaatcaagggcgcaatggatctagggtgaccagcccatcctggcccgcctgagacttttccctttttagcgctaaaagtgccagggccttgcctggtggctcagacctgtaatgccagcacattgggaggctgacaccggagaatcacctgagccaggagattgagcccagcctgggcaatatagtgagactccatctctacaaaataataaaataaattactagcaaggcgtggtggcatgtgcctgtggtcccagctaccagggaggctgaggtgggaggatcgcttgagcccagtattttgaggctgcagtgagccatgatcacaccactgcactgcggcccaggcaacaaagcaagaccctgtctcaaagaagaaaaaagttccgcttccagggtaagcccacagccccagtgggtcactggaagtgggcaggaaaccaacatatatgaggccaagtgaaatgactcacctttgaagaagaaagtttcccctcggatgttggcgatggcgtcaaaattgccctcacatcgatcagggatggggaaggatgggctggggaggaaaggagagagttgctgcaggccatcgcggtcatcctgagacaggcggtacttgtcagggtcgcccaccggaccctggtagaagggcctcataatggagttgggggctgaggagtggcccaggcccagggcgtggccaaactcatggacagccacggcaaacagctcaggcgctcaggactgccaggacccagaggattcacacgccagccccggctgaagcccagctcctcatcaaccggtgagccgcctgccagctcctgctccagctgctgagaggcctgaagagaccaagacagagacacagccccgcagcaccacagggaggccccagttaccccatgcggatgagtttcatggccatctctaactaaggacaggacatcgatgtcatctgtaacttccggtgcactggggcacacagctgcatctccccatgctcacctcctgcctcttgctctgcccagtgtgaggactcagcctggatcacctcctccaggacaagaacaacctaccatcatctgtccgtccaatctacccacccatccatctc

SEQ ID NO: 279457 - DNA, 465 bp, Homo sapiens
cagcacccggccttgctcccagcctcttccctctgtattcagctcaggcgctcaggactgccaggacccagaggattcacacgccagccccggctgaagcccagctcctcatcaaccggtgagccgcctgccagctcctgctccagctgctgagaggcctgaagagaccaagacagagacacagccccgcagcaccacagggaggccccagttaccccatgcggatgagtttcatggccatctctaactaaggtcagcactgttcagggcaggttcataggtaacgacctggtgaactgaaaagcaaatttctctcggtccctaaagccactcgctgagcgtctaagcatgaaacgtgagacctaagaggggtagcaaacacgttttcgttcacttctcaccaaacctgtctcctatgcccattttacagaggaggaaactgaggcacagagacttcaaggtaga

SEQ ID NO: 279458 - DNA, 295 bp, Homo sapiens
gaggagccaggggtttccttgtgggcttgtcatatggggtttggggcgccttccctgtgaggaaagagtcaggcaggtgtgcgtcccctggccttgctgcagaggacactggatggggcaatgatggtttcgcggcaggtccctctccccctaccatagagttgctgcaggccatcgcggtcatcctgagacaggcggtacttgtcagggtcgcccaccggaccctggtagaagggcctcataatggagttgggggctgaggagtggcccaggcccagggcgtggccaaactcat

SEQ ID NO: 279459 - DNA, 551 bp, Homo sapiens
aacgacgggggcgacgaccgacgcatggtcccagcgcgcgtgcgcccctgaaggcgggttccggtggcagcgccggggtctcagaccctgaggagactgagcccagcgccaggcgaccggtccccgccgccgccgcccctgcgcgggagatcccccctgcttagtccgcgcccgagcccccgtccgtgggaacagacaaggggcctccgcagcgcctcacaacccccgaccaggtccagcggcgggggactcggccgtggagggcgctgttcggtctggatggctccccccatcagcgggaggctacaccccccaccagcaggggcaagaggagcagcgggatgggagcaggccaacgtcctgcggcctggttgagctcgcactgacaatcgcaggtttcggacacgggggtcgctttggggggcctgggggcgcggggaccagagctcggggcggggcagtccagccagttgggccccatgggctggggggcgtccggctcggtcttgatgctgttcttggggaacgcagtagtgggcgcccttgaagag

SEQ ID NO: 279460 - DNA, 697 bp, Homo sapiens
aggcgggttccggtggcagcgccggggtctcagaccctgaggagactgagcccagcgccaggcgaccggtccccgccgccgccgcccctgcgcgggagatcccccctgcttagtccgcgcccgagcccccgtccgtgggaacagacaaggggcctccgcagcgcctcacaacccccgaccaggtccagcggcgggggactcggccgtggagggcgctgttcggtctggatggctccccccatcagcgggaggctacaccccccaccagcaggggcaagaggagcagcgggatgggagcaggccaacgtcctgcggcctggttgagctcgcactgacaatcgcagctcaggcgctcaggactgccaggacccagaggattcacacgccagccccggctgaagcccagctcctcatcaaccggtgagccgcctgccagctcctgctccagctgctgagaggcctgaagagaccaagacagagacacagccccgcagcaccacagggaggccccagttaccccatgcggatgagtttcatggccatctctaactaaggacaggacatcgatgtcatctgtaacttccggtgcactggggcacacagctgcatctccccatgctcacctcctgcctcttgctctgcccagtgctggagtgcagtggcacgatctcggctcactgcaacctctgcctccagg

SEQ ID NO: 279461 - DNA, 1555 bp, Homo sapiens
aggcgggttccggtggcagcgccggggtctcagaccctgaggagactgagcccagcgccaggcgaccggtccccgccgccgccgcccctgcgcgggagatcccccctgcttagtccgcgcccgagcccccgtccgtgggaacagacaaggggcctccgcagcgcctcacaacccccgaccaggtccagcggcgggggactcggccgtggagggcgctgttcggtctggatggctccccccatcagcgggaggctacaccccccaccagcaggggcaagaggagcagcgggatgggagcaggccaacgtcctgcggcctggttgagctcgcactgacaatcgcaggcccagtaacccgcaggtcaccgcgctccccacctgcgttgctgacggtgacatcgtcaggggaggggggcgcgccttcccagaggctcaggtcgcgagggtagccggggtccgggcgcgccgccgcctcgtcgtagcgccagtactgccggccgcggaccagcgctaaaagtgccagggccttgcctggtggctcagacctgtaatgccagcacattgggaggctgacaccggagaatcacctgagccaggagattgagcccagcctgggcaatatagtgagactccatctctacaaaataataaaataaattactagcaaggcgtggtggcatgtgcctgtggtcccagctaccagggaggctgaggtgggaggatcgcttgagcccagtattttgaggctgcagtgagccatgatcacaccactgcactgcggcccaggcaacaaagcaagaccctgtctcaaagaagaaaaaagttccgcttccagggtaagcccacagccccagtgggtcactggaagtgggcaggaaaccaacatatatgaggccaagtgaaatgactcacctttgaagaagaaagtttcccctcggatgttggcgatggcgtcaaaattgccctcacatcgatcagggatggggaaggatgggctggggaggaaaggagagagttgctgcaggccatcgcggtcatcctgagacaggcggtacttgtcagggtcgcccaccggaccctggtagaagggcctcataatggagttgggggctgaggagtggcccaggcccagggcgtggccaaactcatggacagccacggcaaacagctcaggcgctcaggactgccaggacccagaggattcacacgccagccccggctgaagcccagctcctcatcaaccggtgagccgcctgccagctcctgctccagctgctgagaggcctgaagagaccaagacagagacacagccccgcagcaccacagggaggccccagttaccccatgcggatgagtttcatggccatctctaactaaggacaggacatcgatgtcatctgtaacttccggtgcactggggcacacagctgcatctccccatgctcacctcctgcctcttgctctgcccagtgtgaggactcagcctggatcacctcctccaggacaagaacaacctaccatcatctgtccgtccaatctacccacccatccatctc

SEQ ID NO: 279462 - DNA, 414 bp, Homo sapiens
aagggaaaagaaactatctgcaaaggaagattctcatgcacagattgaaaccctctgagatatcaaccccctagcttggcccgtgcaggctttctttgcctttaagaagatgaaattgttaccaaagcaggagaagaatgtcagacactctgcatgcttgccagagagctcgctagaggacgtgcagaaggtcaaagtcctccatcaccagagcaagttcagccaccaggccccttaagcacagtgccaagagcctgtgaaaacatgaaacctttgaaaatatgggtgccaaaatataaaaacaaagaatgtatgaatagtatgaaatctttataaaacataatattgtcagtttcattcactgtcaaatttaatattcaaaatagtctcattacatttataaaacttgaaaaa

SEQ ID NO: 279463 - DNA, 508 bp, Homo sapiens
agacctctgcgtcgacgaggagacatgcatgtggctgcagccagtgtagcgagagctgttaggtaatgcgcaaagagaaagggatcgcgagggctgcagtgcgcacgggtcggatttgaaatcggtggccttgagcaggtactttgagaacatccccaagggtctagaccaggaaggctggactcgaggtggcatccagccccagatgccaggaggctacgccctcagccagccggtcagctgcatggaggccacccccaaccccatggagagcctgcggcacctgcatccccacgtgggaagaaccctgacctcagctgaccccttctaccagaacacacctcacagcagccgctgcgtggcacacagctgagccctgagcccttggtttgtcaatcctaggggacaggagccaggctactgtctgtacccccactccatcccccaggggaacacccctgcccagctactttcctaatgaaataaagagcattgaagcagaaaaaaa

SEQ ID NO: 279464 - DNA, 1545 bp, Homo sapiens
acacattgtttctcctgcttggcctcctccaggagggctggcttctctgcagagctctgcttcctgcagcctctccccgacctcagagcctctgcagaggaaaggccccctggggccctgccccacagcatcatgatggggaaactccccctgggggtcgtctccccttatgtgaagatgagttcggggggctacacggaccccctgaaattctacgccaccagctactgcacagcctacggtcgggaggatttcaagccccgtgtgggcagtcacgtaggcaccggctacaaatcaaatttccagcccgtggtctcatgccaagccagtctggaggccttagacaacccggccaggggggaacaagcccaggaccatttccagtctgtggccagccagagctaccgccccctggaggtgcctgacggcaagcatcccctgccctggagcatgcgccagaccagctcaggctatgggcgggagaagcccagtgcgggtccccccaccaaggaggtccggaaggtccatttcgacacccaggagcacgggcctcaggccatcacggggctggagcccagggaagtgcctctgctccaccagcagcagggccaggacccgctggagcgggagaacttccgacatggcccacgcttcatgacgtcggagtacaattccaagtatctcagggaccctctagaccagccagatttcttgcagaagaaatcgatcggcgcaaaggaggggagtggcttcaccaaacagtcccaccagagccccattgtcttccaaccgccctcacagggcctccctggggaccctgccctcctcccaggccagagtgtcaccaagtcagacttcctccccaagactcacctacatggagatgagttcctacctgtgttggccagaggctccaagcgggaaacagccttcagccgagggaatgaaaggattctgaaccccagagtgccccctccctgcccagaacccagcagcgtgagtcaccagcagtttcagccacttcatcggatgcaacagacaaacgttgccctgcttggccgggagactgtggggaaaaaggagcccacagggttcagccttaacaaccccatgtatgtccggagcccctgtgatcctgacagggatcagcgatacctgaccacctacaaccaagggtactttgagaacatccccaagggtctagaccaggaaggctggactcgaggtggcatccagccccagatgccaggaggctacgccctcagccagccggtcagctgcatggaggccacccccaaccccatggagagcctgcggcacctgcatccccacgtgggaagaaccctgacctcagctgaccccttctaccagaacacacctcacagcagccgctgcgtggcacacagctgagccctgagcccttggtttgtcaatcctaggggacaggagccaggctactgtctgtacccccactccatcccccaggggaacacccctgcccagctactttcctaatgaaataaagagcattgaagcagaaaaaaa

SEQ ID NO: 279465 - DNA, 1458 bp, Homo sapiens
  misc_feature (1453)..(1453): n is a, c, g, or t
  misc_feature (1458)..(1458): n is a, c, g, or t
acacattgtttctcctgcttggcctcctccaggagggctggcttctctgcagagctctgcttcctgcagcctctccccgacctcagagcctctgcagaggaaaggccccctggggccctgccccacagcatcatgatggggaaactccccctgggggtcgtctccccttatgtgaagatgagttcggggggctacacggaccccctgaaattctacgccaccagctactgcacagcctacggtcgggaggatttcaagccccgtgtgggcagtcacgtaggcaccggctacaaatcaaatttccagcccgtggtctcatgccaagccagtctggaggccttagacaacccggccaggggggaacaagcccaggaccatttccagtctgtggccagccagagctaccgccccctggaggtgcctgacggcaagcatcccctgccctggagcatgcgccagaccagctcaggctatgggcgggagaagcccagtgcgggtccccccaccaaggaggtccggaaggtccatttcgacacccaggagcacgggcctcaggccatcacggggctggagcccagggaagtgcctctgctccaccagcagcagggccaggacccgctggagcgggagaacttccgacatggcccacgcttcatgacgtcggagtacaattccaagtatctcagggaccctctagaccagccagatttcttgcagaagaaatcgatcggcgcaaaggaggggagtggcttcaccaaacagtcccaccagagccccattgtcttccaaccgccctcacagggcctccctggggaccctgccctcctcccaggccagagtgtcaccaagtcagacttcctccccaagactcacctacatggagatgagttcctacctgtgttggccagaggctccaagcgggaaacagccttcagccgagggaatgaaaggattctgaaccccagagtgccccctccctgcccagaacccagcagcgtgagtcaccagcagtttcagccacttcatcggatgcaacagacaaacgttgccctgcttggccgggagactgtggggaaaaaggagcccacagggttcagccttaacaaccccatgtatgtccggagcccctgtgatcctgacagggatcagcgatacctgaccacctacaaccaagggtactttgagaacatccccaagggtctagaccaggaaggctggactcgaggtggcatccagccccagatgccaggaggctacgccctcagccagccggtcagctgcatggaggccacccccaaccccatggagagcctgcggcacctgcatccccacgtgggaagaaccctgacctcagctgaccccttctaccagaacacacctcacagcagccgctgcgtggcacacagctgagccctgagcccttggttcggcaatccccttttgagagcggggnaaacn

SEQ ID NO: 279466 - DNA, 1378 bp, Homo sapiens
acacattgtttctcctgcttggcctcctccaggagggctggcttctctgcagagctctgcttcctgcagcctctccccgacctcagagcctctgcagaggaaaggccccctggggccctgccccacagcatcatgatggggaaactccccctgggggtcgtctccccttatgtgaagatgagttcggggggctacacggaccccctgaaattctacgccaccagctactgcacagcctacggtcgggaggatttcaagccccgtgtgggcagtcacgtaggcaccggctacaaatcaaatttccagcccgtggtctcatgccaagccagtctggaggccttagacaacccggccaggggggaacaagcccaggaccatttccagtctgtggccagccagagctaccgccccctggaggtgcctgacggcaagcatcccctgccctggagcatgcgccagaccagctcaggctatgggcgggagaagcccagtgcgggtccccccaccaaggaggtccggaaggtccatttcgacacccaggagcacgggcctcaggccatcacggggctggagcccagggaagtgcctctgctccaccagcagcagggccaggacccgctggagcgggagaacttccgacatggagtacaattccaagtatctcagggaccctctagaccagccagatttcttgcagaagaaatcgatcggcgcaaaggaggggagtggcttcaccaaacagtcccaccagagccccattgtcttccaaccgccctcacagggcctccctggggaccctgtgccccctccctgcccagaacccagcagcgtgagtcaccagcagtttcagccacttcatcggatgcaacagacaaacgttgccctgcttggccgggagactgtggggaaaaaggagcccacagggttcagccttaacaaccccatgtatgtccggagcccctgtgatcctgacagggatcagcgatacctgaccacctacaaccaagggtactttgagaacatccccaagggtctagaccaggaaggctggactcgaggtggcatccagccccagatgccaggaggctacgccctcagccagccggtcagctgcatggaggccacccccaaccccatggagagcctgcggcacctgcatccccacgtgggaagaaccctgacctcagctgaccccttctaccagaacacacctcacagcagccgctgcgtggcacacagctgagccctgagcccttggtttgtcaatcctaggggacaggagccaggctactgtctgtacccccactccatcccccaggggaacacccctgcccagctactttcctaatgaaataaagagcattgaagcagaaaaaaa

SEQ ID NO: 279467 - DNA, 167 bp, Homo sapiens
ctacctgtgttggccagaggctccaagcgggaaacagccttcagccgagggaatgaaaggattctgaaccccagagtgagtggccttggcgtcttgctcagagaagggagaagacagggaggtttctgggaagaggtggcatttgggtcaggcattgaagaatgaga

SEQ ID NO: 279468 - DNA, 1380 bp, Homo sapiens
acacattgtttctcctgcttggcctcctccaggagggctggcttctctgcagagctctgcttcctgcagcctctccccgacctcagagcctctgcagaggaaaggccccctggggccctgccccacagcatcatgatggggaaactccccctgggggtcgtctccccttatgtgaagatgagttcggggggctacacggaccccctgaaattctacgccaccagctactgcacagcctacggtcgggaggatttcaagccccgtgtgggcagtcacgtaggcaccggctacaaatcaaatttccagcccgtggtctcatgccaagccagtctggaggccttagacaacccggccaggggggaacaagcccaggaccatttccagtctgtggccagccagagctaccgccccctggaggtgcctgacggcaagcatcccctgccctggagcatgcgccagaccagctcaggctatgggcgggagaagcccagtgcgggtccccccaccaaggaggtccggaaggtccatttcgacacccaggagcacgggcctcaggccatcacggggctggagcccagggaagtgcctctgctccaccagcagcagggccaggacccgctggagcgggagaacttccgacatggcccacgcttcatgacgtcggagtacaattccaagtatctcagggaccctctagaccagccagatttcttgcagaagaaatcgatcggcgcaaaggaggggagtggcttcaccaaacagtcccaccagagccccattgtcttccaaccgccctcacagggcctccctggggaccctgccctcctcccaggccagagtgtcaccaagtcagacttcctccccaagactcacctacatggagatgagttcctacctgtgttggccagaggctccaagcgggaaacagccttcagccgagggaatgaaaggattctgaaccccagagtgccccctccctgcccagaacccagcagcgtgagtcaccagcagtttcagccacttcatcggatgcaacagacaaacgttgccctgcttggccgggagactgtggggaaaaaggagcccacagggttcagccttaacaaccccatgtatgtccggagcccctgtgatcctgacagggatcagcgatacctgaccacctacaaccaaggaaccctgacctcagctgaccccttctaccagaacacacctcacagcagccgctgcgtggcacacagctgagccctgagcccttggtttgtcaatcctaggggacaggagccaggctactgtctgtacccccactccatcccccaggggaacacccctgcccagctactttcctaatgaaataaagagcattgaagcagaaaaaaa

SEQ ID NO: 279469 - DNA, 1485 bp, Homo sapiens
acacattgtttctcctgcttggcctcctccaggagggctggcttctctgcagagctctgcttcctgcagcctctccccgacctcagagcctctgcagaggaaaggccccctggggccctgccccacagcatcatgatggggaaactccccctgggggtcgtctccccttatgtgaagatgagttcggggggctacacggaccccctgaaattctacgccaccagctactgcacagcctacggtcgggaggatttcaagccccgtgtgggcagtcacgtaggcaccggctacaaatcaaatttccagcccgtggtctcatgccaagccagtctggaggccttagacaacccggccaggggggaacaagcccaggaccatttccagtctgtggccagccagagctaccgccccctggaggtgcctgacggcaagcatcccctgccctggagcatgcgccagaccagctcaggctatgggcgggagaagcccagtgcgggtccccccaccaaggaggtccggaaggtccatttcgacacccaggagcacgggcctcaggccatcacggggctggagcccagggaagtgcctctgctccaccagcagcagggccaggacccgctggagcgggagaacttccgacatggcccacgcttcatgacgtcggagtacaattccaagtatctcagggaccctctagaccagccagatttcttgcagaagaaatcgatcggcgcaaaggaggggagtggcttcaccaaacagtcccaccagagccccattgtcttccaaccgccctcacagggcctccctggggaccctggagatgagttcctacctgtgttggccagaggctccaagcgggaaacagccttcagccgagggaatgaaaggattctgaaccccagagtgccccctccctgcccagaacccagcagcgtgagtcaccagcagtttcagccacttcatcggatgcaacagacaaacgttgccctgcttggccgggagactgtggggaaaaaggagcccacagggttcagccttaacaaccccatgtatgtccggagcccctgtgatcctgacagggatcagcgatacctgaccacctacaaccaagggtactttgagaacatccccaagggtctagaccaggaaggctggactcgaggtggcatccagccccagatgccaggaggctacgccctcagccagccggtcagctgcatggaggccacccccaaccccatggagagcctgcggcacctgcatccccacgtgggaagaaccctgacctcagctgaccccttctaccagaacacacctcacagcagccgctgcgtggcacacagctgagccctgagcccttggtttgtcaatcctaggggacaggagccaggctactgtctgtacccccactccatcccccaggggaacacccctgcccagctactttcctaatgaaataaagagcattgaagcagaaaaaaa

SEQ ID NO: 279470 - DNA, 778 bp, Homo sapiens
ggcgcaaacacagctgtcggaaggtggcgagcctgaggcgaacaatggcggagctgggcgaagccgatgaagcggagttgcagcgcctggtggccgccgagcagcagaaggcgcagtttactgcacaggtgcatcacttcatggagttatgttgggataaatgtgtggagaagccagggaatcgcctagactctcgcactgaaaattgtctctccagctgtgtagaccgcttcattgacaccactcttgccatcaccagtcggtttgcccagattgtacagaaaggagggcagtaggccatcccccaggagaatgacagaagcaaaggacttgttactaagcagatttaagggtcagtgggggaaggctatcaacccattgtcagatcagcatcaggctgttatcaagtctgttggtgctaaaaagtaaaagatgaaatgttcaaagagtgaaatttatttatttggaattcagaaattccaggttgtatgacatcagttactcaataagtgtgaattctccaactcttcttttaatcccattttagaatttaatatagagatctctgattggcaggaacactagaaataaatgttccatggccagtagtgcaaatgggggattgtaggttttgaaaaaccaccctaagccatattaagggggttggaagaaccatcgaagcctaaggcatagaagaaaatttggggttaagaaagatgaagaacaaaaaacagctttattgcttatacatgaccaagaaaaggaaaacatggcaaaa

SEQ ID NO: 279471 - DNA, 937 bp, Homo sapiens
ggcgcaaacacagctgtcggaaggtggcgagcctgaggcgaacaatggcggagctgggcgaagccgatgaagcggagttgcagcgcctggtggccgccgagcagcagaaggcgcagtttactgcacaggtgcatcacttcatggagttatgttgggataaatgtgtggagaagccagggaatcgcctagactctcgcactgaaaattgtctctccagctgtgtagaccgcttcattgacaccactcttgccatcaccagtcggtttgcccagattgtacagaaaggagggcagtaggccatcccccaggagaatgacagaagcaaaggacttgttactaagcagatttaagggtcagtgggggaaggctatcaacccattgtcagatcagcatcaggctgttatcaagtctgttggtgctaaaaagtaaaagatgaaatgttcaaacaaaaaaaaaaacttcgagatagtctctctcgtcgccgttgggagggagccgccgccaatgttttgcgcactctgcaggggatggtcgggcggaattgctccagtttcctgatcaagaggaataggcagaccttaagattgagccaataatttgagggcccgaaattcctttccgtacaggggactgattccccggaaaaatgtggggctgtggagccggagcccgagggccagggtggccgcggggcccataaagcgggagatccgggccaatgggaaggcctggccacctccttaatgtggggggcccccatcaaaaggaattgtctcgggcacggctcagaaggattcagaacatttatcggaagaaaatgtacggccgactggcatgggagcatccggggggagggccatcttggacgcagacctgtttgtgaagaaggggcccgccccaaagatttgacccggcccagaaaagggggctccaaaaa

SEQ ID NO: 279472 - DNA, 669 bp, Homo sapiens
  misc_feature (463)..(463): n is a, c, g, or t
  misc_feature (472)..(472): n is a, c, g, or t
ggcgcaaacacagctgtcggaaggtggcgagcctgaggcgaacaatggcggagctgggcgaagccgatgaagcggagttgcagcgcctggtggccgccgagcagcagaaggcgcagtttactgcacaggtgcatcacttcatggagttatgttgggataaatgtgtggagaagccagggaatcgcctagactctcgcactgaaaattgtctctccagctgtgtagaccgcttcattgacaccactcttgccatcaccagtcggtttgcccagattgtacagaaaggagggcagtaggccatcccccaggagaatgacagaagcaaaggacttgttactaagcagatttaagggtcagtgggggaaggctatcaacccattgtcagatcagcatcaggctgttatcaagtctgttggtgctaaaaagtaaaagatgaaatgttcaaaaaaaaaaaaaaattttngggccgccntgggccctggaaaatttttcaacccttcggttggggcgggcgccccagtgggttcgtgcacatggccctacacggtcccaagaaaccgggtgctgaacacgtgttggttttctcccaaataaaaagcccggggaaccgggttctaccatccgaggggttcgaggcataggtccacacgggtccaggatatatagcgg

SEQ ID NO: 279473 - DNA, 699 bp, Homo sapiens
ggcgcaaacacagctgtcggaaggtggcgagcctgaggcgaacaatggcggagctgggcgaagccgatgaagcggagttgcagcgcctggtggccgccgagcagcagaaggcgcagtttactgcacaggccacgtgcccgtagaaaagatactcatccactgtgggttttggtgtcgccgtcaccccactgcctcactggattgtgaggatcatatgcgacaatgtatttgaaaacgactagaacattatcggaggaaggtggactctgaagtagtcgctgtagactatggatgtagaacaagggtttggagcccttcggacatggttctaacgcggcctgacttcttgctggctacatgaccttggactacataatcacgcctcttaaatgggaggtgatgacagctatccttgaggaccttagagagaactgatttcttagtacccagcctcacaaatagtgcatcacttcatggagttatgttgggataaatgtgtggagaagccagggaatcgcctagactctcgcactgaaaattgtctctccagctgtgtagaccgcttcattgacaccactcttgccatcaccagtcggtttgcccagattgtacagaaaggagggctatcaacccattgtcagatcagcatcaggctgttatcaagtctgttggtgctaaaaagtaaaagatgaaatgttc

SEQ ID NO: 279474 - DNA, 443 bp, Homo sapiens
ggcgcaaacacagctgtcggaaggtggcgagcctgaggcgaacaatggcggagctgggcgaagccgatgaagcggagttgcagcgcctggtggccgccgagcagcagaaggcgcagtttactgcacaggtgcatcacttcatggagttatgttgggataaatgtgtggagaagccagggaatcgcctagactctcgcactgaaaattgtctctccagctgtgtagaccgcttcattgacaccactcttgccatcaccagtcggtttgcccagattgtacagaaaggagggcagtaggccatcccccaggagaatgacagaagcaaaggacttgttactaagcagatttaagggtcagtgggggaaggctatcaacccattgtcagatcagcatcaggctgttatcaagtctgttggtgctaaaaagtaaaagatgaaatgttc

SEQ ID NO: 279475 - DNA, 1018 bp, Homo sapiens
  misc_feature (458)..(458): n is a, c, g, or t
  misc_feature (1018)..(1018): n is a, c, g, or t
ggcgcaaacacagctgtcggaaggtggcgagcctgaggcgaacaatggcggagctgggcgaagccgatgaagcggagttgcagcgcctggtggccgccgagcagcagaaggcgcagtttactgcacaggtgcatcacttcatggagttatgttgggataaatgtgtggagaagccagggaatcgcctagactctcgcactgaaaattgtctctccagctgtgtagaccgcttcattgacaccactcttgccatcaccagtcggtttgcccagattgtacagaaaggagggcagtaggccatcccccaggagaatgacagaagcaaaggacttgttactaagcagatttaagggtcagtgggggaaggctatcaacccattgtcagatcagcatcaggctgttatcaagtctgttggtgctaaaaagtaaaagatgaaatgttcaaaaaaaaaaaaaanaaaaaaaaaaaaaaaaaaaaagaacagaaaaaaaaaaaaaaaaaaaaaaaaaaaacaaaagagggggggggcccagaaggacccagggaggccaaaaagaggaacacagataaaagaaaagggcccccaaaggcggcaaaaaacaaacacagaggcgcaaagaaaacgggagagcaggaaaacgaaagggaactgagagagacaacaaaagcgggggggcgacaaaagggcaaacacccaaaaaaaaaacaccagggaaacacacgcaaagaggataaggggacaacacacaaaaacgggcagaaagaagcccagagaaaagagaaatatcatgggagagcaaaaagcaacagcacacaaaagagcagacgaacgagaagaaaaagagaagcaggaacacacacgaaggaaaaaaaaagaaaaaggaagcagcaagaccaaagagaaagaaagagaaacaaggcgaaagcaggacagagagagaaaggagaaccgtagaaaaaagagacaacagaagagagagcaaaaaggtagcaaacaaagaagaagtacacacgagn

SEQ ID NO: 279476 - DNA, 776 bp, Homo sapiens
ggcgcaaacacagctgtcggaaggtggcgagcctgaggcgaacaatggcggagctgggcgaagccgatgaagcggagttgcagcgcctggtggccgccgagcagcagaaggcgcagtttactgcacaggccacgtgcccgtagaaaagatactcatccactgtgggttttggtgtcgccgtcaccccactgcctcactggattgtgaggatcatatgcgacaatgtatttgaaaacgactagaacattatcggaggaaggtggactctgaagtagtcgctgtagactatggatgtagaacaagggtttggagcccttcggacatggttctaacgcggcctgacttcttgctggctacatgaccttggactacataatcacgcctcttaaatgggaggtgatgacagctatccttgaggaccttagagagaactgatttcttagtacccagcctcacaaatagtgcatcacttcatggagttatgttgggataaatgtgtggagaagccagggaatcgcctagactctcgcactgaaaattgtctctccagctgtgtagaccgcttcattgacaccactcttgccatcaccagtcggtttgcccagattgtacagaaaggagggcagtaggccatcccccaggagaatgacagaagcaaaggacttgttactaagcagatttaagggtcagtgggggaaggctatcaacccattgtcagatcagcatcaggctgttatcaagtctgttggtgctaaaaagtaaaagatgaaatgttc

SEQ ID NO: 279477 - DNA, 1942 bp, Homo sapiens
aaatgatacagagtctccctctgttgcccagactggagtgcagtggcacagtctcggctcactgcaacctctgcctcccaggctcaagcgattctcctgcctcagcctcccgagtagctgggattacaggcacccgcaaccgcacccggctaatttttgtatttttattagagacagggtttcaccatgttggccaggttggtctcgaactcctgacctcaggtgatctgcccgcctcagcctcccaaagtgctgggattacaggtgtgagccactgcacccagccgcctttagatatttctaaaatggtgcagccactatgaaaaacagtttggcagttcctcaaaaaggtaaatgtggagttaccataggacccagcaatttcactcctaggtagtaggtttctctatgaaatcttccaagataaaaataaaaagaaaaacaaaaagaaaacttcatttgctctcctcgttcaccaaaataaaactcaaattccttagctgcctgccatacccagtcccctttcataatctagctctaacctatctctccagcctcatctccaatgtcctcctttcttcccccgcacagtgcaaacacacaatattgacattccagcctccagctactcactcttcccaaataggtccctgcttccaagtctcagcacctgtgcttcactctgctgcaataccttctcccccttcctggcttgtgagctattatttatcttgcaagacccagctccacacccttcaggcaagcttcatcactcttcactgtgctgctagagtaggccctcccttaaggctccaaagtcatcacttatatagtgtttgtcattaggcaaaagcctgttccactttcaccagcctgggaattccttaaggccatggaaaccctggggcctggcatatagtaggtgctcaagaatcatctgcagaagacaaggcttatacctgaaagacaggtacaaacataggcttaataggctctctagaaattatactgattgataccacaaactaatttgggggccagatataaagaaaccatcaatgagaatggtttccttcgtgtcaatgtaatagtgtattatgtgttttagggatacataaacaggaaccaaagcacactacttattatgacaaggcgcttataatgatttgcatttctctgcaaaactctttaggcatataattttgttaatttgtgacaaacctcaaaaacacacttaccaccaataccttgattgcaatatatactttcaaagcacacagaaatcaagttcctttcaaaggtttccaaaagagtctgaagtgcgttgttttgtttggtttgttttaaatttgggaatttaaatgcagatcataatttataatttaacccagacttaagggaagaataatttcacaaggatgttcaagaacctgacctagccttcttttgaatgttggcactgacaatgcgtgaccttgagaagtctgtttaatctgagactgtttcatcctcagtcacatgggaataaggagagtttgttgagaggcttttaaaaagcaaaaataaataaataaataataaaaagcaaaaactttgaaaacatggagtctcttttttctcccctgagatacatcatttgaaaaaggtggggtttcaccatcttggccaggctggtcttgaactcctgaccttgtgatccaccccactcggcctccccaagtgctgggattacaggcgtgagccaccgcgcccggccctgtcatgtctttcttatccagccctctctgctcccaccacagtaccctcggttcagcttgcacttgccaccccactggtctttagctcctctgcctcccatttgcctaccctcaaatccagtcatctctcccaaacccaaataagattaaattaattccctcctccaatcttttcatgaatatgt

SEQ ID NO: 279478 - DNA, 486 bp, Homo sapiens
ttaaatgatacagagtctccctctgttgcccagactggagtgcagtggcacagtctcggctcactgcaacctctgcctcccaggctcaagcgattctcctgcctcagcctcccgagtagctgggattacaggcacccgcaaccgcacccggctaatttttgtatttttattagagacagggtttcaccatgttggccaggttggtctcgaactcctgacctcaggtgatctgcccgcctcagcctcccaaagtgctgggattacaggtgtgagccactgcgcctggcctaaagcccctcctttctttagaaagccttctataggatccaggacccagtggtcttccttacctcaaaatttagagctgatggtccattctagggtgtccagccttttcagcaacaaaaatccctcatagttaattcttgcccctctatgacacatctagaagacatctgtacttaccaagtaaactatatttcacat

SEQ ID NO: 279479 - DNA, 1621 bp, Homo sapiens
ccgttgaattcaaggatgcatatttattattaaatgaaacaacagctcctgagtttgtgctgctaggcttagaggttaggccctaggggaagagatggcctcaacttgtatttgtgttttcctcttcaggctctgcagatggcatggggaggaggttgcactcagcccatgatcctggtctctcaaagacttcaacagcagaaatggagcatggtctccatgaagccagaacagtgcgtacttctcaggtagcagcctcaggtgctaaggtgctgggcctggggtggtgtgttggggaaggaattatggagagatgtgacagggatgatgataaggcagaggcatggtgatatggggctatcagaagaaaataaggtctatgattgggcttcttttgaattagaggagattgttacatggccactatcttaccaatacatctaattcaggtgtctattactactgagtcttcccctactcttcccataccctgaggatactgtctgtgggaaaaccataagtctggtattatgtgtctgcctgtatgtgtctgtgtgtttgaaggctacaccttgccgaggcctcagcagggagtgtggggaggatgagcagtacagtgcagagaatttacgtcgcatctcacgcagtctcagtggcaccgttgtctcagagagggaggaagctccggtttcttcccacagttttgtaagtagaatcagggtccatctattcagagcaccctcctccttgctaagcactttggagaatttcacttccttgcccaagttgagtgttcatcacagtagaggtcagggtacaaagtaccagtgcattgaggtgccctgaattcagcacttggaggcaagatgaggatgacttgagtcagcagtcagacagctggcaacacagtgagacccgctacctgcatttaacagatctggacatgatattgacaggagatggcagaatgttgcctcacttgatctgaccatcagatttgactatgattctgcctgcatatacatttctgagcggaccctcttatatttgatacagcagtctgccttacctttcatgagtgcagccgtgtctcttaagtcatagtcactggcagatctggcatgtgcagatagatattcatctattctctctgcttcagagagtgatcttcagtgatctcagatctttgcacaatctcttgagtgtaatctatcctactgttgcaaactatggcgcctaaattgctctagctgcagtcttattatgtgctttcagactattgcaattccagactctaaacacaaaggccagaattatctttcaaactccattttggatggtcccttatccactctagaacctacaatgcttcctatattctctggtcccctaccaacccttcagtattcagatctggtagctaaatcgttatacatttctctattagtaggagatcctgaggtttaatcacgtcttctcagtttactgggaatgccatgagagcgggtgtgtttcctcgcagtcgttcgatcgcagcacctcctcattcttcattcgcgtcgtcaaaggtgagaggtggacgaaaccctgggggcctggcctgaagagctagctgtgtgtc

SEQ ID NO: 279480 - DNA, 1391 bp, Homo sapiens
ccgttgaattcaaggatgcatatttattattaaatgaaacaacagctcctgagtttgtgctgctaggcttagaggttaggccctaggggaagagatggcctcaacttgtatttgtgttttcctcttcaggctctgcagatggcatggggaggaggttgcactcagcccatgatcctggtctctcaaagacttcaacagcagaaatggagcatggtctccatgaagccagaacagtgcgtacttctcaggtagcagcctcaggtgctaaggtgctgggcctggggtggtgtgttggggaaggaattatggagagatgtgacagggatgatgataaggcagaggcatggtgatatggggctatcagaagaaaataaggtctatgattgggcttcttttgaattagaggagattgttacatggccactatcttaccaatacatctaattcaggtgtctattactactgagtcttcccctactcttcccataccctgaggatactgtctgtgggaaaaccataagtctggtattatgtgtctgcctgtatgtgtctgtgtgtttgaaggctacaccttgccgaggcctcagcagggagtgtggggaggatgagcagtacagtgcagagaatttacgtcgcatctcacgcagtctcagtggcaccgttgtctcagagagggaggaagctccggtttcttcccacagttttgtaagtagaatcagggtccatctattcagagcaccctcctccttgctaagcaaaaatacagtgcaggtgaagaagcagggagaaagtgaaggttgtaatgtgaggaaaggccctgtgtactcagcaaaaataaggacacgcagtcattattttatttacaaacattcagctggagcccagaggaatgtccattccatgtagcagttctgaaaggccgtgcgtgttgtagggtttcctggggtgagaagagtcataaagccttgagaggaatctgagaagcaaaggctgctgattgggtcagaacccactgcactaatcaaagaaagaaggaaagaaatgggatggagtattggtttgctttttcctctcacccccagtatgtgattgaatagaattcagtgtgttttcaatctaaagtgatgcatgtgtatcagcaagaagaggaaaaaagccttcttgagaattttcatatggtactagtgcagtaatgtgtaagtagaagaggcaggaaagcccaagccattagagatcaacaaacttaaataatatcagtggctaggtttgtaggtaatcatacctttggagaatttcacttccttgcccaagttgagtgttcatcacagtagaggtcaggggtacaaagtttctgatgaaaacaccttttttttttttttttttttgagaca

SEQ ID NO: 279481 - DNA, 903 bp, Homo sapiens
ggctaggttcgaggctgggtgaatcggccgagggtcaagagaaaggtcactggccatgggcaagcaacaatcctctctggagggtggggatagaccactttcctgggaagagtccactgaacattcttctcttgccttaaactctgggctgcctaatggtgaaacttctagcggaggacagcccaggttggcagagccagacatataccaagagaagctgtcccaagtgagagatgttaggtctaaggatctgggcagcagtactgactggggacttcctgccttggattcctgggtgaatatcacaaggttctgtgattctcagcttaagcatggggcacctaggccaggaatgaagtcctcccctcatgattcccatacgtgtgtaacctatccagagagaaatcacatcctttgcatccacattggaaccaagacacagagcaggagacctcagaattggagtctctgtatcaggccagtcttcaggcttctcaagctggctgttctggatgggggcagcaggataccgcctggcacccacttagccaaacaggctctgcagatggcatggggaggaggttgcactcagcccatgatcctggtctctcaaagacttcaacagcagaaatggagcatggtctccatgaagccagaacagtgcgtacttctcaggctacaccttgccgaggcctcagcagggagtgtggggaggatgagcagtacagtgcagagaatttacgtcgcatctcacgcagtctcagtggcaccgttgtctcagagagggaggaagctccggtttcttcccacagtggtgattcatcaaacgtgaggaagcctttggaaaccgggcaccgttgttccagctcctcttacctccctgtcatccatgacccttctgtg

SEQ ID NO: 279482 - DNA, 666 bp, Homo sapiens
ttctggattctcactctatcgcccagtctggaaaaatacagtgcaggtgaagaagcagggagaaagtgaaggttgtaatgtgaggaaaggccctgtgtactcagcaaaaataaggacacgcagtcattattttatttacaaacattcagctggagcccagaggaatgtccattccatgtagcagttctgaaaggccgtgcgtgttgtagggtttcctggggtgagaagagtcataaagccttgagaggaatctgagaagcaaaggctgctgattgggtcagaacccactgcactaatcaaagaaagaaggaaagaaatgggatggagtattggtttgctttttcctctcacccccagtatgtgattgaatagaattcagtgtgttttcaatctaaagtgatgcatgtgtatcagcaagaagaggaaaaaagccttcttgagaattttcatatggtactagtgcagtaatgtgtaagtagaagaggcaggaaagcccaagccattagagatcaacaaacttaaataatatcagtggctaggtttgtaggtaatcatacctttggagaatttcacttccttgcccaagttgagtgttcatcacagtagaggtcaggggtacaaagtttctgatgaaaacaccttttttttttttttttttttgagaca

SEQ ID NO: 279483 - DNA, 1502 bp, Homo sapiens
ggctaggttcgaggctgggtgaatcggccgagggtcaagagaaaggtcactggccatgggcaagcaacaatcctctctggagggtggggatagaccactttcctgggaagagtccactgaacattcttctcttgccttaaactctgggctgcctaatggtgaaacttctagcggaggacagcccaggttggcagagccagacatataccaagagaagctgtcccaagtgagagatgttaggtctaaggatctgggcagcagtactgactggggacttcctgccttggattcctgggtgaatatcacaaggttctgtgattctcagcttaagcatggggcacctaggccaggaatgaagtcctcccctcatgattcccatacgtgtgtaacctatccagagagaaatcacatcctttgcatccacattggaaccaagacacagagcaggagacctcagaattggagtctctgtatcaggccagtcttcaggcttctcaagctggctgttctggatgggggcagcaggataccgcctggcacccacttagccaaacaggctctgcagatggcatggggaggaggttgcactcagcccatgatcctggtctctcaaagacttcaacagcagaaatggagcatggtctccatgaagccagaacagtgcgtacttctcaggctacaccttgccgaggcctcagcagggagtgtggggaggatgagcagtacagtgcagagaatttacgtcgcatctcacgcagtctcagtggcaccgttgtctcagagagggaggaagctccggtttcttcccacagttttgtaagtagaatcagggtccatctattcagagcaccctcctccttgctaagcaaaaatacagtgcaggtgaagaagcagggagaaagtgaaggttgtaatgtgaggaaaggccctgtgtactcagcaaaaataaggacacgcagtcattattttatttacaaacattcagctggagcccagaggaatgtccattccatgtagcagttctgaaaggccgtgcgtgttgtagggtttcctggggtgagaagagtcataaagccttgagaggaatctgagaagcaaaggctgctgattgggtcagaacccactgcactaatcaaagaaagaaggaaagaaatgggatggagtattggtttgctttttcctctcacccccagtatgtgattgaatagaattcagtgtgttttcaatctaaagtgatgcatgtgtatcagcaagaagaggaaaaaagccttcttgagaattttcatatggtactagtgcagtaatgtgtaagtagaagaggcaggaaagcccaagccattagagatcaacaaacttaaataatatcagtggctaggtttgtaggtaatcatacctttggagaatttcacttccttgcccaagttgagtgttcatcacagtagaggtcaggggtacaaagtttctgatgaaaacaccttttttttttttttttttttgagaca

SEQ ID NO: 279484 - DNA, 426 bp, Homo sapiens
ggctcatgcctataatcccaacactttgggaggccgaggcgggtggatcacctgaagtcaggagtttgagaccaccttggccaacacggtgaaacacctgtaatcccagctactcgggaggctgaggtaggagaatcgcttgaacctgggaggcggaggttgcagtgagctgagatcatgcgattgcactccagcctgggtgacaagggtgaaactccgtctcaaaaaaaaaaaaaaaaaagactttgtcccaacttcctactaacaataagctcattttttcttaaaatctggatatgtttttctcatggagatggggtgcggtgagagacagagaaaccataattaattagccttttatatggagggaatagggtggttatatttaaagagaaccatactttctcacaggaatggcgactcttt

SEQ ID NO: 279485 - DNA, 1007 bp, Homo sapiens
cactcactgcgaaggtctgcggcttcactcctaaagtcaagcaagaccacaaacccactggaaggaagaaagtccagacgcatctgaacactggaaggaacaaacgttggacacaccatctttaagaactgtaacactcaccgtgagggtctgcagcttcagtcttgaagtcagtgagaccaagaactcactggaaggaaccaattctcgacacaatggaatatgacaaatctgaagctatacctgaggaattagctggagctggacaacagtaacgaggtgcaagtccccatggaagattcaagcctgtccagtggtgttgatgtggacaaaggctttgccattgcctttgttgttcttctgtttctgttcctaatagtgatgatttttcggtgtgccaagctggtgaagaatccctacaaggccagctccacaaccacagaaccatctctgagctgaagtataataaaacctggtagactcccccaagcaagagatttgaaatctgttatacacactttatattatttcacctccctgtttctcagccttctcactcttgcattccacagtgagatgaaacacaagccagtttgtattgttcctgttcagggaaatggctactaaagtgagataaaggttgaatttattggctagaataaggccatagattttaattcttcagtgcctaaggtccttaggatgagacagtgggccataattttatgatgtaatgtaacataatgtcatcatgcttggtaaggtccacctgaaactagaagctcacctagaggtggcagacttgaatgatccctttagttatgcaaatgtaggctcagcagaaaccaaatgtcctataagaagagtgtaaccagattgttttagtgtgtgaagttttataaaatctgctgttcttaagtgggcagaactctctggtaaaaggggactaatttgctgcgggtgaaatccttaatctctctcatcccaaatttcctcatctataaaat

SEQ ID NO: 279486 - DNA, 850 bp, Homo sapiens
  misc_feature (12)..(12): n is a, c, g, or t
  misc_feature (14)..(16): n is a, c, g, or t
  misc_feature (18)..(18): n is a, c, g, or t
aaaaaaaaaaangnnnanaaaaaaaagaaaaaaaaaaatgacaaaaaaaaaaagcctgcgcgaatatgacaaatctgaagctatacctgaggaattagctggagctggacaacagtaacgaggtgcaagtccccatggaagattcaagcctgtccagtggtgttgatgtggacaaaggctttgccattgcctttgttgttcttctgtttctgttcctaatagtgatgatttttcggtgtgccaagctggtgaagaatccctacaaggccagctccacaaccacagaaccatctctgagctgaagtataataaaacctggtagactcccccaagcaagagatttgaaatctgttatacacactttatattatttcacctccctgtttctcagccttctcactcttgcattccacagtgagatgaaacacaagccagtttgtattgttcctgttcagggaaatggctactaaagtgagataaaggttgaatttattggctagaataaggccatagattttaattcttcagtgcctaaggtccttaggatgagacagtgggccataattttatgatgtaatgtaacataatgtcatcatgcttggtaaggtccacctgaaactagaagctcacctagaggtggcagacttgaatgatccctttagttatgcaaatgtaggctcagcagaaaccaaatgtcctataagaagagtgtaaccagattgttttagtgtgtgaagttttataaaatctgctgttcttaagtgggcagaactctctggtaaaaggggactaatttgctgcgggtgaaatccttaatctctctcatcccaaatttcctcatctataaaat

SEQ ID NO: 279487 - DNA, 558 bp, Homo sapiens
ttttacacatgaagcaattgagtcccagagaggtagagtgatttttgcaaggtgtcattgcaaataaaagacaaaactggtggttctgtttgagggtgaccagtttgttggtattttcattatgagtcattcttttgcttgaaacaaaatctttgctgatccttgaacctggtgtttgacaggtgctatatcaatatttgtaaaatgaatgaatgaatgatagaattccaaatactgaaacccaaaccatgatactggttttccagaaatacttcctgctattttaatatattatcaattaagaaaaacagttattaaaactttttgaagacctggcgctcactcctgtaatcccagcactttgggagggcaggacgggcagatcccttgagttcaagaccagcctgagcaacatggcaaaaccatatctttacaaaaaattagttgggcatggtggcatgtgcctataatcccagctacttgggaggctaaggtgggataatcacctgagcccaggaagtatgaggctgcagcgagctatgattgcgccacttcaaa

SEQ ID NO: 279488 - DNA, 547 bp, Homo sapiens
aacaaaagacagccactgctgctgatacccaggcaaacagggtctcgagtggacctccagtaaactccaacagacctgcagctgaggctcctggctgttagaaggaaaactaacagaaaggacatccaccaccaaaaacccatctgtacgtcaccatcatcaaagaccaaaggtaggtttcttctgtattttatattgagcaaataatgccatacaacattgtgaaaaatctgtttatagggtgtgtttgttcataaaaatgctatatgaaattacgtagagctccagaatgtgaaaggggagtcatcagatccatgatcagcgtggggacccagccacagcactgacaggctgtgcgtgaggacaggtggcctgtgggcatcttgagtcttcagggtgccttagtgattgagaggtcatctctgcgtattctgggtgggtgtgcctgaatgtgaaaaatgacttaaaattgggaggctaaggtgggataatcacctgagcccaggaagtatgaggctgcagcgagctatgattgcgccacttcaaa

SEQ ID NO: 279489 - DNA, 632 bp, Homo sapiens
ctggcggctagggtttagtaactgtgggcgcgctgggttatctcaatttccatcaggcctcagctgaaagctcatctgccaaaacacatcagcactcatgtaaaataaaaggagtagggaggtgactttctacacaatactgtacagtgtttggcttccagtttccctcttgtgtgtaactattctagcactttaggttttctgaagcattcctttaggacttaaaggacatcattgaaatgttgctttccatagtctgcaggatccatttgaagctctcgttcttcatcatcttttgtaggtgccctatcctgccactatcatctagagaatgccagaatgagacaagaaatgttaaatggcaacactcagctcactttagagccatgctgcggatcaacaggggattcattttcatcaaagaatcggcctgtgaagtaggtagaggattaattcaagagtaaagagagaagaaaagaaggaatctatacggaaggcagaccagaaagtaaacaagtgaaagctggcaacttttggggtactggatataaaaggatacattttgtgaaggttatccaagacaaaagtatataagagggaagactctgaaaatatgtaatttttattaagaa

SEQ ID NO: 279490 - DNA, 567 bp, Homo sapiens
ttgtgttatatataatgattccaacttgaatgtggccacagaattttaaaactgagaaagatcatttattctaattcagcagtcttcatacagatgaagaaattgtggcccagagagtttaagtgacttgaaaagcaatacacagactatctcttgattctagactaatgtttttttctttttttctttctttttttgagacagagtctcgttctgctacctaggctggagtgcaatgtttgtaggtgccctatcctgccactatcatctagagaatgccagaatgagacaagaaatgttaaatggcaacactcagctcacgtaagattaacttgcaaatagggaaatccaaaaatgtaacagccccttctctacttcactgaggacatcatcttttgtcatttccttatattccttagtatcggtgaatttattttcttgtgaaaggaatgggagggcaacatgagggtcttggggacttgaagtagaaggtggcagtaagaaccaggggaggaagaaggagaagagtacaagaaagggagagagaaggcactgaaaatcctcgtg

SEQ ID NO: 279491 - DNA, 1798 bp, Homo sapiens
caagtttaatttttaatttattagaacccagtaaatgatgattttaaaagcagagtttccatcaaattaacacttaattcagggcaaaaatacatttaaaaaacctaaatcttaaggcagaagtaaaacattataaaaacagtatgtctaatacagactgtaaaatgtcagatttttaagagattcacatagtattttatagcactaaaatattaatacagtcagaaatattatcaattggtccaagatttctgtttataaaatgtctagactgctaattgaagaaatgttgctgtataagtaatagctacaatacaaccaaccaagtgattgtttttatgacaaaagaactaaggcaggtaattgcatggtttccatttgtaaagcttttgcagtattaaaatataaagcattactaggggtattttttgattcatctccctaccctaatgcccccgaaatgtacatcacttccctttaactctattttaaaattctgtgaaaccaccatacctattcattgtaggcctgaccctataaaggcatgaattgtttaatttgatatggtagaaaaacaattttagtaaactactacatcttttcctagtcattgagcaatttcaaacagaagtcttaagaatttttgcacctcagcaagtgaacaacctgtttctttaccactataagtttgaattttgcctagaatgtgttagtacacaggggaaaacacatttcatgtttatgtgcaattaacagtagcccttctgaaaaacagggttaacaatcttaaatttccccttgtgatcaaaaccttttgtttttagggggcaggataagatttaaaagtgctttaaatcagaaaacaagaattagctagcttacacattccactgaatagtgtcaaaaaagataaatgcatttaaaataatttgtaagtctagcaaatataagcttgacgggttcttaactaacatattaagtaattacaaagattcatttttttacaaacttttaagctattttaataaaatggctatagacctcactgtacttctatttatctgtgcattaataaaaacctgttaaaattccttatttagtacttctgaaaaagtctaatcaaataagatcactaaaattaccagaaaagctttgaaatactgattgcagattcatttcaaagtagatttaacccctttcaggatctggtgtttaaatcatgaatgtcttcaccaacttcaactctgaaaatataaaaattttagccagttctggctatagttaaacagtactggtattacttgaaaaaataaaaattaaaaatatattgtcaatcatgcattccacaatttcaagaactaagatataactcataaatactgttatgtctttgcaggttatctcaatttccatcaggcctcagctgaaagctcatctgccaaaacacatcagcactcatgtaaaataaaaggagtagggaggtgactttctacacaatactgtacagtgtttggcttccagtttccctcttgtgtgtaactattctaggtatgactccttgagcgtgaaatgaggggtagatagaacagaacagctgttgggctaacaagaattagtgtgtagactgggcgcagtggctcatgcctggaattccagcactttgggaggccaatgcaggaggatcacctgaggtcaggagttcaagaccagcctggccaacatggtgaaaccctctctctctctctctctctctctctctctctctctctctctctctctctctctctctcgctctctc

SEQ ID NO: 279492 - DNA, 1015 bp, Homo sapiens
agtccttggtgcggatgatggcgtcaggcattgcgctgtagccgccgctgcccgggcccgggcagtcctcctgggggccgccgcccgcgcgcagctccagctccagctcctcctgaggccgctcctgctgcagttgccggcggaactcctccagcagctgctccacgcccgacagctgcgcgtgcagttcggacagcggcgccgcgggcggcaaggccgcacggccgcttggcagccacaggcagagcagtagcagcccgcgcagcgccccgtgacgcggcggtagccggcgctgcgagcccgcgctctcctgggcgacggaggccatggcgacgagagccaagggcagcgagccgaggcggggctgagcgcgggaggaaggcggggacgcgggcgagcgcgggccctgggcccctcctgcgcggccgcggctggctctaggccccggcctcacagcgcggcgcccccgaacccggctgctcccccgaggtcgcgggcgccggcgggaaccgcagtagcgggagacatagccggcccagccgggcaccgctccttgccctcgccggagactgcccagcgccctgcgcctctccgccccggcctgcggcgcgctgggtggcgacgagtcggcctcggcgttgatcagcaccaggtgtgtgcgaacagtggccgcggcggggtggagccttggatgaaccgttgtccacattctgttttctgagtcaaagaggaggaagatctgtccatcgaaactgagctgccaagatccactgccgtgtccttcggctttctgctcacaagacatcctggcctgcagggtgaggggttctgcccccatcaaagagagatcagctctggccttgacagatattgagcccccatcctcttccacttgcaatttcctggtcttacttgctctgccacatcctggccttgcctctagacgtcttgcggggtgagatgaccttcctatttgtatttttacatgaaaactataaatgcctctaacctacca

SEQ ID NO: 279493 - DNA, 977 bp, Homo sapiens
agtccttggtgcggatgatggcgtcaggcattgcgctgtagccgccgctgcccgggcccgggcagtcctcctgggggccgccgcccgcgcgcagctccagctccagctcctcctgaggccgctcctgctgcagttgccggcggaactcctccagcagctgctccacgcccgacagctgcgcgtgcagttcggacagcggcgccgcgggcggcaaggccgcacggccgcttggcagccacaggcagagcagtagcagcccgcgcagcgccccgtgacgcggcggtagccggcgctgcgagcccgcgctctcctgggcgacggaggccatggcgacgagagccaagggcagcgagccgaggcggggctgagcgcgggaggaaggcggggacgcgggcgagcgcgggccctgggcccctcctgcgcggccgcggctggctctaggccccggcctcacagcgcggcgcccccgaacccggctgctcccccgaggtcgcgggcgccggcgggaaccgcagtagcgggagacatagccggcccagccgggcaccgctccttgccctcgccggagactgcccagcgccctgcgcctctccgccccggcctgcggcgcgctgggtggcgacgagtcggcctcggcgttgatcagcaccaggatgaaccgttgtccacattctgttttctgagtcaaagaggaggaagatctgtccatcgaaactgagctgccaagatccactgccgtgtccttcggctttctgctcacaagacatcctggcctgcagggtgaggggttctgcccccatcaaagagagatcagctctggccttgacagatattgagcccccatcctcttccacttgcaatttcctggtcttacttgctctgccacatcctggccttgcctctagacgtcttgcggggtgagatgaccttcctatttgtatttttacatgaaaactataaatgcctctaacctacca

SEQ ID NO: 279494 - DNA, 494 bp, Homo sapiens
gacaatgattttatagtgaagttgaagcaaagagagtgaccacctgtgagacaaagatgcaggttccctctgtgtgccgggcagtatgccagttaattcaagtgcatgtcagacccagagggtgacatcctgtgactcagatgctagggcccttatgatgcctggtaaggatgaaccgttgtccacattctgttttctgagtcaaagaggaggaagatctgtccatcgaaactgagctgccaagatccactgccgtgtccttcggctttctgctcacaagacatcctggcctgcagggtgaggggttctgcccccatcaaagagagatcagctctggccttgacagatattgagcccccatcctcttccacttgcaatttcctggtcttacttgctctgccacatcctggccttgcctctagacgtcttgcggggtgagatgaccttcctatttgtatttttacatgaaaactataaatgcctctaacctacca

SEQ ID NO: 279495 - DNA, 1730 bp, Homo sapiens
agtccttggtgcggatgatggcgtcaggcattgcgctgtagccgccgctgcccgggcccgggcagtcctcctgggggccgccgcccgcgcgcagctccagctccagctcctcctgaggccgctcctgctgcagttgccggcggaactcctccagcagctgctccacgcccgacagctgcgcgtgcagttcggacagcggcgccgcgggcggcaaggccgcacggccgcttggcagccacaggcagagcagtagcagcccgcgcagcgccccgtgacgcggcggtagccggcgctgcgagcccgcgctctcctgggcgacggaggccatggcgacgagagccaagggcagcgagccgaggcggggctgagcgcgggaggaaggcggggacgcgggcgagcgcgggccctgggcccctcctgcgcggccgcggctggctctaggccccggcctcacagcgcggcgcccccgaacccggctgctcccccgaggtcgcgggcgccggcgggaaccgcagtagcgggagacatagccggcccagccgggcaccgctccttgccctcgccggagactgcccagcgccctgcgcctctccgccccggcctgcggcgcgctgggtggcgacgagtcggcctcggcgttgatcagcaccaggtgtgtgcgaacagtggccgcggcggggtggagccttggtgagccccgcccccccgcgcggccccgcccccgcgcgtctcgcgccggctcctccagggctgggagagcaggccccggggagggcagcctcagaacaactttgctcccgcgccgctgcccagctagggcagggttcatgtctgggcccagcaggctttagcaaccaaccacacctgcccagggcgcctgcccacaggggcttggcattcgggggaatgggggcagtgggaagggagggcctgtcttcaaatcctcgtgacccccgggactactccagagagggggcacgcgcacctaggaccaccgtagcgcgtcatcagtccttcacctccagcgtccctgactttccgcatcatgttcccaagatgtgcttgggtagtacaaagtggggcggggttggggtggcggagtcagggccgggaggggtggggatgggaagtactgaaagatgttcagtctgtttaaaaacacaaaaatcaagcctggtgaggtggtactcgcctgtaagtcctgaggctgagttgggaggatggcttggacccaggagttcgagactgcaatgagctgtgatcacaccactgtactccagcctgggggacagaacaagaccctgtctttaaaaataaaaacaaaacccataaatagcagtcgtcacatgcactcagatttccacaaatataacaaaaaatctgaacacagccaacatggggacctgggagtaatacagcctgtgacagagaggcctctagcggttatatcacgtaaaatctcgggagttgtgctttaaatgacataaggaataagaaaatgtccaacccagtgggggcttcaccttggcgttctagacttctgtgagcagcatctgcatcttgtttgtttctgaatcagtttctgttgattcatttttctcctgattgtggatcgcattttcttgctttttagcctgtccggaaatttttgcctggatgcgcacattgtaaatagaacactgttaagtgtctgtattttttaggattgaaagaataaataattggtggga

SEQ ID NO: 279496 - DNA, 688 bp, Homo sapiens
acgatcacagggtcccacaataggccatctgtaagccgaggagcaaggaagccagttgaagtcccaaagctgaagagcttggagtccaatgtttgagggcatggaacatccagcactggagaaagagctcctgaaatcgtttgggtaagcaattgctgattttagtcaaattccctcacctcacaaaaagtgaagtttctgaaaagtaatacagcaggcaaataaaatctgcaggagacagcagaaggaaaagcaattattctgaataatctacacataaaaaatatgattttgtttgatatttaccacccccttcaattttgaggagcgattacttccaaatttgcatggcatcttgctgaattatcttgaggaaaaaaatagggagaagctcaaattactttgatggtaggaagagaaattatcctgatgatggtgttggaagaaagaagcatgtatgattcttggcaactgctgtcctattttttctgcaggaggcatgtatgctgagttgttctttgactcatctataaagcttttagcaaattgagggaatttgaatttctaacatcaaaatgcaatgtacaaaggaggaaaaaatatgactcacccagcccccaaatttcatatttatatctctgattgaatctggttttaaaggcgaaattttaaaggaataaaaggcaaa

SEQ ID NO: 279497 - DNA, 571 bp, Homo sapiens
acgatcacagggtcccacaataggccatctgtaagccgaggagcaaggaagccagttgaagtcccaaagctgaagagcttggagtccaatgtttgagggcatggaacatccagcactggagaaagagctcctgaaatcgtttgggtaagcaattgctgattttagtcaaattccctcacctcacaaaaagtgaagtttctgaaaagtaatacagcaggcaaataaaatctgcaggagacagcagaaggaaaagcaattattctgaataatctacacataaaaaatatgattttgtttgatatttaccacccccttcaattttgaggagcgattacttccaaatgaggcatgtatgctgagttgttctttgactcatctataaaggtattgcaaaaaggcctcatatgtccgctctataattgtacagttctcctgctaatggcatgagttagtctaatacagaaatggattattaacagaacaacctagccttacatttaaatttacctttgacaattaatcataattggaaataaacatggatattttgctctttgacccctaaatctat

SEQ ID NO: 279498 - DNA, 432 bp, Homo sapiens
acgatcacagggtcccacaataggccatctgtaagccgaggagcaaggaagccagttgaagtcccaaagctgaagagcttggagtccaatgtttgagggcatggaacatccagcactggagaaagagctcctgaaatcgtttgggtaagcaattgctgattttagtcaaattccctcacctcacaaaaagtgaagtttctgaaaagtaatacagcaggcaaataaaatctgcaggagacagcagaaggaaaagcaattattctgaataatctacacataaaaaatatgattttgtttgatatttaccacccccttcaattttgaggagcgattacttccaaatactgtcacatttatccttctttgctgctgttggtgactctgctccacagagaacaatcttcccttctcatccctgttgtgaatatatat

SEQ ID NO: 279499 - DNA, 693 bp, Homo sapiens
agtcttgctctgtcgcccaggctagagtgcagtgagctgagatcatgccactgcactccagcctgggtaacagagcgagaccctatctcaaaaaaaaattattgcttaggtactaataatgacattataaatttattttaatgatatttttgaaggataaaatatatgtgtgtatataaatggatttgtatgtaaaatatactttgaggatatattatatatattataaacaatgattagtttaaatgttcaacaagttcatggaatgttcgggtatcagtttacaatatatgattcttcttcctgaccaacagtttcctgctctacgaaacgcactcttttgccttgaagcggcattggacagtggtgtcactaatggctacaatcatgcaattctagcttatgcttttgccttagctggaaaagagaagcaagtggaatctttactccaaaccctggatcaatctgccacaaaactaaataatgtcatctactgggaaagagaaaggaaacccaagacagaagaatttccatcctttattccctgggcaccttctgctcagactgagaagagttgctatgtgctgttggctgtcatttcccggaaaattcctgacctcacctatgctagtaagattgtgcagtggcttgcccaacagatgaattcccatggaggcttttcttccaaccagg

SEQ ID NO: 279500 - DNA, 462 bp, Homo sapiens
ccacagaggcaaagaatctgcatttccataccgtctcattgtcttcttcatctttctcatcctccacaaatcggatcgcactgactctgttgacagcacgctcgttccaggcttcatcagagacatcatttaccaagttctccagtgcaccacagcgaggcagattctctgcagtgacaaagaccacataagcagggaattgcgtttcatgtgatcagtaaatgctatgaactttgcggctgacaaggtttcaatgtaaagagagaaagtcaaggtgattttggaaggacccagaaggaggagttctttacctctgatggccacagcctcactgacagggctggtgtgaagctgcaggattacctgtttccaggagcacctgatgaatcaggccaagaggaaggaggtgcctgcggtgtcaaagcatttaagttgcagccaaaataaagattaaacaccatt

SEQ ID NO: 279501 - DNA, 343 bp, Homo sapiens
ccacagaggcaaagaatctgcatttccataccgtctcattgtcttcttcatctttctcatcctccacaaatcggatcgcactgactctgttgacagcacgctcgttccaggcttcatcagagacatcatttaccaagttctccagtgcaccacagcgaggcagattctctgcagtgacaaagaccacataagcagggaattgcgtttcatgtgatcagtaaatgctatgaactttgcggctgacaaggtagaatctatacggaggaccaggggtagaacaccagaaataaggggggtgttctgttgcaagtttggctttaaaacacaaacacacacaaaattc

SEQ ID NO: 279502 - DNA, 970 bp, Homo sapiens
ttactcaccaactagtcatgcgcctcggatgccgccggccacggggctcccggaggggggtccgacaccgcccggtgcccgggatccccaatctggccggtggatgaggccccatcccatgcacccgagtgcgggggacgggggggttaatattaattcaggatcccatccccacccgaggcaggacacccagtgcacgccccaactccgggacgcgggctctgaccctggaacttccgagattcccgcgacgccccctgtctctgggtccagaacttcgggggacacctcttctgcctcctccaaccccagagatggggtgtcactatgttgcccaggctggtctccaactcctggactcaagagatctgcctgcctcagcctctcaaagggctgggataacagatgtaagccactgcatctggcctccaatgagttgttatgtgaagagaacgtgattgtagaagttagaggactccaaccaggcctgaactctcaaggacagaaatgggtccaacctggcatgacatcctctaaatctttagctcctggcctctcaggtgccccctccagctacctccctcttccttctcttcattccccaagccatagctggttgggccaacctccagacattagcctctttgcaaactcctattcatccctcaaagcctcaccttcaatgctctcctccccaagaagctctctcctctacctctagaccttttccagccctcttccctctttctggcccagccctgactcctgggagtgtctgtgtgcagctttgactcccccagcctgagtgtctctcaagggctgagaccagggcccatgtttccctagagtttgtcatcttccagcatagtgtggacgcatgggggtcaggcaaagggggagtttgatgactcagtactattggtgattttgcatcacttgaaggagaccctgccttaaattcagaacttga

SEQ ID NO: 279503 - DNA, 752 bp, Homo sapiens
caccatgcctggctaatttttcttgtatttttagtagaagtggggtttcaccattttgtccaggctggtctcaaactccttacgtcaggtgatctgcctgccttggctcccccaaagtgctgggattacaggcatgaaccattgcacctggccttgattccctttttaatgcacaaatatgaagagcaatattcaccaaactctaataaaatgtaagtgctcttgcaatcctatctgtactatccttccaaattatttttaatcccagctctttctatctttgtttagacacaggtgtaatttctgcttagttgtttcatgatgtagctcagtgtctgtgtctctttcttactttgcagtgtggagtagttttctaccaggacaaagttaacaacccataaaggtctctgcttaagtaagaagtccatttctgtgaaccataacccagatatagcaacgccagactgtctcctatcaaaatttattgaagtggtagatttttggattcctgcggtcacaccttgcaaccagtctcccactcatctgccacagtttccctaaatcagattctctgaatctggaagttccaggaaaccttaggccgagtccagtgacattactcgatgcaacagcccaactgtttctccagagatgctggttcttggtgacaatgtcccttcttggaatggttatttgaggttgggcccagataagaggggctccatggctcaccggagttggccattaacgcc

SEQ ID NO: 279504 - DNA, 2306 bp, Homo sapiens
gaattcggcacgagcggcacgagcttcacctcttcaaccaggagccgagatttctgttgctctgaagccatccaggggtctttaaccagaagagagaggagagcctcaggagttaggaccagaagaagccagggaagcagtgcaatggcttcaaaaatcttgcttaacgtacaagaggaggtgacctgtcccatctgcctggagctgttgacagaacccttgagtctagactgtggccacagcctctgccgagcctgcatcactgtgagcaacaaggaggcagtgaccagcatgggaggaaaaagcagctgtcctgtgtgtggtatcagttactcatttgaacatctacaggctaatcagcatctggccaacatagtggagagactcaaggaggtcaagttgagcccagacaatgggaagaagagagatctctgtgatcatcatggagagaaactcctactcttctgtaaggaggataggaaagtcatttgctggctttgtgagcggtctcaggagcaccgtggtcaccacacagtcctcacggaggaagtattcaaggaatgtcaggagaaactccaggcagtcctcaagaggctgaagaaggaagaggaggaagctgagaagctggaagctgacatcagagaagagaaaacttcctggaagtatcaggtacaaactgagagacaaaggatacaaacagaatttgatcagcttagaagcatcctaaataatgaggagcagagagagctgcaaagattggaagaagaagaaaagaagacgctggataagtttgcagaggctgaggatgagctagttcagcagaagcagttggtgagagagctcatctcagatgtggagtgtcggagtcagtggtcaacaatggagctgctgcaggacatgagtggaatcatgaaatggagtgagatctggaggctgaaaaagccaaaaatggtttccaagaaactgaagactgtattccatgctccagatctgagtaggatgctgcaaatgtttagagaactgacagctgtccggtgctactgggtggatgtcacactgaattcagtcaacctaaatttgaatcttgtcctttcagaagatcagagacaagtgatatctgtgccaatttggccttttcagtgttataattatggtgtcttgggatcccaatatttctcctctgggaaacattactgggaagtggacgtgtccaagaaaactgcctggatcctgggggtatactgtagaacatattcccgccatatgaagtatgttgttagaagatgtgcaaatcgtcaaaatctttacaccaaatacagacctctatttggctactgggttatagggttacagaataaatgtaagtatggtgtctttgaagagtctttgtcctctgatcccgaggttttgactctctccatggctgtgcctccctgccgtgttggggttttcctcgactatgaagcaggcattgtctcatttttcaatgtcacaagccatggctccctcatttacaagttctctaaatgttgcttttctcagcctgtttatccatatttcaatccttggaactgtccagctcccatgactctatgcccaccaagctcttgaattttctcatttcttcacctacaaccctttgtctcgacttatctcctgcaactgactcatctgcaacattcacaccattgcttccttgtggtttcccttctttagaacttttactcatccttgagatgtatggtgtatttggcttgagttatgagagatgcttatttattcatttactctttttcatattttcagagaaagttacctaatccctcctaaagacacagcagtatgggtataacatccttgccttcccatttatccatgtttcactttatcactgatgtgaagaggcccaaagcctgttagccaccatccatgctacctaggtagtccataggaaccacccccatgaccaccaccaacatcaactaaaggttcttggagggtatgtcagtgtgttgctcaggataccccaggtacatcaaggaatcaaggagaggaaaatatgagcaatatgtgtattcagagtgaagattttatgtccagagtatttgagctcaaaccttgcctgttgttttctaatcatgatgaatactttctcagtttctttttcctgaaatataaattgggatttaagactgtacctaactattaagatcactgtgtaaaactaagtgtctctaaatgtaatgcatcgatttagtgtctggaacataataaatatttgctctcatgattgctaaaaaaaaaga

SEQ ID NO: 279505 - DNA, 2501 bp, Homo sapiens
gtgtgatctcggctcactgcaacctctgtctcctgggttcaagcgatcctcctgtctcagcctcccgagtaactgggattacaggcgcccaccaccatgcccggctaatttttgtatttttgtagacagggtttcgacatgttggccaggctggtctcaaactcctgacctcaagtgatccacccgcctcagcctcccaaagtgctgggattacaggtgtgagccactgcgcccgtcctgactcatgcaacttctgcttcagccatccaggggtctttaaccagaagagagaggagagcctcaggagttaggaccagaagaagccagggaagcagtgcaatggcttcaaaaatcttgcttaacgtacaagaggaggtgacctgtcccatctgcctggagctgttgacagaacccttgagtctagactgtggccacagcctctgccgagcctgcatcactgtgagcaacaaggaggcagtgaccagcatgggaggaaaaagcagctgtcctgtgtgtggtatcagttactcatttgaacatctacaggctaatcagcatctggccaacatagtggagagactcaaggaggtcaagttgagcccagacaatgggaagaagagagatctctgtgatcatcatggagagaaactcctactcttctgtaaggaggataggaaagtcatttgctggctttgtgagcggtctcaggagcaccgtggtcaccacacagtcctcacggaggaagtattcaaggaatgtcaggagaaactccaggcagtcctcaagaggctgaagaaggaagaggaggaagctgagaagctggaagctgacatcagagaagagaaaacttcctggaagtatcaggtacaaactgagagacaaaggatacaaacagaatttgatcagcttagaagcatcctaaataatgaggagcagagagagctgcaaagattggaagaagaagaaaagaagacgctggataagtttgcagaggctgaggatgagctagttcagcagaagcagttggtgagagagctcatctcagatgtggagtgtcggagtcagtggtcaacaatggagctgctgcaggacatgagtggaatcatgaaatggagtgagatctggaggctgaaaaagccaaaaatggtttccaagaaactgaagactgtattccatgctccagatctgagtaggatgctgcaaatgtttagagaactgacagctgtccggtgctactgggtggatgtcacactgaattcagtcaacctaaatttgaatcttgtcctttcagaagatcagagacaagtgatatctgtgccaatttggccttttcagtgttataattatggtgtcttgggatcccaatatttctcctctgggaaacattactgggaagtggacgtgtccaagaaaactgcctggatcctgggggtatactgtagaacatattcccgccatatgaagtatgttgttagaagatgtgcaaatcgtcaaaatctttacaccaaatacagacctctatttggctactgggttatagggttacagaataaatgtaagtatggtgtctttgaagagtctttgtcctctgatcccgaggttttgactctctccatggctgtgcctccctgccgtgttggggttttcctcgactatgaagcaggcattgtctcatttttcaatgtcacaagccatggctccctcatttacaagttctctaaatgttgcttttctcagcctgtttatccatatttcaatccttggaactgtccagctcccatgactctatgcccaccaagctcttgaattttctcatttcttcacctacaaccctttgtctcgacttatctcctgcaactgactcatctgcaacattcacaccattgcttccttgtggtttcccttctttagaacttttactcatccttgagatgtatggtgtatttggcttgagttatgagagatgcttatttattcatttactctttttcatattttcagagaaagttacctaatccctcctaaagacacagcagtatgggtataacatccttgccttcccatttatccatgtttcactttatcactgatgtgaagaggcccaaagcctgttagccaccatccatgctacctaggtagtccataggaaccacccccatgaccaccaccaacatcaactaaaggttcttggagggtatgtcagtgtgttgctcaggataccccaggtacatcaaggaatcaaggagaggaaaatatgagcaatatgtgtattcagagtgaagattttatgtccagagtatttgagctcaaaccttgcctgttgttttctaatcatgatgaatactttctcagtttctttttcctgaaatataaattgggatttaagactgtacctaactattaagatcactgtgtaaaactaagtgtctctaaatgtaatgcatcgatttagtgtctggaacataataaatatttgctctcatgattgctaaaaaaaaaga

SEQ ID NO: 279506 - DNA, 2221 bp, Homo sapiens
gaattcggcacgagcggcacgagcttcacctcttcaaccaggagccgagatttctgttgctctgaagccatccaggggtctttaaccagaagagagaggagagcctcaggagttaggaccagaagaagccagggaagcagtgcaatggcttcaaaaatcttgcttaacgtacaagaggaggtgacctgtcccatctgcctggagctgttgacagaacccttgagtctagactgtggccacagcctctgccgagcctgcatcactgtgagcaacaaggaggcagtgaccagcatgggaggaaaaagcagctgtcctgtgtgtggtatcagttactcatttgaacatctacaggctaatcagcatctggccaacatagtggagagactcaaggaggtcaagttgagcccagacaatgggaagaagagagatctctgtgatcatcatggagagaaactcctactcttctgtaaggaggataggaagagaaactccaggcagtcctcaagaggctgaagaaggaagaggaggaagctgagaagctggaagctgacatcagagaagagaaaacttcctggaagtatcaggtacaaactgagagacaaaggatacaaacagaatttgatcagcttagaagcatcctaaataatgaggagcagagagagctgcaaagattggaagaagaagaaaagaagacgctggataagtttgcagaggctgaggatgagctagttcagcagaagcagttggtgagagagctcatctcagatgtggagtgtcggagtcagtggtcaacaatggagctgctgcaggacatgagtggaatcatgaaatggagtgagatctggaggctgaaaaagccaaaaatggtttccaagaaactgaagactgtattccatgctccagatctgagtaggatgctgcaaatgtttagagaactgacagctgtccggtgctactgggtggatgtcacactgaattcagtcaacctaaatttgaatcttgtcctttcagaagatcagagacaagtgatatctgtgccaatttggccttttcagtgttataattatggtgtcttgggatcccaatatttctcctctgggaaacattactgggaagtggacgtgtccaagaaaactgcctggatcctgggggtatactgtagaacatattcccgccatatgaagtatgttgttagaagatgtgcaaatcgtcaaaatctttacaccaaatacagacctctatttggctactgggttatagggttacagaataaatgtaagtatggtgtctttgaagagtctttgtcctctgatcccgaggttttgactctctccatggctgtgcctccctgccgtgttggggttttcctcgactatgaagcaggcattgtctcatttttcaatgtcacaagccatggctccctcatttacaagttctctaaatgttgcttttctcagcctgtttatccatatttcaatccttggaactgtccagctcccatgactctatgcccaccaagctcttgaattttctcatttcttcacctacaaccctttgtctcgacttatctcctgcaactgactcatctgcaacattcacaccattgcttccttgtggtttcccttctttagaacttttactcatccttgagatgtatggtgtatttggcttgagttatgagagatgcttatttattcatttactctttttcatattttcagagaaagttacctaatccctcctaaagacacagcagtatgggtataacatccttgccttcccatttatccatgtttcactttatcactgatgtgaagaggcccaaagcctgttagccaccatccatgctacctaggtagtccataggaaccacccccatgaccaccaccaacatcaactaaaggttcttggagggtatgtcagtgtgttgctcaggataccccaggtacatcaaggaatcaaggagaggaaaatatgagcaatatgtgtattcagagtgaagattttatgtccagagtatttgagctcaaaccttgcctgttgttttctaatcatgatgaatactttctcagtttctttttcctgaaatataaattgggatttaagactgtacctaactattaagatcactgtgtaaaactaagtgtctctaaatgtaatgcatcgatttagtgtctggaacataataaatatttgctctcatgattgctaaaaaaaaaga

SEQ ID NO: 279507 - DNA, 1208 bp, Homo sapiens
gcaataggttattgttaactctagtcaccctactatgcaataaaacattagcacttatttaatgtgaagtttttaatacaaaaattattttaagaaaataagcacaggctgggcgccgtggctcacgcctgtaatcccagcactttgggaggccgaggcgggtggatcacctgaggtcagaggttctagacgagcctaaccaacatggggaaaccccgtctctactgaaaatacaaatttagccaggggtggtggtgggcacctgtaatcccagctacttgggaggctgaggcaggagaattgcttgaatctgagaggtggaggttgcagtgaaccgagatcgtgccattgcactccagccccagtagcgtcggacatctgtcagctctttttatgacgccatccacaccctgaagcagctccatcactgacccctgcagccgatgctccagatctgagatgagctctctcagggactgggtctgctgcaccatctcagtttcagagttcgtaaggcttttcagaatgtcttcctcctccttctccaggttttgcagctcattgctctcctcccagtccaggatgtctctcagttgctcaaaatctgccaagacgttggttttgtcatactgtatttgagtcttccaggaagctttctcttctctgatgtcagcttccaactcttcagcttcctgctgcttctgcctcagcatctccagagctgcctggagcttcacttggtactcccgggcaacctcctctgtgaggaacgtgtggtgaccacggtgctcctgagaccgctcacaaagccagcaaatgaccttcccgtcctcctgacagaagagtagaagtttctctccatggcgtgcacaatgatcaactttctgcccctctgggctcaacttgacctccctgagcttctccactatgttggctacatgccgattaggccgtatgttctcaggctggtaactgatccggcacacagggcagctactctctcctttgtctagcatggacttcttgtggtttgcagtgaggcatgcttggcagaagctgtggccgcagtccaggctcaggggttgtgtcaggagttccaggcagatggggcaggtcacctcctcctttacattaaccaggattccagaagccatagtagctattccactgctcctgcctgtcctggctgctgaggttcctcttgttca

SEQ ID NO: 279508 - DNA, 265 bp, Homo sapiens
ttttttttgagatggagtctcactctgttgcccaggatagagtacagtggcgctatcttggctcactgcaaactccgcctcccaggttcaagcaattcccctccctcagcctcccaagtatgttattcacagttacactgctggtatatggagagacaggagttgaactgagatcctctagatacaaaacctctatacttaagagtataccatttatgatattttctctttaactcacaaataagggcatcgagggtaaactgac

SEQ ID NO: 279509 - DNA, 3539 bp, Homo sapiens
agatgagccttccgcaaactcctgacctgtgggtccgtccgttcaacggccaaaggctggcggaggagggatcccctgcctttctcggaacggaacggagcagagtcgtgcgtggttgagtttagataaaagccgagtgagcgcgctctgttccttaagattagtttaaggtgccttggattgctctgaagagctttgaccacctgatattgcttacatctggaacttcttggcttctcattccccagatgtgcgggtcagagaggattctacaggcaggaaacatcttagaaatcagggttgggcaggcaggagccaggagagtagctacaatgacttcaccagtactggtggacatacgagaagaggtgacctgccctatctgcctggagctcctaacagaacccctgagcatagactgtggccacagcttctgccaagcctgcatcacaccaaatggcagggaatcagtgattggtcaagaaggggaaagaagctgccctgtgtgccagaccagctaccagccagggaacctgcggcctaatcggcatctggccaacatagtgaggcggctcagagaggtagtgttgggccctgggaagcagctgaaagcagttctttgtgcagaccatggagaaaaactgcagctcttctgtcaggaggatgggaaggtcatttgctggctttgtgagcggtctcaggagcaccgtggtcaccacacgttcctcgtggaggaggttgcccaggagtaccaggagaagtttcaggagtctctaaagaagctgaagaacgaggagcaggaagctgagaagctaacagcttttatcagagagaagaagacatcctggaagaatcagatggagcctgagagatgcaggatccagacagagtttaatcagctgcgaaatatcctagacagagtggagcaacgggagctgaaaaagctggaacaggaagagaagaaggggctacgaattatagaagaggctgagaatgatctggtccaccagacccagtcgctgcgagagctcatctcggatctggagcgtcgatgtcaggggtcaacaatggagctgctgcaggatgtgagtgatgtcacagaaaggagtgagttctggaccctgaggaagccagaagctctccctacaaagctgagaagtatgttccgagccccagatctgaaaaggatgctgcgagtgtgtagaggggagatgaaatggccaggtgacatcctcacaggattcctcaccattcccctcaatgtagtaaggagagagataccagacatgagacagttggtcctattcaacattattgactcttttcatcattacagagctgacagatgtccaaagctactgggttgacgtgaccctgaatccacacacagctaatttaaatcttgtcctggctaaaaaccggagacaagtgaggtttgtgggagctaaagtatctggaccttcctgtctggaaaagcattatgactgtagtgtcctgggctcccagcacttctcctctggtaagcattactgggaggtagatgtggccaagaagactgcctggatcctaggggtatgcagcaattcactgggacctacattctctttcaaccattttgctcaaaatcacagtgcttactccaggtatcagcctcagagtggatactgggtgattgggttacagcataaccatgaatatagggcctatgaggattcttccccttccctgcttctctccatgacagtgccccctcgccgtgttggggttttcttagattatgaggctggtactgtctccttttataatgtcacaaaccatggcttccccatctacactttctctaaatattactttcccactactctttgtccatattttaatccttgcaactgtgtaattcctatgaccctgcgtcgtccaagctcttgaatattcttctgttcccacccacttctgataagtaccctgaggcttatcagcatgtgattctcccttctgatcttctgtttttctgtgttctcaattcttttgttgttttttggtttttgaatcttttttgagatggaatctcgctctgtcgcccaggctggagtgcactggcgcaatctcggctcactgcaacctctgcctcctgggttcaagcgaacctcctgcctcagcatcccaagtagctgggattacaggcacccaccaccatgcccaactaatttttgtatttttatagagatagggtttcaccgtgttggccaggctgatctcgaactcctgaccgcaagtgatccacccgcctcggtctcccaaagtgctgggattacagatgtgagccgccgcgcccagacagttctttcgttttaaacagttactcagtactaggatgcacccagtggtgagagtaagcatctttgactgatgacaggtcttgaggtggatagggggcgctttcagtattttgccattaagcatagtatttgatgcaggttttttttgattgatgcaggggatcaaatttaggaagttctgatctgttaatttactacaagtttttgtataaaatgaaaactcgtattctacctatgtcttttctgtaaattattgagacaattgtgtatcatttttgttctgttaatgtggcttagtacattgatttacttcaatttgttaccacaacttgctgaaatacaccattattatttgttgtatgcaatactggatttattttgataacgtattgtttagattttgttctcatctatgttaatgaaagaaattggcctgtatttttacattcttgtaatatctttgccaggttctataaaatgcaataataagcaaataaattactttgtttttgtataagtatgtataggattgagctctaaaaccaaaccattataatgataatttgggtagcttcaaactcaaattgaagagagtcttcactacaatcttcactacaacctttggccttcctctctacatttaagagtagcaatagaacaataaaaaaaaatacgtctttcaaattaattgcagtaaaaacaaaagagtagtggggagagaaaaacaatccaatacatatttttctctcagaatagaaagaaaacacaaagagaaaatatgaacaatataaagcacttaaaggaagaggatgatttcttccagcttttccacactctctttatgcgcaggaacaaacagctgttgagtgagctgctatgactttggtagagaggtgcaatatgttttttgaaccagctataaaagaaattaagaggtacatgtgagggtagaaacaaatatcaaggatgagaatggcactggctgtcccatatggtatccaggagccaccaatgtctgttgagtacttcatacatgcctagtctgaattgagatgtgctcaatgtataaaatatataccagatttcaaatacctacttcaaaaaataatgtaaaatatctcactaataacttttcctttgtgtattgcaatgataatatgttggctctattggattaaataaagtatgttattcatttta

SEQ ID NO: 279510 - DNA, 2323 bp, Homo sapiens
atttgttgaatgaatcctgaccacacccaccctggcttttcttcacctcttcaaccaggagccgagatttctgttgctctgaagccatccaggggtctttaaccagaagagagaggagagcctcaggagttaggaccagaagaagccagggaagcagtgcaatggcttcaaaaatcttgcttaacgtacaagaggaggtgacctgtcccatctgcctggagctgttgacagaacccttgagtctagactgtggccacagcctctgccgagcctgcatcactgtgagcaacaaggaggcagtgaccagcatgggaggaaaaagcagctgtcctgtgtgtggtatcagttactcatttgaacatctacaggctaatcagcatctggccaacatagtggagagactcaaggaggtcaagttgagcccagacaatgggaagaagagagatctctgtgatcatcatggagagaaactcctactcttctgtaaggaggataggaaagtcatttgctggctttgtgagcggtctcaggagcaccgtggtcaccacacagtcctcacggaggaagtattcaaggaatgtcaggagaaactccaggcagtcctcaagaggctgaagaaggaagaggaggaagctgagaagctggaagctgacatcagagaagagaaaacttcctggaagtatcaggtacaaactgagagacaaaggatacaaacagaatttgatcagcttagaagcatcctaaataatgaggagcagagagagctgcaaagattggaagaagaagaaaagaagacgctggataagtttgcagaggctgaggatgagctagttcagcagaagcagttggtgagagagctcatctcagatgtggagtgtcggagtcagtggtcaacaatggagctgctgcaggacatgagtggaatcatgaaatggagtgagatctggaggctgaaaaagccaaaaatggtttccaagaaactgaagactgtattccatgctccagatctgagtaggatgctgcaaatgtttagagaactgacagctgtccggtgctactgggtggatgtcacactgaattcagtcaacctaaatttgaatcttgtcctttcagaagatcagagacaagtgatatctgtgccaatttggccttttcagtgttataattatggtgtcttgggatcccaatatttctcctctgggaaacattactgggaagtggacgtgtccaagaaaactgcctggatcctgggggtatactgtagaacatattcccgccatatgaagtatgttgttagaagatgtgcaaatcgtcaaaatctttacaccaaatacagacctctatttggctactgggttatagggttacagaataaatgtaagtatggtgtctttgaagagtctttgtcctctgatcccgaggttttgactctctccatggctgtgcctccctgccgtgttggggttttcctcgactatgaagcaggcattgtctcatttttcaatgtcacaagccatggctccctcatttacaagttctctaaatgttgcttttctcagcctgtttatccatatttcaatccttggaactgtccagctcccatgactctatgcccaccaagctcttgaattttctcatttcttcacctacaaccctttgtctcgacttatctcctgcaactgactcatctgcaacattcacaccattgcttccttgtggtttcccttctttagaacttttactcatccttgagatgtatggtgtatttggcttgagttatgagagatgcttatttattcatttactctttttcatattttcagagaaagttacctaatccctcctaaagacacagcagtatgggtataacatccttgccttcccatttatccatgtttcactttatcactgatgtgaagaggcccaaagcctgttagccaccatccatgctacctaggtagtccataggaaccacccccatgaccaccaccaacatcaactaaaggttcttggagggtatgtcagtgtgttgctcaggataccccaggtacatcaaggaatcaaggagaggaaaatatgagcaatatgtgtattcagagtgaagattttatgtccagagtatttgagctcaaaccttgcctgttgttttctaatcatgatgaatactttctcagtttctttttcctgaaatataaattgggatttaagactgtacctaactattaagatcactgtgtaaaactaagtgtctctaaatgtaatgcatcgatttagtgtctggaacataataaatatttgctctcatgattgctaaaaaaaaaga

SEQ ID NO: 279511 - DNA, 2778 bp, Homo sapiens
ctgagtctttcggcctgggtggaggacgcggctgcttcaagtccttggctctgatccaggccacagattccagattctacaggcaggaaacttctcctcggcctcccgtgcccaggagtaccaggagaagtttcaggagtctctaaagaagctgaagaacgaggagcaggaagctgagaagctaacagcttttatcagagagaagaagacatcctggaagaatcagatggagcctgagagatgcaggatccagacagagtttaatcagctgcgaaatatcctagacagagtggagcaacgggagctgaaaaagctggaacaggaagagaagaaggggctacgaattatagaagaggctgagaatgatctggtccaccagacccagtcgctgcgagagctcatctcggatctggagcgtcgatgtcaggggtcaacaatggagctgctgcaggatgtgagtgatgtcacagaaaggagtgagttctggaccctgaggaagccagaagctctccctacaaagctgagaagtatgttccgagccccagatctgaaaaggatgctgcgagtgtgtagagagctgacagatgtccaaagctactgggttgacgtgaccctgaatccacacacagctaatttaaatcttgtcctggctaaaaaccggagacaagtgaggtttgtgggagctaaagtatctggaccttcctgtctggaaaagcattatgactgtagtgtcctgggctcccagcacttctcctctggtaagcattactgggaggtagatgtggccaagaagactgcctggatcctaggggtatgcagcaattcactgggacctacattctctttcaaccattttgctcaaaatcacagtgcttactccaggtatcagcctcagagtggatactgggtgattgggttacagcataaccatgaatatagggcctatgaggattcttccccttccctgcttctctccatgacagtgccccctcgccgtgttggggttttcttagattatgaggctggtactgtctccttttataatgtcacaaaccatggcttccccatctacactttctctaaatattactttcccactactctttgtccatattttaatccttgcaactgtgtaattcctatgaccctgcgtcgtccaagctcttgaatattcttctgttcccacccacttctgataagtaccctgaggcttatcagcatgtgattctcccttctgatcttctgtttttctgtgttctcaattcttttgttgttttttggtttttgaatcttttttgagatggaatctcgctctgtcgcccaggctggagtgcactggcgcaatctcggctcactgcaacctctgcctcctgggttcaagcgaacctcctgcctcagcatcccaagtagctgggattacaggcacccaccaccatgcccaactaatttttgtatttttatagagatagggtttcaccgtgttggccaggctgatctcgaactcctgaccgcaagtgatccacccgcctcggtctcccaaagtgctgggattacagatgtgagccgccgcgcccagacagttctttcgttttaaacagttactcagtactaggatgcacccagtggtgagagtaagcatctttgactgatgacaggtcttgaggtggatagggggcgctttcagtattttgccattaagcatagtatttgatgcaggttttttttgattgatgcaggggatcaaatttaggaagttctgatctgttaatttactacaagtttttgtataaaatgaaaactcgtattctacctatgtcttttctgtaaattattgagacaattgtgtatcatttttgttctgttaatgtggcttagtacattgatttacttcaatttgttaccacaacttgctgaaatacaccattattatttgttgtatgcaatactggatttattttgataacgtattgtttagattttgttctcatctatgttaatgaaagaaattggcctgtatttttacattcttgtaatatctttgccaggttctataaaatgcaataataagcaaataaattactttgtttttgtataagtatgtataggattgagctctaaaaccaaaccattataatgataatttgggtagcttcaaactcaaattgaagagagtcttcactacaatcttcactacaacctttggccttcctctctacatttaagagtagcaatagaacaataaaaaaaaatacgtctttcaaattaattgcagtaaaaacaaaagagtagtggggagagaaaaacaatccaatacatatttttctctcagaatagaaagaaaacacaaagagaaaatatgaacaatataaagcacttaaaggaagaggatgatttcttccagcttttccacactctctttatgcgcaggaacaaacagctgttgagtgagctgctatgactttggtagagaggtgcaatatgttttttgaaccagctataaaagaaattaagaggtacatgtgagggtagaaacaaatatcaaggatgagaatggcactggctgtcccatatggtatccaggagccaccaatgtctgttgagtacttcatacatgcctagtctgaattgagatgtgctcaatgtataaaatatataccagatttcaaatacctacttcaaaaaataatgtaaaatatctcactaataacttttcctttgtgtattgcaatgataatatgttggctctattggattaaataaagtatgttattcatttta

SEQ ID NO: 279512 - DNA, 2541 bp, Homo sapiens
gtgtgatctcggctcactgcaacctctgtctcctgggttcaagcgatcctcctgtctcagcctcccgagtaactgggattacaggcgcccaccaccatgcccggctaatttttgtatttttgtagacagggtttcgacatgttggccaggctggtctcaaactcctgacctcaagtgatccacccgcctcagcctcccaaagtgctgggattacaggtgtgagccactgcgcccgtcctgactcatgcaacttctgcttcagccatccaggggtctttaaccagaagagagaggagagcctcaggagttaggaccagaagaagccagggaagcagtgcaatggcttcaaaaatcttgcttaacgtacaagaggaggtgacctgtcccatctgcctggagctgttgacagaacccttgagtctagactgtggccacagcctctgccgagcctgcatcactgtgagcaacaaggaggcagtgaccagcatgggaggaaaaagcagctgtcctgtgtgtggtatcagttactcatttgaacatctacaggctaatcagcatctggccaacatagtggagagactcaaggaggtcaagttgagcccagacaatgggaagaagagagatctctgtgatcatcatggagagaaactcctactcttctgtaaggaggataggaaagtcatttgctggctttgtgagcggtctcaggagcaccgtggtcaccacacagtcctcacggaggaagtattcaaggaatgtcaggagaaactccaggcagtcctcaagaggctgaagaaggaagaggaggaagctgagaagctggaagctgacatcagagaagagaaaacttcctggaagtatcaggtacaaactgagagacaaaggatacaaacagaatttgatcagcttagaagcatcctaaataatgaggagcagagagagctgcaaagattggaagaagaagaaaagaagacgctggataagtttgcagaggctgaggatgagctagttcagcagaagcagttggtgagagagctcatctcagatgtggagtgtcggagtcagtggtcaacaatggagctgctgcaggacatgagtggaatcatgaaatggagtgagatctggaggctgaaaaagccaaaaatggtttccaagaaactgaagactgtattccatgctccagatctgagtaggatgctgcaaatgtttagagaactgacagctgtccggtgctactgggtggatgtcacactgaattcagtcaacctaaatttgaatcttgtcctttcagaagatcagagacaagtgatatctgtgccaatttggccttttcagtgttataattatggtgtcttgggatcccaatatttctccttaatgtttccctgatgtgatactttgagagcccaggatgccagtacaataattgaaattcacaaatgtctggtatcttgtccctcgtgccccatatattatctgtggtttcggagagctcacttgtctcttatcttcagaaatgacagcacatgaaatgttgtttggagccactgtcacatcaactgtagaaaaattaacaggtcagctaagggatataatgtaactttatttgtgatatgagagaaatcttgataaagacttgagagaaaactgggaggaaccttgtttagaagttataaggaggggtaagttatgtgtgtcttggaaggagaatcataaatcttaaaacatgagcctaatagagaacataaaattctaaaagataaagataataataatgataagccgcagggtggcttatgataatgtgacttctccttaccccagtagcgtcggacatctgtcagctctgaaatgataaaaatgcacaatattgaatacaaacaaaggagtcagcactgaaattcattttctctccagattagggaaagagtaggtatgccctatggtagggcagtaaattgctgaatgatgagatgaaacagccacctagccatttcccattaaatataatcccatcagcagcagacaatatctatcctcccctatcccctctatccatatttggaaactgcaccctcttccctatttagcaccctaacaccacttgaattccataaccctgttgttgatctagctctcctcacctctaaacacttctagcattcctttcagatcaggagctcgaaacactctcctttgattttttggaaaagtttctggcttcttcaaggtcacgttctccgtcctaagaattaaaaaaaaaaaaaaaacttccaaacctttgaccttgtgtccgtggaacacccctgacttcctatcatttcaacccattgaggcacttgaactctcttcttggggatcctgagaagggagagtgcaaactcttgaccctggaggcaaacaaaatgttctcatgtttgccttcccacttactttctgcgagaacgtgggaagatcttaacctctcagaagcacagtttcttccttctaaaatgaaataattaacctctccctgtctacattcttaaactcataggacat

SEQ ID NO: 279513 - DNA, 1217 bp, Homo sapiens
gtgtgatctcggctcactgcaacctctgtctcctgggttcaagcgatcctcctgtctcagcctcccgagtaactgggattacaggcgcccaccaccatgcccggctaatttttgtatttttgtagacagggtttcgacatgttggccaggctggtctcaaactcctgacctcaagtgatccacccgcctcagcctcccaaagtgctgggattacaggtgtgagccactgcgcccgtcctgactcatgcaacttctgcttcagccatccaggggtctttaaccagaagagagaggagagcctcaggagttaggaccagaagaagccagggaagcagtgcaatggcttcaaaaatcttgcttaacgtacaagaggaggtgacctgtcccatctgcctggagctgttgacagaacccttgagtctagactgtggccacagcctctgccgagcctgcatcactgtgagcaacaaggaggcagtgaccagcatgggaggaaaaagcagctgtcctgtgtgtggtatcagttactcatttgaacatctacaggctaatcagcatctggccaacatagtggagagactcaaggaggtcaagttgagcccagacaatgggaagaagagagatctctgtgatcatcatggagagaaactcctactcttctgtaaggaggataggaaagtcatttgctggctttgtgagcggtctcaggagcaccgtggtcaccacacagtcctcacggaggaagtattcaaggaatgtcaggagaaactccaggcagtcctcaagaggctgaagaaggaagaggaggaagctgagaagctggaagctgacatcagagaagagaaaacttcctggaagtatcaggtacaaactgagagacaaaggatacaaacagaatttgatcagcttagaagcatcctaaataatgaggagcagagagagctgcaaagattggaagaagaagaaaagaagacgctggataagtttgcagaggctgaggatgagctagttcagcagaagcagttggtgagagagctcatctcagatgtggagtgtcggagtcagtggtcaacaatggagctgctgcaggacatgagtggaatcatgaaatggtgcgtatgggtggccacgagtggtgcttgtgagttataaagaagtgtttgtagctattagagttatttggtggtcaattggaataaaaaatctcccagagtagt

SEQ ID NO: 279514 - DNA, 1267 bp, Homo sapiens
gtgtgatctcggctcactgcaacctctgtctcctgggttcaagcgatcctcctgtctcagcctcccgagtaactgggattacaggcgcccaccaccatgcccggctaatttttgtatttttgtagacagggtttcgacatgttggccaggctggtctcaaactcctgacctcaagtgatccacccgcctcagcctcccaaagtgctgggattacaggtgtgagccactgcgcccgtcctgactcatgcaacttctgcttcagccatccaggggtctttaaccagaagagagaggagagcctcaggagttaggaccagaagaagccagggaagcagtgcaatggcttcaaaaatcttgcttaacgtacaagaggaggtgacctgtcccatctgcctggagctgttgacagaacccttgagtctagactgtggccacagcctctgccgagcctgcatcactgtgagcaacaaggaggcagtgaccagcatgggaggaaaaagcagctgtcctgtgtgtggtatcagttactcatttgaacatctacaggctaatcagcatctggccaacatagtggagagactcaaggaggtcaagttgagcccagacaatgggaagaagagagatctctgtgatcatcatggagagaaactcctactcttctgtaaggaggataggaaagtcatttgctggctttgtgagcggtctcaggagcaccgtggtcaccacacagtcctcacggaggaagtattcaaggaatgtcaggagaaactccaggcagtcctcaagaggctgaagaaggaagaggaggaagctgagaagctggaagctgacatcagagaagagaaaacttcctggaagaatcagatggagcctgagagatgcaggatccagacagagtttaatcagctgcgaaatatcctagacagagtggagcaacgggagctgaaaaagctggaacaggaagagaagaaggggctacgaattatagaagaggctgagaatgatctggtccaccagacccagtcgctgcgagagctcatctcggatctggagcgtcgatgtcaggggtcaacaatggagctgctgcaggatgtaagtgatgtcacagaaaggagtgagttctggaccctgaggaagccagaagctctccctacaagctgagaagtatgttccgagccccagatcgaaaagagctgcgatgtgtagagagatgtccaagctctggcatacgagacggatgttgtaccttttcctacgttgatgaccc

SEQ ID NO: 279515 - DNA, 865 bp, Homo sapiens
agctcggaccccactttccgagtagcgtcggacatctgtcagctctttttatgacgccatccacaccctgaagcagctccatcactgacccctgcagccgatgctccagatctgagatgagctctctcagggactgggtctgctgcaccatctcagtttcagagttcgtaaggcttttcagaatgtcttcctcctccttctccaggttttgcagctcattgctctcctcccagtccaggatgtctctcagttgctcaaaatctgccaagacgttggttttgtcatactgtatttgagtcttccaggaagctttctcttctctgatgtcagcttccaactcttcagcttcctgctgcttctgcctcagcatctccagagctgcctggagcttcacttggtactcccgggcaacctcctctgtgaggaacgtgtggtgaccacggtgctcctgagaccgctcacaaagccagcaaatgaccttcccgtcctcctgacagaagagtagaagtttctctccatggcgtgcacaatgatcaactttctgcccctctgggctcaacttgacctccctgagcttctccactatgttggctacatgccgattaggccgtatgttctcaggctggtaactgatccggcacacagggcagctactctctcctttgtctagcatggacttcttgtggtttgcagtgaggcatgcttggcagaagctgtggccgcagtccaggctcaggggttgtgtcaggagttccaggcagatggggcaggtcacctcctcctttacattaaccaggattccagaagccatagtagctattccactgctcctgcctgtcctggctgctgaggttcctcttgttca

SEQ ID NO: 279516 - DNA, 461 bp, Homo sapiens
caagttttcatcctaggttaggacaggcttcttttgaggttagcagaatctctgtcccattcattctatgtctgggtactgagtcaactgaaggcttgatcctgcttgacctgatttgttttcttcaaggagaagtttcaggagtctctaaagaagctgaagaacgaggagcaggaagctgagaagctaacagcttttatcagagagaagaagacatcctggaaggcaagggagactttttctgaagatgtcctggggcaggaatcatggcaggtcataggagctgagggcaaaggagtccttgtcctgtctgtcctctgatgccatgactagaagagcttccctttgcctggtcctccactatattccttccaaacagggggaggagaggaggtaaatagcaaatatatcaaaactgaacctaggagacaatcacatagcagaggaaccatggctagggg

SEQ ID NO: 279517 - DNA, 3472 bp, Homo sapiens
agatgagccttccgcaaactcctgacctgtgggtccgtccgttcaacggccaaaggctggcggaggagggatcccctgcctttctcggaacggaacggagcagagtcgtgcgtggttgagtttagataaaagccgagtgagcgcgctctgttccttaagattagtttaaggtgccttggattgctctgaagagctttgaccacctgatattgcttacatctggaacttcttggcttctcattccccagatgtgcgggtcagagaggattctacaggcaggaaacatcttagaaatcagggttgggcaggcaggagccaggagagtagctacaatgacttcaccagtactggtggacatacgagaagaggtgacctgccctatctgcctggagctcctaacagaacccctgagcatagactgtggccacagcttctgccaagcctgcatcacaccaaatggcagggaatcagtgattggtcaagaaggggaaagaagctgccctgtgtgccagaccagctaccagccagggaacctgcggcctaatcggcatctggccaacatagtgaggcggctcagagaggtagtgttgggccctgggaagcagctgaaagcagttctttgtgcagaccatggagaaaaactgcagctcttctgtcaggaggatgggaaggtcatttgctggctttgtgagcggtctcaggagcaccgtggtcaccacacgttcctcgtggaggaggttgcccaggagtaccaggagaagtttcaggagtctctaaagaagctgaagaacgaggagcaggaagctgagaagctaacagcttttatcagagagaagaagacatcctggaagaatcagatggagcctgagagatgcaggatccagacagagtttaatcagctgcgaaatatcctagacagagtggagcaacgggagctgaaaaagctggaacaggaagagaagaaggggctacgaattatagaagaggctgagaatgatctggtccaccagacccagtcgctgcgagagctcatctcggatctggagcgtcgatgtcaggggtcaacaatggagctgctgcaggatgtgagtgatgtcacagaaaggagtgagttctggaccctgaggaagccagaagctctccctacaaagctgagaagtatgttccgagccccagatctgaaaaggatgctgcgagtgtgtagagagctgacagatgtccaaagctactgggccatccaggggtctttaaccagaagagagaggagagcctcaggagttaggaccagaagaagccagggaagcagtgcaatggcttcaaaaatcttgcttaacgtacaagaggaggtgacctgtcccatctgcctggagctgttgacagaacccttgagtctagactgtggccacagcctctgccgagcctgcatcactgtgagcaacaaggaggcagtgaccagcatgggaggaaaaagcagctgtcctgtgtgtggtatcagttactcatttgaacatctacaggctaatcagcatctggccaacatagtggagagactcaaggaggtcaagttgagcccagacaatgggaagaagagagatctctgtgatcatcatggagagaaactcctactcttctgtaaggaggataggaaagtcatttgctggctttgtgagcggtctcaggagcaccgtggtcaccacacagtcctcacggaggaagtattcaaggaatgtcaggagaaactccaggcagtcctcaagaggctgaagaaggaagaggaggaagctgagaagctggaagctgacatcagagaagagaaaacttcctggaagtatcaggtacaaactgagagacaaaggatacaaacagaatttgatcagcttagaagcatcctaaataatgaggagcagagagagctgcaaagattggaagaagaagaaaagaagacgctggataagtttgcagaggctgaggatgagctagttcagcagaagcagttggtgagagagctcatctcagatgtggagtgtcggagtcagtggtcaacaatggagctgctgcaggacatgagtggaatcatgaaatggagtgagatctggaggctgaaaaagccaaaaatggtttccaagaaactgaagactgtattccatgctccagatctgagtaggatgctgcaaatgtttagagaactgacagctgtccggtgctactgggtggatgtcacactgaattcagtcaacctaaatttgaatcttgtcctttcagaagatcagagacaagtgatatctgtgccaatttggccttttcagtgttataattatggtgtcttgggatcccaatatttctcctctgggaaacattactgggaagtggacgtgtccaagaaaactgcctggatcctgggggtatactgtagaacatattcccgccatatgaagtatgttgttagaagatgtgcaaatcgtcaaaatctttacaccaaatacagacctctatttggctactgggttatagggttacagaataaatgtaagtatggtgtctttgaagagtctttgtcctctgatcccgaggttttgactctctccatggctgtgcctccctgccgtgttggggttttcctcgactatgaagcaggcattgtctcatttttcaatgtcacaagccatggctccctcatttacaagttctctaaatgttgcttttctcagcctgtttatccatatttcaatccttggaactgtccagctcccatgactctatgcccaccaagctcttgaattttctcatttcttcacctacaaccctttgtctcgacttatctcctgcaactgactcatctgcaacattcacaccattgcttccttgtggtttcccttctttagaacttttactcatccttgagatgtatggtgtatttggcttgagttatgagagatgcttatttattcatttactctttttcatattttcagagaaagttacctaatccctcctaaagacacagcagtatgggtataacatccttgccttcccatttatccatgtttcactttatcactgatgtgaagaggcccaaagcctgttagccaccatccatgctacctaggtagtccataggaaccacccccatgaccaccaccaacatcaactaaaggttcttggagggtatgtcagtgtgttgctcaggataccccaggtacatcaaggaatcaaggagaggaaaatatgagcaatatgtgtattcagagtgaagattttatgtccagagtatttgagctcaaaccttgcctgttgttttctaatcatgatgaatactttctcagtttctttttcctgaaatataaattgggatttaagactgtacctaactattaagatcactgtgtaaaactaagtgtctctaaatgtaatgcatcgatttagtgtctggaacataataaatatttgctctcatgattgctaaaaaaaaaga

SEQ ID NO: 279518 - DNA, 3217 bp, Homo sapiens
ctgagtctttcggcctgggtggaggacgcggctgcttcaagtccttggctctgatccaggccacagattccaggattctacaggcaggaaacatcttagaaatcagggttgggcaggcaggagccaggagagtagctacaatgacttcaccagtactggtggacatacgagaagaggtgacctgccctatctgcctggagctcctaacagaacccctgagcatagactgtggccacagcttctgccaagcctgcatcacaccaaatggcagggaatcagtgattggtcaagaaggggaaagaagctgccctgtgtgccagaccagctaccagccagggaacctgcggcctaatcggcatctggccaacatagtgaggcggctcagagaggtagtgttgggccctgggaagcagctgaaagcagttctttgtgcagaccatggagaaaaactgcagctcttctgtcaggaggatgggaaggtcatttgctggctttgtgagcggtctcaggagcaccgtggtcaccacacgttcctcgtggaggaggttgcccaggagtaccaggagaagtttcaggagtctctaaagaagctgaagaacgaggagcaggaagctgagaagctaacagcttttatcagagagaagaagacatcctggaagaatcagatggagcctgagagatgcaggatccagacagagtttaatcagctgcgaaatatcctagacagagtggagcaacgggagctgaaaaagctggaacaggaagagaagaaggggctacgaattatagaagaggctgagaatgatctggtccaccagacccagtcgctgcgagagctcatctcggatctggagcgtcgatgtcaggggtcaacaatggagctgctgcaggatgtgagtgatgtcacagaaaggagtgagttctggaccctgaggaagccagaagctctccctacaaagctgagaagtatgttccgagccccagatctgaaaaggatgctgcgagtgtgtagagagctgacagatgtccaaagctactgggttgacgtgaccctgaatccacacacagctaatttaaatcttgtcctggctaaaaaccggagacaagtgaggtttgtgggagctaaagtatctggaccttcctgtctggaaaagcattatgactgtagtgtcctgggctcccagcacttctcctctggtaagcattactgggaggtagatgtggccaagaagactgcctggatcctaggggtatgcagcaattcactgggacctacattctctttcaaccattttgctcaaaatcacagtgcttactccaggtatcagcctcagagtggatactgggtgattgggttacagcataaccatgaatatagggcctatgaggattcttccccttccctgcttctctccatgacagtgccccctcgccgtgttggggttttcttagattatgaggctggtactgtctccttttataatgtcacaaaccatggcttccccatctacactttctctaaatattactttcccactactctttgtccatattttaatccttgcaactgtgtaattcctatgaccctgcgtcgtccaagctcttgaatattcttctgttcccacccacttctgataagtaccctgaggcttatcagcatgtgattctcccttctgatcttctgtttttctgtgttctcaattcttttgttgttttttggtttttgaatcttttttgagatggaatctcgctctgtcgcccaggctggagtgcactggcgcaatctcggctcactgcaacctctgcctcctgggttcaagcgaacctcctgcctcagcatcccaagtagctgggattacaggcacccaccaccatgcccaactaatttttgtatttttatagagatagggtttcaccgtgttggccaggctgatctcgaactcctgaccgcaagtgatccacccgcctcggtctcccaaagtgctgggattacagatgtgagccgccgcgcccagacagttctttcgttttaaacagttactcagtactaggatgcacccagtggtgagagtaagcatctttgactgatgacaggtcttgaggtggatagggggcgctttcagtattttgccattaagcatagtatttgatgcaggttttttttgattgatgcaggggatcaaatttaggaagttctgatctgttaatttactacaagtttttgtataaaatgaaaactcgtattctacctatgtcttttctgtaaattattgagacaattgtgtatcatttttgttctgttaatgtggcttagtacattgatttacttcaatttgttaccacaacttgctgaaatacaccattattatttgttgtatgcaatactggatttattttgataacgtattgtttagattttgttctcatctatgttaatgaaagaaattggcctgtatttttacattcttgtaatatctttgccaggttctataaaatgcaataataagcaaataaattactttgtttttgtataagtatgtataggattgagctctaaaaccaaaccattataatgataatttgggtagcttcaaactcaaattgaagagagtcttcactacaatcttcactacaacctttggccttcctctctacatttaagagtagcaatagaacaataaaaaaaaatacgtctttcaaattaattgcagtaaaaacaaaagagtagtggggagagaaaaacaatccaatacatatttttctctcagaatagaaagaaaacacaaagagaaaatatgaacaatataaagcacttaaaggaagaggatgatttcttccagcttttccacactctctttatgcgcaggaacaaacagctgttgagtgagctgctatgactttggtagagaggtgcaatatgttttttgaaccagctataaaagaaattaagaggtacatgtgagggtagaaacaaatatcaaggatgagaatggcactggctgtcccatatggtatccaggagccaccaatgtctgttgagtacttcatacatgcctagtctgaattgagatgtgctcaatgtataaaatatataccagatttcaaatacctacttcaaaaaataatgtaaaatatctcactaataacttttcctttgtgtattgcaatgataatatgttggctctattggattaaataaagtatgttattcatttta

SEQ ID NO: 279519 - DNA, 3177 bp, Homo sapiens
agatgagccttccgcaaactcctgacctgtgggtccgtccgttcaacggccaaaggctggcggaggagggatcccctgcctttctcggaacggaacggagcagagtcgtgcgtggttgagtttagataaaagccgagtgagcgcgctctgttccttaagattagtttaaggtgccttggattgctctgaagagctttgaccacctgatattgcttacatctggaacttcttggcttctcattccccagatgtgcgggtcagagagaccatggagaaaaactgcagctcttctgtcaggaggatgggaaggtcatttgctggctttgtgagcggtctcaggagcaccgtggtcaccacacgttcctcgtggaggaggttgcccaggagtaccaggagaagtttcaggagtctctaaagaagctgaagaacgaggagcaggaagctgagaagctaacagcttttatcagagagaagaagacatcctggaagaatcagatggagcctgagagatgcaggatccagacagagtttaatcagctgcgaaatatcctagacagagtggagcaacgggagctgaaaaagctggaacaggaagagaagaaggggctacgaattatagaagaggctgagaatgatctggtccaccagacccagtcgctgcgagagctcatctcggatctggagcgtcgatgtcaggggtcaacaatggagctgctgcaggatgtgagtgatgtcacagaaaggagtgagttctggaccctgaggaagccagaagctctccctacaaagctgagaagtatgttccgagccccagatctgaaaaggatgctgcgagtgtgtagaggggagatgaaatggccaggtgacatcctcacaggattcctcaccattcccctcaatgtagtaaggagagagataccagacatgagacagttggtcctattcaacattattgactcttttcatcattacagagctgacagatgtccaaagctactgggttgacgtgaccctgaatccacacacagctaatttaaatcttgtcctggctaaaaaccggagacaagtgaggtttgtgggagctaaagtatctggaccttcctgtctggaaaagcattatgactgtagtgtcctgggctcccagcacttctcctctggtaagcattactgggaggtagatgtggccaagaagactgcctggatcctaggggtatgcagcaattcactgggacctacattctctttcaaccattttgctcaaaatcacagtgcttactccaggtatcagcctcagagtggatactgggtgattgggttacagcataaccatgaatatagggcctatgaggattcttccccttccctgcttctctccatgacagtgccccctcgccgtgttggggttttcttagattatgaggctggtactgtctccttttataatgtcacaaaccatggcttccccatctacactttctctaaatattactttcccactactctttgtccatattttaatccttgcaactgtgtaattcctatgaccctgcgtcgtccaagctcttgaatattcttctgttcccacccacttctgataagtaccctgaggcttatcagcatgtgattctcccttctgatcttctgtttttctgtgttctcaattcttttgttgttttttggtttttgaatcttttttgagatggaatctcgctctgtcgcccaggctggagtgcactggcgcaatctcggctcactgcaacctctgcctcctgggttcaagcgaacctcctgcctcagcatcccaagtagctgggattacaggcacccaccaccatgcccaactaatttttgtatttttatagagatagggtttcaccgtgttggccaggctgatctcgaactcctgaccgcaagtgatccacccgcctcggtctcccaaagtgctgggattacagatgtgagccgccgcgcccagacagttctttcgttttaaacagttactcagtactaggatgcacccagtggtgagagtaagcatctttgactgatgacaggtcttgaggtggatagggggcgctttcagtattttgccattaagcatagtatttgatgcaggttttttttgattgatgcaggggatcaaatttaggaagttctgatctgttaatttactacaagtttttgtataaaatgaaaactcgtattctacctatgtcttttctgtaaattattgagacaattgtgtatcatttttgttctgttaatgtggcttagtacattgatttacttcaatttgttaccacaacttgctgaaatacaccattattatttgttgtatgcaatactggatttattttgataacgtattgtttagattttgttctcatctatgttaatgaaagaaattggcctgtatttttacattcttgtaatatctttgccaggttctataaaatgcaataataagcaaataaattactttgtttttgtataagtatgtataggattgagctctaaaaccaaaccattataatgataatttgggtagcttcaaactcaaattgaagagagtcttcactacaatcttcactacaacctttggccttcctctctacatttaagagtagcaatagaacaataaaaaaaaatacgtctttcaaattaattgcagtaaaaacaaaagagtagtggggagagaaaaacaatccaatacatatttttctctcagaatagaaagaaaacacaaagagaaaatatgaacaatataaagcacttaaaggaagaggatgatttcttccagcttttccacactctctttatgcgcaggaacaaacagctgttgagtgagctgctatgactttggtagagaggtgcaatatgttttttgaaccagctataaaagaaattaagaggtacatgtgagggtagaaacaaatatcaaggatgagaatggcactggctgtcccatatggtatccaggagccaccaatgtctgttgagtacttcatacatgcctagtctgaattgagatgtgctcaatgtataaaatatataccagatttcaaatacctacttcaaaaaataatgtaaaatatctcactaataacttttcctttgtgtattgcaatgataatatgttggctctattggattaaataaagtatgttattcatttta

SEQ ID NO: 279520 - DNA, 3465 bp, Homo sapiens
agatgagccttccgcaaactcctgacctgtgggtccgtccgttcaacggccaaaggctggcggaggagggatcccctgcctttctcggaacggaacggagcagagtcgtgcgtggttgagtttagataaaagccgagtgagcgcgctctgttccttaagattagtttaaggtgccttggattgctctgaagagctttgaccacctgatattgcttacatctggaacttcttggcttctcattccccagatgtgcgggtcagagaggattctacaggcaggaaacatcttagaaatcagggttgggcaggcaggagccaggagagtagctacaatgacttcaccagtactggtggacatacgagaagaggtgacctgccctatctgcctggagctcctaacagaacccctgagcatagactgtggccacagcttctgccaagcctgcatcacaccaaatggcagggaatcagtgattggtcaagaaggggaaagaagctgccctgtgtgccagaccagctaccagccagggaacctgcggcctaatcggcatctggccaacatagtgaggcggctcagagaggtagtgttgggccctgggaagcagctgaaagcagttctttgtgcagaccatggagaaaaactgcagctcttctgtcaggaggatgggaaggtcatttgctggctttgtgagcggtctcaggagcaccgtggtcaccacacgttcctcgtggaggaggttgcccaggagtaccaggagaagtttcaggagtctctaaagaagctgaagaacgaggagcaggaagctgagaagctaacagcttttatcagagagaagaagacatcctggaagaatcagatggagcctgagagatgcaggatccagacagagtttaatcagctgcgaaatatcctagacagagtggagcaacgggagctgaaaaagctggaacaggaagagaagaaggggctacgaattatagaagaggctgagaatgatctggtccaccagacccagtcgctgcgagagctcatctcggatctggagcgtcgatgtcaggggtcaacaatggagctgctgcaggatgtgagtgatgtcacagaaaggagtgagttctggaccctgaggaagccagaagctctccctacaaagctgagaagtatgttccgagccccagatctgaaaaggatgctgcgagtgtgtagagagctgacagatgtccaaagctactgggcataacgagacccatgtccccgttctcatctgctgatgttgtaccttttcctacagttgacgtgaccctgaatccacacacagctaatttaaatcttgtcctggctaaaaaccggagacaagtgaggtttgtgggagctaaagtatctggaccttcctgtctggaaaagcattatgactgtagtgtcctgggctcccagcacttctcctctggtaagcattactgggaggtagatgtggccaagaagactgcctggatcctaggggtatgcagcaattcactgggacctacattctctttcaaccattttgctcaaaatcacagtgcttactccaggtatcagcctcagagtggatactgggtgattgggttacagcataaccatgaatatagggcctatgaggattcttccccttccctgcttctctccatgacagtgccccctcgccgtgttggggttttcttagattatgaggctggtactgtctccttttataatgtcacaaaccatggcttccccatctacactttctctaaatattactttcccactactctttgtccatattttaatccttgcaactgtgtaattcctatgaccctgcgtcgtccaagctcttgaatattcttctgttcccacccacttctgataagtaccctgaggcttatcagcatgtgattctcccttctgatcttctgtttttctgtgttctcaattcttttgttgttttttggtttttgaatcttttttgagatggaatctcgctctgtcgcccaggctggagtgcactggcgcaatctcggctcactgcaacctctgcctcctgggttcaagcgaacctcctgcctcagcatcccaagtagctgggattacaggcacccaccaccatgcccaactaatttttgtatttttatagagatagggtttcaccgtgttggccaggctgatctcgaactcctgaccgcaagtgatccacccgcctcggtctcccaaagtgctgggattacagatgtgagccgccgcgcccagacagttctttcgttttaaacagttactcagtactaggatgcacccagtggtgagagtaagcatctttgactgatgacaggtcttgaggtggatagggggcgctttcagtattttgccattaagcatagtatttgatgcaggttttttttgattgatgcaggggatcaaatttaggaagttctgatctgttaatttactacaagtttttgtataaaatgaaaactcgtattctacctatgtcttttctgtaaattattgagacaattgtgtatcatttttgttctgttaatgtggcttagtacattgatttacttcaatttgttaccacaacttgctgaaatacaccattattatttgttgtatgcaatactggatttattttgataacgtattgtttagattttgttctcatctatgttaatgaaagaaattggcctgtatttttacattcttgtaatatctttgccaggttctataaaatgcaataataagcaaataaattactttgtttttgtataagtatgtataggattgagctctaaaaccaaaccattataatgataatttgggtagcttcaaactcaaattgaagagagtcttcactacaatcttcactacaacctttggccttcctctctacatttaagagtagcaatagaacaataaaaaaaaatacgtctttcaaattaattgcagtaaaaacaaaagagtagtggggagagaaaaacaatccaatacatatttttctctcagaatagaaagaaaacacaaagagaaaatatgaacaatataaagcacttaaaggaagaggatgatttcttccagcttttccacactctctttatgcgcaggaacaaacagctgttgagtgagctgctatgactttggtagagaggtgcaatatgttttttgaaccagctataaaagaaattaagaggtacatgtgagggtagaaacaaatatcaaggatgagaatggcactggctgtcccatatggtatccaggagccaccaatgtctgttgagtacttcatacatgcctagtctgaattgagatgtgctcaatgtataaaatatataccagatttcaaatacctacttcaaaaaataatgtaaaatatctcactaataacttttcctttgtgtattgcaatgataatatgttggctctattggattaaataaagtatgttattcatttta

SEQ ID NO: 279521 - DNA, 3557 bp, Homo sapiens
agatgagccttccgcaaactcctgacctgtgggtccgtccgttcaacggccaaaggctggcggaggagggatcccctgcctttctcggaacggaacggagcagagtcgtgcgtggttgagtttagataaaagccgagtgagcgcgctctgttccttaagattagtttaaggtgccttggattgctctgaagagctttgaccacctgatattgcttacatctggaacttcttggcttctcattccccagatgtgcgggtcagagaggattctacaggcaggaaacatcttagaaatcagggttgggcaggcaggagccaggagagtagctacaatgacttcaccagtactggtggacatacgagaagaggtgacctgccctatctgcctggagctcctaacagaacccctgagcatagactgtggccacagcttctgccaagcctgcatcacaccaaatggcagggaatcagtgattggtcaagaaggggaaagaagctgccctgtgtgccagaccagctaccagccagggaacctgcggcctaatcggcatctggccaacatagtgaggcggctcagagaggtagtgttgggccctgggaagcagctgaaagcagttctttgtgcagaccatggagaaaaactgcagctcttctgtcaggaggatgggaaggtcatttgctggctttgtgagcggtctcaggagcaccgtggtcaccacacgttcctcgtggaggaggttgcccaggagtaccaggagaagtttcaggagtctctaaagaagctgaagaacgaggagcaggaagctgagaagctaacagcttttatcagagagaagaagacatcctggaagaatcagatggagcctgagagatgcaggatccagacagagtttaatcagctgcgaaatatcctagacagagtggagcaacgggagctgaaaaagctggaacaggaagagaagaaggggctacgaattatagaagaggctgagaatgatctggtccaccagacccagtcgctgcgagagctcatctcggatctggagcgtcgatgtcaggggtcaacaatggagctgctgcaggatgtgagtgatgtcacagaaaggagtgagttctggaccctgaggaagccagaagctctccctacaaagctgagaagtatgttccgagccccagatctgaaaaggatgctgcgagtgtgtagaggggagatgaaatggccaggtgacatcctcacaggattcctcaccattcccctcaatgtagtaaggagagagataccagacatgagacagttggtcctattcaacattattgactcttttcatcattacagagctgacagatgtccaaagctactgggccatccaggggtctttaaccagaagagagaggagagcctcaggagttaggaccagaagaagccagggaagcagtgcaatggcttcaaaaatcttgcttaacgtacaagaggaggtgacctgtcccatctgcctggagctgttgacagaacccttgagtctagactgtggccacagcctctgccgagcctgcatcactgtgagcaacaaggaggcagtgaccagcatgggaggaaaaagcagctgtcctgtgtgtggtatcagttactcatttgaacatctacaggctaatcagcatctggccaacatagtggagagactcaaggaggtcaagttgagcccagacaatgggaagaagagagatctctgtgatcatcatggagagaaactcctactcttctgtaaggaggataggaagagaaactccaggcagtcctcaagaggctgaagaaggaagaggaggaagctgagaagctggaagctgacatcagagaagagaaaacttcctggaagtatcaggtacaaactgagagacaaaggatacaaacagaatttgatcagcttagaagcatcctaaataatgaggagcagagagagctgcaaagattggaagaagaagaaaagaagacgctggataagtttgcagaggctgaggatgagctagttcagcagaagcagttggtgagagagctcatctcagatgtggagtgtcggagtcagtggtcaacaatggagctgctgcaggacatgagtggaatcatgaaatggagtgagatctggaggctgaaaaagccaaaaatggtttccaagaaactgaagactgtattccatgctccagatctgagtaggatgctgcaaatgtttagagaactgacagctgtccggtgctactgggtggatgtcacactgaattcagtcaacctaaatttgaatcttgtcctttcagaagatcagagacaagtgatatctgtgccaatttggccttttcagtgttataattatggtgtcttgggatcccaatatttctccttaatgtttccctgatgtgatactttgagagcccaggatgccagtacaataattgaaattcacaaatgtctggtatcttgtccctcgtgccccatatattatctgtggtttcggagagctcacttgtctcttatcttcagaaatgacagcacatgaaatgttgtttggagccactgtcacatcaactgtagaaaaattaacaggtcagctaagggatataatgtaactttatttgtgatatgagagaaatcttgataaagacttgagagaaaactgggaggaaccttgtttagaagttataaggaggggtaagttatgtgtgtcttggaaggagaatcataaatcttaaaacatgagcctaatagagaacataaaattctaaaagataaagataataataatgataagccgcagggtggcttatgataatgtgacttctccttaccccagtagcgtcggacatctgtcagctctgaaatgataaaaatgcacaatattgaatacaaacaaaggagtcagcactgaaattcattttctctccagattagggaaagagtaggtatgccctatggtagggcagtaaattgctgaatgatgagatgaaacagccacctagccatttcccattaaatataatcccatcagcagcagacaatatctatcctcccctatcccctctatccatatttggaaactgcaccctcttccctatttagcaccctaacaccacttgaattccataaccctgttgttgatctagctctcctcacctctaaacacttctagcattcctttcagatcaggagctcgaaacactctcctttgattttttggaaaagtttctggcttcttcaaggtcacgttctccgtcctaagaattaaaaaaaaaaaaaaaacttccaaacctttgaccttgtgtccgtggaacacccctgacttcctatcatttcaacccattgaggcacttgaactctcttcttggggatcctgagaagggagagtgcaaactcttgaccctggaggcaaacaaaatgttctcatgtttgccttcccacttactttctgcgagaacgtgggaagatcttaacctctcagaagcacagtttcttccttctaaaatgaaataattaacctctccctgtctacattcttaaactcataggacat

SEQ ID NO: 279522 - DNA, 2768 bp, Homo sapiens
gtgtgatctcggctcactgcaacctctgtctcctgggttcaagcgatcctcctgtctcagcctcccgagtaactgggattacaggcgcccaccaccatgcccggctaatttttgtatttttgtagacagggtttcgacatgttggccaggctggtctcaaactcctgacctcaagtgatccacccgcctcagcctcccaaagtgctgggattacaggtgtgagccactgcgcccgtcctgactcatgcaacttctgcttcagccatccaggggtctttaaccagaagagagaggagagcctcaggagttaggaccagaagaagccagggaagcagtgcaatggcttcaaaaatcttgcttaacgtacaagaggaggtgacctgtcccatctgcctggagctgttgacagaacccttgagtctagactgtggccacagcctctgccgagcctgcatcactgtgagcaacaaggaggcagtgaccagcatgggaggaaaaagcagctgtcctgtgtgtggtatcagttactcatttgaacatctacaggctaatcagcatctggccaacatagtggagagactcaaggaggtcaagttgagcccagacaatgggaagaagagagatctctgtgatcatcatggagagaaactcctactcttctgtaaggaggataggaaagtcatttgctggctttgtgagcggtctcaggagcaccgtggtcaccacacagtcctcacggaggaagtattcaaggaatgtcaggagaaactccaggcagtcctcaagaggctgaagaaggaagaggaggaagctgagaagctggaagctgacatcagagaagagaaaacttcctggaagtatcaggtacaaactgagagacaaaggatacaaacagaatttgatcagcttagaagcatcctaaataatgaggagcagagagagctgcaaagattggaagaagaagaaaagaagacgctggataagtttgcagaggctgaggatgagctagttcagcagaagcagttggtgagagagctcatctcagatgtggagtgtcggagtcagtggtcaacaatggagctgctgcaggacatgagtggaatcatgaaatggagtgagatctggaggctgaaaaagccaaaaatggtttccaagaaactgaagactgtattccatgctccagatctgagtaggatgctgcaaatgtttagagaactgacagctgtccggtgctactgggtggatgtcacactgaattcagtcaacctaaatttgaatcttgtcctttcagaagatcagagacaagtgatatctgtgccaatttggccttttcagtgttataattatggtgtcttgggatcccaatatttctccttaatgtttccctgatgtgatactttgagagcccaggatgccagtacaataattgaaattcacaaatgtctggtatcttgtccctcgtgccccatatattatctgtggtttcggagagctcacttgtctcttatcttcagaaatgacagcacatgaaatgttgtttggagccactgtcacatcaactgtagaaaaattaacaggtcagctaagggatataatgtaactttatttgtgatatgagagaaatcttgataaagacttgagagaaaactgggaggaaccttgtttagaagttataaggaggggtaagttatgtgtgtcttggaaggagaatcataaatcttaaaacatgagcctaatagagaacataaaattctaaaagataaagataataataatgataagccgcagggtggcttatgataatgtgacttctccttaccccagtagcgtcggacatctgtcagctctctaaacacttctagcattcctttcagatcaggagctcgaaacactctcctttgattttttggaaaagtttctggcttcttcaaggtcacgttctccgtcctttttatgacgccatccacaccctgaagcagctccatcactgacccctgcagccgatgctccagatctgagatgagctctctcagggactgggtctgctgcaccatctcagtttcagagttcgtaaggcttttcagaatgtcttcctcctccttctccaggttttgcagctcattgctctcctcccagtccaggatgtctctcagttgctcaaaatctgccaagacgttggttttgtcatactgtatttgagtcttccaggaagctttctcttctctgatgtcagcttccaactcttcagcttcctgctgcttctgcctcagcatctccagagctgcctggagcttcacttggtactcccgggcaacctcctctgtgaggaacgtgtggtgaccacggtgctcctgagaccgctcacaaagccagcaaatgaccttcccgtcctcctgacagaagagtagaagtttctctccatggcgtgcacaatgatcaactttctgcccctctgggctcaacttgacctccctgagcttctccactatgttggctacatgccgattaggccgtatgttctcaggctggtaactgatccggcacacagggcagctactctctcctttgtctagcatggacttcttgtggtttgcagtgaggcatgcttggcagaagctgtggccgcagtccaggctcaggggttgtgtcaggagttccaggcagatggggcaggtcacctcctcctttacattaaccaggattccagaagccatagtagctattccactgctcctgcctgtcctggctgctgaggttcctcttgttca

SEQ ID NO: 279523 - DNA, 2923 bp, Homo sapiens
gtgtgatctcggctcactgcaacctctgtctcctgggttcaagcgatcctcctgtctcagcctcccgagtaactgggattacaggcgcccaccaccatgcccggctaatttttgtatttttgtagacagggtttcgacatgttggccaggctggtctcaaactcctgacctcaagtgatccacccgcctcagcctcccaaagtgctgggattacaggtgtgagccactgcgcccgtcctgactcatgcaacttctgcttcagccatccaggggtctttaaccagaagagagaggagagcctcaggagttaggaccagaagaagccagggaagcagtgcaatggcttcaaaaatcttgcttaacgtacaagaggaggtgacctgtcccatctgcctggagctgttgacagaacccttgagtctagactgtggccacagcctctgccgagcctgcatcactgtgagcaacaaggaggcagtgaccagcatgggaggaaaaagcagctgtcctgtgtgtggtatcagttactcatttgaacatctacaggctaatcagcatctggccaacatagtggagagactcaaggaggtcaagttgagcccagacaatgggaagaagagagatctctgtgatcatcatggagagaaactcctactcttctgtaaggaggataggaaagtcatttgctggctttgtgagcggtctcaggagcaccgtggtcaccacacagtcctcacggaggaagtattcaaggaatgtcaggagaaactccaggcagtcctcaagaggctgaagaaggaagaggaggaagctgagaagctggaagctgacatcagagaagagaaaacttcctggaagtatcaggtacaaactgagagacaaaggatacaaacagaatttgatcagcttagaagcatcctaaataatgaggagcagagagagctgcaaagattggaagaagaagaaaagaagacgctggataagtttgcagaggctgaggatgagctagttcagcagaagcagttggtgagagagctcatctcagatgtggagtgtcggagtcagtggtcaacaatggagctgctgcaggacatgagtggaatcatgaaatggagtgagatctggaggctgaaaaagccaaaaatggtttccaagaaactgaagactgtattccatgctccagatctgagtaggatgctgcaaatgtttagagaactgacagctgtccggtgctactgggtggatgtcacactgaattcagtcaacctaaatttgaatcttgtcctttcagaagatcagagacaagtgatatctgtgccaatttggccttttcagtgttataattatggtgtcttgggatcccaatatttctccttaatgtttccctgatgtgatactttgagagcccaggatgccagtacaataattgaaattcacaaatgtctggtatcttgtccctcgtgccccatatattatctgtggtttcggagagctcacttgtctcttatcttcagaaatgacagcacatgaaatgttgtttggagccactgtcacatcaactgtagaaaaattaacaggtcagctaagggatataatgtaactttatttgtgatatgagagaaatcttgataaagacttgagagaaaactgggaggaaccttgtttagaagttataaggaggggtaagttatgtgtgtcttggaaggagaatcataaatcttaaaacatgagcctaatagagaacataaaattctaaaagataaagataataataatgataagccgcagggtggcttatgataatgtgacttctccttaccccagtagcgtcggacatctgtcagctctgaaatgataaaaatgcacaatattgaatacaaacaaaggagtcagcactgaaattcattttctctccagattagggaaagagtaggtatgccctatggtagggcagtaaattgttgaattccataaccctgttgttgatctagctctcctcacctctaaacacttctagcattcctttcagatcaggagctcgaaacactctcctttgattttttggaaaagtttctggcttcttcaaggtcacgttctccgtcctttttatgacgccatccacaccctgaagcagctccatcactgacccctgcagccgatgctccagatctgagatgagctctctcagggactgggtctgctgcaccatctcagtttcagagttcgtaaggcttttcagaatgtcttcctcctccttctccaggttttgcagctcattgctctcctcccagtccaggatgtctctcagttgctcaaaatctgccaagacgttggttttgtcatactgtatttgagtcttccaggaagctttctcttctctgatgtcagcttccaactcttcagcttcctgctgcttctgcctcagcatctccagagctgcctggagcttcacttggtactcccgggcaacctcctctgtgaggaacgtgtggtgaccacggtgctcctgagaccgctcacaaagccagcaaatgaccttcccgtcctcctgacagaagagtagaagtttctctccatggcgtgcacaatgatcaactttctgcccctctgggctcaacttgacctccctgagcttctccactatgttggctacatgccgattaggccgtatgttctcaggctggtaactgatccggcacacagggcagctactctctcctttgtctagcatggacttcttgtggtttgcagtgaggcatgcttggcagaagctgtggccgcagtccaggctcaggggttgtgtcaggagttccaggcagatggggcaggtcacctcctcctttacattaaccaggattccagaagccatagtagctattccactgctcctgcctgtcctggctgctgaggttcctcttgttca

SEQ ID NO: 279524 - DNA, 2277 bp, Homo sapiens
agatgagccttccgcaaactcctgacctgtgggtccgtccgttcaacggccaaaggctggcggaggagggatcccctgcctttctcggaacggaacggagcagagtcgtgcgtggttgagtttagataaaagccgagtgagcgcgctctgttccttaagattagtttaaggtgccttggattgctctgaagagctttgaccacctgatattgcttacatctggaacttcttggcttctcattccccagatgtgcgggtcagagaggattctacaggcaggaaacatcttagaaatcagggttgggcaggcaggagccaggagagtagctacaatgacttcaccagtactggtggacatacgagaagaggtgacctgccctatctgcctggagctcctaacagaacccctgagcatagactgtggccacagcttctgccaagcctgcatcacaccaaatggcagggaatcagtgattggtcaagaaggggaaagaagctgccctgtgtgccagaccagctaccagccagggaacctgcggcctaatcggcatctggccaacatagtgaggcggctcagagaggtagtgttgggccctgggaagcagctgaaagcagttctttgtgcagaccatggagaaaaactgcagctcttctgtcaggaggatgggaaggtcatttgctggctttgtgagcggtctcaggagcaccgtggtcaccacacgttcctcgtggaggaggttgcccaggagtaccaggagaagtttcaggagtctctaaagaagctgaagaacgaggagcaggaagctgagaagctaacagcttttatcagagagaagaagacatcctggaagaatcagatggagcctgagagatgcaggatccagacagagtttaatcagctgcgaaatatcctagacagagtggagcaacgggagctgaaaaagctggaacaggaagagaagaaggggctacgaattatagaagaggctgagaatgatctggtccaccagacccagtcgctgcgagagctcatctcggatctggagcgtcgatgtcaggggtcaacaatggagctgctgcaggatgtgagtgatgtcacagaaaggagtgagttctggaccctgaggaagccagaagctctccctacaaagctgagaagtatgttccgagccccagatctgaaaaggatgctgcgagtgtgtagagagctgacagatgtccaaagctactgggcataacgagacccatgtccccgttctcatctgctgatgttgtaccttttcctacagttgacgtgaccctgaatccacacacagctaatttaaatcttgtcctggctaaaaaccggagacaagtgaggtttgtgggagctaaagtatctggaccttcctgtctggaaaagcattatgactgtagtgtcctgggctcccagcacttctcctctggtaagcattactgggaggtagatgtggccaagaagactgcctggatcctaggggtatgcagcaattcactgggacctacattctctttcaaccattttgctcaaaatcacagtgcttactccaggtatcagcctcagagtggatactgggtgattgggttacagcataaccatgaatatagggcctatgaggattcttccccttccctgcttctctccatgacagtgccccctcgccgtgttggggttttcttagattatgaggctggtactgtctccttttataatgtcacaaaccatggcttccccatctacactttctctaaatattactttcccactactctttgtccatattttaatccttgcaactgtgtaattcctatgaccctgcgtcgtccaagctcttgaatattcttctgttcccacccacttctgataagtaccctgaggcttatcagcatgtgattctcccttctgatcttctgtttttctgtgttctcaattcttgaggacgaacagggcattgccgaatcttttaggagattccgtctcaaaaaaaacaacacaaggaagggaaaaaaaaatagcatttataccctcttacagtgggtatcaagccgcccatgaaaacttctgaaacactcgcagaattcagggtggaatactcccaaaagcaagacttctataacgtttcaacctcacctcgtacattcctgtataggtaagacagtctccgttgaaaaaagcccaaggctaagtgatctaacaaagacggtaccacgtacaggtgacggtacgttaacccagtatgtgaccaaattgacagacaa

SEQ ID NO: 279525 - DNA, 945 bp, Homo sapiens
cgcttggggttccgcgcccccaagttcccggtgctcccgcccctcgccccagcggctgcaacatcagcgcgcagaggagtttctgcgagcacccgggagttgtagccaccgcttccccacccccgactcagcaggacagccccagaacgggaccccacagccagtcagctgggtcagctccccagcagcgaagccgggagcccgaggacccggggacgcgcggtgggggcggcggccgagctgctgcggcgctcagggcttgggggcgcccccgttctgcagatgcgcttttcagggggtggggagtcaagagcctgtggctcttccgtcacggggtaaacggtaacacctgggcggccgcgactctgcgagcgttctggcctcggcgggcggcggggaaccgcagtgatgcccgagctcgccccttttgtgtcctcgcggtgagccccgttccgaagccggaagcttgggaacgctctaactgggagaacggcgctcggctggtcaattcattccgctcctcggaaacaatgagctggatccttgacttgaatgtgctggcggagcggggtttgtaagccggcgtttcatccagctctggtcctcaaggcgccctttgtaccacccgcaggtggccgaggctactgcacgtattttcgaaatcaccgagtgtgggtgtttggggcaggtatcaccccgcgaggaccatctcagactgagagttggtttaggagttttgaacagattggatacagaactatattgtgttttgtatttagaccgggggaaagactagaatgttaactctagggtccagtttgtcatctaacagaattccgggcttgggtaggtcctgtaatgcggtacaataacaaccaggtgttaaaaccggcatcttctggattctcagattctgtagacagcatacttctaaaaaatgtagag

SEQ ID NO: 279526 - DNA, 908 bp, Homo sapiens
cgcttggggttccgcgcccccaagttcccggtgctcccgcccctcgccccagcggctgcaacatcagcgcgcagaggagtttctgcgagcacccgggagttgtagccaccgcttccccacccccgactcagcaggacagccccagaacgggaccccacagccagtcagctgggtcagctccccagcagcgaagccgggagcccgaggacccggggacgcgcggtgggggcggcggccgagctgctgcggcgctcagggcttgggggcgcccccgttctgcagatgcgcttttcagggggtggggagtcaagagcctgtggctcttccgtcacggggtaaacggtaacacctgggcggccgcgactctgcgagcgttctggcctcggcgggcggcggggaaccgcagtgatgcccgagctcgccccttttgtgtcctcgcggtgagccccgttccgaagccggaagcttgggaacgctctaactgggagaacggcgctcggctggtcaattcattccgctcctcggaaacaatgagctggatccttgacttgaatgtgctggcggagcggggtttagcgtttattgagaacctactatgcctaggataattcctgaccaatacaagagagacagtttccatggagatgtgatcggtaaggtggtggagactcagagtgatggatgggctccctttgattggtggtccaggaagcctctaggaggaggaggtggcaacatttaaactgagaccttaatgatattgatgagttcctgttttatcagatctaagatatctttgaaatatttcaatttttaatgaaatatacagttttaaaatgttccactttaaaatgtaccacaaagaaagaaaaactactgtcaataaaattggcaccatctactgtaag

SEQ ID NO: 279527 - DNA, 5500 bp, Homo sapiens
aatggcggaagtggcaccgttgccaggcagccgttgcctggcgtcgcggggcgtactctgcgctgggcgcgcggaggcctaggcgggaagctcgagcggcggcgccatggcccgaggtagcgcgcggctggcgggggtcccgaggatcccgggttccggggttccggggtccagggtcggcggccggagcgctcagggcccccgcctaggccctgaggccagagtccccgctcaggcagggtcccgtctgccgggcgcccaccctcgggctcccggagcttggcttccctcgggcgcccggcctcgtcccgccagcctagctggcgttggcgtcgccggggaaggcgcggagagccccggctcctgcctggtccccgaggcccggcccagccccgcagtggccccggctcgcgtggccgagtcccctgacgcccggcgcccgctccccgcagcgtggcagcacccgttcctcaacgtcttcagacacttccgggtggacgagtggaagcgctccgccaagcagggggacgtggccgtggtcacggacaagaccctgaagggcgccgtgtatcgcattcggggctcagtctctgccgccaactacatccagctccctaagagcagcacccagtctctggggctgacgggacgatacctgtatgtgctctttcggcccctgcccagcaagcacttcgtcatccacctcgatgtgtcctccaaggacaaccaagtcatccgtgtgtctttctccaacctcttcaaggagtttaagtctacggccacgtggctccagtttcccttggtcctggaggccaggacacctcagagagatctggtgggtttggccccctccggagcccgctggacctgcctgcagctcgatctgcaggacgttctcctggtctacctgaaccggtgctacggccatctcaagagcatcaggctgtgcgccagcctgctggtcaggaacctgtacaccagtgacctgtgctttgagcctgccatctctggggcccagtgggcaaagctgcccgtgactcctatgcctcgggaaatggcattccctgtgcccaagggagagagctggcatgaccgctacatccacgtccggtttccaagtgagagcttgaaagtgccttccaagccgattgagaagagctgttcccctcctgaggcagtcctcctggggccggggccacagcctctcccttgcccggtggcctccagcaaacctgtgcggttcagtgtgtctccagtggtccagacgcccagccccacagcccagtccggccgggccgccttggcacccaggcccttcccggaggtcagcctgtcccaagagcgctcagacgcctccaacgcggatggccccggtttccatagccttgagccctgggcccagctggaggcctctgacatccacacggctgctgccggcacccacgtgttgactcacgagtcggctgaggtgcccgtggcccgcaccggctcctgcgaaggcttcctcccagacccagtcctgaggctcaagggcgtcatcggctttgggggccacggcaccagacaggccctgtggaccccagacggggcggctgtcgtgtacccctgccatgcggtcatcgtcgtcctgctcgtggacacgggggagcagcgcttcttccttggccacacagacaaggtctccgccctggcgctggatggcagcagctcactattggcctcggcccaggcaagggcccctagtgtgatgcggctctgggacttccagaccgggcggtgcttgtgcctgttccggagcccaatgcacgttgtctgctctctcagcttctctgacagcggggcccttctctgcggggttggcaaggaccaccacgggaggacggtaacagggccctggctgcgggttggggtggggctgtcctgatgcacgcagacagctggaagggtcttggttttctgaaactccagcttcatgtgaccctgggtccctgctctgtgtcctccctgtggtggggctccctgcactctggtgttcatgccgcccccgtgccctgcacaaaaaccaccaccagcagctcacatttcacgtctcggcttttcggccatcggagtcggtttaagccagcgtttacacacctcgcctcgttctctctgctggtgatgcggttgtaagattttcacgtggcagagcccctgcagctgacccacgcttgggcatcaatggcacctccacacagccgaagcacccggcatcttggtgggggcacctttttaaacattttttttttgagagagagccttgttctgtcacctaggctggaatgcagtggtgcaatcatagctcactgcagccttgaccccctccctgacctccccgccagctggactccagccatcctcctgcctcagcttcccagatagctgggccacaggcgtgtgccaccacacctggctaacttttttttttttttttttttgagatggcatcttgctctgtcgcccaggatggagtgcagtggcgcgatcttagctcactgcaagctccgcctcccaggttcacaccattctcctgcctcagcctccccagtagctgggactacaggcgcctgccaacatgcctggctaattttttttttttgtatttttagtagagataggctttcaccttgttagccaggatggtctcacgttttgtttttttaactttttgtagagatagggtttcattacattgctcaggctggtctcaaactccagggctcaagcagtcctcccacctcagcctcccaaagtgctgggatcacaggcatgagccactgtgcccagccacgagctgctttttatccaccttccggcttgcgggggggtttgtacttctctgcgaatgggttgcagtgctcagcattgcgggtctctgtagaagtcccaaagcttcaggatgagaagatggaggggctggtttccttccactctccacggccgcacgctcagaggctggtctccgcatgagagaaaagccacctccgggtggggctcggctgggccttgcagaatcgaggtggccccgactggccctgccgtgcgggctcagcctgggcttgttgcagatggtggtggcctggggcaccggccaggtgggcctcggtggcgaggtggtcgttctggcaaaggcgcacactgactttgacgtccaggccttccgggtcaccttttttgatgaaaccaggatggcgtcgtgcgggcagggcagtgtgcggctctggcggctgcgtggcggggtgctgcgttcctgccccgtggacttaggggagcaccacgcgctgcagttcaccgacctggccttcaagcaggcccgggacggctgcccggagccctcggctgccatgctcttcgtgtgcagccgcagtggccacatcttggagattgactgtcagcgcatggtcgtgcggcatgcccgccgcctgctccccacacggactccaggcggtccccacccacagaagcagaccttcagctcaggccccggcattgccatcagcagcctcagcgtctccccggccatgtgtgctgtgggctctgaggacggcttcttgcggctctggcccctggacttctcctcggtgctcctggaggcaggtgatgctgtgggcacgctctcccaactccgggagagcctcgcctggatgctggggcggggaaggcccagtccccggggctctgctgtcagccgccctggctcctggctgcacagggtgccacggggccaagtggcatatccagagccctggggcggctgatgccagggcggcccgcggggcagcctcacggaagggcccggtgggacgtgggtagtgtgtgaagcccctcagcctgggtcccgcctagcctaagagtggtggcctcgagggagctgcatcttgcagccgtgtggagcctgggactttgagcagcagggagtgcatttgctggggtgtcggggacccgaagcctgagcatgcggctcaccccggggtggccctggaggcccctgaccccaccccacccacagagcacgagggccccgtcagctcagtctgtgtcagccccgatggcctccgtgtgctgtctgccacctcctcgggccacctgggcttcctggacacgctgtcccgggtgtaccacatgctggctcgctcccacaccgccccggtgttggccctcgccatggagcagaggcggggacagctggccaccgtgtcccaggaccgtaccgtccgcatctgggacctggccaccctgcagcagctatacgacttcacatcatcagaggacgccccgtgcgctgtcaccttccaccccacaaggccaacctttttctgtggctttagcagtggggccgtgcgctccttcagcctggaggccgctgaggtcctggtggaacacacgtgccaccgaggagctgtcaccggcctgaccgccacccctgacggccgcctgctcttcagctcctgctcccagggctccctggcccagtacagctgtgcggacccccagtggcatgtcctccgagtggcagcggacatggtatgcccggatgcccccgcgagccccagcgccctggcagtcagcagggatggccgcctgctggcctttgtgggaccctccaggtgcacagtgacagtcatgggctcggcctcccttgatgagctgctgcgagttgacatcggcactctggacctggccagcagccgcctggactcagccatggctgtgtgctttggccctgcagctctgggccacctgctggtgtccacctcgtccaacagagtcgtggtgctggatgctgtgtcgggccgcatcatccgggagctgcccggtgtccaccctgagccctgcccctccttgacgctcagtgaggacgcccgcttcctgctgattgccgccggccggaccatcaaggtgtgggactacgccacacaggccagcccaggcccccaggtgtacatcggccactcggaacccgtgcaggctgtggccttctctcctgaccagcagcaggtcctcagcgcaggggacgccgtcttcctctgggatgtcctggcccctactgagagcgaccaaagcttccccggggcccccccagcctgcaagacaggcccgggcgcaggaccgctggaggacgcagcgtccagggccagcgagctcccccggcagcaggtccccaagccatgtcaggcatctccaccacggctgggcgtctgtgccaggcctcccgaaggtggcgatggcgccagggacaccaggaattcgggggccccacgcaccacctacctggcttcctgcaaggccttcacgcctgccagggtcagctgcagcccccactctgccaagggcacttgcccgcctcccgccagcggtgggtggctgcgtctgaaggctgtcgtcggttacagcgggaatgggcgggccaacatggtctggaggccggacacaggcttctttgcctacacgtgcggccgct

SEQ ID NO: 279528 - DNA, 532 bp, Homo sapiens
ttacaccatgttagcaaggctggtcttgaactctttgacctaaggttatctaccaaacctcagcctcccaaagtgctgggatcacaggcatgagccactgtgcccagccacgagctgctttttatccaccttccggcttgcgggggggtttgtacttctctgcgaatgggttgcagtgctcagcattgcgggtctctgtagaagtcccaaagcttcaggatgagaagatggaggggctggtttccttccactctccacggccgcacgctcagaggctggtctccgcatgagagaaaagccacctccgggtggggctcggctgggccttgcagaatcgaggtggccccgactggccctgccgtgcgggctcagcctgggcttgttgcagatggtggtggcctggggcaccggccaggtgggcctcggtggcgaggtggtcgttctggcaaaggcgcacactgactttgacgtccaggccttccgggtcaccttttttgatgaaaccaggtgatgcagccgcccatccacgatg

SEQ ID NO: 279529 - DNA, 3527 bp, Homo sapiens
aatggcggaagtggcaccgttgccaggcagccgttgcctggcgtcgcggggcgtactctgcgctgggcgcgcggaggcctaggcgggaagctcgagcggcggcgccatggcccgagcgtggcagcacccgttcctcaacgtcttcagacacttccgggtggacgagtggaagcgctccgccaagcagggggacgtggccgtggtcacggacaagaccctgaagggcgccgtgtatcgcattcggggctcagtctctgccgccaactacatccagctccctaagagcagcacccagtctctggggctgacgggacgatacctgtatgtgctctttcggcccctgcccagcaagcacttcgtcatccacctcgatgtgtcctccaaggacaaccaagtcatccgtgtgtctttctccaacctcttcaaggagtttaagtctacggccacgtggctccagtttcccttggtcctggaggccaggacacctcagagagatctggtgggtttggccccctccggagcccgctggacctgcctgcagctcgatctgcaggacgttctcctggtctacctgaaccggtgctacggccatctcaagagcatcaggctgtgcgccagcctgctggtcaggaacctgtacaccagtgacctgtgctttgagcctgccatctctggggcccagtgggcaaagctgcccgtgactcctatgcctcgggaaatggcattccctgtgcccaagggagagagctggcatgaccgctacatccacgtccggtttccaagtgagagcttgaaagtgccttccaagccgattgagaagagctgttcccctcctgaggcagtcctcctggggccggggccacagcctctcccttgcccggtggcctccagcaaacctgtgcggttcagtgtgtctccagtggtccagacgcccagccccacagcccagtccggccgggccgccttggcacccaggcccttcccggaggtcagcctgtcccaagagcgctcagacgcctccaacgcggatggccccggtttccatagccttgagccctgggcccagctggaggcctctgacatccacacggctgctgccggcacccacgtgttgactcacgagtcggctgaggtgcccgtggcccgcaccggctcctgcgaaggcttcctcccagacccagtcctgaggctcaagggcgtcatcggctttgggggccacggcaccagacaggccctgtggaccccagacggggcggctgtcgtgtacccctgccatgcggtcatcgtcgtcctgctcgtggacacgggggagcagcgcttcttccttggccacacagacaaggtctccgccctggcgctggatggcagcagctcactattggcctcggcccaggcaagggcccctagtgtgatgcggctctgggacttccagaccgggcggtgcttgtgcctgttccggagcccaatgcacgttgtctgctctctcagcttctctgacagcggggcccttctctgcggggttggcaaggaccaccacgggaggacgatggtggtggcctggggcaccggccaggtgggcctcggtggcgaggtggtcgttctggcaaaggcgcacactgactttgacgtccaggccttccgggtcaccttttttgatgaaaccaggatggcgtcgtgcgggcagggcagtgtgcggctctggcggctgcgtggcggggtgctgcgttcctgccccgtggacttaggggagcaccacgcgctgcagttcaccgacctggccttcaagcaggcccgggacggctgcccggagccctcggctgccatgctcttcgtgtgcagccgcagtggccacatcttggagattgactgtcagcgcatggtcgtgcggcatgcccgccgcctgctccccacacggactccaggcggtccccacccacagaagcagaccttcagctcaggccccggcattgccatcagcagcctcagcgtctccccggccatgtgtgctgtgggctctgaggacggcttcttgcggctctggcccctggacttctcctcggtgctcctggaggcagagcacgagggccccgtcagctcagtctgtgtcagccccgatggcctccgtgtgctgtctgccacctcctcgggccacctgggcttcctggacacgctgtcccgggtgtaccacatgctggctcgctcccacaccgccccggtgttggccctcgccatggagcagaggcggggacagctggccaccgtgtcccaggaccgtaccgtccgcatctgggacctggccaccctgcagcagctatacgacttcacatcatcagaggacgccccgtgcgctgtcaccttccaccccacaaggccaacctttttctgtggctttagcagtggggccgtgcgctccttcagcctggaggccgctgaggtcctggtggaacacacgtgccaccgaggagctgtcaccggcctgaccgccacccctgacggccgcctgctcttcagctcctgctcccagggctccctggcccagtacagctgtgcggacccccagtggcatgtcctccgagtggcagcggacatggtatgcccggatgcccccgcgagccccagcgccctggcagtcagcagggatggccgcctgctggcctttgtgggaccctccaggtgcacagtgacagtcatgggctcggcctcccttgatgagctgctgcgagttgacatcggcactctggacctggccagcagccgcctggactcagccatggctgtgtgctttggccctgcagctctgggccacctgctggtgtccacctcgtccaacagagtcgtggtgctggatgctgtgtcgggccgcatcatccgggagctgcccggtgtccaccctgagccctgcccctccttgacgctcagtgaggacgcccgcttcctgctgattgccgccggccggaccatcaaggtgtgggactacgccacacaggccagcccaggcccccaggtgtacatcggccactcggaacccgtgcaggctgtggccttctctcctgaccagcagcaggtcctcagcgcaggggacgccgtcttcctctgggatgtcctggcccctactgagagcgaccaaagcttccccggggcccccccagcctgcaagacaggcccgggcgcaggaccgctggaggacgcagcgtccagggccagcgagctcccccggcagcaggtccccaagccatgtcaggcatctccaccacggctgggcgtctgtgccaggcctcccgaaggtggcgatggcgccagggacaccaggaattcgggggccccacgcaccacctacctggcttcctgcaaggccttcacgcctgccagggtcagctgcagcccccactctgccaagggcacttgcccgcctcccgccagcggtgggtggctgcgtctgaaggctgtcgtcggttacagcgggaatgggcgggccaacatggtctggaggccggacacaggcttctttgcctacacgtgcggccgct

SEQ ID NO: 279530 - DNA, 3776 bp, Homo sapiens
aatggcggaagtggcaccgttgccaggcagccgttgcctggcgtcgcggggcgtactctgcgctgggcgcgcggaggcctaggcgggaagctcgagcggcggcgccatggcccgaggtagcgcgcggctggcgggggtcccgaggatcccgggttccggggttccggggtccagggtcggcggccggagcgctcagggcccccgcctaggccctgaggccagagtccccgctcaggcagggtcccgtctgccgggcgcccaccctcgggctcccggagcttggcttccctcgggcgcccggcctcgtcccgccagcctagctggcgttggcgtcgccggggaaggcgcggagagccccggctcctgcctggtccccgaggcccggcccagccccgcagtggccccggctcgcgtggccgagtcccctgacgcccggcgcccgctccccgcagcgtggcagcacccgttcctcaacgtcttcagacacttccgggtggacgagtggaagcgctccgccaagcagggggacgtggccgtggtcacggacaagaccctgaagggcgccgtgtatcgcattcggggctcagtctctgccgccaactacatccagctccctaagagcagcacccagtctctggggctgacgggacgatacctgtatgtgctctttcggcccctgcccagcaagcacttcgtcatccacctcgatgtgtcctccaaggacaaccaagtcatccgtgtgtctttctccaacctcttcaaggagtttaagtctacggccacgtggctccagtttcccttggtcctggaggccaggacacctcagagagatctggtgggtttggccccctccggagcccgctggacctgcctgcagctcgatctgcaggacgttctcctggtctacctgaaccggtgctacggccatctcaagagcatcaggctgtgcgccagcctgctggtcaggaacctgtacaccagtgacctgtgctttgagcctgccatctctggggcccagtgggcaaagctgcccgtgactcctatgcctcgggaaatggcattccctgtgcccaagggagagagctggcatgaccgctacatccacgtccggtttccaagtgagagcttgaaagtgccttccaagccgattgagaagagctgttcccctcctgaggcagtcctcctggggccggggccacagcctctcccttgcccggtggcctccagcaaacctgtgcggttcagtgtgtctccagtggtccagacgcccagccccacagcccagtccggccgggccgccttggcacccaggcccttcccggaggtcagcctgtcccaagagcgctcagacgcctccaacgcggatggccccggtttccatagccttgagccctgggcccagctggaggcctctgacatccacacggctgctgccggcacccacgtgttgactcacgagtcggctgaggtgcccgtggcccgcaccggctcctgcgaaggcttcctcccagacccagtcctgaggctcaagggcgtcatcggctttgggggccacggcaccagacaggccctgtggaccccagacggggcggctgtcgtgtacccctgccatgcggtcatcgtcgtcctgctcgtggacacgggggagcagcgcttcttccttggccacacagacaaggtctccgccctggcgctggatggcagcagctcactattggcctcggcccaggcaagggcccctagtgtgatgcggctctgggacttccagaccgggcggtgcttgtgcctgttccggagcccaatgcacgttgtctgctctctcagcttctctgacagcggggcccttctctgcggggttggcaaggaccaccacgggaggacgatggtggtggcctggggcaccggccaggtgggcctcggtggcgaggtggtcgttctggcaaaggcgcacactgactttgacgtccaggccttccgggtcaccttttttgatgaaaccaggatggcgtcgtgcgggcagggcagtgtgcggctctggcggctgcgtggcggggtgctgcgttcctgccccgtggacttaggggagcaccacgcgctgcagttcaccgacctggccttcaagcaggcccgggacggctgcccggagccctcggctgccatgctcttcgtgtgcagccgcagtggccacatcttggagattgactgtcagcgcatggtcgtgcggcatgcccgccgcctgctccccacacggactccaggcggtccccacccacagaagcagaccttcagctcaggccccggcattgccatcagcagcctcagcgtctccccggccatgtgtgctgtgggctctgaggacggcttcttgcggctctggcccctggacttctcctcggtgctcctggaggcagagcacgagggccccgtcagctcagtctgtgtcagccccgatggcctccgtgtgctgtctgccacctcctcgggccacctgggcttcctggacacgctgtcccgggtgtaccacatgctggctcgctcccacaccgccccggtgttggccctcgccatggagcagaggcggggacagctggccaccgtgtcccaggaccgtaccgtccgcatctgggacctggccaccctgcagcagctatacgacttcacatcatcagaggacgccccgtgcgctgtcaccttccaccccacaaggccaacctttttctgtggctttagcagtggggccgtgcgctccttcagcctggaggccgctgaggtcctggtggaacacacgtgccaccgaggagctgtcaccggcctgaccgccacccctgacggccgcctgctcttcagctcctgctcccagggctccctggcccagtacagctgtgcggacccccagtggcatgtcctccgagtggcagcggacatggtatgcccggatgcccccgcgagccccagcgccctggcagtcagcagggatggccgcctgctggcctttgtgggaccctccaggtgcacagtgacagtcatgggctcggcctcccttgatgagctgctgcgagttgacatcggcactctggacctggccagcagccgcctggactcagccatggctgtgtgctttggccctgcagctctgggccacctgctggtgtccacctcgtccaacagagtcgtggtgctggatgctgtgtcgggccgcatcatccgggagctgcccggtgtccaccctgagccctgcccctccttgacgctcagtgaggacgcccgcttcctgctgattgccgccggccggaccatcaaggtgtgggactacgccacacaggccagcccaggcccccaggtgtacatcggccactcggaacccgtgcaggctgtggccttctctcctgaccagcagcaggtcctcagcgcaggggacgccgtcttcctctgggatgtcctggcccctactgagagcgaccaaagcttccccggggcccccccagcctgcaagacaggcccgggcgcaggaccgctggaggacgcagcgtccagggccagcgagctcccccggcagcaggtccccaagccatgtcaggcatctccaccacggctgggcgtctgtgccaggcctcccgaaggtggcgatggcgccagggacaccaggaattcgggggccccacgcaccacctacctggcttcctgcaaggccttcacgcctgccagggtcagctgcagcccccactctgccaaggctttggggcacaggtggccatgctgggccccagcagcatccg

SEQ ID NO: 279531 - DNA, 2781 bp, Homo sapiens
ttacaccatgttagcaaggctggtcttgaactctttgacctaaggttatctaccaaacctcagcctcccaaagtgctgggatcacaggcatgagccactgtgcccagccacgagctgctttttatccaccttccggcttgcgggggggtttgtacttctctgcgaatgggttgcagtgctcagcattgcgggtctctgtagaagtcccaaagcttcaggatgagaagatggaggggctggtttccttccactctccacggccgcacgctcagaggctggtctccgcatgagagaaaagccacctccgggtggggctcggctgggccttgcagaatcgaggtggccccgactggccctgccgtgcgggctcagcctgggcttgttgcagatggtggtggcctggggcaccggccaggtgggcctcggtggcgaggtggtcgttctggcaaaggcgcacactgactttgacgtccaggccttccgggtcaccttttttgatgaaaccaggatggcgtcgtgcgggcagggcagtgtgcggctctggcggctgcgtggcggggtgctgcgttcctgccccgtggacttaggggagcaccacgcgctgcagttcaccgacctggccttcaagcaggcccgggacggctgcccggagccctcggctgccatgctcttcgtgtgcagccgcagtggccacatcttggagattgactgtcagcgcatggtcgtgcggcatgcccgccgcctgctccccacacggactccaggcggtccccacccacagaagcagaccttcagctcaggccccggcattgccatcagcagcctcagcgtctccccggccatgtgtgctgtgggctctgaggacggcttcttgcggctctggcccctggacttctcctcggtgctcctggaggcaggtgatgctgtgggcacgctctcccaactccgggagagcctcgcctggatgctggggcggggaaggcccagtccccggggctctgctgtcagccgccctggctcctggctgcacagggtgccacggggccaagtggcatatccagagccctggggcggctgatgccagggcggcccgcggggcagcctcacggaagggcccggtgggacgtgggtagtgtgtgaagcccctcagcctgggtcccgcctagcctaagagtggtggcctcgagggagctgcatcttgcagccgtgtggagcctgggactttgagcagcagggagtgcatttgctggggtgtcggggacccgaagcctgagcatgcggctcaccccggggtggccctggaggcccctgaccccaccccacccacagagcacgagggccccgtcagctcagtctgtgtcagccccgatggcctccgtgtgctgtctgccacctcctcgggccacctgggcttcctggacacgctgtcccgggtgtaccacatgctggctcgctcccacaccgccccggtgttggccctcgccatggagcagaggcggggacagctggccaccgtgtcccaggaccgtaccgtccgcatctgggacctggccaccctgcagcagctatacgacttcacatcatcagaggacgccccgtgcgctgtcaccttccaccccacaaggccaacctttttctgtggctttagcagtggggccgtgcgctccttcagcctggaggccgctgaggtcctggtggaacacacgtgccaccgaggagctgtcaccggcctgaccgccacccctgacggccgcctgctcttcagctcctgctcccagggctccctggcccagtacagctgtgcggacccccagtggcatgtcctccgagtggcagcggacatggtatgcccggatgcccccgcgagccccagcgccctggcagtcagcagggatggccgcctgctggcctttgtgggaccctccaggtgcacagtgacagtcatgggctcggcctcccttgatgagctgctgcgagttgacatcggcactctggacctggccagcagccgcctggactcagccatggctgtgtgctttggccctgcagctctgggccacctgctggtgtccacctcgtccaacagagtcgtggtgctggatgctgtgtcgggccgcatcatccgggagctgcccggtgtccaccctgagccctgcccctccttgacgctcagtgaggacgcccgcttcctgctgattgccgccggccggaccatcaaggtgtgggactacgccacacaggccagcccaggcccccaggtgtacatcggccactcggaacccgtgcaggctgtggccttctctcctgaccagcagcaggtcctcagcgcaggggacgccgtcttcctctgggatgtcctggcccctactgagagcgaccaaagcttccccggggcccccccagcctgcaagacaggcccgggcgcaggaccgctggaggacgcagcgtccagggccagcgagctcccccggcagcaggtccccaagccatgtcaggcatctccaccacggctgggcgtctgtgccaggcctcccgaaggtggcgatggcgccagggacaccaggaattcgggggccccacgcaccacctacctggcttcctgcaaggccttcacgcctgccagggtcagctgcagcccccactctgccaagggcacttgcccgcctcccgccagcggtgggtggctgcgtctgaaggctgtcgtcggttacagcgggaatgggcgggccaacatggtctggaggccggacacaggcttctttgcctacacgtgcggccgct

SEQ ID NO: 279532 - DNA, 425 bp, Homo sapiens
tggcctccagacgggactctgtggtggcctcctgctgacctgccttcccctctcacccagcagctgcccttgatgagagccccacgggcctgtgcccctcctggccctggcacagtgcccacagctcccacacctcctaccccagcttccccgtctgcccctgggtgtcctctgcagctggcctgggtgtgccccaacacagcctcccatgtgcaggctttggggcacaggtggccatgctgggccccagcagcatccgggtctccttcctcgcagggcacttgcccgcctcccgccagcggtgggtggctgcgtctgaaggctgtcgtcggttacagcgggaatgggcgggccaacatggtctggaggccggacacaggtgggggccaagagcctacccccacccccagccaagatgcggccgc

SEQ ID NO: 279533 - DNA, 3863 bp, Homo sapiens
aatggcggaagtggcaccgttgccaggcagccgttgcctggcgtcgcggggcgtactctgcgctgggcgcgcggaggcctaggcgggaagctcgagcggcggcgccatggcccgaggtagcgcgcggctggcgggggtcccgaggatcccgggttccggggttccggggtccagggtcggcggccggagcgctcagggcccccgcctaggccctgaggccagagtccccgctcaggcagggtcccgtctgccgggcgcccaccctcgggctcccggagcttggcttccctcgggcgcccggcctcgtcccgccagcctagctggcgttggcgtcgccggggaaggcgcggagagccccggctcctgcctggtccccgaggcccggcccagccccgcagtggccccggctcgcgtggccgagtcccctgacgcccggcgcccgctccccgcagcgtggcagcacccgttcctcaacgtcttcagacacttccgggtggacgagtggaagcgctccgccaagcagggggacgtggccgtggtcacggacaagaccctgaagggcgccgtgtatcgcattcggggctcagtctctgccgccaactacatccagctccctaagagcagcacccagtctctggggctgacgggacgatacctgtatgtgctctttcggcccctgcccagcaagcacttcgtcatccacctcgatgtgtcctccaaggacaaccaagtcatccgtgtgtctttctccaacctcttcaaggagtttaagtctacggccacgtggctccagtttcccttggtcctggaggccaggacacctcagagagatctggtgggtttggccccctccggagcccgctggacctgcctgcagctcgatctgcaggacgttctcctggtctacctgaaccggtgctacggccatctcaagagcatcaggctgtgcgccagcctgctggtcaggaacctgtacaccagtgacctgtgctttgagcctgccatctctggggcccagtgggcaaagctgcccgtgactcctatgcctcgggaaatggcattccctgtgcccaagggagagagctggcatgaccgctacatccacgtccggtttccaagtgagagcttgaaagtgccttccaagccgattgagaagagctgttcccctcctgaggcagtcctcctggggccggggccacagcctctcccttgcccggtggcctccagcaaacctgtgcggttcagtgtgtctccagtggtccagacgcccagccccacagcccagtccggccgggccgccttggcacccaggcccttcccggaggtcagcctgtcccaagagcgctcagacgcctccaacgcggatggccccggtttccatagccttgagccctgggcccagctggaggcctctgacatccacacggctgctgccggcacccacgtgttgactcacgagtcggctgaggtgcccgtggcccgcaccggctcctgcgaaggcttcctcccagacccagtcctgaggctcaagggcgtcatcggctttgggggccacggcaccagacaggccctgtggaccccagacggggcggctgtcgtgtacccctgccatgcggtcatcgtcgtcctgctcgtggacacgggggagcagcgcttcttccttggccacacagacaaggtctccgccctggcgctggatggcagcagctcactattggcctcggcccaggcaagggcccctagtgtgatgcggctctgggacttccagaccgggcggtgcttgtgcctgttccggagcccaatgcacgttgtctgctctctcagcttctctgacagcggggcccttctctgcggggttggcaaggaccaccacgggaggacgatggtggtggcctggggcaccggccaggtgggcctcggtggcgaggtggtcgttctggcaaaggcgcacactgactttgacgtccaggccttccgggtcaccttttttgatgaaaccaggatggcgtcgtgcgggcagggcagtgtgcggctctggcggctgcgtggcggggtgctgcgttcctgccccgtggacttaggggagcaccacgcgctgcagttcaccgacctggccttcaagcaggcccgggacggctgcccggagccctcggctgccatgctcttcgtgtgcagccgcagtggccacatcttggagattgactgtcagcgcatggtcgtgcggcatgcccgccgcctgctccccacacggactccaggcggtccccacccacagaagcagaccttcagctcaggccccggcattgccatcagcagcctcagcgtctccccggccatgtgtgctgtgggctctgaggacggcttcttgcggctctggcccctggacttctcctcggtgctcctggaggcagagcacgagggccccgtcagctcagtctgtgtcagccccgatggcctccgtgtgctgtctgccacctcctcgggccacctgggcttcctggacacgctgtcccgggtgtaccacatgctggctcgctcccacaccgccccggtgttggccctcgccatggagcagaggcggggacagctggccaccgtgtcccaggaccgtaccgtccgcatctgggacctggccaccctgcagcagctatacgacttcacatcatcagaggacgccccgtgcgctgtcaccttccaccccacaaggccaacctttttctgtggctttagcagtggggccgtgcgctccttcagcctggaggccgctgaggtcctggtggaacacacgtgccaccgaggagctgtcaccggcctgaccgccacccctgacggccgcctgctcttcagctcctgctcccagggctccctggcccagtacagctgtgcggacccccagtggcatgtcctccgagtggcagcggacatggtatgcccggatgcccccgcgagccccagcgccctggcagtcagcagggatggccgcctgctggcctttgtgggaccctccaggtgcacagtgacagtcatgggctcggcctcccttgatgagctgctgcgagttgacatcggcactctggacctggccagcagccgcctggactcagccatggctgtgtgctttggccctgcagctctgggccacctgctggtgtccacctcgtccaacagagtcgtggtgctggatgctgtgtcgggccgcatcatccgggagctgcccggtgtccaccctgagccctgcccctccttgacgctcagtgaggacgcccgcttcctgctgattgccgccggccggaccatcaaggtgtgggactacgccacacaggccagcccaggcccccaggtgtacatcggccactcggaacccgtgcaggctgtggccttctctcctgaccagcagcaggtcctcagcgcaggggacgccgtcttcctctgggatgtcctggcccctactgagagcgaccaaagcttccccggggcccccccagcctgcaagacaggcccgggcgcaggaccgctggaggacgcagcgtccagggccagcgagctcccccggcagcaggtccccaagccatgtcaggcatctccaccacggctgggcgtctgtgccaggcctcccgaaggtggcgatggcgccagggacaccaggaattcgggggccccacgcaccacctacctggcttcctgcaaggccttcacgcctgccagggtcagctgcagcccccactctgccaagggcacttgcccgcctcccgccagcggtgggtggctgcgtctgaaggctgtcgtcggttacagcgggaatgggcgggccaacatggtctggaggccggacacaggcttctttgcctacacgtgcggccgct

SEQ ID NO: 279534 - DNA, 3884 bp, Homo sapiens
aatggcggaagtggcaccgttgccaggcagccgttgcctggcgtcgcggggcgtactctgcgctgggcgcgcggaggcctaggcgggaagctcgagcggcggcgccatggcccgaggtagcgcgcggctggcgggggtcccgaggatcccgggttccggggttccggggtccagggtcggcggccggagcgctcagggcccccgcctaggccctgaggccagagtccccgctcaggcagggtcccgtctgccgggcgcccaccctcgggctcccggagcttggcttccctcgggcgcccggcctcgtcccgccagcctagctggcgttggcgtcgccggggaaggcgcggagagccccggctcctgcctggtccccgaggcccggcccagccccgcagtggccccggctcgcgtggccgagtcccctgacgcccggcgcccgctccccgcagcgtggcagcacccgttcctcaacgtcttcagacacttccgggtggacgagtggaagcgctccgccaagcagggggacgtggccgtggtcacggacaagaccctgaagggcgccgtgtatcgcattcggggctcagtctctgccgccaactacatccagctccctaagagcagcacccagtctctggggctgacgggacgatacctgtatgtgctctttcggcccctgcccagcaagcacttcgtcatccacctcgatgtgtcctccaaggacaaccaagtcatccgtgtgtctttctccaacctcttcaaggagtttaagtctacggccacgtggctccagtttcccttggtcctggaggccaggacacctcagagagatctggtgggtttggccccctccggagcccgctggacctgcctgcagctcgatctgcaggacgttctcctggtctacctgaaccggtgctacggccatctcaagagcatcaggctgtgcgccagcctgctggtcaggaacctgtacaccagtgacctgtgctttgagcctgccatctctggggcccagtgggcaaagctgcccgtgactcctatgcctcgggaaatggcattccctgtgcccaagggagagagctggcatgaccgctacatccacgtccggtttccaagtgagagcttgaaagtgccttccaagccgattgagaagagctgttcccctcctgaggcagtcctcctggggccggggccacagcctctcccttgcccggtggcctccagcaaacctgtgcggttcagtgtgtctccagtggtccagacgcccagccccacagcccagtccggccgggccgccttggcacccaggcccttcccggaggtcagcctgtcccaagagcgctcagacgcctccaacgcggatggccccggtttccatagccttgagccctgggcccagctggaggcctctgacatccacacggctgctgccggcacccacgtgttgactcacgagtcggctgaggtgcccgtggcccgcaccggctcctgcgaaggcttcctcccagacccagtcctgaggctcaagggcgtcatcggctttgggggccacggcaccagacaggccctgtggaccccagacggggcggctgtcgtgtacccctgccatgcggtcatcgtcgtcctgctcgtggacacgggggagcagcgcttcttccttggccacacagacaaggtctccgccctggcgctggatggcagcagctcactattggcctcggcccaggcaagggcccctagtgtgatgcggctctgggacttccagaccgggcggtgcttgtgcctgttccggagcccaatgcacgttgtctgctctctcagcttctctgacagcggggcccttctctgcggggttggcaaggaccaccacgggaggacgatggtggtggcctggggcaccggccaggtgggcctcggtggcgaggtggtcgttctggcaaaggcgcacactgactttgacgtccaggccttccgggtcaccttttttgatgaaaccaggatggcgtcgtgcgggcagggcagtgtgcggctctggcggctgcgtggcggggtgctgcgttcctgccccgtggacttaggggagcaccacgcgctgcagttcaccgacctggccttcaagcaggcccgggacggctgcccggagccctcggctgccatgctcttcgtgtgcagccgcagtggccacatcttggagattgactgtcagcgcatggtcgtgcggcatgcccgccgcctgctccccacacggactccaggcggtccccacccacagaagcagaccttcagctcaggccccggcattgccatcagcagcctcagcgtctccccggccatgtgtgctgtgggctctgaggacggcttcttgcggctctggcccctggacttctcctcggtgctcctggaggcagagcacgagggccccgtcagctcagtctgtgtcagccccgatggcctccgtgtgctgtctgccacctcctcgggccacctgggcttcctggacacgctgtcccgggtgtaccacatgctggctcgctcccacaccgccccggtgttggccctcgccatggagcagaggcggggacagctggccaccgtgtcccaggaccgtaccgtccgcatctgggacctggccaccctgcagcagctatacgacttcacatcatcagaggacgccccgtgcgctgtcaccttccaccccacaaggccaacctttttctgtggctttagcagtggggccgtgcgctccttcagcctggaggccgctgaggtcctggtggaacacacgtgccaccgaggagctgtcaccggcctgaccgccacccctgacggccgcctgctcttcagctcctgctcccagggctccctggcccagtacagctgtgcggacccccagtggcatgtcctccgagtggcagcggacatggtatgcccggatgcccccgcgagccccagcgccctggcagtcagcagggatggccgcctgctggcctttgtgggaccctccaggtgcacagtgacagtcatgggctcggcctcccttgatgagctgctgcgagttgacatcggcactctggacctggccagcagccgcctggactcagccatggctgtgtgctttggccctgcagctctgggccacctgctggtgtccacctcgtccaacagagtcgtggtgctggatgctgtgtcgggccgcatcatccgggagctgcccggtgtccaccctgagccctgcccctccttgacgctcagtgaggacgcccgcttcctgctgattgccgccggccggaccatcaaggtgtgggactacgccacacaggccagcccaggcccccaggtgtacatcggccactcggaacccgtgcaggctgtggccttctctcctgaccagcagcaggtcctcagcgcaggggacgccgtcttcctctgggatgtcctggcccctactgagagcgaccaaagcttccccggggcccccccagcctgcaagacaggcccgggcgcaggaccgctggaggacgcagcgtccagggccagcgagctcccccggcagcaggtccccaagccatgtcaggcatctccaccacggctgggcgtctgtgccaggcctcccgaaggtggcgatggcgccagggacaccaggaattcgggggccccacgcaccacctacctggcttcctgcaaggccttcacgcctgccagggtcagctgcagcccccactctgccaagggcacttgcccgcctcccgccagcggtgggtggctgcgtctgaaggctgtcgtcggttacagcgggaatgggcgggccaacatggtctggaggccggacacaggtgggggccaagagcctacccccacccccagccaagatgcggccgcgc

SEQ ID NO: 279535 - DNA, 3780 bp, Homo sapiens
aatggcggaagtggcaccgttgccaggcagccgttgcctggcgtcgcggggcgtactctgcgctgggcgcgcggaggcctaggcgggaagctcgagcggcggcgccatggcccgaggtagcgcgcggctggcgggggtcccgaggatcccgggttccggggttccggggtccagggtcggcggccggagcgctcagggcccccgcctaggccctgaggccagagtccccgctcaggcagggtcccgtctgccgggcgcccaccctcgggctcccggagcttggcttccctcgggcgcccggcctcgtcccgccagcctagctggcgttggcgtcgccggggaaggcgcggagagccccggctcctgcctggtccccgaggcccggcccagccccgcagtggccccggctcgcgtggccgagtcccctgacgcccggcgcccgctccccgcagcgtggcagcacccgttcctcaacgtcttcagacacttccgggtggacgagtggaagcgctccgccaagcagggggacgtggccgtggtcacggacaagaccctgaagggcgccgtgtatcgcattcggggctcagtctctgccgccaactacatccagctccctaagagcagcacccagtctctggggctgacgggacgatacctgtatgtgctctttcggcccctgcccagcaagcacttcgtcatccacctcgatgtgtcctccaaggacaaccaagtcatccgtgtgtctttctccaacctcttcaaggagtttaagtctacggccacgtggctccagtttcccttggtcctggaggccaggacacctcagagagatctggtgggtttggccccctccggagcccgctggacctgcctgcagctcgatctgcaggacgttctcctggtctacctgaaccggtgctacggccatctcaagagcatcaggctgtgcgccagcctgctggtcaggaacctgtacaccagtgacctgtgctttgagcctgccatctctggggcccagtgggcaaagctgcccgtgactcctatgcctcgggaaatggcattccctgtgcccaagggagagagctggcatgaccgctacatccacgtccggtttccaagtgagagcttgaaagtgccttccaagccgattgagaagagctgttcccctcctgaggcagtcctcctggggccggggccacagcctctcccttgcccggtggcctccagcaaacctgtgcggttcagtgtgtctccagtggtccagacgcccagccccacagcccagtccggccgggccgccttggcacccaggcccttcccggaggtcagcctgtcccaagagcgctcagacgcctccaacgcggatggccccggtttccatagccttgagccctgggcccagctggaggcctctgacatccacacggctgctgccggcacccacgtgttgactcacgagtcggctgaggtgcccgtggcccgcaccggctcctgcgaaggcttcctcccagacccagtcctgaggctcaagggcgtcatcggctttgggggccacggcaccagacaggccctgtggaccccagacggggcggctgtcgtgtacccctgccatgcggtcatcgtcgtcctgctcgtggacacgggggagcagcgcttcttccttggccacacagacaaggtctccgccctggcgctggatggcagcagctcactattggcctcggcccaggcaagggcccctagtgtgatgcggctctgggacttccagaccgggcggtgcttgtgcctgttccggagcccaatgcacgttgtctgctctctcagcttctctgacagcggggcccttctctgcggggttggcaaggaccaccacgggaggacgatggtggtggcctggggcaccggccaggtgggcctcggtggcgaggtggtcgttctggcaaaggcgcacactgactttgacgtccaggccttccgggtcaccttttttgatgaaaccaggatggcgtcgtgcgggcagggcagtgtgcggctctggcggctgcgtggcggggtgctgcgttcctgccccgtggacttaggggagcaccacgcgctgcagttcaccgacctggccttcaagcaggcccgggacggctgcccggagccctcggctgccatgctcttcgtgtgcagccgcagtggccacatcttggagattgactgtcagcgcatggtcgtgcggcatgcccgccgcctgctccccacacggactccaggcggtccccacccacagaagcagaccttcagctcaggccccggcattgccatcagcagcctcagcgtctccccggccatgtgtgctgtgggctctgaggacggcttcttgcggctctggcccctggacttctcctcggtgctcctggaggcagagcacgagggccccgtcagctcagtctgtgtcagccccgatggcctccgtgtgctgtctgccacctcctcgggccacctgggcttcctggacacgctgtcccgggtgtaccacatgctggctcgctcccacaccgccccggtgttggccctcgccatggagcagaggcggggacagctggccaccgtgtcccaggaccgtaccgtccgcatctgggacctggccaccctgcagcagctatacgacttcacatcatcagaggacgccccgtgcgctgtcaccttccaccccacaaggccaacctttttctgtggctttagcagtggggccgtgcgctccttcagcctggaggccgctgaggtcctggtggaacacacgtgccaccgaggagctgtcaccggcctgaccgccacccctgacggccgcctgctcttcagctcctgctcccagggctccctggcccagtacagctgtgcggacccccagtggcatgtcctccgagtggcagcggacatggtatgcccggatgcccccgcgagccccagcgccctggcagtcagcagggatggccgcctgctggcctttgtgggaccctccaggtgcacagtgacagtcatgggctcggcctcccttgatgagctgctgcgagttgacatcggcactctggacctggccagcagccgcctggactcagccatggctgtgtgctttggccctgcagctctgggccacctgctggtgtccacctcgtccaacagagtcgtggtgctggatgctgtgtcgggccgcatcatccgggagctgcccggtgtccaccctgagccctgcccctccttgacgctcagtgaggacgcccgcttcctgctgattgccgccggccggaccatcaaggtgtgggactacgccacacaggccagcccaggcccccaggtgtacatcggccactcggaacccgtgcaggctgtggccttctctcctgaccagcagcaggtcctcagcgcaggggacgccgtcttcctctgggatgtcctggcccctactgagagcgaccaaagcttccccggggcccccccagcctgcaagacaggcccgggcgcaggaccgctggaggacgcagcgtccagggccagcgagctcccccggcagcaggtccccaagccatgtcaggcatctccaccacggctgggcgtctgtgccaggcctcccgaaggtggcgatgggcacttgcccgcctcccgccagcggtgggtggctgcgtctgaaggctgtcgtcggttacagcgggaatgggcgggccaacatggtctggaggccggacacaggtgggggccaagagcctacccccacccccagccaagatgcggccgcgc

SEQ ID NO: 279536 - DNA, 3720 bp, Homo sapiens
aatggcggaagtggcaccgttgccaggcagccgttgcctggcgtcgcggggcgtactctgcgctgggcgcgcggaggcctaggcgggaagctcgagcggcggcgccatggcccgaggtagcgcgcggctggcgggggtcccgaggatcccgggttccggggttccggggtccagggtcggcggccggagcgctcagggcccccgcctaggccctgaggccagagtccccgctcaggcagggtcccgtctgccgggcgcccaccctcgggctcccggagcttggcttccctcgggcgcccggcctcgtcccgccagcctagctggcgttggcgtcgccggggaaggcgcggagagccccggctcctgcctggtccccgaggcccggcccagccccgcagtggccccggctcgcgtggccgagtcccctgacgcccggcgcccgctccccgcagcgtggcagcacccgttcctcaacgtcttcagacacttccgggtggacgagtggaagcgctccgccaagcagggggacgtggccgtggtcacggacaagaccctgaagggcgccgtgtatcgcattcggggctcagtctctgccgccaactacatccagctccctaagagcagcacccagtctctggggctgacgggacgatacctgtatgtgctctttcggcccctgcccagcaagcacttcgtcatccacctcgatgtgtcctccaaggacaaccaagtcatccgtgtgtctttctccaacctcttcaaggagtttaagtctacggccacgtggctccagtttcccttggtcctggaggccaggacacctcagagagatctggtgggtttggccccctccggagcccgctggacctgcctgcagctcgatctgcaggacgttctcctggtctacctgaaccggtgctacggccatctcaagagcatcaggctgtgcgccagcctgctggtcaggaacctgtacaccagtgacctgtgctttgagcctgccatctctggggcccagtgggcaaagctgcccgtgactcctatgcctcgggaaatggcattccctgtgcccaagggagagagctggcatgaccgctacatccacgtccggtttccaagtgagagcttgaaagtgccttccaagccgattgagaagagctgttcccctcctgaggcagtcctcctggggccggggccacagcctctcccttgcccggtggcctccagcaaacctgtgcggttcagtgtgtctccagtggtccagacgcccagccccacagcccagtccggccgggccgccttggcacccaggcccttcccggaggtcagcctgtcccaagagcgctcagacgcctccaacgcggatggccccggtttccatagccttgagccctgggcccagctggaggcctctgacatccacacggctgctgccggcacccacgtgttgactcacgagtcggctgaggtgcccgtggcccgcaccggctcctgcgaaggcttcctcccagacccagtcctgaggctcaagggcgtcatcggctttgggggccacggcaccagacaggccctgtggaccccagacggggcggctgtcgtgtacccctgccatgcggtcatcgtcgtcctgctcgtggacacgggggagcagcgcttcttccttggccacacagacaaggtctccgccctggcgctggatggcagcagctcactattggcctcggcccaggcaagggcccctagtgtgatgcggctctgggacttccagaccgggcggtgcttgtgcctgttccggagcccaatgcacgttgtctgctctctcagcttctctgacagcggggcccttctctgcggggttggcaaggaccaccacgggaggacgatggtggtggcctggggcaccggccaggtgggcctcggtggcgaggtggtcgttctggcaaaggcgcacactgactttgacgtccaggccttccgggtcaccttttttgatgaaaccaggatggcgtcgtgcgggcagggcagtgtgcggctctggcggctgcgtggcggggtgctgcgttcctgccccgtggacttaggggagcaccacgcgctgcagttcaccgacctggccttcaagcaggcccgggacggctgcccggagccctcggctgccatgctcttcgtgtgcagccgcagtggccacatcttggagattgactgtcagcgcatggtcgtgcggcatgcccgccgcctgctccccacacggactccaggcggtccccacccacagaagcagaccttcagctcaggccccggcattgccatcagcagcctcagcgtctccccggccatgtgtgctgtgggctctgaggacggcttcttgcggctctggcccctggacttctcctcggtgctcctggaggcagagcacgagggccccgtcagctcagtctgtgtcagccccgatggcctccgtgtgctgtctgccacctcctcgggccacctgggcttcctggacacgctgtcccgggtgtaccacatgctggctcgctcccacaccgccccggtgttggccctcgccatggagcagaggcggggacagctggccaccgtgtcccaggaccgtaccgtccgcatctgggacctggccaccctgcagcagctatacgacttcacatcatcagaggacgccccgtgcgctgtcaccttccaccccacaaggccaacctttttctgtggctttagcagtggggccgtgcgctccttcagcctggaggccgctgaggtcctggtggaacacacgtgccaccgaggagctgtcaccggcctgaccgccacccctgacggccgcctgctcttcagctcctgctcccagggctccctggcccagtacagctgtgcggacccccagtggcatgtcctccgagtggcagcggacatggtatgcccggatgcccccgcgagccccagcgccctggcagtcagcagggatggccgcctgctggcctttgtgggaccctccaggtgcacagtgacagtcatgggctcggcctcccttgatgagctgctgcgagttgacatcggcactctggacctggccagcagccgcctggactcagccatggctgtgtgctttggccctgcagctctgggccacctgctggtgtccacctcgtccaacagagtcgtggtgctggatgctgtgtcgggccgcatcatccgggagctgcccggtgtccaccctgagccctgcccctccttgacgctcagtgaggacgcccgcttcctgctgattgccgccggccggaccatcaaggtgtacatcggccactcggaacccgtgcaggctgtggccttctctcctgaccagcagcaggtcctcagcgcaggggacgccgtcttcctctgggatgtcctggcccctactgagagcgaccaaagcttccccggggcccccccagcctgcaagacaggcccgggcgcaggaccgctggaggacgcagcgtccagggccagcgagctcccccggcagcaggtccccaagccatgtcaggcatctccaccacggctgggcgtctgtgccaggcctcccgaaggtggcgatgggcacttgcccgcctcccgccagcggtgggtggctgcgtctgaaggctgtcgtcggttacagcgggaatgggcgggccaacatggtctggaggccggacacaggcttctttgcctacacgtgcggccgct

SEQ ID NO: 279537 - DNA, 166 bp, Homo sapiens
ggtagaccaggggcttgtggggagactgcgtgtagtgtggggtctctgaagagctcagggcagtgtaatgccacaagctctgcctcctccctgccaggcgccagggacaccaggaattcgggggccccacgcaccacctacctggcttcctgcaaggccttcacgc

SEQ ID NO: 279538 - DNA, 876 bp, Homo sapiens
taaggctcagggaggggaggaaagttgcttgagggtccctctgggagctaggactggaacccacatttcctcccccgaccgccactgctgtaagagctccctggccttcagagacaagtggacgggggtgcttttctgcctcgctgcgtacaggagctgagccagttctaggcccaggcttctctttcctggcccctgactgactgaccctgatcctgtcccatttctcttgtcagccatgtgctctgggcacctcgcacgggctccgtagtcacattcccgggcctatccaatgcctgctccagggccagggacacagcttctggatctgaagcttgggctgaggtccagagacagctcagcattgtggtgacagccctggagggtgcggcagccaccctgaggcctgtggctgacctctgaccccagccctctttcttcagccctccctttactccaaccctctcctgcctgctttcctgagatgtcctggtcttccttggtgccagaagagggcactaccacaggaccctctcaagcttctcaggcaacagcttgaggtccctgaggggagtggcaagccctaatgcaactcaccctcatcctggtgcttaggtggcagagggtgggcagcaggggacagggatgggatggcaaaaccaccaactgcccttggtggcaggtgggtggagatgggatgcgtgccaacctcagatgccaactcaggtcatcaaggccaaggaccagtggcgaaagtgagtcttggggtaccttaggccttggctagtctgcgttcctctccctgcatgctgtgtatcctaactccctacaacagcccctcaaataaatcacatctagtgactggtaccaacaaaa

SEQ ID NO: 279539 - DNA, 2322 bp, Homo sapiens
accccagctggccaagagtccgcaggatgcagtggacgaaggtgttggggctggggctgggggctgctgccctcttggggctggggatcatcctcggccactttgccatccccaaaaaagccaactcactggccccccaggacctggacctggagatcctggagaccgtcatggggcagctggatgcccacaggatccgggagaacctcagagaactctccagggagccacacctggcctccagccctcgggatgaggacctggtgcagctgctgctgcagcgctggaaggacccagagtcaggcctggactcggccgaggcctccacgtacgaagtgctgctgtccttccctagccaggagcagcccaacgtcgtggacatcgtgggccccactgggggcatcatccactcctgccaccggactgaggagaacgtgaccggggagcaaggggggccagatgtggtacaaccctatgctgcctatgctccttctggaaccccacagggcctcctcgtctatgccaaccggggcgcggaagaagactttaaggagctacagactcagggcatcaaacttgaaggcaccattgccctgactcgatatgggggtgtagggcgtggggccaaggctgtgaacgctgccaagcacggggtagctggggtgctggtgtacacagaccctgccgacatcaacgatgggctgagctcacccgacgaaacctttcccaactcctggtacctgcccccctcaggagtggagcgaggctcctactacgagtattttggggaccctctgactccctaccttccagccgtcccctcttccttccgcgtggaccttgccaatgtctccggatttcccccaattcctacacagcccattggcttccaggatgcaagagacctgctctgtaacctcaacggaactttggccccagccacctggcagggagcactgggctgccactacaggttgggtcccggcttccggcctgacggagacttcccagcagacagccaggtgaatgtgagcgtctacaaccgcctggagctgaggaactcttccaacgtcctgggcatcatccgtggggctgtggagcctgatcgctacgtgctgtatgggaaccaccgagacagctgggtgcacggggctgtggaccccagcagtggcaccgccgtcctcctggagctctcccgtgtcctggggaccctgctgaagaagggcacctggcgtcctcgcagatcaatcgtgtttgcgagctggggggctgaggagtttgggctcattggctccacggaattcacagaagagttcttcaacaagctgcaggagcgcacggtggcctacatcaacgtggacatctcggtgtttgccaacgctacccttagggtgcaggggacgccccctgtccagagcgtcgtcttctctgcaaccaaagagatccgctcaccaggccctggcgacctgagcatctacgacaactggatccggtacttcaaccgcagcagcccggtgtacggcctggtccccagcttgggttctctgggtgctggcagcgactatgcacccttcgttcacttcctgggcatctcctccatggacattgcctatacctatgaccggagcaagacttcagccaggatctaccccacctaccacacagcctttgacacctttgactatgtggacaagtttttggacccgggcttcagcagccatcaggctgtggcccggacagcggggagtgtgattctccggctcagtgacagcttcttcctgcccctcaaagtcagtgactacagtgagacactccgcagcttcctgcaggcagcccagcaagatcttggggccctgctggagcagcacagcatcagcctggggcctctggtgactgcagtggagaagtttgaggcagaagctgcagccttgggccaacgcatatcaacactgcagaagggcagccctgaccccctgcaggtccggatgctcaatgaccagttgatgctcttggaacggacctttctgaaccctagagccttcccagaggaacgctactacagccatgtgctctgggcacctcgcacgggctccgtagtcacattcccgggcctatccaatgcctgctccagggccagggacacagcttctggatctgaagcttgggctgaggtccagagacagctcagcattgtggtgacagccctggagggtgcggcagccaccctgaggcctgtggctgacctctgaccccagccctctttcttcagccctcccggtgctttatatttacaaagtgctttgtgttttttaaaagtctttt

SEQ ID NO: 279540 - DNA, 1505 bp, Homo sapiens
gggctgctaccggtcggaagggctggggatgtactctctagatctgctggggctggactgaggctggggcaagcctcgtaaggactggaccacgggtgggcaggagaccggtggagaacccgccctgttgttggggctggggagggccgcgcaccgagactaaattctccttccggccagatccgctcaccaggccctggcgacctgagcatctacgacaactggatccggtacttcaaccgcagcagcccggtgtacggcctggtccccagagcaagacttcagccaggatctaccccacctaccacacagcctttgacacctttgactatgtggacaagtttttggacccgggtgaggagggagacaaggggcatcctgagaccaggacaggagaggctgaagactgagccctggccttgtcaccttgccgcaggcttcagcagccatcaggctgtggcccggacagcggggagtgtgattctccggctcagtgacagcttcttcctgcccctcaaagtcagtgactacagtgagacactccgcagcttcctgcaggcagcccagcaagatcttggggccctgctggagcagcacagcatcagcctgggtatgcacagccctgaccctgaggtatggggagccctgcacccccatgactgagccactgcttgttcctcacagggcctctggtgactgcagtggagaagtttgaggcagaagctgcagccttgggccaacgcatatcaacactgcagaagggcagccctgaccccctgcaggtccggatgctcaatgaccagttgatgctcttggaacggacctttctgaaccctagagccttcccagaggaacgctactacagccatgtgctctgggcacctcgcacgggctccgtagtcacattcccgggcctatccaatgcctgctccagggccagggacacagcttctggatctgaagcttgggctgaggtccagagacagctcagcattgtggtgacagccctggagggtgcggcagccaccctgaggcctgtggctgacctctgaccccagccctctttcttcagccctccctttactccaaccctctcctgcctgctttcctgagatgtcctggtcttccttggtgccagaagagggcactaccacaggaccctctcaagcttctcaggcaacagcttgaggtccctgaggggagtggcaagccctaatgcaactcaccctcatcctggtgcttaggtggcagagggtgggcagcaggggacagggatgggatggcaaaaccaccaactgcccttggtggcaggtgggtggagatgggatgcgtgccaacctcagatgccaactcaggtcatcaaggccaaggaccagtggcgaaagtgagtcttggggtaccttaggccttggctagtctgcgttcctctccctgcatgctgtgtatcctaactccctacaacagcccctcaaataaatcacatctagtgactggtaccaacaaaa

SEQ ID NO: 279541 - DNA, 1663 bp, Homo sapiens
cccctcctcacgtcagcagcctttctcctaaggcaccctaggatcaggaggaccctgtcctccaaccctctatcccccattcccaggcacctggcgtcctcgcagatcaatcgtgtttgcgagctggggggctgaggagtttgggctcattggctccacggaattcacagaagagttcttcaacaagctgcaggagcgcacggtggcctacatcaacgtggacatctcggtgtttgccaacgctacccttagggtgcaggggacgccccctgtccagagcgtcgtcttctctgcaaccaaagagatccgctcaccaggccctggcgacctgagcatctacgacaactggatccggtacttcaaccgcagcagcccggtgtacggcctggtccccagagcaagacttcagccaggatctaccccacctaccacacagcctttgacacctttgactatgtggacaagtttttggacccgggcttcagcagccatcaggctgtggcccggacagcggggagtgtgattctccggctcagtgacagcttcttcctgcccctcaaagtcagtgactacagtgagacactccgcagcttcctgcaggcagcccagcaagatcttggggccctgctggagcagcacagcatcagcctggggcctctggtgactgcagtggagaagtttgaggcagaagctgcagccttgggccaacgcatatcaacactgcagaagggcagccctgaccccctgcaggtccggatgctcaatgaccagttgatgctcttggaacggacctttctgaaccctagagccttcccagaggaacgctactacagccatgtgctctgggcacctcgcacgggctccgtagtcacattcccgggcctatccaatgcctgctccagggccagggacacagcttctggatctgaagcttgggctgaggtccagagacagctcagcattgtggtgacagccctggagggtgcggcagccaccctgaggcctgtggctgacctctgaccccagccctctttcttcagccctccctttactccaaccctctcctgcctgctttcctgagatgtcctggtcttccttggtgccagaagagggcactaccacaggaccctctcaagcttctcaggcaacagcttgaggtccctgaggggagtggcaagccctaatgcaactcaccctcatcctggtgcttaggtggcagagggtgggcagcaggggacagggatgggatggcaaaaccaccaactgcccttggtggcaggtgggtggagatgggatgcgtgccaacctcagatgccaactcaggtcatcaaggccaaggaccagtggcgaaagtgagtcttggggtaccttaggccttggctagtctgcgttcctctccctgcatgctgtgtatcctaactccctacaacagcccctcaaataaatcacatctagtgactggtaccaacaaaaaaaaaaaaaaacaagaaaaaaaaaaaaaaaaacacacaataagaaagaacaaaaaccaaaagaaaaggaaaaaaaaaagaacaagaacgaagatgacaaagaaagaacgaaggggagcgcacaaaacaaaaaagaggcggaggacagaagaacgccaaaacacagaaaacagagaacagacgacacaagg

SEQ ID NO: 279542 - DNA, 954 bp, Homo sapiens
gggctgctaccggtcggaagggctggggatgtactctctagatctgctggggctggactgaggctggggcaagcctcgtaaggactggaccacgggtgggcaggagaccggtggagaacccgccctgttgttggggctggggagggccgcgcaccgagactaaattctccttccggccagatccgctcaccaggccctggcgacctgagcatctacgacaactggatccggtacttcaaccgcagcagcccggtgtacggcctggtccccagagcaagacttcagccaggatctaccccacctaccacacagcctttgacacctttgactatgtggacaagtttttggacccgggtgaggagggagacaaggggcatcctgagaccaggacaggagaggctgaagactgagccctggccttgtcaccttgccgcaggcttcagcagccatcaggctgtggcccggacagcggggagtgtgattctccggctcagtgacagcttcttcctgcccctcaaagtcagtgactacagtgagacactccgcagcttcctgcaggcagcccagcaagatcttggggccctgctggagcagcacagcatcagcctgggtatgcacagccctgaccctgaggtatggggagccctgcacccccatgactgagccactgcttgttcctcacagggcctctggtgactgcagtggagaagtttgaggcagaagctgcagccttgggccaacgcatatcaacactgcagaagggcagccctgaccccctgcaggtccggatgctcaatgaccagttgatgctcttggaacggacctttctgaaccctagagccttcccagaggaacgctactacagtctgcgttcctctccctgcatgctgtgtatcctaactccctacaacagcccctcaaataaatcacatctagtgactggtaccaacaaaa

SEQ ID NO: 279543 - DNA, 1473 bp, Homo sapiens
cccctcctcacgtcagcagcctttctcctaaggcaccctaggatcaggaggaccctgtcctccaaccctctatcccccattcccaggcacctggcgtcctcgcagatcaatcgtgtttgcgagctggggggctgaggagtttgggctcattggctccacggaattcacagaagagttcttcaacaagctgcaggagcgcacggtggcctacatcaacgtggacatctcggtgtttgccaacgctacccttagggtgcaggggacgccccctgtccagagcgtcgtcttctctgcaaccaaagagatccgctcaccaggccctggcgacctgagcatctacgacaactggatccggtacttcaaccgcagcagcccggtgtacggcctggtccccagagcaagacttcagccaggatctaccccacctaccacacagcctttgacacctttgactatgtggacaagtttttggacccgggcttcagcagccatcaggctgtggcccggacagcggggagtgtgattctccggctcagtgacagcttcttcctgcccctcaaagtcagtgactacagtgagacactccgcagcttcctgcaggcagcccagcaagatcttggggccctgctggagcagcacagcatcagcctggggcctctggtgactgcagtggagaagtttgaggcagaagctgcagccttgggccaacgcatatcaacactgcagaagggcagccctgaccccctgcaggtccggatgctcaatgaccagttgatgctcttggaacggacctttctgaaccctagagccttcccagaggaacgctactacagccatgtgctctgggcacctcgcacgggctccgtagtcacattcccgggcctatccaatgcctgctccagggccagggacacagcttctggatctgaagcttgggctgaggtccagagacagctcagcattgtggtgacagccctggagggtgcggcagccaccctgaggcctgtggctgacctctgaccccagccctctttcttcagccctccctttactccaaccctctcctgcctgctttcctgagatgtcctggtcttccttggtgccagaagagggcactaccacaggaccctctcaagcttctcaggcaacagcttgaggtccctgaggggagtggcaagccctaatgcaactcaccctcatcctggtgcttaggtggcagagggtgggcagcaggggacagggatgggatggcaaaaccaccaactgcccttggtggcaggtgggtggagatgggatgcgtgccaacctcagatgccaactcaggtcatcaaggccaaggaccagtggcgaaagtgagtcttggggtaccttaggccttggctagtctgcgttcctctccctgcatgctgtgtatcctaactccctacaacagcccctcaaataaatcacatctagtgactggtaccaacaaaa

SEQ ID NO: 279544 - DNA, 1291 bp, Homo sapiens
gggctgctaccggtcggaagggctggggatgtactctctagatctgctggggctggactgaggctggggcaagcctcgtaaggactggaccacgggtgggcaggagaccggtggagaacccgccctgttgttggggctggggagggccgcgcaccgagactaaattctccttccggccagatccgctcaccaggccctggcgacctgagcatctacgacaactggatccggtacttcaaccgcagcagcccggtgtacggcctggtccccagagcaagacttcagccaggatctaccccacctaccacacagcctttgacacctttgactatgtggacaagtttttggacccgggtgaggagggagacaaggggcatcctgagaccaggacaggagaggctgaagactgagccctggccttgtcaccttgccgcaggcttcagcagccatcaggctgtggcccggacagcggggagtgtgattctccggctcagtgacagcttcttcctgcccctcaaagtcagtgactacagtgagacactccgcagcttcctgcaggcagcccagcaagatcttggggccctgctggagcagcacagcatcagcctgggtatgcacagccctgaccctgaggtatggggagccctgcacccccatgactgagccactgcttgttcctcacagggcctctggtgactgcagtggagaagtttgaggcagaagctgcagccttgggccaacgcatatcaacactgcagaagggcagccctgaccccctgcaggtccggatgctcaatgaccagttgatgctcttggaacggacctttctgaaccctagagccttcccagaggaacgctactacagtttactccaaccctctcctgcctgctttcctgagatgtcctggtcttccttggtgccagaagagggcactaccacaggaccctctcaagcttctcaggcaacagcttgaggtccctgaggggagtggcaagccctaatgcaactcaccctcatcctggtgcttaggtggcagagggtgggcagcaggggacagggatgggatggcaaaaccaccaactgcccttggtggcaggtgggtggagatgggatgcgtgccaacctcagatgccaactcaggtcatcaaggccaaggaccagtggcgaaagtgagtcttggggtaccttaggccttggctagtctgcgttcctctccctgcatgctgtgtatcctaactccctacaacagcccctcaaataaatcacatctagtgactggtaccaacaaaa

SEQ ID NO: 279545 - DNA, 2083 bp, Homo sapiens
accccagctggccaagagtccgcaggatgcagtggacgaaggtgttggggctggggctgggggctgctgccctcttggggctggggatcatcctcggccactttgccatccccaaaaaagccaactcactggccccccaggacctggacctggagatcctggagaccgtcatggggcagctggatgcccacaggatccgggagaacctcagagaactctccagggagccacacctggcctccagccctcgggatgaggacctggtgcagctgctgctgcagcgctggaaggacccagagtcaggcctggactcggccgaggcctccacgtacgaagtgctgctgtccttccctagccaggagcagcccaacgtcgtggacatcgtgggccccactgggggcatcatccactcctgccaccggactgaggagaacgtgaccggggagcaaggggggccagatgtggtacaaccctatgctgcctatgctccttctggaaccccacagggcctcctcgtctatgccaaccggggcgcggaagaagactttaaggagctacagactcagggcatcaaacttgaaggcaccattgccctgactcgatatgggggtgtagggcgtggggccaaggctgtgaacgctgccaagcacggggtagctggggtgctggtgtacacagaccctgccgacatcaacgatgggctgagctcacccgacgaaacctttcccaactcctggtacctgcccccctcaggagtggagcgaggctcctactacgagtattttggggaccctctgactccctaccttccagccgtcccctcttccttccgcgtggaccttgccaatgtctccggatttcccccaattcctacacagcccattggcttccaggatgcaagagacctgctctgtaacctcaacggaactttggccccagccacctggcagggagcactgggctgccactacaggttgggtcccggcttccggcctgacggagacttcccagcagacagccaggtgaatgtgagcgtctacaaccgcctggagctgaggaactcttccaacgtcctgggcatcatccgtggggctgtggagcctgatcgctacgtgctgtatgggaaccaccgagacagctgggtgcacggggctgtggaccccagcagtggcaccgccgtcctcctggagctctcccgtgtcctggggaccctgctgaagaagggcacctggcgtcctcgcagatcaatcgtgtttgcgagctggggggctgaggagtttgggctcattggctccacggaattcacagaagagttcttcaacaagctgcaggagcgcacggtggcctacatcaacgtggacatctcggtgtttgccaacgctacccttagggtgcaggggacgccccctgtccagagcgtcgtcttctctgcaaccaaagagatccgctcaccaggccctggcgacctgagcatctacgacaactggatccggtacttcaaccgcagcagcccggtgtacggcctggtccccaggcttcagcagccatcaggctgtggcccggacagcggggagtgtgattctccggctcagtgacagcttcttcctgcccctcaaagtcagtgactacagtgagacactccgcagcttcctgcaggcagcccagcaagatcttggggccctgctggagcagcacagcatcagcctggggcctctggtgactgcagtggagaagtttgaggcagaagctgcagccttgggccaacgcatatcaacactgcagaagggcagccctgaccccctgcaggtccggatgctcaatgaccagttgatgctcttggaacggacctttctgaaccctagagccttcccagaggaacgctactacaggtgggtggagatgggatgcgtgccaacctcagatgccaactcaggtcatcaaggccaaggaccagtggcgaaagtgagtcttggggtaccttaggccttggctagtctgcgttcctctccctgcatgctgtgtatcctaactccctacaacagcccctcaaataaatcacatctagtgactggtaccaacaaaa

SEQ ID NO: 279546 - DNA, 600 bp, Homo sapiens
caaagaaaagtcaacaaaggctctaacatcaacatgaccttggataaggtgtacatttcatcaggacagatgactcgaatggccaccaccaccgaggccttgcacacacctttgcagtgaacggcgatggccccttcggtgttctcacagatgttcaggaaccttcgcacgatgttgtcactgggtgtgctgccatctatgaagaagaggtcatagtgctcgaagccagcgtctgtgaagcgctttgcctcataaatctttttgtttagcctcacaactgcagtcacattatgctttttgaaataaggaaagtaggcttcaggggcgtgaagaggataacctaaaggaacaaaggagcagtaagcaaaaggcatgcatttcatcttccacaacccagaaatacaaaactctcaacaatgaagtgtataaatctcaacaaagcttgggaggaaagtgtgttgtgtgagagaagaggtcacagcaagctcctacaagcatcaatctgcataactgtaagcaccacaggaggttaaaaagaaaacttctgtaagtactgaaaatacatcattaaagttcaaaatctcaacctctagattcgaa

SEQ ID NO: 279547 - DNA, 3340 bp, Homo sapiens
agctcgccgagtagacggccccgccgcccgctgcccgccggggctctccagcttcgccatgccgccgtggggcgccgccctcgcgctcatcttggccgtgctcgcccttctcggcctgctcggcccgcggctccggggaccctgggggcgcgccgtcggagagaggaccctgccgggggcccaagaccgagacgacggggaggaggcggacggcggaggcccggcggaccagttcagcgacgggcgcgagccactgccgggagggtgcagccttgtttgcaagccgtcggccctggcccagtgcctgctgcgcgccctgcggcgctcagaggcgctggaggccggcccgcgctcctggttctccgggccccacctgcagaccctctgccacttcgtcctgcccgtagcgcctgggcctgagctggcccgggagtacctgcagttggcggacgatgggctagtggccctggactgggtggtaggaccttgtgttcggggccgccggatcaccagcgccgggggccttcctgcggtgcttctggtgatccccaatgcgtggggtcgcctcacccgcaacgtgctcggcctttgcttgctcgccctggagcgcggctactacccggtcatcttccatcgccgcggccaccacggttgcccactggtcagcccccggctgcagcctttcggggacccgtccgacctcaaggaggcggtcacatacatccgcttccgacacccggcggcgccgctgttcgcggtgagcgaaggctcgggctcggcgctgctcctgtcctacctgggcgagtgcggctcctccagctacgtgacaggcgccgcctgcatctcgcccgtgctgcgctgccgagagtggttcgaggccggcctgccctggccctacgagcggggctttctgctccaccagaagatcgccctcagcaggtatgccacagccctggaggacactgtggacaccagcagactgttcaggagccgttcccttcgagagtttgaggaggctctcttctgccacaccaaaagcttccccatcagctgggatgcctactgggaccgcaacgacccgctccgggatgtcgatgaggcagccgtgcctgtgctgtgtatctgcagtgctgacgaccccgtgtgtggacccccagaccacactctgacaactgaactcttccacagcaacccctacttcttcctcctgctcagtcgccacggaggccactgtggcttcctgcgccaggagcccttgccagcctggagccatgaggtcatcttggagtccttccgggccttgactgagttcttccgaacggaggagaggattaaagggctgagcaggcacagagcttccttccttgggggccgtcgtcgtgggggagccttgcagaggcgggaagtctcttcctcttccaacctggaggagatctttaactggaagcgatcatacacaaggtgaaagacctggcctgagaacccccaagtcctgcaaagaaaaacagagctgggcaagggggagtcctggaaagatggggcggactgaacagagggagctccagctctgtgctcctcattcagtccctctctcttaaattggtgccttgaaagagaaggaacgtcctgcgagcctgcactcacttcatcctcagcagaactcctgcctggcctctgctcaacatatccctactcatccggtcagcagcggcgcgttccagtcactgtcacctgtcactgacatcacaagccaaaggatagcactttttcaatccatggactcaggagaaaatgccctcttactggcagtggctagagggatgagacgtttgtgtatgtcactgggcagtgaccccgattctcaagctggagccatttgatgtcatgaggacaggatgtttgtgtctcggccccacttccctcatttgctctgtggttgtggcgccctgctttgaccgaatgctctggcaactgcggcagcaggcttgtgtgtgtgagaagggcggcagaggcagtggggctggctcgctgagggctgagcaggtagagaatgtgaatgtccatctcaaggaatgcgaagttccaatctctcagaggagctctgcaagtctcagctaggaatggggctgatctggcccccaagcctcactggagagatcccaagggtattttacaaataggaagcgctctcatgcaggatctgagggctttgctagaccatggttcaaggagtcagaatcttggctaccctacatgctccctctggcaccatttcaggggattactccagagagctgcagccagaactgtttatctcctgagatatggactttctctaagtcaggaaaagcacaaacctcataacttaggtgttttctggttggttgctcccttttctgatcctactactggcctctccctttccagagccaggagacacatctgggaccagaggaaacaaaagcaccaagaggttgactagagctgaccagtgatttacaaatatttcatattccaatgcttcgtctgctcaattattcaaaaggccatccctgtaaaggcagaaaagcttcctcttagatctggccactcagcaaataagtgggtatttggttttatgaagaataatgctgaggactagagatatagtatatcagagataatatatagtatacaggttgatctaaatattctggtttggattaggcaattaaaatttttttggcaacaggacatatgtttccatgtgttgctaagattcaaaaactttgccctgaagttttattttaatcgtcattgagaaagagggctcctgttctgacctcaaaaacagcaaagctgttgtaaagaagagagctgcttatacgaaaacccacattccaagacttggtataaggtattcctgaggccttgatttcaggtttggataatcttgccccagattctagatcttgttcttctagatcaaatcagaagaaactttgaaataactccaagaatctgcactgaaatgtagacagcactcgataatctaagggacattatcttgttgtgaaaaattatctccctcctggtgggattataggagtgagccatcgcacccggccggagctaaagttttgaaggtaaaatgatacttcattgaaacaataagacactcatgcatcaaaagtaagtctctagtccctctagtcttaccttgtaataatgcaataccttgccttagtatttagtatggttgaacaaaaaatttctctccaacttatttgtctctgaatagtaaatcagtctcccagtaacactggaatgttattattttttaaatctccagaaacaaata

SEQ ID NO: 279548 - DNA, 1904 bp, Homo sapiens
atctcacctgttgtatgatcgcgttccagattagagatctcctccaggttggaagaggaagagacttcccgcctctgcaaggctcccccacgacgacggcccccaaggaaggaagctctgtgctcctcattcagtccctctctcttaaattggtgccttgaaagagaaggaacgtcctgcgagcctgcactcacttcatcctcagcagaactcctgcctggcctctgctcaacatatccctactcatccggtcagcagcggcgcgttccagtcactgtcacctgtcactgacatcacaagccaaaggatagcactttttcaatccatggactcaggagaaaatgccctcttactggcagtggctagagggatgagacgtttgtgtatgtcactgggcagtgaccccgattctcaagctggagccatttgatgtcatgaggacaggatgtttgtgtctcggccccacttccctcatttgctctgtggttgtggcgccctgctttgaccgaatgctctggcaactgcggcagcaggcttgtgtgtgtgagaagggcggcagaggcagtggggctggctcgctgagggctgagcaggtagagaatgtgaatgtccatctcaaggaatgcgaagttccaatctctcagaggagctctgcaagtctcagctaggaatggggctgatctggcccccaagcctcactggagagatcccaagggtattttacaaataggaagcgctctcatgcaggatctgagggctttgctagaccatggttcaaggagtcagaatcttggctaccctacatgctccctctggcaccatttcaggggattactccagagagctgcagccagaactgtttatctcctgagatatggactttctctaagtcaggaaaagcacaaacctcataacttaggtgttttctggttggttgctcccttttctgatcctactactggcctctccctttccagagccaggagacacatctgggaccagaggaaacaaaagcaccaagaggttgactagagctgaccagtgatttacaaatatttcatattccaatgcttcgtctgctcaattattcaaaaggccatccctgtaaaggcagaaaagcttcctcttagatctggccactcagcaaataagtgggtatttggttttatgaagaataatgctgaggactagagatatagtatatcagagataatatatagtatacaggttgatctaaatattctggtttggattaggcaattaaaatttttttggcaacaggacatatgtttccatgtgttgctaagattcaaaaactttgccctgaagttttattttaatcgtcattgagaaagagggctcctgttctgacctcaaaaacagcaaagctgttgtaaagaagagagctgcttatacgaaaacccacattccaagacttggtataaggtattcctgaggccttgatttcaggtttggataatcttgccccagattctagatcttgttcttctagatcaaatcagaagaaactttgaaataactccaagaatctgcactgaaatgtagacagcactcgataatctaagggacattatcttgttgtgaaaaattatctccctcctggctgggagcggtggcacacacctataatctcagcactttgggaggccgaggtgggtggatcacgaggtcaggagatcgagaccatcctggctaacacagtgaaacctcatctctactaaaaatacaaaaaattagccgggcgtggtagcgggtgcctgtaatcccagttactcaggaggctgaggcaggagaatggcgtgaacccgggaggcggagcttgcagtgagctgagatcgcaccactgcactccagcctgggcgacagagtaagactgtgtttca

SEQ ID NO: 279549 - DNA, 1322 bp, Homo sapiens
tacggccatcgcaaagtttgtgcgtgtagggcgactctatagaatacccgccggatcgagcaaggagctctgcaagtctcagctaggaatggggctgatctggcccccaagcctcactggagagatcccaagggtattttacaaataggaagcgctctcatgcaggatctgagggctttgctagaccatggttcaaggagtcagaatcttggctaccctacatgctccctctggcaccatttcaggggattactccagagagctgcagccagaactgtttatctcctgagatatggactttctctaagtcaggaaaagcacaaacctcataacttaggtgttttctggttggttgctcccttttctgatcctactactggcctctccctttccagagccaggagacacatctgggaccagaggaaacaaaagcaccaagaggttgactagagctgaccagtgatttacaaatatttcatattccaatgcttcgtctgctcaattattcaaaaggccatccctgtaaaggcagaaaagcttcctcttagatctggccactcagcaaataagtgggtatttggttttatgaagaataatgctgaggactagagatatagtatatcagagataatatatagtatacaggttgatctaaatattctggtttggattaggcaattaaaatttttttggcaacaggacatatgtttccatgtgttgctaagattcaaaaactttgccctgaagttttattttaatcgtcattgagaaagagggctcctgttctgacctcaaaaacagcaaagctgttgtaaagaagagagctgcttatacgaaaacccacattccaagacttggtataaggtattcctgaggccttgatttcaggtttggataatcttgccccagattctagatcttgttcttctagatcaaatcagaagaaactttgaaataactccaagaatctgcactgaaatgtagacagcactcgataatctaagggacattatcttgttgtgaaaaattatctccctcctggctgggagcggtggcacacacctataatctcagcactttgggaggccgaggtgggtggatcacgaggtcaggagatcgagaccatcctggctaacacagtgaaacctcatctctactaaaaatacaaaaaattagccgggcgtggtagcgggtgcctgtaatcccagttactcaggaggctgaggcaggagaatggcgtgaacccgggaggcggagcttgcagtgagctgagatcgcaccactgcactccagcctgggcgacagagtaagactgtgtttca

SEQ ID NO: 279550 - DNA, 342 bp, Homo sapiens
tggtcagcccccggctgcagcctttcggggacccgtccgacctcaaggaggcggtcacatacatccgcttccgacacccggcggcgccgctgttcgcggtgagcgaaggctcgggctcggcgctgctcctgtcctacctgggcgagtgcggctcctccagctacgtgacaggcgccgcctgcatctcgcccgtgctgcgctgccgagagtggttcgaggccggcctgccctggccctacgagcggggctttctgctccaccagaagatcgccctcagcaggtgggtaacggaggccgcagaccagcatggaaagaatagagggcctgagctggctaagaatc

SEQ ID NO: 279551 - DNA, 3354 bp, Homo sapiens
agctcgccgagtagacggccccgccgcccgctgcccgccggggctctccagcttcgccatgccgccgtggggcgccgccctcgcgctcatcttggccgtgctcgcccttctcggcctgctcggcccgcggctccggggaccctgggggcgcgccgtcggagagaggaccctgccgggggcccaagaccgagacgacggggaggaggcggacggcggaggcccggcggaccagttcagcgacgggcgcgagccactgccgggagggtgcagccttgtttgcaagccgtcggccctggcccagtgcctgctgcgcgccctgcggcgctcagaggcgctggaggccggcccgcgctcctggttctccgggccccacctgcagaccctctgccacttcgtcctgcccgtagcgcctgggcctgagctggcccgggagtacctgcagttggcggacgatgggctagtggccctggactgggtggtaggaccttgtgttcggggccgccggatcaccagcgccgggggccttcctgcggtgcttctggtgatccccaatgcgtggggtcgcctcacccgcaacgtgctcggcctttgcttgctcgccctggagcgcggctactacccggtcatcttccatcgccgcggccaccacggttgcccactggtcagcccccggctgcagcctttcggggacccgtccgacctcaaggaggcggtcacatacatccgcttccgacacccggcggcgccgctgttcgcggtgagcgaaggctcgggctcggcgctgctcctgtcctacctgggcgagtgcggctcctccagctacgtgacaggcgccgcctgcatctcgcccgtgctgcgctgccgagagtggttcgaggccggcctgccctggccctacgagcggggctttctgctccaccagaagatcgccctcagcaggtatgccacagccctggaggacactgtggacaccagcagactgttcaggagccgttcccttcgagagtttgaggaggctctcttctgccacaccaaaagcttccccatcagctgggatgcctactgggaccgcaacgacccgctccgggatgtcgatgaggcagccgtgcctgtgctgtgtatctgcagtgctgacgaccccgtgtgtggacccccagaccacactctgacaactgaactcttccacagcaacccctacttcttcctcctgctcagtcgccacggaggccactgtggcttcctgcgccaggagcccttgccagcctggagccatgaggtcatcttggagtccttccgggccttgactgagttcttccgaacggaggagaggattaaagggctgagcaggcacagagcttccttccttgggggccgtcgtcgtgggggagccttgcagaggcgggaagtctcttcctcttccaacctggaggagatctttaactggaagcgatcatacacaaggtgaaagacctggcctgagaacccccaagtcctgcaaagaaaaacagagctgggcaagggggagtcctggaaagatggggcggactgaacagagggagctccagctctgtgctcctcattcagtccctctctcttaaattggtgccttgaaagagaaggaacgtcctgcgagcctgcactcacttcatcctcagcagaactcctgcctggcctctgctcaacatatccctactcatccggtcagcagcggcgcgttccagtcactgtcacctgtcactgacatcacaagccaaaggatagcactttttcaatccatggactcaggagaaaatgccctcttactggcagtggctagagggatgagacgtttgtgtatgtcactgggcagtgaccccgattctcaagctggagccatttgatgtcatgaggacaggatgtttgtgtctcggccccacttccctcatttgctctgtggttgtggcgccctgctttgaccgaatgctctggcaactgcggcagcaggcttgtgtgtgtgagaagggcggcagaggcagtggggctggctcgctgagggctgagcaggtagagaatgtgaatgtccatctcaaggaatgcgaagttccaatctctcagaggagctctgcaagtctcagctaggaatggggctgatctggcccccaagcctcactggagagatcccaagggtattttacaaataggaagcgctctcatgcaggatctgagggctttgctagaccatggttcaaggagtcagaatcttggctaccctacatgctccctctggcaccatttcaggggattactccagagagctgcagccagaactgtttatctcctgagatatggactttctctaagtcaggaaaagcacaaacctcataacttaggtgttttctggttggttgctcccttttctgatcctactactggcctctccctttccagagccaggagacacatctgggaccagaggaaacaaaagcaccaagaggttgactagagctgaccagtgatttacaaatatttcatattccaatgcttcgtctgctcaattattcaaaaggccatccctgtaaaggcagaaaagcttcctcttagatctggccactcagcaaataagtgggtatttggttttatgaagaataatgctgaggactagagatatagtatatcagagataatatatagtatacaggttgatctaaatattctggtttggattaggcaattaaaatttttttggcaacaggacatatgtttccatgtgttgctaagattcaaaaactttgccctgaagttttattttaatcgtcattgagaaagagggctcctgttctgacctcaaaaacagcaaagctgttgtaaagaagagagctgcttatacgaaaacccacattccaagacttggtataaggtattcctgaggccttgatttcaggtttggataatcttgccccagattctagatcttgttcttctagatcaaatcagaagaaactttgaaataactccaagaatctgcactgaaatgtagacagcactcgataatctaagggacattatcttgttgtgaaaaattatctccctcctggctgggagcggtggcacacacctataatctcagcactttgggaggccgaggtgggtggatcacgaggtcaggagatcgagaccatcctggctaacacagtgaaacctcatctctactaaaaatacaaaaaattagccgggcgtggtagcgggtgcctgtaatcccagttactcaggaggctgaggcaggagaatggcgtgaacccgggaggcggagcttgcagtgagctgagatcgcaccactgcactccagcctgggcgacagagtaagactgtgtttca

SEQ ID NO: 279552 - DNA, 2733 bp, Homo sapiens
agctcgccgagtagacggccccgccgcccgctgcccgccggggctctccagcttcgccatgccgccgtggggcgccgccctcgcgctcatcttggccgtgctcgcccttctcggcctgctcggcccgcggctccggggaccctgggggcgcgccgtcggagagaggaccctgccgggggcccaagaccgagacgacggggaggaggcggacggcggaggcccggcggaccagttcagcgacgggcgcgagccactgccgggagggtgcagccttgtttgcaagccgtcggccctggcccagtgcctgctgcgcgccctgcggcgctcagaggcgctggaggccggcccgcgctcctggttctccgggccccacctgcagaccctctgccacttcgtcctgcccgtagcgcctgggcctgagctggcccgggagtacctgcagttggcggacgatgggctagtggccctggactgggtggtaggaccttgtgttcggggccgccggatcaccagcgccgggggccttcctgcggtgcttctggtgatccccaatgcgtggggtcgcctcacccgcaacgtgctcggcctttgcttgctcgccctggagcgcggctactacccggtcatcttccatcgccgcggccaccacggttgcccactggtcagcccccggctgcagcctttcggggacccgtccgacctcaaggaggcggtcacatacatccgcttccgacacccggcggcgccgctgttcgcggtgagcgaaggctcgggctcggcgctgctcctgtcctacctgggcgagtgcggctcctccagctacgtgacaggcgccgcctgcatctcgcccgtgctgcgctgccgagagtggttcgaggccggcctgccctggccctacgagcggggctttctgctccaccagaagatcgccctcagcaggtatgccacagccctggaggacactgtggacaccagcagactgttcaggagccgttcccttcgagagtttgaggaggctctcttctgccacaccaaaagcttccccatcagctgggatgcctactgggaccgcaacgacccgctccgggatgtcgatgaggcagccgtgcctgtgctgtgtatctgcagtgctgacgaccccgtgtgtggacccccagaccacactctgacaactgaactcttccacagcaacccctacttcttcctcctgctcagtcgccacggaggccactgtggcttcctgcgccaggagcccttgccagcctggagccatgaggtcatcttggagtccttccgggccttgactgagttcttccgaacggaggagaggattaaagggctgagcaggcacagagcttccttccttgggggccgtcgtcgtgggggagccttgcagaggcgggaagtctcttcctcttccaacctggaggagatctttaactggaagcgatcatacacaaggtgaaagacctggcctgagaacccccaagtcctgcaaagaaaaacagagctgggcaagggggagtcctggaaagatggggcggactgaacagagggagctccagctctgtgctcctcattcagtccctctctcttaaattggtgccttgaaagagaaggaacgtcctgcgagcctgcactcacttcatcctcagcagaactcctgcctggcctctgctcaacatatccctactcatccggtcagcagcggcgcgttccagtcactgtcacctgtcactgacatcacaagccaaaggatagcactttttcaatccatggactcaggagaaaatgccctcttactggcagtggctagagggatgagacgtttgtgtatgtcactgggcagtgaccccgattctcaagctggagccatttgatgtcatgaggacaggatgtttgtgtctcggccccacttccctcatttgctctgtggttgtggcgccctgctttgaccgaatgctctggcaactgcggcagcaggcttgtgtgtgtgagaagggcggcagaggcagtggggctggctcgctgagggctgagcaggtagagaatgtgaatgtccatctcaaggaatgcgaagttccaatctctcagaggagctctgcaagtctcagctaggaatggggctgatctggcccccaagcctcactggagagatcccaagggtattttacaaataggaagcgctctcatgcaggatctgagggctttgctagaccatggttcaaggagtcagaatcttggctaccctacatgctccctctggcaccatttcaggggattactccagagagctgcagccagaactgtttatctcctgagatatggactttctctaagtcaggaaaagcacaaacctcataacttaggtgttttctggttggttgctcccttttctgatcctactactggcctctccctttccagagccaggagacacatctgggaccagaggaaacaaaagcaccaagaggttgactagagctgaccagtgatttacaaatatttcatattccaatgcttcgtctgctcaattattcaaaaggccatccctgtaaaggcagaaaagcttcctcttagatctggccactcagcaaataagtgggtatttggttttatgaagaataatgctgaggactagagatatagtatatcagagataatatatagtatacaggttgatctaaatattctggtttggattaggcaattaaaatttttttggcaacagga

SEQ ID NO: 279553 - DNA, 2709 bp, Homo sapiens
agctcgccgagtagacggccccgccgcccgctgcccgccggggctctccagcttcgccatgccgccgtggggcgccgccctcgcgctcatcttggccgtgctcgcccttctcggcctgctcggcccgcggctccggggaccctgggggcgcgccgtcggagagaggaccctgccgggggcccaagaccgagacgacggggaggaggcggacggcggaggcccggcggaccagttcagcgacgggcgcgagccactgccgggagggtgcagccttgtttgcaagccgtcggccctggcccagtgcctgctgcgcgccctgcggcgctcagaggcgctggaggccggcccgcgctcctggttctccgggccccacctgcagaccctctgccacttcgtcctgcccgtagcgcctgggcctgagctggcccgggagtacctgcagttggcggacgatgggctagtggccctggactgggtggtaggaccttgtgttcggggccgccggatcaccagcgccgggggccttcctgcggtgcttctggtgatccccaatgcgtggggtcgcctcacccgcaacgtgctcggcctttgcttgctcgccctggagcgcggctactacccggtcatcttccatcgccgcggccaccacggttgcccactggtcagcccccggctgcagcctttcggggacccgtccgacctcaaggaggcggtcacatacatccgcttccgacacccggcggcgccgctgttcgcggtgagcgaaggctcgggctcggcgctgctcctgtcctacctgggcgagtgcggctcctccagctacgtgacaggcgccgcctgcatctcgcccgtgctgcgctgccgagagtggttcgaggccggcctgccctggccctacgagcggggctttctgctccaccagaagatcgccctcagcaggtatgccacagccctggaggacactgtggacaccagcagactgttcaggagccgttcccttcgagagtttgaggaggctctcttctgccacaccaaaagcttccccatcagctgggatgcctactgggaccgcaacgacccgctccgggatgtcgatgaggcagccgtgcctgtgctgtgtatctgcagtgctgacgaccccgtgtgtggacccccagaccacactctgacaactgaactcttccacagcaacccctacttcttcctcctgctcagtcgccacggaggccactgtggcttcctgcgccaggagcccttgccagcctggagccatgaggtcatcttggagtccttccgggccttgactgagttcttccgaacggaggagaggattaaagggctgagcaggcacagagcttccttccttgggggccgtcgtcgtgggggagccttgcagaggcgggaagtctcttcctcttccaacctggaggagatctttaactggaagcgatcatacacaaggtgaaagacctggcctgagaacccccaagtcctgcaaagaaaaacagagctgggcaagggggagtcctggaaagatggggcggactgaacagagggagctccagctctgtgctcctcattcagtccctctctcttaaattggtgccttgaaagagaaggaacgtcctgcgagcctgcactcacttcatcctcagcagaactcctgcctggcctctgctcaacatatccctactcatccggtcagcagcggcgcgttccagtcactgtcacctgtcactgacatcacaagccaaaggatagcactttttcaatccatggactcaggagaaaatgccctcttactggcagtggctagagggatgagacgtttgtgtatgtcactgggcagtgaccccgattctcaagctggagccatttgatgtcatgaggacaggatgtttgtgtctcggccccacttccctcatttgctctgtggttgtggcgccctgctttgaccgaatgctctggcaactgcggcagcaggcttgtgtgtgtgagaagggcggcagaggcagtggggctggctcgctgagggctgagcaggtagagaatgtgaatgtccatctcaaggaatgcgaagttccaatctctcagaggagctctgcaagtctcagctaggaatggggctgatctggcccccaagcctcactggagagatcccaagggtattttacaaataggaagcgctctcatgcaggatctgagggctttgctagaccatggttcaaggagtcagaatcttggctaccctacatgctccctctggcaccatttcaggggattactccagagagctgcagccagaactgtttatctcctgagatatggactttctctaagtcaggaaaagcacaaacctcataacttaggtgttttctggttggttgctcccttttctgatcctactactggcctctccctttccagagccaggagacacatctgggaccagaggaaacaaaagcaccaagaggttgactagagctgaccagtgatttacaaatatttcatattccaatgcttcgtctgctcaattattcaaaaggccatccctgtaaaggcagaaaagcttcctcttagatctggccactcagcaaataataatgctgaggactagagatatagtatatcagagataatatatagtatacaggttgatctaaatattctggtttggattaggcaattaaaatttttttggcaacagga

SEQ ID NO: 279554 - DNA, 1067 bp, Homo sapiens
agggccgcagggagtgcgcatgcggccgagtgcgggactggggctcctggctgtgggtgtggtactgaggcttcagcgggtgccgcccgcctagagggagtggagcgagagcctacgactagatttgcatctttacgtcctgcgcggaggctgctacacacatgcagaagtcatgctggtggcctggacattgaagggagagaagtggatttgggagacatttaggagatggcaccgaaagcgaaggaagctcctgctcctcctaaagccgaagccaaagcgaaggctttaaaggccaagaaggcagtgttgaaaggtgtccgcagccacacgcaaaaaagaggatccgcatgtcactcaccttcaggcggcccaagacactgcgactccggaggcagcccagatatcctcagaagagcacccccaggagaaacaagcttggccactatgctatcatcaagtttccgctgaccactgagtcggccgtgaagaagatagaagaaaacaacacgcttgtgttcactgtggatgttaaagccaacaagcaccagatcagacaggctgtgaagaagctctatgacagtgatgtggccaaggtcaccaccctgatttgtcctgataaagagaagaaggcatatgttcgacttgctcctgattatgatgctttcaatgttgtaacaaaattgggatcacctaaactgagtccagctggctaactctaaatatatgtgtatcttttcagcataaaaaaataatgtttttcataagaatgacaacttaattagaatcaaatctataagctttaagattttacgtttctagtaagtataatattagcttatttgactagaactcaagcagaataggaatttatgcttgttttatattcaataatgataattttgaagatatagttgttttattacaccaaaaatactatattaatcttatttaactaagttttatccaaatcatgttaacttaagaaacatttgatcagttcctatatttctaggagtttggtgaatatttatttataaatgcttatttttttccaagccaagtta

SEQ ID NO: 279555 - DNA, 1318 bp, Homo sapiens
agggccgcagggagtgcgcatgcggccgagtgcgggactggggctcctggctgtgggtgtggtactgaggcttcagcgggtgccgcccgcctagagggagtggagcggtgagcacgtcaggggtggggggcgcaggtcaagctttcaccagtttttaattctttgatggggtaaatttgagcaattttctcgacttgtcgacattcgttattaactgagcaggaatcaggagaggaacccggtcctctccacacagcccagcagggagacaggagacatcaatatatgtaagatgaacgttggttccctcgggaaaggcgggacaactcgaagcagggagggggcttccaggtcacagagagcctacgactagatttgcatctttacgtcctgcgcggaggctgctacacacatgcagaagtcatgctggtggcctggacattgaagggagagaagtggatttgggagacatttaggagatggcaccgaaagcgaaggaagctcctgctcctcctaaagccgaagccaaagcgaaggctttaaaggccaagaaggcagtgttgaaaggtgtccgcagccacacgcaaaaaagaggatccgcatgtcactcaccttcaggcggcccaagacactgcgactccggaggcagcccagatatcctcagaagagcacccccaggagaaacaagcttggccactatgctatcatcaagtttccgctgaccactgagtcggccgtgaagaagatagaagaaaacaacacgcttgtgttcactgtggatgttaaagccaacaagcaccagatcagacaggctgtgaagaagctctatgacagtgatgtggccaaggtcaccaccctgatttgtcctgataaagagaagaaggcatatgttcgacttgctcctgattatgatgctttcaatgttgtaacaaaattgggatcacctaaactgagtccagctggctaactctaaatatatgtgtatcttttcagcataaaaaaataatgtttttcataagaatgacaacttaattagaatcaaatctataagctttaagattttacgtttctagtaagtataatattagcttatttgactagaactcaagcagaataggaatttatgcttgttttatattcaataatgataattttgaagatatagttgttttattacaccaaaaatactatattaatcttatttaactaagttttatccaaatcatgttaacttaagaaacatttgatcagttcctatatttctaggagtttggtgaatatttatttataaatgcttatttttttccaagccaagtta

SEQ ID NO: 279556 - DNA, 1627 bp, Homo sapiens
agggccgcagggagtgcgcatgcggccgagtgcgggactggggctcctggctgtgggtgtggtactgaggcttcagcgggtgccgcccgcctagagggagtggagcggtgagcacgtcaggggtggggggcgcaggtcaagctttcaccagtttttaattctttgatggggtaaatttgagcaattttctcgacttgtcgacattcgttattaactgagcaggaatcaggagaggaacccggtcctctccacacagcccagcaggtacgccgcccatgtgcctgtggagaagagaggttcctgtggggcagacaggtgtggaccaagtagctgtgaaatttcttctgaagaaaacacacaaggaggaagcgagtgagctcagtggaggaggggcgctaccccaggggacgtccccatgcatgggcttgtgaacctcgaatatgtgagacggtctcagtcaatttagaaagtttattttgccaaggttgaggacgcacgcccgtgacacagcctcaggaggtcttgacatgtgccaaaggtggtcgggacacagcttgcttttatacattttagggagacaggagacatcaatatatgtaagatgaacgttggttccctcgggaaaggcgggacaactcgaagcagggagggggcttccaggtcacagagagcctacgactagatttgcatctttacgtcctgcgcggaggctgctacacacatgcagaagtcatgctggtggcctggacattgaagggagagaagtggatttgggagacatttaggagatggcaccgaaagcgaaggaagctcctgctcctcctaaagccgaagccaaagcgaaggctttaaaggccaagaaggcagtgttgaaaggtgtccgcagccacacgcaaaaaagaggatccgcatgtcactcaccttcaggcggcccaagacactgcgactccggaggcagcccagatatcctcagaagagcacccccaggagaaacaagcttggccactatgctatcatcaagtttccgctgaccactgagtcggccgtgaagaagatagaagaaaacaacacgcttgtgttcactgtggatgttaaagccaacaagcaccagatcagacaggctgtgaagaagctctatgacagtgatgtggccaaggtcaccaccctgatttgtcctgataaagagaagaaggcatatgttcgacttgctcctgattatgatgctttcaatgttgtaacaaaattgggatcacctaaactgagtccagctggctaactctaaatatatgtgtatcttttcagcataaaaaaataatgtttttcataagaatgacaacttaattagaatcaaatctataagctttaagattttacgtttctagtaagtataatattagcttatttgactagaactcaagcagaataggaatttatgcttgttttatattcaataatgataattttgaagatatagttgttttattacaccaaaaatactatattaatcttatttaactaagttttatccaaatcatgttaacttaagaaacatttgatcagttcctatatttctaggagtttggtgaatatttatttataaatgcttatttttttccaagccaagtta

SEQ ID NO: 279557 - DNA, 730 bp, Homo sapiens
agggccgcagggagtgcgcatgcggccgagtgcgggactggggctcctggctgtgggtgtggtactgaggcttcagcgggtgccgcccgcctagagggagtggagcggtgagcacgtcaggggtggggggcgcaggtcaagctttcaccagtttttaattctttgatggggtaaatttgagcaattttctcgacttgtcgacattcgttattaactgagcaggaatcaggagaggaacccggtcctctccacacagcccagcagagagcctacgactagatttgcatctttacgtcctgcgcggaggctgctacacacatgcagaagtcatgctggtggcctggacattgaagggagagaagtggatttgggagacatttaggaggaacagtaagaggaccttgtgcatgaataatttgtttccacactacagaaaagaatcccagtcttcttagagaacccagtgactttttgcaccttaaatctgtgaaatcctcatgttttcttctgccgtatccatagttcaaacaaagatgaggcaaagctagatgcattcctgaaggaacccaagaaattcctctctttatttctctggaatgaaatgaattctctagacgaccagttctaaccttcaaaaaccaaacctgtttgtgagatctccttcaaatactactgtagaccccagtgtttattcattaaattttaaaatatttgttttatttggaatcca

SEQ ID NO: 279558 - DNA, 1084 bp, Homo sapiens
agggccgcagggagtgcgcatgcggccgagtgcgggactggggctcctggctgtgggtgtggtactgaggcttcagcgggtgccgcccgcctagagggagtggagcggtgagcacgtcaggggtggggggcgcaggtcaagctttcaccagtttttaattctttgatggggtaaatttgagcaattttctcgacttgtcgacattcgttattaactgagcaggaatcaggagaggaacccggtcctctccacacagcccagcaggtacgccgcccatgtgcctgtggagaagagaggttcctgtggggcagacaggtgtggaccaagtagctgtgaaatttcttctgaagaaaacacacaaggaggaagcgagtgagctcagtggaggaggggcgctaccccaggggacgtccccatgcatgggcttgtgaacctcgaatatgtgagacggtctcagtcaatttagaaagtttattttgccaaggttgaggacgcacgcccgtgacacagcctcaggaggtcttgacatgtgccaaaggtggtcgggacacagcttgcttttatacattttagggagacaggagacatcaatatatgtaagatgaacgttggttccctcgggaaaggcgggacaactcgaagcagggagggggcttccaggtcacagagagcctacgactagatttgcatctttacgtcctgcgcggaggctgctacacacatgcagaagtcatgctggtggcctggacattgaagggagagaagtggatttgggagacatttaggagaaagaatcccagtcttcttagagaacccagtgactttttgcaccttaaatctgtgaaatcctcatgttttcttctgccgtatccatagttcaaacaaagatgaggcaaagctagatgcattcctgaaggaacccaagaaattcctctctttatttctctggaatgaaatgaattctctagacgaccagttctaaccttcaaaaaccaaacctgtttgtgagatctccttcaaatactactgtagaccccagtgtttattcattaaattttaaaatatttgttttatttggaatcca

SEQ ID NO: 279559 - DNA, 1224 bp, Homo sapiens
agggccgcagggagtgcgcatgcggccgagtgcgggactggggctcctggctgtgggtgtggtactgaggcttcagcgggtgccgcccgcctagagggagtggagcggtgagcacgtcaggggtggggggcgcaggtcaagctttcaccagtttttaattctttgatggggtaaatttgagcaattttctcgacttgtcgacattcgttattaactgagcaggaatcaggagaggaacccggtcctctccacacagcccagcagagagcctacgactagatttgcatctttacgtcctgcgcggaggctgctacacacatgcagaagtcatgctggtggcctggacattgaagggagagaagtggatttgggagacatttaggagatggcaccgaaagcgaaggaagctcctgctcctcctaaagccgaagccaaagcgaaggctttaaaggccaagaaggcagtgttgaaaggtgtccgcagccacacgcaaaaaagaggatccgcatgtcactcaccttcaggcggcccaagacactgcgactccggaggcagcccagatatcctcagaagagcacccccaggagaaacaagcttggccactatgctatcatcaagtttccgctgaccactgagtcggccgtgaagaagatagaagaaaacaacacgcttgtgttcactgtggatgttaaagccaacaagcaccagatcagacaggctgtgaagaagctctatgacagtgatgtggccaaggtcaccaccctgatttgtcctgataaagagaagaaggcatatgttcgacttgctcctgattatgatgctttcaatgttgtaacaaaattgggatcacctaaactgagtccagctggctaactctaaatatatgtgtatcttttcagcataaaaaaataatgtttttcataagaatgacaacttaattagaatcaaatctataagctttaagattttacgtttctagtaagtataatattagcttatttgactagaactcaagcagaataggaatttatgcttgttttatattcaataatgataattttgaagatatagttgttttattacaccaaaaatactatattaatcttatttaactaagttttatccaaatcatgttaacttaagaaacatttgatcagttcctatatttctaggagtttggtgaatatttatttataaatgcttatttttttccaagccaagtta

SEQ ID NO: 279560 - DNA, 524 bp, Homo sapiens
agggccgcagggagtgcgcatgcggccgagtgcgggactggggctcctggctgtgggtgtggtactgaggcttcagcgggtgccgcccgcctagagggagtggagcgagagcctacgactagatttgcatctttacgtcctgcgcggaggctgctacacacatgcagaagtcatgctggtggcctggacattgaagggagagaagtggatttgggagacatttaggagaaagaatcccagtcttcttagagaacccagtgactttttgcaccttaaatctgtgaaatcctcatgttttcttctgccgtatccatagttcaaacaaagatgaggcaaagctagatgcattcctgaaggaacccaagaaattcctctctttatttctctggaatgaaatgaattctctagacgaccagttctaaccttcaaaaaccaaacctgtttgtgagatctccttcaaatactactgtagaccccagtgtttattcattaaattttaaaatatttgttttatttggaatcca

SEQ ID NO: 279561 - DNA, 667 bp, Homo sapiens
agggccgcagggagtgcgcatgcggccgagtgcgggactggggctcctggctgtgggtgtggtactgaggcttcagcgggtgccgcccgcctagagggagtggagcgggagacaggagacatcaatatatgtaagatgaacgttggttccctcgggaaaggcgggacaactcgaagcagggagggggcttccaggtcacagagagcctacgactagatttgcatctttacgtcctgcgcggaggctgctacacacatgcagaagtcatgctggtggcctggacattgaagggagagaagtggatttgggagacatttaggaggaacagtaagaggaccttgtgcatgaataatttgtttccacactacagaaaagaatcccagtcttcttagagaacccagtgactttttgcaccttaaatctgtgaaatcctcatgttttcttctgccgtatccatagttcaaacaaagatgaggcaaagctagatgcattcctgaaggaacccaagaaattcctctctttatttctctggaatgaaatgaattctctagacgaccagttctaaccttcaaaaaccaaacctgtttgtgagatctccttcaaatactactgtagaccccagtgtttattcattaaattttaaaatatttgttttatttggaatcca

SEQ ID NO: 279562 - DNA, 922 bp, Homo sapiens
ggggcgatcagaagcaggtcacacagcctgtttcctgttttcaaacggggaacttagaaagtggcagcccctcggcttgtcgccggagctgagaaccaagagctcgaaggggccatatgacactcctcccggacccctggacacacacagccctggagactggagccttggagcatggcaagtccagagcaccctgggagccctggctgcatgggacccataacccagtgcacggcaaggacccagcaggaagcaccagccactggccccgacctcccgcacccaggacctgacgggcacttagacacacacagtggcctgagctccaactccagcatgaccacgcgggagcttcagcagtactggcagaaccagaaatgccgctggaagcacgtcaaactgctctttgagatcgcttcagctcgcatcgaggagagaaaagtctctaagtttgtgatggggaaatcaaggcctggagagatgacttatccagggtcacgtggcgagacagggacagcaccagaaccagacccgagatgtccacgtcaaagtgacatgctctgagaggcagcacacacagaataaccctgcatccaaattccaggaagctcttaggggtcatccagctgggcctaggggtgcagggtcagtgctgaggcctgggcagggccgctagcctccctgagctttctggcttcaggctgggaggcacagttcagggtggactgtgaccccttggcctagaatgcccttagctctgctctctagtggctgtccccatagctggaactctgttttggagtggcaaaaccagttccacctgctggtaggggtaggttggctcccaacacatccccagcaggcctctcttgggctcaaaagccaagctgtgcccagccacgtctccaaatgcttcctggcc

SEQ ID NO: 279563 - DNA, 1355 bp, Homo sapiens
ggggcgatcagaagcaggtcacacagcctgtttcctgttttcaaacggggaacttagaaagtggcagcccctcggcttgtcgccggagctgagaaccaagagctcgaaggggccatatgacactcctcccggacccctggacacacacagccctggagactggagccttggagcatggcaagtccagagcaccctgggagccctggctgcatgggacccataacccagtgcacggcaaggacccagcaggaagcaccagccactggccccgacctcccgcacccaggacctgacgggcacttagacacacacagtggcctgagctccaactccagcatgaccacgcgggagcttcagcagtactggcagaaccagaaatgccgctggaagcacgtcaaactgctctttgagatcgcttcagctcgcatcgaggagagaaaagtctctaagtttgtggtgtaccaaatcatcgtcatccagactgggagctttgacaacaacaaggccgtcctggaacggcgctattccgacttcgcgaagctccagaaagcgctgctgaagacgttcagggaggagatcgaagacgtggagtttcccaggaagcacctgactgggaacttcgctgaggagatgatctgtgagcgtcggcgcgccctgcaggagtacctgggcctgctctacgccatccgctgcgtgcgccgctcccgggagttcctggacttcctcacgcggccggagctgcgcgaggctttcggctgcctgcgggccggccagtacccgcgcgccctggagctgctgctgcgcgtgctgccgctgcaggagaagctcaccgcccactgccctgcggccgccgtcccggccctgtgcgccgtgctgctgtgccaccgcgacctcgaccgccccgccgaggccttcgcggccggagagagggccctgcagcgcctgcaggcccgggagggccatcgctactatgcgcctctgctggacgccatggtccgcctggcctacgcgctgggcaaggacttcgtgactctgcaggagaggctggaggagagccagctccggaggcccacgccccgaggcatcaccctgaaggagctcactgtgcgagaatacctgcactgagccggcctgggaccccgcagggacgctggagatttggggtcaccatggctcacagtgggctgtttggggttctttttttttatttttccttttcttttttgttatttgagacagtcttgctctgtcacccagactgaagtgcagtggctcaattatgtctcactgcagcctcaaactcctgggcacaagcaatcctcccctcgtgcgaattcttgggctcgagggcaaaa

SEQ ID NO: 279564 - DNA, 897 bp, Homo sapiens
ggggcgatcagaagcaggtcacacagcctgtttcctgttttcaaacggggaacttagaaagtggcagcccctcggcttgtcgccggagctgagaaccaagagctcgaaggggccatatgacactcctcccggacccctggacacacacagccctggagactggagccttggagcatggcaagtccagagcaccctgggagccctggctgcatgggacccataacccagtgcacggcaaggacccagcaggaagcaccagccactggccccgacctcccgcacccaggacctgacgggcacttagacacacacagtggcctgagctccaactccagcatgaccacgcgggagcttcagcagtactggcagaaccagaaatgccgctggaagcacgtcaaactgctctttgagatcgcttcagctcgcatcgaggagagaaaagtctctaagtttgtggctccggctcctgacgccacaccctgatatcaagaccctcagatggagcgagcgttctgggctggtcgaagcctgaagccgcagtatgtccttgagtgggtccccccctacccatctagctgttgcccccatggtaagatcaagaaaatgccctcccctccaaaagtccccacgccgagccctcatctgtcagctcccaggctcggccccctcactagctccaggctgggaggcacagttcagggcagactgtggcccctcagcatagcatggacttagctctgctctctagtggctgtccccatagctagaactctgttttggagcagcaaaactagttccacctgctggtagggctaagttgactcccaacatgtccccagcgtgttggtgttgggaaccttgatctagctgctcgttttctcagtaaccaaagatccc

SEQ ID NO: 279565 - DNA, 484 bp, Homo sapiens
tcagggcatgctttacaccggcctggttaactttactctgggtgtgctccgtccgccgcagcccccgccgggaggtggccacagctctctctggttgcgccctaggtgtaccaaatcatcgtcatccagactgggagctttgacaacaacaaggccgtcctggaacggcgctattccgacttcgcgaagctccagaaagcgctgctgaagacgttcagggaggagatcgaagacgtggagtttcccaggaagcacctgactgggaacttcgctgaggagatgatctgtgagcgtcggcgcgccctgcaggagtacctgggcctgctctacgccatccgctgcgtgcgccgctcccgggagttcctggacttcctcacgcggccggagctgcgcgaggctttcggctgcctgcgggccggccagtacccgcgcgccctggagctgctgctgcgcgtgctgccgctgcaggagaagctcaccgccc

SEQ ID NO: 279566 - DNA, 892 bp, Homo sapiens
ccgcctcccgaggccccgggtgagaaacgggggagacgcgaggggcggagcttgtggaggaagatggctgccgcctgggggtcgtccctaacggccgcgacgcagagagcggtcactccctggccgaggggcaggctcctcacggcctccctgggaccccaggcgcgtcgggaggcgtcgtcctccagccccgaggccggcgaagggcagatccgcctcacagacagttgcgtccagaggcttttggaaatcaccgaagggtcagaattcctcaggctgcaagtggagggaggtggatgctccggattccaatacaaattttcactggatacagttatcaaccccgacgacagggtatttgaacagggtggggcaagagtggtggttgactctgatagcttggccttcgtgaaaggggcccaggtggacttcagccaagaactgatccgaagctcatttcaagtgttgaacaatcctcaagcacagcaaggctgctcctgtgggtcatctttctctatcaaactttgatgtgatgactggtgactctgggattgtcaccagttgtaccaatttgaagaacctggaattagtagaattctagaagtttacttctaatcatgtccctctcaattttatttcccgcagtccaggagtgttatgttttgccactattattttcagaatgtgaagattttactcttggcttaatttttccctccactcagtgctaaggctgagcctccagatgctgttacctcagatttaatcactggttgaaactccgtataatctgtagagcctccatggctctaaaatttggaattaacttctcttgccttaagagctgcttgtacatatgtggatagctatgtataaaagcttcattttaaag

SEQ ID NO: 279567 - DNA, 726 bp, Homo sapiens
ccgcctcccgaggccccgggtgagaaacgggggagacgcgaggggcggagcttgtggaggaagatggctgccgcctgggggtcgtccctaacggccgcgacgcagagagcggtcactccctggccgaggggcagtccggattccaatacaaattttcactggatacagttatcaaccccgacgacagggtatttgaacagggtggggcaagagtggtggttgactctgatagcttggccttcgtgaaaggggcccaggtggacttcagccaagaactgatccgaagctcatttcaagtgttgaacaatcctcaagcacagcaaggctgctcctgtgggtcatctttctctatcaaactttgatgtgatgactggtgactctgggattgtcaccagttgtaccaatttgaagaacctggaattagtagaattctagaagtttacttctaatcatgtccctctcaattttatttcccgcagtccaggagtgttatgttttgccactattattttcagaatgtgaagattttactcttggcttaatttttccctccactcagtgctaaggctgagcctccagatgctgttacctcagatttaatcactggttgaaactccgtataatctgtagagcctccatggctctaaaatttggaattaacttctcttgccttaagagctgcttgtacatatgtggatagctatgtataaaagcttcattttaaag

SEQ ID NO: 279568 - DNA, 1122 bp, Homo sapiens
  misc_feature (897)..(897): n is a, c, g, or t
  misc_feature (901)..(902): n is a, c, g, or t
  misc_feature (908)..(908): n is a, c, g, or t
ccgcctcccgaggccccgggtgagaaacgggggagacgcgaggggcggagcttgtggaggaagatggctgccgcctgggggtcgtccctaacggccgcgacgcagagagcggtcactccctggccgaggggcaggctcctcacggcctccctgggaccccaggcgcgtcgggaggcgtcgtcctccagccccgaggccggcgaagggcagatccgcctcacagacagttgcgtccagaggcttttggaaatcaccgaagggtcagaattcctcaggctgcaagtggagggaggtggatgctccggattccaatacaaattttcactggatacagttatcaaccccgacgacagggtatttgaacagggtggggcaagagtggtggttgactctgatagcttggccttcgtgaaaggggcccaggtggacttcagccaagaactgatccgaagctcatttcaagtgttgaacaatcctcaagcacagcaaggctgctcctgtgggtcatctttctctatcaaactttgatgtgatgactggtgactctgggattgtcaccagttgtaccaatttgaagaacctggaattagtagaattctagaagtttacttctaatcatgtccctctcaattttatttcccgcagtccaggagtgttatgttttgccactattattttcagaatgtgaagattttactcttggcttaatttttccctccactcagtgctaaggctgagcctccagatgctgttacctcagatttaatcactggttgaaactccgtataatctgtagagcctccatggctctaaaatttggaattaacttctcttgccttaagagctgcttgtacatatgtggatagctatgtataaaagcttcattttaaaggtaanaaannaaaaanaaaaaaaaaaaaaaaccttgtcggccgcctgggcccagtcacttctagactcaagcaagttaatgcatgcggccgaaattcggctaactggcccaatccgcccttagtgagtcgaatacattccactgcccgcggtttaacaacgcggaactggaaaaccctgccgtcaccaactaatcgccttgagaaatccccttttgcagctgggaatacc

SEQ ID NO: 279569 - DNA, 1752 bp, Homo sapiens
ccgcctcccgaggccccgggtgagaaacgggggagacgcgaggggcggagcttgtggaggaagatggctgccgcctgggggtcgtccctaacggccgcgacgcagagagcggtcactccctggccgaggggcaggctcctcacggcctccctgggaccccaggcgcgtcgggaggcgtcgtcctccagccccgaggccggcgaagggcagatccgcctcacagacagttgcgtccagaggcttttggaaatcaccgaagggtcagaattcctcaggctgcaagtggagggaggtggatgctccggattccaatacaaattttcactggatacagttatcaaccccgacgacagggtatttgaacagggtggggcaagagtggtggttgactctgatagcttggccttcgtgaaaggggcccaggtggacttcagccaagaactgatccgaagctcatttcaagtgttgaacaatcctcaagcacagcaaggctgctcctgtgggtcatctttctctatcaaactttgatgtgatgactggtgactctgggattgtcaccagttgtaccaatttgaagaacctggaattagtagaattctagaagtttacttctaatcatgtccctctcaattttatttcccgcagtccaggagtgttatgttttgccactattattttcagaatgtgaagattttactcttggcttaatttttccctccactcagtgctaaggctgagcctccagatgctgttacctcagatttaatcactggttgaaactccgtataatctgtagagcctccatggctctaaaatttggaattaacttctcttgccttaagagctgcttgtacatatgtggatagctatgtataaaagcttcattttaaagaaggttcttattgtgttgtggatcagggtcacagattgggtagcttggacaccagttattagaggatgagaaaagtaaatgaaatgttctctttttcacttcaccctgccagaatgtgccacttgacttatctttattgtctatgcaacccatttgccacttcctgtttgataggacagatacattttactctcatgctcgtggatctgctatgagtcataaaaccaagagcccgttacccagaaaacttggaccaaaccctcactgatagtgaattatttcaaaaatagcctccctactcatacagacattttaagattctgtgacaatttaatgactgaatctttttaggatatgttgctttacctgccttctgttgtaaaatggctctggtctcatgcacagcaggaagtgatccctttattgttataggtaatagattcttgggaacctttttttagattgggttaccagatgaaatgtaggatgcccagttaaatttgaatttcaggtaaataattttttagtatgcatatgtctcaaatattgcatatactaaaaattactatttgaaattcaaatttaactcatatttttatttgctgaccttggcaactctgctttagggtcaccaaacagcttttaaaatcacaaattctagtgaattaaagtacttgtgtaggtgtggcacttaaataggcttcggagcttgaaataatcctgttagagtactgtggagctgtgtggacagacagtgaaagaaatctaccaccatcaccacaccgaatgatttattaatactgatgttggagaaactacaaccaagttgattctggaagagttactggttaaatccatct

SEQ ID NO: 279570 - DNA, 895 bp, Homo sapiens
ccgcctcccgaggccccgggtgagaaacgggggagacgcgaggggcggagcttgtggaggaagatggctgccgcctgggggtcgtccctaacggccgcgacgcagagagcggtcactccctggccgaggggcaggctcctcacggcctccctgggaccccaggcgcgtcgggaggcgtcgtcctccagccccgaggccggcgaagggcagatccgcctcacagacagttgcgtccagaggcttttggaaatcaccgaagggtcagaattcctcaggctgcaagtggagggaggtggatgctccggattccaatacaaattttcactggatacagttatcaaccccgacgacagggtatttgaacagggtggggcaagagtggtggttgactctgatagcttggccttcgtgaaaggggcccaggtggacttcagccaagaactgatccgaagctcatttcaagtgttgaacaatcctcaagcacagcaaggctgctcctgtgggtcatctttctctatcaaactttgatgtgatgactggtgactctgggattgtcaccagttgtaccaatttgaagaacctggaattagtagaattctagaagtttacttctaatcatgtccctctcaattttatttcccgcagtccaggagtgttatgttttgccactattattttcagaatgtgaagattttactcttggcttaatttttccctccactcagtgctaaggctgagcctccagatgctgttacctcagatttaatcactggttgaaactccgtataatctgtagagcctccatggctctaaaatttggaattaacttctcttgccttaaaatgaagcttttatacatagctatccacataagtacaagcagctcttaaggcag

SEQ ID NO: 279571 - DNA, 1772 bp, Homo sapiens
tacaggcgaggagccaaggaccagactgtggaacactgtgggtactagcggacgggccgtgacccggatgaagcagaggggcgcctgagttcccgtcacctaagcgacagcctgcgagcctctcttcccctcccccacccaagccccagcccggcctccgctccggccgccgccaccgcccctgttttgtttccatggcgacaggcggcgcagggcccgctccaaacataacgcgctgtggaaaacatgctgctcgggggacccccccgcagtccccgctcggggacgagccccaaggggccctggagcagtacaggccacgtgcagtttggcaagagcccccagacctggcccaggcgcacaagaccccgctctccagagcctgccgcgccttcaggggttcggggctccacttggacgaggcgccgtgactctccgaggcgcgccgggccgacagcgctgtcccgctacgtgggccacctctggatgggccggcggccgccctcccccgaggcccgcggcccagtcccccgcagttcagctgccagtcgggccagaagaagcctcgcctccccggggatctccccaggccccctgaccgcaacgatcggaggggcggtggcggggggcgggcccaggcaggggagggcagaagcacacaaggaagtgtttccgggacagagggtgggcaagatggcggcgcccatggagctgttctgctggtcagggggctgggggctgccgtcagtggacctggacagcctggccgtgctgacctatgccagatttactggtgctccactgaaggtacacaagatcagcaacccctggcagagcccttcaggaactctgcctgcccttcggaccagtcatggagaggtcatctcagttccacacaagatcatcacccaccttcgaaaagagaagtacaatgctgattatgatctgtcagctcggcaaggggcagacaccctggccttcatgtctctcctggaggagaagttgctcccggtgctggtacatactttttggatagacaccaagaactacgtggaagtgacccggaagtggtatgcagaggctatgccctttcccctcaacttcttcctgcctggccgcatgcagcggcagtacatggaacggctacagctgctgactggggagcacaggcctgaggacgaggaagagctggagaaggagctgtaccgagaggctcgggagtgtctgaccctgctctctcagcgcctgggctctcaaaagttcttctttggagatgcccctgcctccttggacgccttcgtcttcagctacttggccctgctgctgcaggcaaagctgcccagtgggaagctgcaggtccacctgcgtgggctgcacaacctctgtgcctattgtacccacattctcagtctctacttcccctgggatggagctgaggtaccaccgcaacgccagacaccagcaggcccagagactgaggaggagccataccggcgccggaaccagatcctatctgtgctggcaggactggcagccatggtgggctacgccttgctcagcggcattgtctccatccagcgggcaacgcctgctcgggccccaggcacccggaccctgggcatggctgaggaggatgaagaggaatgatttgtcctcacgctcccaagactggtttttctactctcatgcattccagaggcccccgtgcctcctcgttgttggtacagccggacacggggtgctgccacccagaataaagccactcacactga

SEQ ID NO: 279572 - DNA, 1679 bp, Homo sapiens
tacaggcgaggagccaaggaccagactgtggaacactgtgggtactagcggacgggccgtgacccggatgaagcagaggggcgcctgagttcccgtcacctaagcgacagcctgcgagcctctcttcccctcccccacccaagccccagcccggcctccgctccggccgccgccaccgcccctgttttgtttccatggcgacaggcggcgcagggcccgctccaaacataacgcgctgtggaaaacatgctgctcgggggacccccccgcagtccccgctcggggacgagccccaaggggccctggagcagtacaggccacgtgcagtttggcaagagcccccagacctggcccaggcgcacaagaccccgctctccagagcctgccgcgccttcaggggttcggggctccacttggacgaggcgccgtgactctccgaggcgcgccgggccgacagcgctgtcccgctacgtgggccacctctggatgggccggcggccgccctcccccgaggcccgcggcccagtcccccgcagttcagctgccagtcgggccagaagaagcctcgcctccccggggatctccccaggccccctgaccgcaacgatcggaggggcggtggcggggggcgggcccaggcaggggagggcagaagcacacaaggaagtgtttccgggacagagggtgggcaagatggcggcgcccatggagctgttctgctggtcagggggctgggggctgccgtcagtggacctggacagcctggccgtgctgacctatgccagatttactggtgctccactgaaggtacacaagatcagcaacccctggcagagcccttcaggaactctgcctgcccttcggaccagtcatggagaggtcatctcagttccacacaagatcatcacccaccttcgaaaagaggtacatactttttggatagacaccaagaactacgtggaagtgacccggaagtggtatgcagaggctatgccctttcccctcaacttcttcctgcctggccgcatgcagcggcagtacatggaacggctacagctgctgactggggagcacaggcctgaggacgaggaagagctggagaaggagctgtaccgagaggctcgggagtgtctgaccctgctctctcagcgcctgggctctcaaaagttcttctttggagatgcccctgcctccttggacgccttcgtcttcagctacttggccctgctgctgcaggcaaagctgcccagtgggaagctgcaggtccacctgcgtgggctgcacaacctctgtgcctattgtacccacattctcagtctctacttcccctgggatggagctgaggtaccaccgcaacgccagacaccagcaggcccagagactgaggaggagccataccggcgccggaaccagatcctatctgtgctggcaggactggcagccatggtgggctacgccttgctcagcggcattgtctccatccagcgggcaacgcctgctcgggccccaggcacccggaccctgggcatggctgaggaggatgaagaggaatgatttgtcctcacgctcccaagactggtttttctactctcatgcattccagaggcccccgtgcctcctcgttgttggtacagccggacacggggtgctgccacccagaataaagccactcacactga

SEQ ID NO: 279573 - DNA, 1973 bp, Homo sapiens
tacaggcgaggagccaaggaccagactgtggaacactgtgggtactagcggacgggccgtgacccggatgaagcagaggggcgcctgagttcccgtcacctaagcgacagcctgcgagcctctcttcccctcccccacccaagccccagcccggcctccgctccggccgccgccaccgcccctgttttgtttccatggcgacaggcggcgcagggcccgctccaaacataacgcgctgtggaaaacatgctgctcgggggacccccccgcagtccccgctcggggacgagccccaaggggccctggagcagtacaggccacgtgcagtttggcaagagcccccagacctggcccaggcgcacaagaccccgctctccagagcctgccgcgccttcaggggttcggggctccacttggacgaggcgccgtgactctccgaggcgcgccgggccgacagcgctgtcccgctacgtgggccacctctggatgggccggcggccgccctcccccgaggcccgcggcccagtcccccgcagttcagctgccagtcgggccagaagaagcctcgcctccccggggatctccccaggccccctgaccgcaacgatcggaggggcggtggcggggggcgggcccaggcaggggagggcagaagcacacaaggaagtgtttccgggacagagggtgggcaagatggcggcgcccatggagctgttctgctggtcagggggctgggggctgccgtcagtggacctggacagcctggccgtgctgacctatgccagatttactggtgctccactgaaggtacacaagatcagcaacccctggcagagcccttcaggaactctgcctgcccttcggaccagtcatggagaggtcatctcagttccacacaagatcatcacccaccttcgaaaagagaagtacaatgctgattatgatctgtcagctcggcaaggggcagacaccctggccttcatgtctctcctggaggagaagttgctcccggtgctggtacatactttttggatagacaccaagaactacgtggaagtgacccggaagtggtatgcagaggctatgccctttcccctcaacttcttcctgcctggccgcatgcagcggcagtacatggaacggctacagctgctgactggggagcacaggcctgaggacgaggaagagctggagaaggagctgtaccgagaggctcgggagtgtctgaccctgctctctcagcgcctgggctctcaaaagttcttctttggagatgcccctgcctccttggacgccttcgtcttcagctacttggccctgctgctgcaggcaaagctgcccagtgggaagctgcaggtccacctgcgtgggctgcacaacctctgtgcctattgtacccacattctcagtctctacttcccctgggatggagctgaggtaccaccgcaacgccagacaccagcaggcccagagactgaggaggagccataccggcgccggaaccagatcctatctgtgctggcaggactggcagccatggtgggctacgccttgctcagcggcattgtctccatccagcgggcaacgcctgctcgggccccaggcacccggaccctgggcatggctgaggaggatgaagaggaatgatttgtcctcacgctcccaagactggtttttctactctcatgcattccagaggcccccgtgcctcctcgttgttggtacagccggacacggggtgctgccacccagaataaagccactcacactgaaaaaaaaaaaaaccagcgcacacccacacccctacttaaccaatgcgcacaccaaacacacggtccccgcgcgcggggacgggcgacacgccacaccacacaagacgtgcgcgactcaacgcgcggcacctcccccgcgcaccatcttacgcggccacacccaagaaagtcgctcccccacaaacggcgagcgggggcgca

SEQ ID NO: 279574 - DNA, 2686 bp, Homo sapiens
tacaggcgaggagccaaggaccagactgtggaacactgtgggtactagcggacgggccgtgacccggatgaagcagaggggcgcctgagttcccgtcacctaagcgacagcctgcgagcctctcttcccctcccccacccaagccccagcccggcctccgctccggccgccgccaccgcccctgttttgtttccatggcgacaggcggcgcagggcccgctccaaacataacgcgctgtggaaaacatgctgctcgggggacccccccgcagtccccgctcggggacgagccccaaggggccctggagcagtacaggccacgtgcagtttggcaagagcccccagacctggcccaggcgcacaagaccccgctctccagagcctgccgcgccttcaggggttcggggctccacttggacgaggcgccgtgactctccgaggcgcgccgggccgacagcgctgtcccgctacgtgggccacctctggatgggccggcggccgccctcccccgaggcccgcggcccagtcccccgcagttcagctgccagtcgggccagaagaagcctcgcctccccggggatctccccaggccccctgaccgcaacgatcggaggggcggtggcggggggcgggcccaggcaggggagggcagaagcacacaaggaagtgtttccgggacagagggtgggcaagatggcggcgcccatggagctgttctgctggtcagggggctgggggctgccgtcagtggacctggacagcctggccgtgctgacctatgccagatttactggtgctccactgaaggtacacaagatcagcaacccctggcagagcccttcaggaactctgcctgcccttcggaccagtcatggagaggtcatctcagttccacacaagatcatcacccaccttcgaaaagaggtaggtgacttggatagagggggctgccagtgagagaagttcagtcaattctatacaatacacatttattgagcaccagatatatgccatgctagatgcaggtgacccagagcatcaaggagcaacagtcttgtggcagagacacacacaatgtcactgtgatgtattaaagcagtcggcaagagatgaaacttagggcactgtgaggcagggagggagaggagcacaggctgaaggagagtggaagacagcagttggcctctgatggtgggactggagagagatttctaagggccacttcctgttttcagggactaggttgggctagatatggggctcaggatggacaaggcttagagccaggttggagaagatgaaagagcattactagaggagtggggaggcctaggctatgctctttactctgccattgactatgtgatctcgggcaggccatgtaacctctcagggctgtgcactcccttatttgtaaaactagagggctgggccagcatgttttccaagggttcttctagcattgacggtcaggttccaagagggaacagtgtcagaagtaggacactcttcctcatttctaacttcccaaaggttgaggacctggggaattaattgagaggcctggaaagagaggatccagataaaagccaaagttcctggcagagccgaggccactgccctgattgcttaggtgtgaacagagcttttccagtttccaaagtattctaaattatttcctaacacaggggcattcagagaaagagattcttacccccattccacaggggagaaactgaggcttagggagatttaaggatcatgctgaagaggttatctggggacaaagcttactcaggatgtggagggggatgctgaggaacagggactggagcctgaagtacaatgctgattatgatctgtcagctcggcaaggggcagacaccctggccttcatgtctctcctggaggagaagttgctcccggtgctggtacatactttttggatagacaccaagaactacgtggaagtgacccggaagtggtatgcagaggctatgccctttcccctcaacttcttcctgcctggccgcatgcagcggcagtacatggaacggctacagctgctgactggggagcacaggcctgaggacgaggaagagctggagaaggagctgtaccgagaggctcgggagtgtctgaccctgctctctcagcgcctgggctctcaaaagttcttctttggagatgcccctgcctccttggacgccttcgtcttcagctacttggccctgctgctgcaggcaaagctgcccagtgggaagctgcaggtccacctgcgtgggctgcacaacctctgtgcctattgtacccacattctcagtctctacttcccctgggatggagctgaggtaccaccgcaacgccagacaccagcaggcccagagactgaggaggagccataccggcgccggaaccagatcctatctgtgctggcaggactggcagccatggtgggctacgccttgctcagcggcattgtctccatccagcgggcaacgcctgctcgggccccaggcacccggaccctgggcatggctgaggaggatgaagaggaatgatttgtcctcacgctcccaagactggtttttctactctcatgcattccagaggcccccgtgcctcctcgttgttggtacagccggacacggggtgctgccacccagaataaagccactcacactga

SEQ ID NO: 279575 - DNA, 2189 bp, Homo sapiens
tacaggcgaggagccaaggaccagactgtggaacactgtgggtactagcggacgggccgtgacccggatgaagcagaggggcgcctgagttcccgtcacctaagcgacagcctgcgagcctctcttcccctcccccacccaagccccagcccggcctccgctccggccgccgccaccgcccctgttttgtttccatggcgacaggcggcgcagggcccgctccaaacataacgcgctgtggaaaacatgctgctcgggggacccccccgcagtccccgctcggggacgagccccaaggggccctggagcagtacaggccacgtgcagtttggcaagagcccccagacctggcccaggcgcacaagaccccgctctccagagcctgccgcgccttcaggggttcggggctccacttggacgaggcgccgtgactctccgaggcgcgccgggccgacagcgctgtcccgctacgtgggccacctctggatgggccggcggccgccctcccccgaggcccgcggcccagtcccccgcagttcagctgccagtcgggccagaagaagcctcgcctccccggggatctccccaggccccctgaccgcaacgatcggaggggcggtggcggggggcgggcccaggcaggggagggcagaagcacacaaggaagtgtttccgggacagagggtgggcaagatggcggcgcccatggagctgttctgctggtcagggggctgggggctgccgtcagtggacctggacagcctggccgtgctgacctatgccagatttactggtgctccactgaaggtacacaagatcagcaacccctggcagagcccttcaggaactctgcctgcccttcggaccagtcatggagaggtcatctcagttccacacaagatcatcacccaccttcgaaaagaggtaggtgacttggatagagggggctgccagtgagagaagttcagtcaattctatacaatacacatttattgagcaccagatatatgccatgctagatgcaggtgacccagagcatcaaggagcaacagtcttgtggcagagacacacacaatgtcactgtgatgtattaaagcagtcggcaagagatgaaacttagggcactgtgaggcagggagggagaggagcacaggctgaaggagagtggaagacagcagttggcctctgatggggcattcagagaaagagattcttacccccattccacaggggagaaactgaggcttagggagatttaaggatcatgctgaagaggttatctggggacaaagcttactcaggatgtggagggggatgctgaggaacagggactggagcctgaagtacaatgctgattatgatctgtcagctcggcaaggggcagacaccctggccttcatgtctctcctggaggagaagttgctcccggtgctggtacatactttttggatagacaccaagaactacgtggaagtgacccggaagtggtatgcagaggctatgccctttcccctcaacttcttcctgcctggccgcatgcagcggcagtacatggaacggctacagctgctgactggggagcacaggcctgaggacgaggaagagctggagaaggagctgtaccgagaggctcgggagtgtctgaccctgctctctcagcgcctgggctctcaaaagttcttctttggagatgcccctgcctccttggacgccttcgtcttcagctacttggccctgctgctgcaggcaaagctgcccagtgggaagctgcaggtccacctgcgtgggctgcacaacctctgtgcctattgtacccacattctcagtctctacttcccctgggatggagctgaggtaccaccgcaacgccagacaccagcaggcccagagactgaggaggagccataccggcgccggaaccagatcctatctgtgctggcaggactggcagccatggtgggctacgccttgctcagcggcattgtctccatccagcgggcaacgcctgctcgggccccaggcacccggaccctgggcatggctgaggaggatgaagaggaatgatttgtcctcacgctcccaagactggtttttctactctcatgcattccagaggcccccgtgcctcctcgttgttggtacagccggacacggggtgctgccacccagaataaagccactcacactga

SEQ ID NO: 279576 - DNA, 1987 bp, Homo sapiens
tacaggcgaggagccaaggaccagactgtggaacactgtgggtactagcggacgggccgtgacccggatgaagcagaggggcgcctgagttcccgtcacctaagcgacagcctgcgagcctctcttcccctcccccacccaagccccagcccggcctccgctccggccgccgccaccgcccctgttttgtttccatggcgacaggcggcgcagggcccgctccaaacataacgcgctgtggaaaacatgctgctcgggggacccccccgcagtccccgctcggggacgagccccaaggggccctggagcagtacaggccacgtgcagtttggcaagagcccccagacctggcccaggcgcacaagaccccgctctccagagcctgccgcgccttcaggggttcggggctccacttggacgaggcgccgtgactctccgaggcgcgccgggccgacagcgctgtcccgctacgtgggccacctctggatgggccggcggccgccctcccccgaggcccgcggcccagtcccccgcagttcagctgccagtcgggccagaagaagcctcgcctccccggggatctccccaggccccctgaccgcaacgatcggaggggcggtggcggggggcgggcccaggcaggggagggcagaagcacacaaggaagtgtttccgggacagagggtgggcaagatggcggcgcccatggagctgttctgctggtcagggggctgggggctgccgtcagtggacctggacagcctggccgtgctgacctatgccagatttactggtgctccactgaaggtacacaagatcagcaacccctggcagagcccttcaggaactctgcctgcccttcggaccagtcatggagaggtcatctcagttccacacaagatcatcacccaccttcgaaaagaggtaggtgacttggatagagggggctgccagtgagagaagttcagtcaattctatacaatacacatttattgagcaccagatatatgccatgctagatgcaggtgacccagagcatcaaggagcaacagtcttgtggcagagacacacacaatgtcactgtgatgtattaaagcagtcggcaagagatgaaacttagggcactgtgaggcagggagggagaggagcacaggctgaaggagagtggaagacagcagttggcctctgatggtgggactggagagagatttctaagggccacttcctgttttcagggactaggttgggctagatatggggctcaggatggacaaggcttagagccaggttggagaagatgaaagagcattactagaggagtggggaggcctaggctatgctctttactctgccattgactatgtgatctcgggcaggccatgtaacctctcagggctgtgcactcccttatttgtaaaactagagggctgggccagcatgttttccaagggttcttctagcattgacggtcaggttccaagagggaacagtgtcagaagtaggacactcttcctcatttctaacttcccaaaggttgaggacctggggaattaattgagaggcctggaaagagaggatccagataaaagccaaagttcctggcagagccgaggccactgccctgattgcttaggtgtgaacagagcttttccagtttccaaagtattctaaattatttcctaacacaggggcattcagagaaagagattcttacccccattccacaggggagaaactgaggcttagggagatttaaggatcatgctgaagaggttatctggggacaaagcttactcaggatgtggagggggatgctgaggaacagggactggagcctgggaaggtagggcaggctgagaacctgggggtatgggtggaatgtgtatgtggtaatgaggagcgtccgaagtgcacataaagtacagctaatgatcccgaaggagggaccataagggaaaaagccgtgagggagcagctgtgaaaaacg

SEQ ID NO: 279577 - DNA, 1369 bp, Homo sapiens
aaagggtttgctgcaactgattttaagatgcatctccattttagagatgttaaaatgttttaaaaaatgtgtttcagatttagtgaaatatggcatgtgtttcagatttagtgaaatatggtatgcgtttcatagaacaatatctgatgtaactaaatacactgagcattagtgaaagtgtaagggcctcgaaaagagaagtacaatgctgattatgatctgtcagctcagcaaggggcagacaccctggccttcatgtctctcctggaggagaagttgatcccggtgctggtgagtgtgcccagacctcccagcatccatggccagccggggaggggacgggaacacacagacccacacagagactcaggagagcatggaggtcagaagcccaccttgaatcagacaggtgcactggctcagacctgcctgtttcttcctgcccacccaatccaggtacatactttttggatagacaccaagaactacgtagaagtgacccggaagtggtatgcagaggctatgccctttcccctcaacttcttcctgcctggccgcatgcagcggcagtacatggaacggctacagctgctgactggggagcacaggcctgaggacgaggaagagctggagaaggaggtagctctgagaccgggggctattgtatgagatgagccccaaggatgctggccaggaatgggagtgcttaggtgcagaggtggcactgttcccgcagctgcaagcctacctgtgtcgcccctacagctgtaccgagaggctcgggagtgtctgaccctgctctctcagcgcctgggctctcaaaagttcttctttggagatgcccctgcctccttggacgccttcgtcttcagctacttggccctgctgctgcaggcaaagctgcccagtgggaagctgcaggtccacctgcgtgggctgcacaacctctgtgcctattgtacccacattctcagtctctacttcccctgggatggagctgaggtaccaccgcaacgccagacaccagcaggcccagagactgaggaggagccataccggcgccggaaccagatcctatctgtgctggcaggactggcagccatggtgggctacgccttgctcagcggcattgtctccatccagcgggcaacgcctgctcgggccccaggcacccggaccctgggcatggctgaggaggatgaagaggaatgatttgtcctcacgctcccaagactggtttttctactctcatgcattccagaggcccccgtgcctcctcgttgttggtacagccggacacggggtgctgccacccagaataaagccactcacactgactgggctcaaacattttctcctttaagagctg

SEQ ID NO: 279578 - DNA, 1567 bp, Homo sapiens
tacaggcgaggagccaaggaccagactgtggaacactgtgggtactagcggacgggccgtgacccggatgaagcagaggggcgcctgagttcccgtcacctaagcgacagcctgcgagcctctcttcccctcccccacccaagccccagcccggcctccgctccggccgccgccaccgcccctgttttgtttccatggcgacaggcggcgcagggcccgctccaaacataacgcgctgtggaaaacatgctgctcgggggacccccccgcagtccccgctcggggacgagccccaaggggccctggagcagtacaggccacgtgcagtttggcaagagcccccagacctggcccaggcgcacaagaccccgctctccagagcctgccgcgccttcaggggttcggggctccacttggacgaggcgccgtgactctccgaggcgcgccgggccgacagcgctgtcccgctacgtgggccacctctggatgggccggcggccgccctcccccgaggcccgcggcccagtcccccgcagttcagctgccagtcgggccagaagaagcctcgcctccccggggatctccccaggccccctgaccgcaacgatcggaggggcggtggcggggggcgggcccaggcaggggagggcagaagcacacaaggaagtgtttccgggacagagggtgggcaagatggcggcgcccatggagctgttctgctggtcagggggctgggggctgccgtcagtggacctggacagcctggccgtgctgacctatgccagatttactggtgctccactgaaggtacacaagatcagcaacccctggcagagcccttcaggaactctgcctgcccttcggaccagtcatggagaggtcatctcagttccacacaagatcatcacccaccttcgaaaagaggtaggtgacttggatagagggggctgccagtgagagaagttcagtcaattctatacaatacacatttattgagcaccagatatatgccatgctagatgcaggtgacccagagcatcaaggagcaacagtcttgtggcagagacacacacaatgtcactgtgatgtattaaagcagtcggcaagagatgaaacttagggcactgtgaggcagggagggagaggagcacaggctgaaggagagtggaagacagcagttggcctctgatggtgggactggagagagatttctaagggccacttcctgttttcagggactaggttgggctagatatggggctcaggatggacaaggcttagagccagaagtacaatgctgattatgatctgtgctggcaggactggcagccatggtgggctacgccttgctcagcggcattgtctccatccagcgggcaacgcctgctcgggccccaggcacccggaccctgggcatggctgaggaggatgaagaggaatgatttgtcctcacgctcccaagactggtttttctactctcatgcattccagaggcccccgtgcctcctcgttgttggtacagccggacacggggtgctgccacccagaataaagccactcacactga

SEQ ID NO: 279579 - DNA, 247 bp, Homo sapiens
ctctgagccctgtgttgtccatttgtaaaatagaaatggtagtgactcccccttttttttcgagactaagatactaagtatagggaatggcacataaggtattcaataaatgttatttctcttcttgataccactgtgggggacatggctctgcctctctgacttctgcttccttccctgcagacctatgccagatttactggtgctccactgaaggtacacaagatcagcaacccctggcagagcc

SEQ ID NO: 279580 - DNA, 708 bp, Homo sapiens
gcagccaggcacaggaagggcctgaagagctgtggggcactgagtgtgccctttatgcagccctgggatagagccctattcagggccagctggcgccacctggggatctctccccataccaggtctagaactgtgtgtcctgtccttccctggtggccgcctgctgcccagagcccacctcccaaggctgactcttcctccagctccatctttaccccttctaccccagtggttctcctccatcccacccttctctctctgctccagccctgcctccttggacgccttcgtcttcagctacttggccctgctgctgcaggcaaagctgcccagtgggaagctgcaggtccacctgcgtgggctgcacaacctctgtgcctattgtacccacattctcagtctctacttcccctgggatggaggtaaggggcagatgggaggggcagccctggggagagtgggcagggatccaagaactagttctcctaacacaccttccttccttgaccctcagctgaggtaccaccgcaacgccagacaccagcaggcccagagactgaggaggagccataccggcgccggaaccagatcctatctgtgctggcaggactggcagccatggtgggctacgccttgctcagcggcattgtctccatccagcgggcaacgcctgctcgggccccaggcacccggaccctgggcatggct

SEQ ID NO: 279581 - DNA, 374 bp, Homo sapiens
agctgaggtaccaccgcaacgccagacaccagcaggcccagagactgaggaggagccataccggcgccggaaccagatcctatctgtgctggcaggactggcagccatggtgggctacgccttgctcagcggcattgtctccatccagcgggcaacgcctgctcgggccccaggcacccggaccctgggcatggctgaggaggatgaagaggaatgatttgtcctcacgctcccaagactggtttttctactctcatgcattccagaggcccccgtgcctcctcgttgttggtacagccggacacggggtgctgccacccagaataaagccactcacactgactgggctcaaacattttctcctttaagagctg

SEQ ID NO: 279582 - DNA, 1792 bp, Homo sapiens
tacaggcgaggagccaaggaccagactgtggaacactgtgggtactagcggacgggccgtgacccggatgaagcagaggggcgcctgagttcccgtcacctaagcgacagcctgcgagcctctcttcccctcccccacccaagccccagcccggcctccgctccggccgccgccaccgcccctgttttgtttccatggcgacaggcggcgcagggcccgctccaaacataacgcgctgtggaaaacatgctgctcgggggacccccccgcagtccccgctcggggacgagccccaaggggccctggagcagtacaggccacgtgcagtttggcaagagcccccagacctggcccaggcgcacaagaccccgctctccagagcctgccgcgccttcaggggttcggggctccacttggacgaggcgccgtgactctccgaggcgcgccgggccgacagcgctgtcccgctacgtgggccacctctggatgggccggcggccgccctcccccgaggcccgcggcccagtcccccgcagttcagctgccagtcgggccagaagaagcctcgcctccccggggatctccccaggccccctgaccgcaacgatcggaggggcggtggcggggggcgggcccaggcaggggagggcagaagcacacaaggaagtgtttccgggacagagggtgggcaagatggcggcgcccatggagctgttctgctggtcagggggctgggggctgccgtcagtggacctggacagcctggccgtgctgacctatgccagatttactggtgctccactgaaggtacacaagatcagcaacccctggcagagcccttcaggaactctgcctgcccttcggaccagtcatggagaggtcatctcagttccacacaagatcatcacccaccttcgaaaagagaagtacaatgctgattatgatctgtcagctcggcaaggggcagacaccctggccttcatgtctctcctggaggagaagttgctcccggtgctggtacatactttttggatagacaccaagaactacgtggaagtgacccggaagtggtatgcagaggctatgccctttcccctcaacttcttcctgcctggccgcatgcagcggcagtacatggaacggctacagctgctgactggggagcacaggcctgaggacgaggaagagctggagaaggagctgtaccgagaggctcgggagtgtctgaccctgctctctcagcgcctgggctctcaaaagttcttctttggagatgcccctgcctccttggacgccttcgtcttcagctacttggccctgctgctgcaggcaaagctgcccagtgggaagctgcaggtccacctgcgtgggctgcacaacctctgtgcctattgtacccacattctcagtctctacttcccctgggatggagctgaggtaccaccgcaacgccagacaccagcaggcccagagactgaggaggagccataccggcgccggaaccagatcctatctgtgctggcaggactggcagccatggtgggctacgccttgctcagcggcattgtctccatccagcgggcaacgcctgctcgggccccaggcacccggaccctgggcatggctgaggaggatgaagaggaatgatttgtcctcacgctcccaagactggtttttctactctcatgcattccagaggcccccgtgcctcctcgttgttggtacagccggacacggggtgctgccacccagaataaagccactcacactgactgggctcaaacattttctc

SEQ ID NO: 279583 - DNA, 1792 bp, Homo sapiens
tacaggcgaggagccaaggaccagactgtggaacactgtgggtactagcggacgggccgtgacccggatgaagcagaggggcgcctgagttcccgtcacctaagcgacagcctgcgagcctctcttcccctcccccacccaagccccagcccggcctccgctccggccgccgccaccgcccctgttttgtttccatggcgacaggcggcgcagggcccgctccaaacataacgcgctgtggaaaacatgctgctcgggggacccccccgcagtccccgctcggggacgagccccaaggggccctggagcagtacaggccacgtgcagtttggcaagagcccccagacctggcccaggcgcacaagaccccgctctccagagcctgccgcgccttcaggggttcggggctccacttggacgaggcgccgtgactctccgaggcgcgccgggccgacagcgctgtcccgctacgtgggccacctctggatgggccggcggccgccctcccccgaggcccgcggcccagtcccccgcagttcagctgccagtcgggccagaagaagcctcgcctccccggggatctccccaggccccctgaccgcaacgatcggaggggcggtggcggggggcgggcccaggcaggggagggcagaagcacacaaggaagtgtttccgggacagagggtgggcaagatggcggcgcccatggagctgttctgctggtcagggggctgggggctgccgtcagtggacctggacagcctggccgtgctgacctatgccagatttactggtgctccactgaaggtacacaagatcagcaacccctggcagagcccttcaggtacccagtatcccttgggggaactctgcctgcccttcggaccagtcatggagaggtcatctcagttccacacaagatcatcacccaccttcgaaaagagaagtacaatgctgattatgatctgtcagctcggcaaggggcagacaccctggccttcatgtctctcctggaggagaagttgctcccggtgctggtacatactttttggatagacaccaagaactacgtggaagtgacccggaagtggtatgcagaggctatgccctttcccctcaacttcttcctgcctggccgcatgcagcggcagtacatggaacggctacagctgctgactggggagcacaggcctgaggacgaggaagagctggagaaggagctgtaccgagaggctcgggagtgtctgaccctgctctctcagcgcctgggctctcaaaagttcttctttggagatgcccctgcctccttggacgccttcgtcttcagctacttggccctgctgctgcaggcaaagctgcccagtgggaagctgcaggtccacctgcgtgggctgcacaacctctgtgcctattgtacccacattctcagtctctacttcccctgggatggagctgaggtaccaccgcaacgccagacaccagcaggcccagagactgaggaggagccataccggcgccggaaccagatcctatctgtgctggcaggactggcagccatggtgggctacgccttgctcagcggcattgtctccatccagcgggcaacgcctgctcgggccccaggcacccggaccctgggcatggctgaggaggatgaagaggaatgatttgtcctcacgctcccaagactggtttttctactctcatgcattccagaggcccccgtgcctcctcgttgttggtacagccggacacggggtgctgccacccagaataaagccactcacactga

SEQ ID NO: 279584 - DNA, 2024 bp, Homo sapiens
tacaggcgaggagccaaggaccagactgtggaacactgtgggtactagcggacgggccgtgacccggatgaagcagaggggcgcctgagttcccgtcacctaagcgacagcctgcgagcctctcttcccctcccccacccaagccccagcccggcctccgctccggccgccgccaccgcccctgttttgtttccatggcgacaggcggcgcagggcccgctccaaacataacgcgctgtggaaaacatgctgctcgggggacccccccgcagtccccgctcggggacgagccccaaggggccctggagcagtacaggccacgtgcagtttggcaagagcccccagacctggcccaggcgcacaagaccccgctctccagagcctgccgcgccttcaggggttcggggctccacttggacgaggcgccgtgactctccgaggcgcgccgggccgacagcgctgtcccgctacgtgggccacctctggatgggccggcggccgccctcccccgaggcccgcggcccagtcccccgcagttcagctgccagtcgggccagaagaagcctcgcctccccggggatctccccaggccccctgaccgcaacgatcggaggggcggtggcggggggcgggcccaggcaggggagggcagaagcacacaaggaagtgtttccgggacagagggtgggcaagatggcggcgcccatggagctgttctgctggtcagggggctgggggctgccgtcagtggacctggacagcctggccgtgctgacctatgccagatttactggtgctccactgaaggtacacaagatcagcaacccctggcagagcccttcaggaactctgcctgcccttcggaccagtcatggagaggtcatctcagttccacacaagatcatcacccaccttcgaaaagaggtaggtgacttggatagagggggctgccagtgagagaagttcagtcaattctatacaatacacatttattgagcaccagatatatgccatgctagatgcaggtgacccagagcatcaaggagcaacagtcttgtggcagagacacacacaatgtcactgtgatgtattaaagcagtcggcaagagatgaaacttagggcactgtgaggcagggagggagaggagcacaggctgaaggagagtggaagacagcagttggcctctgatggtgggactggagagagatttctaagggccacttcctgttttcagggactaggttgggctagatatggggctcaggatggacaaggcttagagccaggttggagaagatgaaagagcattactagaggagtggggaggcctaggctatgctctttactctgccattgactatgtgatctcgggcaggccatgtaacctctcagggctgtgcactcccttatttgtaaaactagagggctgggccagcatgttttccaagggttcttctagcattgacggtcaggttccaagagggaacagtgtcagaagtaggacactcttcctcatttctaacttcccaaaggttgaggacctggggaattaattgagaggcctggaaagagaggatccagataaaagccaaagttcctggcagagccgaggccactgccctgattgcttaggtgtgaacagagcttttccagtttccaaagtattctaaattatttcctaacacaggggcattcagagaaagagattcttacccccattccacaggggagaaactgaggcttagggagatttaaggatcatgctgaagaggttatctggggacaaagcttactcaggatgtggagggggatgctgaggaacagggactggagcctggcctgctcgggccccaggcacccggaccctgggcatggctgaggaggatgaagaggaatgatttgtcctcacgctcccaagactggtttttctactctcatgcattccagaggcccccgtgcctcctcgttgttggtacagccggacacggggtgctgccacccagaataaagccactcacactga

SEQ ID NO: 279585 - DNA, 1052 bp, Homo sapiens
aaagggtttgctgcaactgattttaagatgcatctccattttagagatgttaaaatgttttaaaaaatgtgtttcagatttagtgaaatatggcatgtgtttcagatttagtgaaatatggtatgcgtttcatagaacaatatctgatgtaactaaatacactgagcattagtgaaagtgtaagggcctcgaaaagagaagtacaatgctgattatgatctgtcagctcagcaaggggcagacaccctggccttcatgtctctcctggaggagaagttgatcccggtgctggtgagtgtgcccagacctcccagcatccatggccagccggggaggggacgggaacacacagacccacacagagactcaggagagcatggaggtcagaagcccaccttgaatcagacaggtgcactggctcagacctgcctgtttcttcctgcccacccaatccaggtacatactttttggatagacaccaagaactacgtagaagtgacccggaagtggtatgcagaggctatgccctttcccctcaacttcttcctgcctggccgcatgcagcggcagtacatggaacggctacagctgctgactggggagcacaggcctgaggacgaggaagagctggagaaggaggtagctctgagaccgggggctattgtatgagatgagccccaaggatgctggccaggaatgggagtgcttaggtgcagaggtggcactgttcccgcagctgcaagcctacctgtgtcgcccctacagctgtaccgagaggctcgggagtgtctgaccctgctctctcagcgcctgggctctcaaaagttcttctttggagatgcgtgagtctgactccaagagggtaatgggtggcttggaagaagatacaggttcagatggagcagctggagctggggctggggctggggctgactcaggctctggataggaggtccctgagacagatactggcctggtgacagtgggctgtgcgtgggccagagccttctcagaggtacaaaagggtaggtgtccaccctttcgtctaaggc

SEQ ID NO: 279586 - DNA, 5188 bp, Homo sapiens
gggaagcgggaggagagccacacggtcaagttgcacaggttcttgcagcttctggaatcaagaccatgggcaccctcataagtcagtgtgggcagggactgccccagggccaatccaagatccagaggtagccatagggtgtgacaagttgtgcagattacaacactcaccccttgcaataacgtcactgcctgtgactcggggccaggcccaggccaaagcccttcctacatcatttcgtttaatcctcacagtttcctgctgaaagggctactattcttactcccatccccactctacagatgaggtaatggaggcccaggaaagttaagtgacttgtcccagatgacaccgctggtaagttgcaaagtcagaatttgaactcaggcagtttacctctgatggctgctctgttaatcacagctgctttccagtgagacaaaaacgggtgatcagggcagagtcaagacagagaggtaaacaagattgggaaaaagacaggaatgagaggggaacaatgggggaaaagataggaacaaagagagttggggaaggggagagaaacaggaaacatgacttgcccgggaggggcatcagtccacgtgcaagcaggtggaggctcaagttttctgctcacttggtgatgcagaggctccctttccctcagcagccgccttgctgcgtggacagcagcttcccatctggcctgtccccggagccccggcctcatcctcctcagcggcaggccacttagcttcacaggaaatgctctttctctaattggcattgaaactcacagccctcccttttcctgtaggtggggtttccataggaaaaagctgcttctctgtttccccagcctagcaactgtttggcagtcagagtcccacatcctgctcaactgggtcaggtccctcttagaccagctcttgtccatcatttgctgaagtggaccaactagttccccagtagggggtctcccctggcaattcttgatcggcgtttggacatctcagatcgcttccaatgaagatggccttgccttggggtcctgcttgtttcataatcatctaactatgggacaaggttgtgccggcagctctgggggaaggagcacggggctgatcaagccatccaggaaacactggaggacttgtccagccttgaaagaactctagtggtttctgaatctagcccacttggcggtaagcatgatgcaacttctgcaacttctgctggggcttttggggccaggtggctacttatttcttttaggggattgtcaggaggtgaccactctcacggtgaaataccaagtgtcagaggaagtgccatctggtacagtgatcgggaagctgtcccaggaactgggccgggaggagaggcggaggcaagctggggccgccttccaggtgttgcagctgcctcaggcgctccccattcaggtggactctgaggaaggcttgctcagcacaggcaggcggctggatcgagagcagctgtgccgacagtgggatccctgcctggtttcctttgatgtgcttgccacaggggatttggctctgatccatgtggagatccaagtgctggacatcaatgaccaccagccacggtttcccaaaggcgagcaggagctggaaatctctgagagcgcctctctgcgaacccggatccccctggacagagctcttgacccagacacaggccctaacaccctgcacacctacactctgtctcccagtgagcactttgccttggatgtcattgtgggccctgatgagaccaaacatgcagaactcatagtggtgaaggagctggacagggaaatccattcattttttgatctggtgttaactgcctatgacaatgggaacccccccaagtcaggtaccagcttggtcaaggtcaacgtcttggactccaatgacaatagccctgcgtttgctgagagttcactggcactggaaatccaagaagatgctgcacctggtacgcttctcataaaactgaccgccacagaccctgaccaaggccccaatggggaggtggagttcttcctcagtaagcacatgcctccagaggtgctggacaccttcagtattgatgccaagacaggccaggtcattctgcgtcgacctctagactatgaaaagaaccctgcctacgaggtggatgttcaggcaagggacctgggtcccaatcctatcccagcccattgcaaagttctcatcaaggttctggatgtcaatgacaacatcccaagcatccacgtcacatgggcctcccagccatcactggtgtcagaagctcttcccaaggacagttttattgctcttgtcatggcagatgacttggattcaggacacaatggtttggtccactgctggctgagccaagagctgggccacttcaggctgaaaagaactaatggcaacacatacatgttgctaaccaatgccacactggacagagagcagtggcccaaatataccctcactctgttagcccaagaccaaggactccagcccttatcagccaagaaacagctcagcattcagatcagtgacatcaacgacaatgcacctgtgtttgagaaaagcaggtatgaagtctccacgcgggaaaacaacttaccctctcttcacctcattaccatcaaggctcatgatgcagacttgggcattaatggaaaagtctcataccgcatccaggactccccagttgctcacttagtagctattgactccaacacaggagaggtcactgctcagaggtcactgaactatgaagagatggccggctttgagttccaggtgatcgcagaggacagcgggcaacccatgcttgcatccagtgtctctgtgtgggtcagcctcttggatgccaatgataatgccccagaggtggtccagcctgtgctcagcgatggaaaagccagcctctccgtgcttgtgaatgcctccacaggccacctgctggtgcccatcgagactcccaatggcttgggcccagcgggcactgacacacctccactggccactcacagctcccggccattccttttgacaaccattgtggcaagagatgcagactcgggggcaaatggagagcccctctacagcatccgcagtggaaatgaagcccacctcttcatcctcaaccctcatacggggcagctgttcgtcaatgtcaccaatgccagcagcctcattgggagtgagtgggagctggagatagtagtagaggaccagggaagcccccccttacagacccgagccctgttgagggtcatgtttgtcaccagtgtggaccacctgagggactcagcccgcaagcctggggccttgagcatgtcgatgctgacggtgatctgcctggctgtactgttgggcatcttcgggttgatcctggctttgttcatgtccatctgccggacagaaaagaaggacaacagggcctacaactgtcgggaggccgagtccacctaccgccagcagcccaagaggccccagaaacacattcagaaggcagacatccacctcgtgcctgtgctcaggggtcaggcaggtgagccttgtgaagtcgggcagtcccacaaagatgtggacaaggaggcgatgatggaagcaggctgggacccctgcctgcaggcccccttccacctcaccccgaccctgtacaggacgctgcgtaatcaaggcaaccagggagcaccggcggagagccgagaggtgctgcaagacacggtcaacctccttttcaaccatcccaggcagaggaatgcctcccgggagaacctgaaccttcccgagccccagcctgccacaggccagccacgttccaggcctctgaaggttgcaggcagccccacagggaggctggctggagaccagggcagtgaggaagccccacagaggccaccagcctcctctgcaaccctgagacggcagcgacatctcaatggcaaagtgtcccctgagaaagaatcagggccccgtcagatcctgcggagcctggtccggctgtctgtggctgccttcgccgagcggaaccccgtggaggagctcactgtggattctcctcctgttcagcaaatctcccagctgctgtccttgctgcatcagggccaattccagcccaaaccaaaccaccgaggaaataagtacttggccaagccaggaggcagcaggagtgcaatcccagacacagatggcccaagtgcaagggctggaggccagacagacccagaacaggaggaagggcctttggatcctgaagaggacctctctgtgaagcaactgctagaagaagagctgtcaagtctgctggaccccagcacaggtctggccctggaccggctgagcgcccctgacccggcctggatggcgagactctctttgcccctcaccaccaactaccgtgacaatgtgatctccccggatgctgcagccacggaggagccaaggaccttccagacgttcggcaaggcagaggcaccagagctgagcccaacaggcacgaggctggccagcacctttgtctcggagatgagctcactgctggagatgctgctggaacagcgctccagcatgcccgtggaggccgcctccgaggcgctgcggcggctctcggtctgcgggaggaccctcagtttagacttggccaccagtgcagcctcaggcatgaaagtgcaaggggacccaggtggaaagacggggactgagggcaagagcagaggcagcagcagcagcagcaggtgcctgtgaacatacctcagacgcctctggatccaagaaccaggggcctgaggatctgtggacaagagctggtttctaaaatcttgtaactcactagctagcggcggcctgagaactttagggtgactgatgctacccccacagaggaggcaagagccccaggactaacagctgactgaccaaagcagccccttgtaagcagctctgagtcttttggaggacagggacggtttgtggctgagataagtgtttcctggcaaaacatatgtggagcacaaagggtcagtcctctggcagaacagatgccacggagtatcacaggcaggaaagggtggccttcttgggtagcaggagtcagggggctgtaccctgggggtgccaggaaatgctctctgacctatcaataaaggaaaagcagtgattcattctcc

SEQ ID NO: 279587 - DNA, 474 bp, Homo sapiens
tgtgaggtgggtgttatttattactctcattttacaaatgaggaaacagagtaagaggagggcgggaatcacatgatccaggttggtctgactctagaggccaggctgtgtatccagttccctatatgggtaaatgaatgcaaacatgaatgggcatgaatgaatgaatctatatgggaatgtccctacccatggactggttggtttcttttgcaggagtgcaatcccagacacagatggcccaagtgcaagggctggaggccagacagacccagaacaggaggaagggcctttggatcctgaagaggacctctctgtgaagcaactgctagaagaagagctgtcaagtctgctggaccccagcacaggtagggaccccctggagttaccttgaccctgcttctgccccatggtgtccaagcttcagagttctgctccaatccactgcagggaaaagccattctgtttctgtgg

SEQ ID NO: 279588 - DNA, 2345 bp, Homo sapiens
  misc_feature (17)..(17): n is a, c, g, or t
tcgagctccggtacccngacgctctctcatgtgggggacgctctctcatgtggggagaaggtggtccagcctgtgctcagcgatggaaaagccagcctctccgtgcttgtgaatgcctccacaggccacctgctggtgcccatcgagactcccaatggcttgggcccagcgggcactgacacacctccactggccactcacagctcccggccattccttttgacaaccattgtggcaagagatgcagactcgggggcaaatggagagcccctctacagcatccgcagtggaaatgaagcccacctcttcatcctcaaccctcatacggggcagctgttcgtcaatgtcaccaatgccagcagcctcattgggagtgagtgggagctggagatagtagtagaggaccagggaagcccccccttacagacccgagccctgttgagggtcatgtttgtcaccagtgtggaccacctgagggactcagcccgcaagcctggggccttgagcatgtcgatgctgacggtgatctgcctggctgtactgttgggcatcttcgggttgatcctggctttgttcatgtccatctgccggacagaaaagaaggacaacagggcctacaactgtcgggaggccgagtccacctaccgccagcagcccaagaggccccagaaacacattcagaaggcagacatccacctcgtgcctgtgctcaggggtcaggcaggtgagccttgtgaagtcgggcagtcccacaaagatgtggacaaggaggcgatgatggaagcaggctgggacccctgcctgcaggcccccttccacctcaccccgaccctgtacaggacgctgcgtaatcaaggcaaccagggagcaccggcggagagccgagaggtgctgcaagacacggtcaacctccttttcaaccatcccaggcagaggaatgcctcccgggagaacctgaaccttcccgagccccagcctgccacaggccagccacgttccaggcctctgaaggttgcaggcagccccacagggaggctggctggagaccagggcagtgaggaagccccacagaggccaccagcctcctctgcaaccctgagacggcagcgacatctcaatggcaaagtgtcccctgagaaagaatcagggccccgtcagatcctgcggagcctggtccggctgtctgtggctgccttcgccgagcggaaccccgtggaggagctcactgtggattctcctcctgttcagcaaatctcccagctgctgtccttgctgcatcagggccaattccagcccaaaccaaaccaccgaggaaataagtacttggccaagccaggaggcagcaggagtgcaatcccagacacagatggcccaagtgcaagggctggaggccagacagacccagaacaggaggaagggcctttggatcctgaagaggacctctctgtgaagcaactgctagaagaagagctgtcaagtctgctggaccccagcacaggtctggccctggaccggctgagcgcccctgacccggcctggatggcgagactctctttgcccctcaccaccaactaccgtgacaatgtgatctccccggatgctgcagccacggaggagccaaggaccttccagacgttcggcaaggcagaggcaccagagctgagcccaacaggcacgaggctggccagcacctttgtctcggagatgagctcactgctggagatgctgctggaacagcgctccagcatgcccgtggaggccgcctccgaggcgctgcggcggctctcggtctgcgggaggaccctcagtttagacttggccaccagtgcagcctcaggcatgaaagtgcaaggggacccaggtggaaagacggggactgagggcaagagcagaggcagcagcagcagcagcaggtgcctgtgaacatacctcagacgcctctggatccaagaaccaggggcctgaggatctgtggacaagagctggtttctaaaatcttgtaactcactagctagcggcggcctgagaactttagggtgactgatgctacccccacagaggaggcaagagccccaggactaacagctgactgaccaaagcagccccttgtaagcagctctgagtcttttggaggacagggacggtttgtggctgagataagtgtttcctggcaaaacatatgtggagcacaaagggtcagtcctctggcagaacagatgccacggagtatcacaggcaggaaagggtggccttcttgggtagcaggagtcagggggctgtaccctgggggtgccaggaaatgctctctgacctatcaataaaggaaaagcagtgattcattctcc

SEQ ID NO: 279589 - DNA, 188 bp, Homo sapiens
aagtgtgctgagtcggaattgtgtggagtcaacagatttttcctgtcttgtagcaaatctcccagctgctgtccttgctgcatcagggccaattccagcccaaaccaaaccaccgaggaaataagtacttggccaagccaggaggcagcaggtaagcagcacgtagcccccacaggcatctcaaggcc

SEQ ID NO: 279590 - DNA, 2467 bp, Homo sapiens
gggaagcgggaggagagccacacggtcaagttgcacaggttcttgcagcttctggaatcaagaccatgggcaccctcataagtcagtgtgggcagggactgccccagggccaatccaagatccagaggtagccatagggtgtgacaagttgtgcagattacaacactcaccccttgcaataacgtcactgcctgtgactcggggccaggcccaggccaaagcccttcctacatcatttcgtttaatcctcacagtttcctgctgaaagggctactattcttactcccatccccactctacagatgaggtaatggaggcccaggaaagttaagtgacttgtcccagatgacaccgctggtaagttgcaaagtcagaatttgaactcaggcagtttacctctgatggctgctctgttaatcacagctgctttccagtgagacaaaaacgggtgatcagggcagagtcaagacagagaggtaaacaagattgggaaaaagacaggaatgagaggggaacaatgggggaaaagataggaacaaagagagttggggaaggggagagaaacaggaaacatgacttgcccgggaggggcatcagtccacgtgcaagcaggtggaggctcaagttttctgctcacttggtgatgcagaggctccctttccctcagcagccgccttgctgcgtggacagcagcttcccatctggcctgtccccggagccccggcctcatcctcctcagcggcaggccacttagcttcacaggaaatgctctttctctaattggcattgaaactcacagccctcccttttcctgtaggtggggtttccataggaaaaagctgcttctctgtttccccagcctagcaactgtttggcagtcagagtcccacatcctgctcaactgggtcaggtccctcttagaccagctcttgtccatcatttgctgaagtggaccaactagttccccagtagggggtctcccctggcaattcttgatcggcgtttggacatctcagatcgcttccaatgaagatggccttgccttggggtcctgcttgtttcataatcatctaactatgggacaaggttgtgccggcagctctgggggaaggagcacggggctgatcaagccatccaggaaacactggaggacttgtccagccttgaaagaactctagtggtttctgaatctagcccacttggcggtaagcatgatgcaacttctgcaacttctgctggggcttttggggccaggtggctacttatttcttttaggggattgtcaggaggtgaccactctcacggtgaaataccaagtgtcagaggaagtgccatctggtacagtgatcgggaagctgtcccaggaactgggccgggaggagaggcggaggcaagctggggccgccttccaggtgttgcagctgcctcaggcgctccccattcaggtggactctgaggaaggcttgctcagcacaggcaggcggctggatcgagagcagctgtgccgacagtgggatccctgcctggtttcctttgatgtgcttgccacaggggatttggctctgatccatgtggagatccaagtgctggacatcaatgaccaccagccacggtttcccaaaggcgagcaggagctggaaatctctgagagcgcctctctgcgaacccggatccccctggacagagctcttgacccagacacaggccctaacaccctgcacacctacactctgtctcccagtgagcactttgccttggatgtcattgtgggccctgatgagaccaaacatgcagaactcatagtggtgaaggagctggacagggaaatccattcattttttgatctggtgttaactgcctatgacaatgggaacccccccaagtcaggtaccagcttggtcaaggtcaacgtcttggactccaatgacaatagccctgcgtttgctgagagttcactggcactggaaatccaagaagatgctgcacctggtacgcttctcataaaactgaccgccacagaccctgaccaaggccccaatggggaggtggagttcttcctcagtaagcacatgcctccagaggtgctggacaccttcagtattgatgccaagacaggccaggtcattctgcgtcgacctctagactatgaaaagaaccctgcctacgaggtggatgttcaggcaagggacctgggtcccaatcctatcccagcccattgcaaagttctcatcaaggttctggatgtcaatgacaacatcccaagcatccacgtcacatgggcctcccagccatcactggtgtcagaagctcttcccaaggacagttttattgctcttgtcatggcagatgacttggattcaggaaagggtggccttcttgggtagcaggagtcagggggctgtaccctgggggtgccaggaaatgctctctgacctatcaataaaggaaaagcagtgattcattctcc

SEQ ID NO: 279591 - DNA, 1215 bp, Homo sapiens
tgtgaggtgggtgttatttattactctcattttacaaatgaggaaacagagtaagaggagggcgggaatcacatgatccaggttggtctgactctagaggccaggctgtgtatccagttccctatatgggtaaatgaatgcaaacatgaatgggcatgaatgaatgaatctatatgggaatgtccctacccatggactggttggtttcttttgcaggagtgcaatcccagacacagatggcccaagtgcaagggctggaggccagacagacccagaacaggaggaagggcctttggatcctgaagaggacctctctgtgaagcaactgctagaagaagagctgtcaagtctgctggaccccagcacaggtctggccctggaccggctgagcgcccctgacccggcctggatggcgagactctctttgcccctcaccaccaactaccgtgacaatgtgatctccccggatgctgcagccacggaggagccaaggaccttccagacgttcggcaaggcagaggcaccagagctgagcccaacaggcacgaggctggccagcacctttgtctcggagatgagctcactgctggagatgctgctggaacagcgctccagcatgcccgtggaggccgcctccgaggcgctgcggcggctctcggtctgcgggaggaccctcagtttagacttggccaccagtgcagcctcaggcatgaaagtgcaaggggacccaggtggaaagacggggactgagggcaagagcagaggcagcagcagcagcagcaggtgcctgtgaacatacctcagacgcctctggatccaagaaccaggggcctgaggatctgtggacaagagctggtttctaaaatcttgtaactcactagctagcggcggcctgagaactttagggtgactgatgctacccccacagaggaggcaagagccccaggactaacagctgactgaccaaagcagccccttgtaagcagctctgagtcttttggaggacagggacggtttgtggctgagataagtgtttcctggcaaaacatatgtggagcacaaagggtcagtcctctggcagaacagatgccacggagtatcacaggcaggaaagggtggccttcttgggtagcaggagtcagggggctgtaccctgggggtgccaggaaatgctctctgacctatcaataaaggaaaagcagtgattcattctcc

SEQ ID NO: 279592 - DNA, 2137 bp, Homo sapiens
ttcgtagtttcctgataaccattcagtcatctatttcaacaccctgacatgacataaaggcaggcacggaaccacacgttcaccatacagacacacgccactttgctggagcattcactaggcgaggcgctccatcggactcactagctgcactcatgaatcggcaccatctgcaggatcactttctggaaatagacaagaagaactgctgtgtgttccgagatgacttcattgccaaggtgttgccgccggtgttggggctggagtttatctttgggcttctgggcaatggccttgccctgtggattttctgtttccacctcaagtcctggaaatccagccggattttcctgttcaacctggcagtagctgactttctactgatcatctgcctgccgttcgtgatggactactatgtgcggcgttcagactggaagtttggggacatcccttgccggctggtgctcttcatgtttgccatgaaccgccagggcagcatcatcttcctcacggtggtggcggtagacaggtatttccgggtggtccatccccaccacgccctgaacaagatctccaattggacagcagccatcatctcttgccttctgtggggcatcactgttggcctaacagtccacctcctgaagaagaagttgctgatccagaatggccctgcaaatgtgtgcatcagcttcagcatctgccataccttccggtggcacgaagctatgttcctcctggagttcctcctgcccctgggcatcatcctgttctgctcagccagaattatctggagcctgcggcagagacaaatggaccggcatgccaagatcaagagagccatcaccttcatcatggtggtggccatcgtctttgtcatctgcttccttcccagcgtggttgtgcggatccgcatcttctggctcctgcacacttcgggcacgcagaattgtgaagtgtaccgctcggtggacctggcgttctttatcactctcagcttcacctacatgaacagcatgctggaccccgtggtgtactacttctccagcccatcctttcccaacttcttctccactttgatcaaccgctgcctccagaggaagatgacaggtgagccagataataaccgcagcacgagcgtcgagctcacaggggaccccaacaaaaccagaggcgctccagaggcgttaatggccaactccggtgagccatggagcccctcttatctgggcccaacctcaaataaccattccaagaagggacattgtcaccaagaaccagcatctctggagaaacagttgggctgttgcatcgagtaatgtcactggactcggcctaaggtttcctggaacttccagattcagagaatctgatttagggaaactgtggcagatgagtgggagactggttgcaaggtgtgaccacaggaatcctggaggaacagagagtaaagcttctaggcatctgaaacttgcttcatctctgacgctcgcaggactgaagatgggcaaattgtaggcgtttctgctgagcagagttggagccagagatctacttgtgacttgttggccttcttcccacatctgcctcagactggggggggctcagctcctcgggtgatatctagcctgcttgtgagctctagcagggataaggagagctgagattggagggaattgtgttgctcctggaggaagcccaggcatcattaaacaagccagtaggtcacctggcttccgtggaccaattcatctttcagacaagctttagcagaaatggactcagggaagagactcacatgctttggttagtatctgtgtttccggtgggtgtaataggggattagccccagaagggactgagctaaacagtgttattatgggaaaggaaatggcattgctgctttcaaccagcgactaatgcaatccattcctctcttgtttatagtaatctaagggttgagcagttaaaacggcttcaggatagaaagctgtttcccacctgtttgcttttaccattaaaagggaaacgtgcctctgccccacgggtagaggggtgcacgttcctcctggttccttcgcttgtgtttctgtacttaccaaaaatctaccacttcaataaattttgataggagaca

SEQ ID NO: 279593 - DNA, 2028 bp, Homo sapiens
ttcgtagtttcctgataaccattcagtcatctatttcaacaccctgacatgacataaaggcaggcacggaaccacacgttcaccatacagacacacgccactttgctggagcattcactaggcgaggcgctccatcggactcactagctgcactcatgaatcggcaccatctgcaggatcactttctggaaatagacaagaagaactgctgtgtgttccgagatgacttcattgccaaggtgttgccgccggtgttggggctggagtttatctttgggcttctgggcaatggccttgccctgtggattttctgtttccacctcaagtcctggaaatccagccggattttcctgttcaacctggcagtagctgactttctactgatcatctgcctgccgttcgtgatggactactatgtgcggcgttcagactggaagtttggggacatcccttgccggctggtgctcttcatgtttgccatgaaccgccagggcagcatcatcttcctcacggtggtggcggtagacaggtatttccgggtggtccatccccaccacgccctgaacaagatctccaattggacagcagccatcatctcttgccttctgtggggcatcactgttggcctaacagtccacctcctgaagaagaagttgctgatccagaatggccctgcaaatgtgtgcatcagcttcagcatctgccataccttccggtggcacgaagctatgttcctcctggagttcctcctgcccctgggcatcatcctgttctgctcagccagaattatctggagcctgcggcagagacaaatggaccggcatgccaagatcaagagagccatcaccttcatcatggtggtggccatcgtctttgtcatctgcttccttcccagcgtggttgtgcggatccgcatcttctggctcctgcacacttcgggcacgcagaattgtgaagtgtaccgctcggtggacctggcgttctttatcactctcagcttcacctacatgaacagcatgctggaccccgtggtgtactacttctccagcccatcctttcccaacttcttctccactttgatcaaccgctgcctccagaggaagatgacaggtgagccagataataaccgcagcacgagcgtcgagctcacaggggaccccaacaaaaccagaggcgctccagaggcgttaatggccaactccggtgagccatggagcccctcttatctgggcccaacctcaaataaccattccaagaagggacattgtcaccaagaaccagcatctctggagaaacagttgggctgttgcatcgagtaatgtcactggactcggcctaaggtttcctggaacttccagattcagagaatctgatttagggaaactgtggcagatgagtgggagactggttgcaaggtgtgaccacaggaatcctggaggaacagagagtaaagcttctaggcatctgaaacttgcttcatctctgacgctcgcaggactgaagatgggcaaattgtaggcgtttctgctgagcagagttggagccagagatctacttgtgacttgttggccttcttcccacatctgcctcagactggggggggctcagctcctcgggtgatatctagcctgcttgtgagctctagcagggataaggagagctgagattggagggaattgtgttgctcctggaggaagcccaggcatcattaaacaagccagtaggtcacctggcttccgtggaccaattcatctttcagacaagctttagcagaaatggactcagggaagagactcacatgctttgggtgttgccaactcatggtgcatggattcaaatgcaataaacagtcctggggagatgtcccgctcctgtagccccatcatgggtgtctgatttggtgagtattctaggtgcttccaacaacctcatccttctgacctgctggcctctctgaagggggtgtctgctctaactggatcaagaataggggacttgtttggaggaacattcttggtttgtgatttg

SEQ ID NO: 279594 - DNA, 510 bp, Homo sapiens
  misc_feature (2)..(2): n is a, c, g, or t
  misc_feature (28)..(31): n is a, c, g, or t
  misc_feature (47)..(47): n is a, c, g, or t
  misc_feature (62)..(63): n is a, c, g, or t
  misc_feature (301)..(301): n is a, c, g, or t
  misc_feature (369)..(371): n is a, c, g, or t
  misc_feature (479)..(479): n is a, c, g, or t
  misc_feature (492)..(492): n is a, c, g, or t
  misc_feature (496)..(496): n is a, c, g, or t
  misc_feature (503)..(503): n is a, c, g, or t
tnggctagacattctcagttttttcagnnnntttcctgataaggggnttacgttccatcacnntgctgaccattgtctactactgaagactaactaacacagtcattaacagcaatggaattttgaggatggaagacatgttttcagattatgcctctgccatctgctcactgtatatattggatgtcttctgtttgtcccctagatgtactcctcatccttcttcaccttactttggctacagatggctgatgtgaatgaacatcagtagcccccatgtcctctgcttccacctggattnggccaacagaaattcccggcagagatgagagggagagaattgagtgagatcaaggtgtcttttcaaannntggttagctctgtcttatgattgcctcaatctatgtgtccttttatgaaaaatcatgagttctttgaagcatcctgctctatagggctctcctaatgattctgataantacttccttgctngatncctttgnacctggg

SEQ ID NO: 279595 - DNA, 482 bp, Homo sapiens
tttttttttaaatcttgtagagcttgttaaccagaacaccactgtaagagaccttgaatctttttgttcccaggactttctgaattttcagcccatatgacatggaagaagagttagaaggggaatctgactgcttggatcagggactgtctggctggtggaacttgaatgtatacaacactcttcatttgcatgttttgacattttaaaaaatgttttcactttccttatctactttgactctaataacatcctgaaaggtaagtagaattattctcataatatgatgaagaacccaaggctctcaagggaacaccactcttggattatttagccccgctcttctacaagaattgcataccccaacccctggagcccctccccatatccatgtttctgccctataatctgatcctttcaccaaaaatgtttagatcaggtacacacacctgaactaaattgggactatcagtttctctctc

SEQ ID NO: 279596 - DNA, 976 bp, Homo sapiens
ggagaggaccaaattatgtcttagttacctggctgctggtggttgtctctgttttttgtagagcacaggtgtaacggctttcagggtgggggtggggaactctccactgagtagtgtgctgatgtgggagatctctggcttggcctcttccggccctcctcccactcagctcccaccaatgatgtatcaataaaacctcttgctgctggagatctgcttacctggtggccagggtggcaagacaagtgaagcctgactatgcctgcagcatccactgtggaaactactacatctttgccatgccaaacacttctgcttaagcatgcaggtgagaagggaagatacatgtaatctgcatgtctgccaccattccttgttaccctttttcatatcccatgagcacagcactccagcggacctacccaaaatatgtgggagttcagtgaaactcaaacagcatgcttctggtcagcctatacagtctctgtcctggtgaggagcatgatcaccaacaggcaagatcttctggccttgaagtttcgcttgagttaaaagagctcatctcaggactttctgaattttcagcccatatgacatggaagaagagttagaaggggaatctgactgcttggatcagggactgtctggctggtggaacttgaatgtatacaacactcttcatttgcatgttttgacattttaaaaaatgttttcactttccttatctactttgactctaataacatcctgaaaggtaagtagaattattctcataatatgatgaagaacccaaggctctcaagggaacaccactcttggattatttagccccgctcttctacaagaattgcataccccaacccctggagcccctccccatatccatgtttctgccctataatctgatcctttcaccaaaaatgtttagatcaggtacacacacctgaactaaattgggactatcagtttctctctc

SEQ ID NO: 279597 - DNA, 1695 bp, Homo sapiens
tcgggtagcatgggtgttctgctagaggatgtgtctggctgggggcggtgtcccaatcgggagggttgccctgatgggggaggttctacagttgtggagatgccaacctggggggcgctccggttggggggtgtgccctctctggttaccccgctctcgctgccactcataggcccgctgcccaggtatgcacaagtcaaggccttttctgcagaccaagtagccttccctggagagcgcccccagcaccacggaagctacctacatgccccgcggtggtcagcccgccttatcccagccccgagacctggagctggagaacccgcccgccagagtcgtagtagtggatggggagtagccgtcccattttcaacacatgtctcattctaaattgacgttttggtgggctggccgaagaaggagaaagacccgcggctccgacctctgacctctaaccccggacgcactttgatttcgccggcttgcgcggaaggctgactccctgggccgcggcctggcgcgggagccgcctgtggggtgtccccggcgcgggagggtgctctggttcaggcccgctgcccaggtatgcacaagtcaaggccttttctgcagaccaagtagccttccctggagagcgcccccagcaccacggaaactacctacatgccccgcggtggtcagcccgccttatcccagccccgagacccaaaacaagaagcatggactgaatttgaggtttctggatggtcgtgtgaaccgaggggacgggtactggactgacaagaaatgagccttgaaggtcaatctgggtgacacccgagtctcctgatggagtttcactatgttgcccaggctgatctggaactcctgacctcaagcaatccacctgcctcagcctcccaaagtactgggattacaggagggagccaccgtgcccggcctggtcctgtgcattttatagataaggtaactgacaaacctagccacagtcaccccttcgccctaaaggagaactggaatttgaacccagagccttcttcaccaccatctccgttgtttctggaagcaccctccaggcaggccagccagcatcacggggcctcccctggggctggaacgtctgcaggatgcccctttgagaaatgctgttccacagaaccctgcctttcaggccttggagacgtgggcaggggagaagcagcgtccctcagagccaggcctggcagtggtgctagcaggggccaaggcccagggagcagggtctcctgtcggagggacctgggcaagcccctccacgcgccagcgggtttctcagcaggggaggtccacaccacaccgcttgggaacctgggtgcctaaacgcaacaggagccaaggcacaaatttaaccaaacaccaaggttgcgtgaggccccatttcatgagccgggctccaaggacgtgtccttaggcggctctggaaggcccagcgccagcccccgtcctctgttaaagggagccagccccgcggctccgcccaggcatggtagcctgagcgcgcccccagggtagtagggggcacctgaggagcagggtctgccctggcatgagcagagcccaggatggggtcagggtcaggccctgccagaggctggagggtgcccaaggcgaggccggtgaggcccagctctacaaataaagtgttttatttacagg

SEQ ID NO: 279598 - DNA, 1604 bp, Homo sapiens
tcgggtagcatgggtgttctgctagaggatgtgtctggctgggggcggtgtcccaatcgggagggttgccctgatgggggaggttctacagttgtggagatgccaacctggggggcgctccggttggggggtgtgccctctctggttaccccgctctcgctgccactcataggcccgctgcccaggtatgcacaagtcaaggccttttctgcagaccaagtagccttccctggagagcgcccccagcaccacggaagctacctacatgccccgcggtggtcagcccgccttatcccagccccgagacctggagctggagaacccgcccgccagagtcgtagtagtggatggggagtagccgtcccattttcaacacatgtctcattctaaattgacgttttggtgggctggccgaagaaggagaaagacccgcggctccgacctctgacctgttaccccgctctcgctgccactcataggcccgctgcccaggtatgcacaagtcaaggccttttctgcagaccaagtagccttccctggagagcgcccccagcaccacggaaactacctacatgccccgcggtggtcagcccgccttatcccagccccgagacccaaaacaagaagcatggactgaatttgaggtttctggatggtcgtgtgaaccgaggggacgggtactggactgacaagaaatgagccttgaaggtcaatctgggtgacacccgagtctcctgatggagtttcactatgttgcccaggctgatctggaactcctgacctcaagcaatccacctgcctcagcctcccaaagtactgggattacaggagggagccaccgtgcccggcctggtcctgtgcattttatagataaggtaactgacaaacctagccacagtcaccccttcgccctaaaggagaactggaatttgaacccagagccttcttcaccaccatctccgttgtttctggaagcaccctccaggcaggccagccagcatcacggggcctcccctggggctggaacgtctgcaggatgcccctttgagaaatgctgttccacagaaccctgcctttcaggccttggagacgtgggcaggggagaagcagcgtccctcagagccaggcctggcagtggtgctagcaggggccaaggcccagggagcagggtctcctgtcggagggacctgggcaagcccctccacgcgccagcgggtttctcagcaggggaggtccacaccacaccgcttgggaacctgggtgcctaaacgcaacaggagccaaggcacaaatttaaccaaacaccaaggttgcgtgaggccccatttcatgagccgggctccaaggacgtgtccttaggcggctctggaaggcccagcgccagcccccgtcctctgttaaagggagccagccccgcggctccgcccaggcatggtagcctgagcgcgcccccagggtagtagggggcacctgaggagcagggtctgccctggcatgagcagagcccaggatggggtcagggtcaggccctgccagaggctggagggtgcccaaggcgaggccggtgaggcccagctctacaaataaagtgttttatttacagg

SEQ ID NO: 279599 - DNA, 1641 bp, Homo sapiens
tcgggtagcatgggtgttctgctagaggatgtgtctggctgggggcggtgtcccaatcgggagggttgccctgatgggggaggttctacagttgtggagatgccaacctggggggcgctccggttggggggtgtgccctctctggttaccccgctctcgctgccactcataggcccgctgcccaggtatgcacaagtcaaggccttttctgcagaccaagtagccttccctggagagcgcccccagcaccacggaagctacctacatgccccgcggtggtcagcccgccttatcccagccccgagacctggagctggagaacccgcccgccagagtcgtagtagtggatggggagtagccgtcccattttcaacacatgtctcattctaaattgacgttttggtgggctggccgaagaaggagaaagacccgcggctccgacctctgacctctaaccccggacgcactttgatttcgccggcttgcgcggaaggctgactccctgggccgcggcctggcgcgggagccgcctgtggggtgtccccggcgcgggagggtgctctggttcaggcccgctgcccaggtatgcacaagtcaaggccttttctgcagaccaagtagccttccctggagagcgcccccagcaccacggaaactacctacatgccccgcggtggtcagcccgccttatcccagccccgagacccgggacgggtactggactgacaagaaatgagccttgaaggtcaatctgggtgacacccgagtctcctgatggagtttcactatgttgcccaggctgatctggaactcctgacctcaagcaatccacctgcctcagcctcccaaagtactgggattacaggagggagccaccgtgcccggcctggtcctgtgcattttatagataaggtaactgacaaacctagccacagtcaccccttcgccctaaaggagaactggaatttgaacccagagccttcttcaccaccatctccgttgtttctggaagcaccctccaggcaggccagccagcatcacggggcctcccctggggctggaacgtctgcaggatgcccctttgagaaatgctgttccacagaaccctgcctttcaggccttggagacgtgggcaggggagaagcagcgtccctcagagccaggcctggcagtggtgctagcaggggccaaggcccagggagcagggtctcctgtcggagggacctgggcaagcccctccacgcgccagcgggtttctcagcaggggaggtccacaccacaccgcttgggaacctgggtgcctaaacgcaacaggagccaaggcacaaatttaaccaaacaccaaggttgcgtgaggccccatttcatgagccgggctccaaggacgtgtccttaggcggctctggaaggcccagcgccagcccccgtcctctgttaaagggagccagccccgcggctccgcccaggcatggtagcctgagcgcgcccccagggtagtagggggcacctgaggagcagggtctgccctggcatgagcagagcccaggatggggtcagggtcaggccctgccagaggctggagggtgcccaaggcgaggccggtgaggcccagctctacaaataaagtgttttatttacagg

SEQ ID NO: 279600 - DNA, 1725 bp, Homo sapiens
cgcgttggagctcgaccggtgcggcgcctgcgcactggaaccaggcgtgcggcgccccaggcgccgggcctgcggcggccggaaccggaacgcgcgcccgcggggtaggagacctggagctggagaacccgcccgccagagtcgtagtagtggatggggagtagccgtcccattttcaacacatgtctcattctaaattgacgttttggtgggctggccgaagaaggagaaagacccgcggctccgacctctgacctctaaccccggacgcactttgatttcgccggcttgcgcggaaggctgactccctgggccgcggcctggcgcgggagccgcctgtggggtgtccccggcgcgggagggtgctctggttcaggcaggttcccgttgcggcggggttccctcggttgggaggaatgcccctgccgagggtatgctccggctggagggggtgtccctaacggcgggaatacctggactggctggggtgtcccactggggagggtttcccggtggggaggtgtctggcgggggagcggctccggctaagcatgggtgttctgctaggaggatgtgtctggctgggggcggtgtcccaatcgggagggttgccctgatgggggaggttctacagttgtggagatgccaacctggggggcgctccggttggggggtgtgccctctctggttaccccgctctcgctgccactcataggcccgctgcccaggtatgcacaagtcaaggccttttctgcagaccaagtagccttccctggagagcgcccccagcaccacggaaactacctacatgccccgcggtggtcagcccgccttatcccagccccgagacccaaaacaagaagcatggactgaatttgaggtttctggatggtcgtgtgaaccgaggggacgggtactggactgacaagaaatgagccttgaaggtcaatctgggtgacacccgagtctcctggtgagtcggactccggagaattatctcaagtccagcatagacagcgcacatagacagaaaaggaaacggacaatcccaagtgccaagggaaccttcccaggtttctttagggcagctaaactgctctgtcaaagcctaagtccatttatgacaggccgagcaccctgagccctcgcaggagacacgagcgccttcatggccctcctgccccgcacccacctctccgccacccctgctgtctgtcccttccctgaaacctttatttcgagtgtctttgtggcttccctctttaccatccttgagttgaaatatcacctcttaagggaagccttccctctcctccctagttaaaatgatactgcccccccatacctgtcttcgttgacttacttggctccatcacagtgtgtgtcatgtgactctcccacatcctgatttggaatattgtctccctactagaatgtaagtccatggtgcctagaacaatacctggtgtacaggagacaaaatatttgttgactgggccgggtgcggtggctcacgcctgtaatcccagcactttgggaggccgaggtgggcagatcatgaggtcaggagatggagaccagcctggctaacatggtgaaaccccatctctactaaaaatacaaaaaatagccgggagtggtgctgggcgcctgtagtcccagctactcgggaggctgaggcaggagaatggcatgaacccgatcaaagaactcgggcctgtacca

SEQ ID NO: 279601 - DNA, 1114 bp, Homo sapiens
cgcgttggagctcgaccggtgcggcgcctgcgcactggaaccaggcgtgcggcgccccaggcgccgggcctgcggcggccggaaccggaacgcgcgcccgcggggtaggagacctggagctggagaacccgcccgccagagtcgtagtagtggatggggagtagccgtcccattttcaacacatgtctcattctaaattgacgttttggtgggctggccgaagaaggagaaagacccgcggctccgacctctgacctctaaccccggacgcactttgatttcgccggcttgcgcggaaggctgactccctgggccgcggcctggcgcgggagccgcctgtggggtgtccccggcgcgggagggtgctctggttcaggcaggttcccgttgcggcggggttccctcggttgggaggaatgcccctgccgagggtatgctccggctggagggggtgtccctaacggcgggaatacctggactggctggggtgtcccactggggagggtttcccggtggggaggtgtctggcgggggagcggctccggctaagcatgggtgttctgctaggaggatgtgtctggctgggggcggtgtcccaatcgggagggttgccctgatgggggaggttctacagttgtggagatgccaacctggggggcgctccggttggggggtgtgccctctctggttaccccgctctcgctgccactcataggcccgctgcccaggtatgcacaagtcaaggccttttctgcagaccaagtagccttccctggagagcgcccccagcaccacggaaactacctacatgccccgcggtggtcagcccgccttatcccagccccgagacccaaaacaagaagcatggactgaatttgaggtttctggatggtcgtgtgaaccgaggggacgggtactggactgacaagaaatgagccttgaaggtcaatctcgagccagctgtctcaatcgagcgagcgcttgtcctgatgggcaagcttccacattgtattggaaatgcatacctggggagcgctccggttggggggtgtgccctctctggttaacccgagcgctacccatgcaagtataatattaagtatgcatgacctcc

SEQ ID NO: 279602 - DNA, 1501 bp, Homo sapiens
cgcgttggagctcgaccggtgcggcgcctgcgcactggaaccaggcgtgcggcgccccaggcgccgggcctgcggcggccggaaccggaacgcgcgcccgcggggtaggagacctggagctggagaacccgcccgccagagtcgtagtagtggatggggagtagccgtcccattttcaacacatgtctcattctaaattgacgttttggtgggctggccgaagaaggagaaagacccgcggctccgacctctgacctctaaccccggacgcactttgatttcgccggcttgcgcggaaggctgactccctgggccgcggcctggcgcgggagccgcctgtggggtgtccccggcgcgggagggtgctctggttcaggcccgctgcccaggtatgcacaagtcaaggccttttctgcagaccaagtagccttccctggagagcgcccccagcaccacggaaactacctacatgccccgcggtggtcagcccgccttatcccagccccgagacccaaaacaagaagcatggactgaatttgaggtttctggatggtcgtgtgaaccgaggggacgggtactggactgacaagaaatgagccttgaaggtcaatctgggtgacacccgagtctcctgatggagtttcactatgttgcccaggctgatctggaactcctgacctcaagcaatccacctgcctcagcctcccaaagtactgggattacaggagggagccaccgtgcccggcctggtcctgtgcattttatagataaggtaactgacaaacctagccacagtcaccccttcgccctaaaggagaactggaatttgaacccagagccttcttcaccaccatctccgttgtttctggaagcaccctccaggcaggccagccagcatcacggggcctcccctggggctggaacgtctgcaggatgcccctttgagaaatgctgttccacagaaccctgcctttcaggccttggagacgtgggcaggggagaagcagcgtccctcagagccaggcctggcagtggtgctagcaggggccaaggcccagggagcagggtctcctgtcggagggacctgggcaagcccctccacgcgccagcgggtttctcagcaggggaggtccacaccacaccgcttgggaacctgggtgcctaaacgcaacaggagccaaggcacaaatttaaccaaacaccaaggttgcgtgaggccccatttcatgagccgggctccaaggacgtgtccttaggcggctctggaaggcccagcgccagcccccgtcctctgttaaagggagccagccccgcggctccgcccaggcatggtagcctgagcgcgcccccagggtagtagggggcacctgaggagcagggtctgccctggcatgagcagagcccaggatggggtcagggtcaggccctgccagaggctggagggtgcccaaggcgaggccggtgaggcccagctctacaaataaagtgttttatttacagg

SEQ ID NO: 279603 - DNA, 1840 bp, Homo sapiens
cgcgttggagctcgaccggtgcggcgcctgcgcactggaaccaggcgtgcggcgccccaggcgccgggcctgcggcggccggaaccggaacgcgcgcccgcggggtaggagacctggagctggagaacccgcccgccagagtcgtagtagtggatggggagtagccgtcccattttcaacacatgtctcattctaaattgacgttttggtgggctggccgaagaaggagaaagacccgcggctccgacctctgacctctaaccccggacgcactttgatttcgccggcttgcgcggaaggctgactccctgggccgcggcctggcgcgggagccgcctgtggggtgtccccggcgcgggagggtgctctggttcaggcaggttcccgttgcggcggggttccctcggttgggaggaatgcccctgccgagggtatgctccggctggagggggtgtccctaacggcgggaatacctggactggctggggtgtcccactggggagggtttcccggtggggaggtgtctggcgggggagcggctccggctaagcatgggtgttctgctaggaggatgtgtctggctgggggcggtgtcccaatcgggagggttgccctgatgggggaggttctacagttgtggagatgccaacctggggggcgctccggttggggggtgtgccctctctggttaccccgctctcgctgccactcataggcccgctgcccaggtatgcacaagtcaaggccttttctgcagaccaagtagccttccctggagagcgcccccagcaccacggaaactacctacatgccccgcggtggtcagcccgccttatcccagccccgagacccaaaacaagaagcatggactgaatttgaggtttctggatggtcgtgtgaaccgaggggacgggtactggactgacaagaaatgagccttgaaggtcaatctgggtgacacccgagtctcctgatggagtttcactatgttgcccaggctgatctggaactcctgacctcaagcaatccacctgcctcagcctcccaaagtactgggattacaggagggagccaccgtgcccggcctggtcctgtgcattttatagataaggtaactgacaaacctagccacagtcaccccttcgccctaaaggagaactggaatttgaacccagagccttcttcaccaccatctccgttgtttctggaagcaccctccaggcaggccagccagcatcacggggcctcccctggggctggaacgtctgcaggatgcccctttgagaaatgctgttccacagaaccctgcctttcaggccttggagacgtgggcaggggagaagcagcgtccctcagagccaggcctggcagtggtgctagcaggggccaaggcccagggagcagggtctcctgtcggagggacctgggcaagcccctccacgcgccagcgggtttctcagcaggggaggtccacaccacaccgcttgggaacctgggtgcctaaacgcaacaggagccaaggcacaaatttaaccaaacaccaaggttgcgtgaggccccatttcatgagccgggctccaaggacgtgtccttaggcggctctggaaggcccagcgccagcccccgtcctctgttaaagggagccagccccgcggctccgcccaggcatggtagcctgagcgcgcccccagggtagtagggggcacctgaggagcagggtctgccctggcatgagcagagcccaggatggggtcagggtcaggccctgccagaggctggagggtgcccaaggcgaggccggtgaggcccagctctacaaataaagtgttttatttacagg

SEQ ID NO: 279604 - DNA, 522 bp, Homo sapiens
tcttaaggctctaatatcttgtcttctggctatgagaacagagcatatggtttgcttgaagattcttgttcaacacttatccattaatctgacagcaggaagtgctaaagagcagaaacaggagtcggtcagactctcacctcaagtccaaggcaaatatgcttgcccctaaaagacatacttgatcttcaagttcaggaaaaccagatacaaagtctcactctgttgcccaggatggagtgcagtggtgcgatctcagctcactacaacctctgcctcccagggtcaagcgattctcctgcttcagcctccccagtagctgggactacaggtagcctcagcttgcacctgcatcagtcagtatttaccagccattctagacccttttaggatcctcaaacacacctcacaggactcaaaaggaagcgaactttcaccagttcgccaactgtcgtcaccaatctcatcactcaagagaaactcattcagcttttgaacactgcaaaaaacaataaacacaga

SEQ ID NO: 279605 - DNA, 807 bp, Homo sapiens
cagccagagattatgtgggcttttccatgggaagaaccactctacgttatcaccttctacatagtagcagttgaagccaaatggacagaaagcccgagacaacatgaagttgttctacaagttattttggagaaattgacttaccataccactcatcaacccatgcaaaagcctgtctatgtccaatcagcagaatgtctcggaccacctaaaaagtaaaagaaggagactgaaataatagcatctttgatgaaaactatctggaagacaagttgttaacaattctggggatcttggtgattacagagttcttaatccctctgtccataggtgatgacaattacaggctgcctataggtcctatagtgctcacacacctccagcccttccccatggtgtacacacacttgcagtatattcatctctttgtcttatttgagagtagggctgggtgtgtgtacaaactaatgacaaatacttgacagtcacacagcagtgatacaaataaatatctaggttaattaccttgaagtttttctctccatttatttttaactaaaacagcatctacttttcatctgtgggagggtgtgtctcactggtaccaggaggtcataaattttggaaatctagaacacttttctaggcagcaagtcactttttttttttttttttggaaacaaattcttactctgtcgccaagctggagtgcagtggcgcgatcttggctcacagcaacctcgtgcctccagggttcaagcaattctcctgcctcagcctcacaagtagctgggactacaggcgtgg

SEQ ID NO: 279606 - DNA, 1901 bp, Homo sapiens
ggcgcccgaggagaacgctgggacctaactcttgctgcagagtttggagcgccgctttctggcggcgcgcgcgctgcgctccttcccctggcagagcttagaagcaaaattaacagactcatcagattctgagcttctgcgggatattttgcagaagactgtgaagcatcctgtgtgtgtgacgcacccgccgtcagtcaagtatgcccggtgctttctctcagaactcatcaaaaagacgtgctgtattgcccagaagccatcgtgttgctggtcggggtcctgctgaggctggctgcctgccgggagcaccagcgggctcctgaggtctatgtggcctttactgtccgcaacccagagacatgccagctgttcaccaccgagctaggccaggccaggatcagatgggaagtggaacctcgtcatgaccagaaactgtttccctatgaagagcacttggagatggcaatgctgaacctcacactgtaggactcacacacgactccaatgggattgtgagaatcaagtcactctcaagggaagaggtttcatatgggaaagctgataaaactttcactggactggaatgtttggagaatgttaatttccaaatcaggaactacaaactgccctctaataagacatcggctatctaagcgtgtgggtgctccctttctgccagcagttctggttcttaaggaaatcgccatcactcagacatgaaaactctggctccaaaaatagcattttctttgtgcaaataaaaacgtgtgtatcaagtatgtggacacactcggttcctcacaaagccaagcccgctgcagctgccacatccctggacacactcggttcctcacaaagccaagactgctgcagctgccacatccgcggacacactcagttcttcacaaagccaagcccgctgcagctgccacatccctgggcttacgatgcagcaggtgcttttttcaagacaggaatcaaaatgttaggaacacggcagaaaggtgacacctggagaccaaacgcaggataaggagtactgcagaggtcacagggaagtcacagaacagtaatacgctagcaggggcatggggcatgaagaacagaagaagagaggaagtgtttccgagcctccggaaaagaaatcagagccaagcacagcttcccgggtcacagaaccaattcattcaccaggcggcaccactgccgtcatttcagcttctggccactgggaggcgctgctcaaaagggtttgccctgagactccgagaagaagctgcgggaaggacagcaggggtcccggggttttagcctctggcccaggagttgtatgtccataaccaaagggagcacagtctgcacccagctctcatcccatcggagctgctgcgactcccgcaggttcttccaaaactggtttagcttgcctgcaggatcaggaaagtttgagaaaagcatctgcaaaaaaataaagagcagagcttacctcattgcctgtccccaccccatcccaggtcaccacctggctgaccccaggtccccgacccaacaacaacccctcccaagttcctaactccctcacttggactcgagactcttcacgccccagcagcgctccgcctccaacttgacatcatgctttctggaaacttccccgtatgtcccactttcccacacttggtgccctggagcacctcccggcctctaacgtgctgtatgttcccctgcgagcaccctcctcttggcctctggccaagtcccacccatctgtgggtaacaagggggtgtcggtgttcttttcagccttgctaaactctctgaatcaaggatcacaaactacagcctgcaggccaaatccagcccacagcctgtgtttgtaaataaagttttattggaac

SEQ ID NO: 279607 - DNA, 1688 bp, Homo sapiens
ggcgcccgaggagaacgctgggacctaactcttgctgcagagtttggagcgccgctttctggcggcgcgcgcgctgcgctccttcccctggcagactgtgaagcatcctgtgtgtgtgacgcacccgccgtcagtcaagtatgcccggtgctttctctcagaactcatcaaaaaggccaggccaggatcagatgggaagtggaacctcgtcatgaccagaaactgtttccctatgaagagcacttggagatggcaatgctgaacctcacactgtaggactcacacacgactccaatgggattgtgagaatcaagtcactctcaagggaagaggtttcatatgggaaagctgataaaactttcactggactggaatgtttggagaatgttaatttccaaatcaggaactacaaactgccctctaataagacatcggctatctaagcgtgtgggtgctccctttctgccagcagttctggttcttaaggaaatcgccatcactcagacatgaaaactctggctccaaaaatagcattttctttgtgcaaataaaaacgtgtgtatcaagtatgtggacacactcggttcctcacaaagccaagcccgctgcagctgccacatccctggacacactcggttcctcacaaagccaagactgctgcagctgccacatccgcggacacactcagttcttcacaaagccaagcccgctgcagctgccacatccctgggcttacgatgcagcaggtgcttttttcaagacaggaatcaaaatgttaggaacacggcagaaaggtgacacctggagaccaaacgcaggataaggagtactgcagaggtcacagggaagtcacagaacagtaatacgctagcaggggcatggggcatgaagaacagaagaagagaggaagtgtttccgagcctccggaaaagaaatcagagccaagcacagcttcccgggtcacagaaccaattcattcaccaggcggcaccactgccgtcatttcagcttctggccactgggaggcgctgctcaaaagggtttgccctgagactccgagaagaagctgcgggaaggacagcaggggtcccggggttttagcctctggcccaggagttgtatgtccataaccaaagggagcacagtctgcacccagctctcatcccatcggagctgctgcgactcccgcaggttcttccaaaactggtttagcttgcctgcaggatcaggaaagtttgagaaaagcatctgcaaaaaaataaagagcagagcttacctcattgcctgtccccaccccatcccaggtcaccacctggctgaccccaggtccccgacccaacaacaacccctcccaagttcctaactccctcacttggactcgagactcttcacgccccagcagcgctccgcctccaacttgacatcatgctttctggaaacttccccgtatgtcccactttcccacacttggtgccctggagcacctcccggcctctaacgtgctgtatgttcccctgcgagcaccctcctcttggcctctggccaagtcccacccatctgtgggtaacaagggggtgtcggtgttcttttcagccttgctaaactctctgaatcaaggatcacaaactacagcctgcaggccaaatccagcccacagcctgtgtttgtaaataaagttttattggaac

SEQ ID NO: 279608 - DNA, 1670 bp, Homo sapiens
ggcgcccgaggagaacgctgggacctaactcttgctgcagagtttggagcgccgctttctggcggcgcgcgcgctgcgctccttcccctggcagagcttagaagcaaaattaacagactcatcagattctgagcttctgcgggatattttgcagaaggccaggccaggatcagatgggaagtggaacctcgtcatgaccagaaactgtttccctatgaagagcacttggagatggcaatgctgaacctcacactgtaggactcacacacgactccaatgggattgtgagaatcaagtcactctcaagggaagaggtttcatatgggaaagctgataaaactttcactggactggaatgtttggagaatgttaatttccaaatcaggaactacaaactgccctctaataagacatcggctatctaagcgtgtgggtgctccctttctgccagcagttctggttcttaaggaaatcgccatcactcagacatgaaaactctggctccaaaaatagcattttctttgtgcaaataaaaacgtgtgtatcaagtatgtggacacactcggttcctcacaaagccaagcccgctgcagctgccacatccctggacacactcggttcctcacaaagccaagactgctgcagctgccacatccgcggacacactcagttcttcacaaagccaagcccgctgcagctgccacatccctgggcttacgatgcagcaggtgcttttttcaagacaggaatcaaaatgttaggaacacggcagaaaggtgacacctggagaccaaacgcaggataaggagtactgcagaggtcacagggaagtcacagaacagtaatacgctagcaggggcatggggcatgaagaacagaagaagagaggaagtgtttccgagcctccggaaaagaaatcagagccaagcacagcttcccgggtcacagaaccaattcattcaccaggcggcaccactgccgtcatttcagcttctggccactgggaggcgctgctcaaaagggtttgccctgagactccgagaagaagctgcgggaaggacagcaggggtcccggggttttagcctctggcccaggagttgtatgtccataaccaaagggagcacagtctgcacccagctctcatcccatcggagctgctgcgactcccgcaggttcttccaaaactggtttagcttgcctgcaggatcaggaaagtttgagaaaagcatctgcaaaaaaataaagagcagagcttacctcattgcctgtccccaccccatcccaggtcaccacctggctgaccccaggtccccgacccaacaacaacccctcccaagttcctaactccctcacttggactcgagactcttcacgccccagcagcgctccgcctccaacttgacatcatgctttctggaaacttccccgtatgtcccactttcccacacttggtgccctggagcacctcccggcctctaacgtgctgtatgttcccctgcgagcaccctcctcttggcctctggccaagtcccacccatctgtgggtaacaagggggtgtcggtgttcttttcagccttgctaaactctctgaatcaaggatcacaaactacagcctgcaggccaaatccagcccacagcctgtgtttgtaaataaagttttattggaac

SEQ ID NO: 279609 - DNA, 1999 bp, Homo sapiens
ggcgcccgaggagaacgctgggacctaactcttgctgcagagtttggagcgccgctttctggcggcgcgcgcgctgcgctccttcccctggcaggtgggcggcggggcgagcggagaggcccgcagggctcgcgggagtccaggggcagacgggatgggtctccgtgcagaagcccccgacacgcccgccacagcttagaagcaaaattaacagactcatcagattctgagcttctgcgggatattttgcagaagactgtgaagcatcctgtgtgtgtgacgcacccgccgtcagtcaagtatgcccggtgctttctctcagaactcatcaaaaagacgtgctgtattgcccagaagccatcgtgttgctggtcggggtcctgctgaggctggctgcctgccgggagcaccagcgggctcctgaggtctatgtggcctttactgtccgcaacccagagacatgccagctgttcaccaccgagctaggccaggccaggatcagatgggaagtggaacctcgtcatgaccagaaactgtttccctatgaagagcacttggagatggcaatgctgaacctcacactgtaggactcacacacgactccaatgggattgtgagaatcaagtcactctcaagggaagaggtttcatatgggaaagctgataaaactttcactggactggaatgtttggagaatgttaatttccaaatcaggaactacaaactgccctctaataagacatcggctatctaagcgtgtgggtgctccctttctgccagcagttctggttcttaaggaaatcgccatcactcagacatgaaaactctggctccaaaaatagcattttctttgtgcaaataaaaacgtgtgtatcaagtatgtggacacactcggttcctcacaaagccaagcccgctgcagctgccacatccctggacacactcggttcctcacaaagccaagactgctgcagctgccacatccgcggacacactcagttcttcacaaagccaagcccgctgcagctgccacatccctgggcttacgatgcagcaggtgcttttttcaagacaggaatcaaaatgttaggaacacggcagaaaggtgacacctggagaccaaacgcaggataaggagtactgcagaggtcacagggaagtcacagaacagtaatacgctagcaggggcatggggcatgaagaacagaagaagagaggaagtgtttccgagcctccggaaaagaaatcagagccaagcacagcttcccgggtcacagaaccaattcattcaccaggcggcaccactgccgtcatttcagcttctggccactgggaggcgctgctcaaaagggtttgccctgagactccgagaagaagctgcgggaaggacagcaggggtcccggggttttagcctctggcccaggagttgtatgtccataaccaaagggagcacagtctgcacccagctctcatcccatcggagctgctgcgactcccgcaggttcttccaaaactggtttagcttgcctgcaggatcaggaaagtttgagaaaagcatctgcaaaaaaataaagagcagagcttacctcattgcctgtccccaccccatcccaggtcaccacctggctgaccccaggtccccgacccaacaacaacccctcccaagttcctaactccctcacttggactcgagactcttcacgccccagcagcgctccgcctccaacttgacatcatgctttctggaaacttccccgtatgtcccactttcccacacttggtgccctggagcacctcccggcctctaacgtgctgtatgttcccctgcgagcaccctcctcttggcctctggccaagtcccacccatctgtgggtaacaagggggtgtcggtgttcttttcagccttgctaaactctctgaatcaaggatcacaaactacagcctgcaggccaaatccagcccacagcctgtgtttgtaaataaagttttattggaac

SEQ ID NO: 279610 - DNA, 2134 bp, Homo sapiens
  misc_feature (1)..(1): n is a, c, g, or t
  misc_feature (10)..(10): n is a, c, g, or t
  misc_feature (13)..(13): n is a, c, g, or t
  misc_feature (17)..(17): n is a, c, g, or t
  misc_feature (29)..(31): n is a, c, g, or t
  misc_feature (52)..(52): n is a, c, g, or t
  misc_feature (66)..(67): n is a, c, g, or t
  misc_feature (83)..(83): n is a, c, g, or t
  misc_feature (88)..(88): n is a, c, g, or t
  misc_feature (92)..(92): n is a, c, g, or t
  misc_feature (146)..(146): n is a, c, g, or t
  misc_feature (162)..(162): n is a, c, g, or t
  misc_feature (166)..(166): n is a, c, g, or t
  misc_feature (171)..(171): n is a, c, g, or t
  misc_feature (173)..(173): n is a, c, g, or t
  misc_feature (184)..(184): n is a, c, g, or t
  misc_feature (192)..(192): n is a, c, g, or t
  misc_feature (197)..(197): n is a, c, g, or t
  misc_feature (204)..(204): n is a, c, g, or t
  misc_feature (207)..(207): n is a, c, g, or t
  misc_feature (211)..(211): n is a, c, g, or t
  misc_feature (218)..(218): n is a, c, g, or t
  misc_feature (256)..(256): n is a, c, g, or t
  misc_feature (320)..(320): n is a, c, g, or t
  misc_feature (322)..(323): n is a, c, g, or t
nttttttttnaanggantcttgctctgtnnncaggctggagtgcagtggcgngatctcagctcacnncaacctccgcctcccnggttnaagngattctcctgcctcagcctcccgagtagctgggactacaggcacgcgccaccangcccatttttgtattnttantagananggggtttcacnatgttggncaggntggtctnganctcntgacctngtgatccacccgcctaggcctcccgaagtgctgggatnacaggcgtgagccaccgcgccaggcctaatttattttcatttttagtaaagacgagggctcgcnannttgcccagcctggtctcgaactcctgagctcaagcgatgattcccgcctccgcctcccaaactgctagaattatatagccttagtttttgactctgtccagatcttcagtatggccccgcctctggagttgaccacgcctgtcattctgagcctcccttctaaccctgtccctgagttgactcagttgcttgagaattgactgctacctcccgccaacgctccttctccggcccgccaggcattctgattacgtccattttcacgtattccttatgtgaataccttcgaggcctccaagttggctgcacctcttggcatttgaccacgcccctacggccccgcccaacctttaagccacgcccttttcaacctggcagtgccccccgattttgatgtcaaagcttctggaatctggaatgcctccacctggtctcagcctctgttactccgtaccccagattttaatttcgcccaggcgaacactgtggctgcacccttaaattcctcagactccctctttccttgtagaaactctgtggctgctgccttgacttcatccctgaaactcaacggggcctctcctgtaccttaataaccacgcccataagccaagctcctccctgacttcctcacccagtagacctgaccgtccagcttctaaaaactctggccacgcccctcaatattgactccgccctcccagaccttccactgttaccgtgccacctcaagattggtccctccaaggctctggcaccgtccccgcttttgaactagctggccccactctaggttacgacctcgtggcctggggcatgactacatttctcgaccatttcctccctatctctttctgcggcttgacgccgccccagtccttacccttcctttttggcgctacagttgctgctggaggatgtggtccggctgcgggggtcctcacggcgcaccgaggcgaggcgctctggtgacaagtagcggcggacactgctaaaagagagcacacaggtcttggaagaggctgggggtcccggccttgtgccttacctgcgcccggaggtcgcctccttcttgggagaggatggggacgtggcatagccacccacgcgccgcgggggtcccgagccattaaggggcgtcctggtgggaaggcctttcaagagctgacacactggagggatggggttaggggacagaagagggcgacgcagagcatccgccagcgccgcctttaggaccgccagctcgtcttcctgtaactgcagccgctgctccagcgccgacacgcggtcgtccacttccataccgctcgtgcccgacaaattgtcatctggaagacgggggagtgccggctgcagggccacccaggagctccagtgcccaaggggtccctcccgccttcctgggtctaagcggggggccagccacgcccctttcctgtcccgctacctggggctgggacacttggacatgagccaaggaagaggactctgaagggggaaggaaatccccacagctctccaacccatccgcacactcctctctgccacagcgcgctggccgtgtgaccttggggaagtcccttccctcttattttctaagagtctgtgaacccaggagcctctcgctctggctttaagatgctatgactaagacgtgaccaggcgcagtggctcacgcctgtaaccccagcactttgggaggccgaggcgggcgtatcacgaggtcaggagatcgagaccatcctggccaacatggtgaaaccccgtctctactaaaataaaattaaattaaaaataaaataaaattt

SEQ ID NO: 279611 - DNA, 2398 bp, Homo sapiens
  misc_feature (1)..(1): n is a, c, g, or t
  misc_feature (10)..(10): n is a, c, g, or t
  misc_feature (13)..(13): n is a, c, g, or t
  misc_feature (17)..(17): n is a, c, g, or t
  misc_feature (29)..(31): n is a, c, g, or t
  misc_feature (52)..(52): n is a, c, g, or t
  misc_feature (66)..(67): n is a, c, g, or t
  misc_feature (83)..(83): n is a, c, g, or t
  misc_feature (88)..(88): n is a, c, g, or t
  misc_feature (92)..(92): n is a, c, g, or t
  misc_feature (146)..(146): n is a, c, g, or t
  misc_feature (162)..(162): n is a, c, g, or t
  misc_feature (166)..(166): n is a, c, g, or t
  misc_feature (171)..(171): n is a, c, g, or t
  misc_feature (173)..(173): n is a, c, g, or t
  misc_feature (184)..(184): n is a, c, g, or t
  misc_feature (192)..(192): n is a, c, g, or t
  misc_feature (197)..(197): n is a, c, g, or t
  misc_feature (204)..(204): n is a, c, g, or t
  misc_feature (207)..(207): n is a, c, g, or t
  misc_feature (211)..(211): n is a, c, g, or t
  misc_feature (218)..(218): n is a, c, g, or t
  misc_feature (256)..(256): n is a, c, g, or t
  misc_feature (320)..(320): n is a, c, g, or t
  misc_feature (322)..(323): n is a, c, g, or t
  misc_feature (1333)..(1333): n is a, c, g, or t
nttttttttnaanggantcttgctctgtnnncaggctggagtgcagtggcgngatctcagctcacnncaacctccgcctcccnggttnaagngattctcctgcctcagcctcccgagtagctgggactacaggcacgcgccaccangcccatttttgtattnttantagananggggtttcacnatgttggncaggntggtctnganctcntgacctngtgatccacccgcctaggcctcccgaagtgctgggatnacaggcgtgagccaccgcgccaggcctaatttattttcatttttagtaaagacgagggctcgcnannttgcccagcctggtctcgaactcctgagctcaagcgatgattcccgcctccgcctcccaaactgctagaattatatagccttagtttttgactctgtccagatcttcagtatggccccgcctctggagttgaccacgcctgtcattctgagcctcccttctaaccctgtccctgagttgactcagttgcttgagaattgactgctacctcccgccaacgctccttctccggcccgccaggcattctgattacgtccattttcacgtattccttatgtgaataccttcgaggcctccaagttggctgcacctcttggcatttgaccacgcccctacggccccgcccaacctttaagccacgcccttttcaacctggcagtgccccccgattttgatgtcaaagcttctggaatctggaatgcctccacctggtctcagcctctgttactccgtaccccagattttaatttcgcccaggcgaacactgtggctgcacccttaaattcctcagactccctctttccttgtagaaactctgtggctgctgccttgacttcatccctgaaactcaacggggcctctcctgtaccttaataaccacgcccataagccaagctcctccctgacttcctcacccagtagacctgaccgtccagcttctaaaaactctggccacgcccctcaatattgactccgccctcccagaccttccactgttaccgtgccacctcaagattggtccctccaaggctctggcaccgtccccgcttttgaactagctggccccactctaggttacgacctcgtggcctggggcatgactacatttctcgaccatttcctccctatctctttctgcggcttgacgccgccccagtccttacccttcctttttggcgctacagttgctgctggaggatgtggtccggctgcgggggtcctcacggcgcaccgaggcgaggcgctctggtgacaagtagcggcggacactgctaaaagagagcacacagntgggggcagagccttctaggccagcaggcgagtgccgtgagcaagcgagattctccctgcaccctctgctgctggagctcaggcaaacaaaccacctctgtctcccacgaggtcttggaagaggctgggggtcccggccttgtgccttacctgcgcccggaggtcgcctccttcttgggagaggatggggacgtggcatagccacccacgcgccgcgggggtcccgagccattaaggggcgtcctggtgggaaggcctttcaagagctgacacactggagggatggggttaggggacagaagagggtgagtataaggaccaggccccggtcctccccatcccacccctccagtctaacggggatacccgaggcagtggtgcctaagcgcggaggcgcccggcccttgggggtgccccgcgcgcgtagcgccgctccctgttcttcgcatgcccgcaggcgacgcagagcatccgccagcgccgcctttaggaccgccagctcgtcttcctgtaactgcagccgctgctccagcgccgacacgcggtcgtccacttccataccgctcgtgcccgacaaattgtcatctggaagacgggggagtgccggctgcagggccacccaggagctccagtgcccaaggggtccctcccgccttcctgggtctaagcggggggccagccacgcccctttcctgtcccgctacctggggctgggacacttggacatgagccaaggaagaggactctgaagggggaaggaaatccccacagctctccaacccatccgcacactcctctctgccacagcgcgctggccgtgtgaccttggggaagtcccttccctcttattttctaagagtctgtgaacccaggagcctctcgctctggctttaagatgctatgactaagacgtgaccaggcgcagtggctcacgcctgtaaccccagcactttgggaggccgaggcgggcgtatcacgaggtcaggagatcgagaccatcctggccaacatggtgaaaccccgtctctactaaaataaaattaaattaaaaataaaataaaattt

SEQ ID NO: 279612 - DNA, 1940 bp, Homo sapiens
  misc_feature (1)..(1): n is a, c, g, or t
  misc_feature (10)..(10): n is a, c, g, or t
  misc_feature (13)..(13): n is a, c, g, or t
  misc_feature (17)..(17): n is a, c, g, or t
  misc_feature (29)..(31): n is a, c, g, or t
  misc_feature (52)..(52): n is a, c, g, or t
  misc_feature (66)..(67): n is a, c, g, or t
  misc_feature (83)..(83): n is a, c, g, or t
  misc_feature (88)..(88): n is a, c, g, or t
  misc_feature (92)..(92): n is a, c, g, or t
  misc_feature (146)..(146): n is a, c, g, or t
  misc_feature (162)..(162): n is a, c, g, or t
  misc_feature (166)..(166): n is a, c, g, or t
  misc_feature (171)..(171): n is a, c, g, or t
  misc_feature (173)..(173): n is a, c, g, or t
  misc_feature (184)..(184): n is a, c, g, or t
  misc_feature (192)..(192): n is a, c, g, or t
  misc_feature (197)..(197): n is a, c, g, or t
  misc_feature (204)..(204): n is a, c, g, or t
  misc_feature (207)..(207): n is a, c, g, or t
  misc_feature (211)..(211): n is a, c, g, or t
  misc_feature (218)..(218): n is a, c, g, or t
  misc_feature (256)..(256): n is a, c, g, or t
  misc_feature (320)..(320): n is a, c, g, or t
  misc_feature (322)..(323): n is a, c, g, or t
nttttttttnaanggantcttgctctgtnnncaggctggagtgcagtggcgngatctcagctcacnncaacctccgcctcccnggttnaagngattctcctgcctcagcctcccgagtagctgggactacaggcacgcgccaccangcccatttttgtattnttantagananggggtttcacnatgttggncaggntggtctnganctcntgacctngtgatccacccgcctaggcctcccgaagtgctgggatnacaggcgtgagccaccgcgccaggcctaatttattttcatttttagtaaagacgagggctcgcnannttgcccagcctggtctcgaactcctgagctcaagcgatgattcccgcctccgcctcccaaactgctagaattatatagccttagtttttgactctgtccagatcttcagtatggccccgcctctggagttgaccacgcctgtcattctgagcctcccttctaaccctgtccctgagttgactcagttgcttgagaattgactgctacctcccgccaacgctccttctccggcccgccaggcattctgattacgtccattttcacgtattccttatgtgaataccttcgaggcctccaagttggctgcacctcttggcatttgaccacgcccctacggccccgcccaacctttaagccacgcccttttcaacctggcagtgccccccgattttgatgtcaaagcttctggaatctggaatgcctccacctggtctcagcctctgttactccgtaccccagattttaatttcgcccaggcgaacactgtggctgcacccttaaattcctcagactccctctttccttgtagaaactctgtggctgctgccttgacttcatccctgaaactcaacggggcctctcctgtaccttaataaccacgcccataagccaagctcctccctgacttcctcacccagtagacctgaccgtccagcttctaaaaactctggccacgcccctcaatattgactccgccctcccagaccttccactgttaccgtgccacctcaagattggtccctccaaggctctggcaccgtccccgcttttgaactagctggccccactctaggttacgacctcgtggcctggggcatgactacatttctcgaccatttcctccctatctctttctgcggcttgacgccgccccagtccttacccttcctttttggcgctacagttgctgctggaggatgtggtccggctgcgggggtcctcacggcgcaccgaggcgaggcgctctggtgacaagtagcggcggacactgctaaaagagagcacacaggcgacgcagagcatccgccagcgccgcctttaggaccgccagctcgtcttcctgtaactgcagccgctgctccagcgccgacacgcggtcgtccacttccataccgctcgtgcccgacaaattgtcatctggaagacgggggagtgccggctgcagggccacccaggagctccagtgcccaaggggtccctcccgccttcctgggtctaagcggggggccagccacgcccctttcctgtcccgctacctggggctgggacacttggacatgagccaaggaagaggactctgaagggggaaggaaatccccacagctctccaacccatccgcacactcctctctgccacagcgcgctggccgtgtgaccttggggaagtcccttccctcttattttctaagagtctgtgaacccaggagcctctcgctctggctttaagatgctatgactaagacgtgaccaggcgcagtggctcacgcctgtaaccccagcactttgggaggccgaggcgggcgtatcacgaggtcaggagatcgagaccatcctggccaacatggtgaaaccccgtctctactaaaataaaattaaattaaaaataaaataaaattt

SEQ ID NO: 279613 - DNA, 473 bp, Homo sapiens
gcaggatctgtgagaatgggcctgactgtgcaggctgcaatgtggagtaccagtcttgcaacaccaacccgtgtcctgagctgaagaagaccacgccctggacaccctggacacctgtcaacatctctgacaacggcggccactatgagcaacgattccgatacacatgcaaagcccgcctggctgatccgaatttgctggaagtgggaagacagagaatcgaaatgcggtactgttctagcgacggcaccagtggctgctccacagatgggctttctggggatttcctgcgtgctgggagatactctgcccacacggtcaacggggcttggtcagcctggacgtcgtggtcacagtgcagccgtgactgcagcaggggcattcggaaccggaagcgtgtttgcaacaaccccgaacccaagtatgggggaatgccttgccttggcccatctctggaataccaggaatgcaac

SEQ ID NO: 279614 - DNA, 456 bp, Homo sapiens
ataggcttttttttttttttgaggaaaaagaagaaagagaaagagacaaaggaaaaggagaaagacaagagaggaagaagcaggaggaaaacagtggagagaagaagaaaaaagagaaaaaataaattacagctatctgggcttccatgggagtgccaactctgacagctgagacatctctgacttggctctttcacctcttgtgcaagggaagaacagcactatttttaaaggaggtcattagtgagtcatgtttaagctcaatgcttagccatcatcgccatttgggtgcttgttgggaaggtcctaaattgagcggcctttgggcacagatctctgtgcactttgtttgccacttgctggctagctgatctggagactagttgaattttgcagtttttctgttttattttcctgacaaagcagtcgttccattaagaaaaaagcactcagcta

SEQ ID NO: 279615 - DNA, 1562 bp, Homo sapiens
cagctctcaaatctccaggcagcctctattgattgatctgagttggcagatgagttggcaggcaagggcagtgactggaagctgggagagagggtcaacagctgaatctcagcctgatggaggccaccatttaataagtaaatacatgcacggctatttagatcctgcatcagacaggtcatcagaaaacatgaagctaaatgcagtaaagaattactctcttgaactcttgaaaatatcaaaaacatgaagctaaatgcagtaaagaattagtctcttgaactcttgaaaatatcattttcttatagaaatggtttaaaaatttcttttttattatttctaattttccttcagaaaattgtgagttttaacctacaacacatacactccaaggtaatgccactctaatgctgtctagttgatctgaataactaactggtcaattatcagatccaccaaactgtctctctggagattaacttctgccagcatattggtttctgttcattttcacaagattgacaggctcattacagcaatattaacatcttcctttgagcactcacactgtgcaattgtaattttgcatatgttgatgagcaggcaattacatcaaagagtgaacactgggctgatgtgcaaggcactatttaattataaaaacagtataggattgagccctgtcactgagtcttccattccttctatctcgcctgtttctaatttatttctctatttcttcatttcttccttgactgtcttcattctttgctttttatttcttctccttcatcccttaaatgacagaccttttcttagatgccatttctctatgtctgcgcttaagacaagaatttttttcctcctagttgttggttaatgtctgcaaatgtgagagcatgttaacatgacaaacaacaaggaatttgaaataaacttaaatgaaacagtgtcttttctccccctactctcccccaccccccatggtggaaatgatgatatccttaccatctgcacacttgcaggctgtgagtgggcagaaaaccagctggagatgcagcccatggcagggatacagatcctcagcttctgggaggtcctagaagctcacaatgccacccagctattggactatcatctctcatcatgtatattcaaagggaaaatgtacaacatttcttctaaactattttgtacagagaacatctccactatcatcaaaaagaggctgatgtgtagtagggagaaagtgttctggactaagtgtcaggaaacctcagtgcttcaggttctcttgcaattatgagactggttctgttacttcacctctctggagtttatttttcttatttgtatagtgaaggcctccagctttagcatctcataattttgttgtggaaaataaatacgtgcagaattaagagaataatgaaaagagtttgagggtatctcctctgccttaattgacaaactatgttaagggtagactatcacggtatccttcaaacatatctatgaggcaaggcttgtggcagaaaaggaagcaaaatgatatacttgtc

SEQ ID NO: 279616 - DNA, 1620 bp, Homo sapiens
tgaggcctccccagcaatgcagaactaagttacgaagacaaaagaggaatgacgactcagcatatgtaattatccagttgatatttatcttgttccagtcacctttagaaagctgtttggcaagggcagtgactggaagctgggagagagggtcaacagctgaatctcagcctgatggaggccaccatttaataagtaaatacatgcacggctatttagatcctgcatcagacaggtcatcagaaaacatgaagctaaatgcagtaaagaattactctcttgaactcttgaaaatatcaaaaacatgaagctaaatgcagtaaagaattagtctcttgaactcttgaaaatatcattttcttatagaaatggtttaaaaatttcttttttattatttctaattttccttcagaaaattgtgagttttaacctacaacacatacactccaaggtaatgccactctaatgctgtctagttgatctgaataactaactggtcaattatcagatccaccaaactgtctctctggagattaacttctgccagcatattggtttctgttcattttcacaagattgacaggctcattacagcaatattaacatcttcctttgagcactcacactgtgcaattgtaattttgcatatgttgatgagcaggcaattacatcaaagagtgaacactgggctgatgtgcaaggcactatttaattataaaaacagtataggattgagccctgtcactgagtcttccattccttctatctcgcctgtttctaatttatttctctatttcttcatttcttccttgactgtcttcattctttgctttttatttcttctccttcatcccttaaatgacagaccttttcttagatgccatttctctatgtctgcgcttaagacaagaatttttttcctcctagttgttggttaatgtctgcaaatgtgagagcatgttaacatgacaaacaacaaggaatttgaaataaacttaaatgaaacagtgtcttttctccccctactctcccccaccccccatggtggaaatgatgatatccttaccatctgcacacttgcaggctgtgagtgggcagaaaaccagctggagatgcagcccatggcagggatacagatcctcagcttctgggaggtcctagaagctcacaatgccacccagctattggactatcatctctcatcatgtatattcaaagggaaaatgtacaacatttcttctaaactattttgtacagagaacatctccactatcatcaaaaagaggctgatgtgtagtagggagaaagtgttctggactaagtgtcaggaaacctcagtgcttcaggttctcttgcaattatgagactggttctgttacttcacctctctggagtttatttttcttatttgtatagtgaaggcctccagctttagcatctcataattttgttgtggaaaataaatacgtgcagaattaagagaataatgaaaagagtttgagggtatctcctctgccttaattgacaaactatgttaagggtagactatcacggtatccttcaaacatatctatgaggcaaggcttgtggcagaaaaggaagcaaaatgatatacttgtc

SEQ ID NO: 279617 - DNA, 1631 bp, Homo sapiens
tggcaggcagagagggagaaataacaagaatggaagagtcgttcttccaaaaagggccatctgtgaccctgagagataaacctggcagaccagggctcacatcttagtaaatcacctgtaaataaagcttgcaagggcagtgactggaagctgggagagagggtcaacagctgaatctcagcctgatggaggccaccatttaataagtaaatacatgcacggctatttagatcctgcatcagacaggtcatcagaaaacatgaagctaaatgcagtaaagaattactctcttgaactcttgaaaatatcaaaaacatgaagctaaatgcagtaaagaattagtctcttgaactcttgaaaatatcattttcttatagaaatggtttaaaaatttcttttttattatttctaattttccttcagaaaattgtgagttttaacctacaacacatacactccaaggtaatgccactctaatgctgtctagttgatctgaataactaactggtcaattatcagatccaccaaactgtctctctggagattaacttctgccagcatattggtttctgttcattttcacaagattgacaggctcattacagcaatattaacatcttcctttgagcactcacactgtgcaattgtaattttgcatatgttgatgagcaggcaattacatcaaagagtgaacactgggctgatgtgcaaggcactatttaattataaaaacagtataggattgagccctgtcactgagtcttccattccttctatctcgcctgtttctaatttatttctctatttcttcatttcttccttgactgtcttcattctttgctttttatttcttctccttcatcccttaaatgacagaccttttcttagatgccatttctctatgtctgcgcttaagacaagaatttttttcctcctagttgttggttaatgtctgcaaatgtgagagcatgttaacatgacaaacaacaaggaatttgaaataaacttaaatgaaacagtgtcttttctccccctactctcccccaccccccatggtggaaatgatgatatccttaccatctgcacacttgcaggctgtgagtgggcagaaaaccagctggagatgcagcccatggcagggatacagatcctcagcttctgggaggtcctagaagctcacaatgccacccagctattggactatcatctctcatcatgtatattcaaagggaaaatgtacaacatttcttctaaactattttgtacagagaacatctccactatcatcaaaaagaggctgatgtgtagtagggagaaagtgttctggactaagtgtcaggaaacctcagtgcttcaggttctcttgcaattatgagactggttctgttacttcacctctctggagtttatttttcttatttgtatagtgaaggcctccagctttagcatctcataattttgttgtggaaaataaatacgtgcagaattaagagaataatgaaaagagtttgagggtatctcctctgccttaattgacaaactatgttaagggtagactatcacggtatccttcaaacatatctatgaggcaaggcttgtggcagaaaaggaagcaaaatgatatacttgtc

SEQ ID NO: 279618 - DNA, 1543 bp, Homo sapiens
  misc_feature (23)..(23): n is a, c, g, or t
  misc_feature (38)..(38): n is a, c, g, or t
  misc_feature (42)..(42): n is a, c, g, or t
ggatgtagtgcgccaccagcaanaaaaaaaaaaaatanttcngcaagggcagtgactggaagctgggagagagggtcaacagctgaatctcagcctgatggaggccaccatttaataagtaaatacatgcacggctatttagatcctgcatcagacaggtcatcagaaaacatgaagctaaatgcagtaaagaattactctcttgaactcttgaaaatatcaaaaacatgaagctaaatgcagtaaagaattagtctcttgaactcttgaaaatatcattttcttatagaaatggtttaaaaatttcttttttattatttctaattttccttcagaaaattgtgagttttaacctacaacacatacactccaaggtaatgccactctaatgctgtctagttgatctgaataactaactggtcaattatcagatccaccaaactgtctctctggagattaacttctgccagcatattggtttctgttcattttcacaagattgacaggctcattacagcaatattaacatcttcctttgagcactcacactgtgcaattgtaattttgcatatgttgatgagcaggcaattacatcaaagagtgaacactgggctgatgtgcaaggcactatttaattataaaaacagtataggattgagccctgtcactgagtcttccattccttctatctcgcctgtttctaatttatttctctatttcttcatttcttccttgactgtcttcattctttgctttttatttcttctccttcatcccttaaatgacagaccttttcttagatgccatttctctatgtctgcgcttaagacaagaatttttttcctcctagttgttggttaatgtctgcaaatgtgagagcatgttaacatgacaaacaacaaggaatttgaaataaacttaaatgaaacagtgtcttttctccccctactctcccccaccccccatggtggaaatgatgatatccttaccatctgcacacttgcaggctgtgagtgggcagaaaaccagctggagatgcagcccatggcagggatacagatcctcagcttctgggaggtcctagaagctcacaatgccacccagctattggactatcatctctcatcatgtatattcaaagggaaaatgtacaacatttcttctaaactattttgtacagagaacatctccactatcatcaaaaagaggctgatgtgtagtagggagaaagtgttctggactaagtgtcaggaaacctcagtgcttcaggttctcttgcaattatgagactggttctgttacttcacctctctggagtttatttttcttatttgtatagtgaaggcctccagctttagcatctcataattttgttgtggaaaataaatacgtgcagaattaagagaataatgaaaagagtttgagggtatctcctctgccttaattgacaaactatgttaagggtagactatcacggtatccttcaaacatatctatgaggcaaggcttgtggcagaaaaggaagcaaaatgatatacttgtc

SEQ ID NO: 279619 - DNA, 1034 bp, Homo sapiens
cagctctcaaatctccaggcagcctctattgattgatctgagttggcagatgagttggcaggcaagggcagtgactggaagctgggagagagggtcaacagctgaatctcagcctgatggaggccaccatttaataagtaaatacatgcacggctatttagatcctgcatcagacaggtcatcagaaaacatgaagctaaatgcagtaaagaattactctcttgaactcttgaaaatatcaaaaacatgaagctaaatgcagtaaagaattagtctcttgaactcttgaaaatatcattttcttatagaaatggtttaaaaatttcttttttattatttctaattttccttcagaaaattgtgagttttaacctacaacacatacactccaaggtaatgccactctaatgctgtctagttgatctgaataactaactggtcaattatcagatccaccaaactgtctctctggagattaacttctgccagcatattggtttctgttcattttcacaagattgacaggctcattacagcaatattaacatcttcctttgagcactcacactgtgcaattgtaattttgcatatgttgatgagcaggcaattacatcaaagagtgaacactgggctgatgtgcaaggcactatttaattataaaaacagtataggattgagccctgtcactgagtcttccattccttctatctcgcctgtttctaatttatttctctatttcttcatttcttccttgactgtcttcattctttgctttttatttcttctccttcatcccttaaatgacagaccttttcttagatgccatttctctatgtctgcgcttaagacaagaatttttttcctcctagttgttggttaatgtctgcaaatgtgagagcatgttaacatgacaaacaacaaggaatttgaaataaaactatggcctcgttggctacagcgtggagtgtgcggccgagcttaaattaatttgaggtcggtcgtgggtgatagataaaatgaattgagattaaaaa

SEQ ID NO: 279620 - DNA, 1866 bp, Homo sapiens
ataggcttttttttttttttgaggaaaaagaagaaagagaaagagacaaaggaaaaggagaaagacaagagaggaagaagcaggaggaaaacagtggagagaagaagaaaaaagagaaaaaataaattacagctatctgggcttccatgggagtgccaactctgacagctgagacatctctgacttggctctttcacctcttgtgcaagggaagaacagcactatttttaaaggaggtcattagttttggaaatcactagtgggtaaaaaagaccaatttgcaactaggctctcatgctctgttgaaaactatgtcacaatatcacaatactagatgctgggctcaagacagcaaacagaaagcagcaagggcagtgactggaagctgggagagagggtcaacagctgaatctcagcctgatggaggccaccatttaataagtaaatacatgcacggctatttagatcctgcatcagacaggtcatcagaaaacatgaagctaaatgcagtaaagaattactctcttgaactcttgaaaatatcaaaaacatgaagctaaatgcagtaaagaattagtctcttgaactcttgaaaatatcattttcttatagaaatggtttaaaaatttcttttttattatttctaattttccttcagaaaattgtgagttttaacctacaacacatacactccaaggtaatgccactctaatgctgtctagttgatctgaataactaactggtcaattatcagatccaccaaactgtctctctggagattaacttctgccagcatattggtttctgttcattttcacaagattgacaggctcattacagcaatattaacatcttcctttgagcactcacactgtgcaattgtaattttgcatatgttgatgagcaggcaattacatcaaagagtgaacactgggctgatgtgcaaggcactatttaattataaaaacagtataggattgagccctgtcactgagtcttccattccttctatctcgcctgtttctaatttatttctctatttcttcatttcttccttgactgtcttcattctttgctttttatttcttctccttcatcccttaaatgacagaccttttcttagatgccatttctctatgtctgcgcttaagacaagaatttttttcctcctagttgttggttaatgtctgcaaatgtgagagcatgttaacatgacaaacaacaaggaatttgaaataaacttaaatgaaacagtgtcttttctccccctactctcccccaccccccatggtggaaatgatgatatccttaccatctgcacacttgcaggctgtgagtgggcagaaaaccagctggagatgcagcccatggcagggatacagatcctcagcttctgggaggtcctagaagctcacaatgccacccagctattggactatcatctctcatcatgtatattcaaagggaaaatgtacaacatttcttctaaactattttgtacagagaacatctccactatcatcaaaaagaggctgatgtgtagtagggagaaagtgttctggactaagtgtcaggaaacctcagtgcttcaggttctcttgcaattatgagactggttctgttacttcacctctctggagtttatttttcttatttgtatagtgaaggcctccagctttagcatctcataattttgttgtggaaaataaatacgtgcagaattaagagaataatgaaaagagtttgagggtatctcctctgccttaattgacaaactatgttaagggtagactatcacggtatccttcaaacatatctatgaggcaaggcttgtggcagaaaaggaagcaaaatgatatacttgtc

SEQ ID NO: 279621 - DNA, 1748 bp, Homo sapiens
gctgcaaagatggccctgcctccatgccttgttgaacatgatgatgcccctgggaatgggaggtgatggttttttacttcggccctagtacagagtatgctcttgaagctggattccatcagcaggttttggaaatcactagtgggtaaaaaagaccaatttgcaactaggctctcatgctctgttgaaaactatgtcacaatatcacaatactagatgctgggctcaagacagcaaacagaaagcagcaagggcagtgactggaagctgggagagagggtcaacagctgaatctcagcctgatggaggccaccatttaataagtaaatacatgcacggctatttagatcctgcatcagacaggtcatcagaaaacatgaagctaaatgcagtaaagaattactctcttgaactcttgaaaatatcaaaaacatgaagctaaatgcagtaaagaattagtctcttgaactcttgaaaatatcattttcttatagaaatggtttaaaaatttcttttttattatttctaattttccttcagaaaattgtgagttttaacctacaacacatacactccaaggtaatgccactctaatgctgtctagttgatctgaataactaactggtcaattatcagatccaccaaactgtctctctggagattaacttctgccagcatattggtttctgttcattttcacaagattgacaggctcattacagcaatattaacatcttcctttgagcactcacactgtgcaattgtaattttgcatatgttgatgagcaggcaattacatcaaagagtgaacactgggctgatgtgcaaggcactatttaattataaaaacagtataggattgagccctgtcactgagtcttccattccttctatctcgcctgtttctaatttatttctctatttcttcatttcttccttgactgtcttcattctttgctttttatttcttctccttcatcccttaaatgacagaccttttcttagatgccatttctctatgtctgcgcttaagacaagaatttttttcctcctagttgttggttaatgtctgcaaatgtgagagcatgttaacatgacaaacaacaaggaatttgaaataaacttaaatgaaacagtgtcttttctccccctactctcccccaccccccatggtggaaatgatgatatccttaccatctgcacacttgcaggctgtgagtgggcagaaaaccagctggagatgcagcccatggcagggatacagatcctcagcttctgggaggtcctagaagctcacaatgccacccagctattggactatcatctctcatcatgtatattcaaagggaaaatgtacaacatttcttctaaactattttgtacagagaacatctccactatcatcaaaaagaggctgatgtgtagtagggagaaagtgttctggactaagtgtcaggaaacctcagtgcttcaggttctcttgcaattatgagactggttctgttacttcacctctctggagtttatttttcttatttgtatagtgaaggcctccagctttagcatctcataattttgttgtggaaaataaatacgtgcagaattaagagaataatgaaaagagtttgagggtatctcctctgccttaattgacaaactatgttaagggtagactatcacggtatccttcaaacatatctatgaggcaaggcttgtggcagaaaaggaagcaaaatgatatacttgtc

SEQ ID NO: 279622 - DNA, 1487 bp, Homo sapiens
  misc_feature (23)..(23): n is a, c, g, or t
  misc_feature (38)..(38): n is a, c, g, or t
  misc_feature (42)..(42): n is a, c, g, or t
ggatgtagtgcgccaccagcaanaaaaaaaaaaaatanttcngcaagggcagtgactggaagctgggagagagggtcaacagctgaatctcagcctgatggaggccaccatttaataagtaaatacatgcacggctatttagatcctgcatcagacaggtcatcagaaaacatgaagctaaatgcagtaaagaattagtctcttgaactcttgaaaatatcattttcttatagaaatggtttaaaaatttcttttttattatttctaattttccttcagaaaattgtgagttttaacctacaacacatacactccaaggtaatgccactctaatgctgtctagttgatctgaataactaactggtcaattatcagatccaccaaactgtctctctggagattaacttctgccagcatattggtttctgttcattttcacaagattgacaggctcattacagcaatattaacatcttcctttgagcactcacactgtgcaattgtaattttgcatatgttgatgagcaggcaattacatcaaagagtgaacactgggctgatgtgcaaggcactatttaattataaaaacagtataggattgagccctgtcactgagtcttccattccttctatctcgcctgtttctaatttatttctctatttcttcatttcttccttgactgtcttcattctttgctttttatttcttctccttcatcccttaaatgacagaccttttcttagatgccatttctctatgtctgcgcttaagacaagaatttttttcctcctagttgttggttaatgtctgcaaatgtgagagcatgttaacatgacaaacaacaaggaatttgaaataaacttaaatgaaacagtgtcttttctccccctactctcccccaccccccatggtggaaatgatgatatccttaccatctgcacacttgcaggctgtgagtgggcagaaaaccagctggagatgcagcccatggcagggatacagatcctcagcttctgggaggtcctagaagctcacaatgccacccagctattggactatcatctctcatcatgtatattcaaagggaaaatgtacaacatttcttctaaactattttgtacagagaacatctccactatcatcaaaaagaggctgatgtgtagtagggagaaagtgttctggactaagtgtcaggaaacctcagtgcttcaggttctcttgcaattatgagactggttctgttacttcacctctctggagtttatttttcttatttgtatagtgaaggcctccagctttagcatctcataattttgttgtggaaaataaatacgtgcagaattaagagaataatgaaaagagtttgagggtatctcctctgccttaattgacaaactatgttaagggtagactatcacggtatccttcaaacatatctatgaggcaaggcttgtggcagaaaaggaagcaaaatgatatacttgtc

SEQ ID NO: 279623 - DNA, 301 bp, Homo sapiens
ttttttttggtttgatttcttttttattctttttccttaggtaattatccagttgatatttatcttgttccagtcacctttagaaagctgtttggtgagtacaatgttaatatagagacaatcagaatggtgtgtgcttttgtacaaaacttgtggatccatcaatgaggcatctgccattttttctttcttcccctctatattacaagttctggaatgcctgttctaattctccaaggagaattagaaaataaaaggcagagtctagagccatgtcaatatcctcccacagaatgtgtat

SEQ ID NO: 279624 - DNA, 969 bp, Homo sapiens
  misc_feature (841)..(841): n is a, c, g, or t
agcggtcttccggccggcgccccgccccctttactgacaggttgcccacctcccccaacgccaccccgcttcgcagtagacggacagaggagtcgtagcggtcgaggcttttgcggctccggcgtgccggaaagtatgttatgcataaaagtggataatttacatgataaatgaaaatggccaattctttaagaggagaagtactaaaactttataaaaatctgctgtatcttggacgagactatccaaaaggagcagactattttaaaaagcgtttgaagaacattttccttaaaaacaaagatgtgaagaatccagagaagatcaaagaacttattgcacagggcgaatttgtaatgaaagagctagaagctttgtacttccttaggaaatacagagctatgaaacaacgctattattcagataccaacaaaactaattgatcattactactttaatttagctatcagtgccagctgtttatgtataccagatgttgtaaaataattctaacttaaaatgggaagatatacatgttgtgtaaaaaatccctgagctgccctactgaactaaataggtttcaacttctgttcatacggagaaagtatcagcaactttatgctcaattttgatacaaacatagcaatttagctatactaccgatcataaattaatgagcacccaattttgaatgaaaatataatacacttaatcctctaacttaataggacttagccaattatttttagcttatttctccattttactgacaagagaatgccatttaccgaacatttaataagcaaaataatttcttacacttttctctaatttgaagganccttttttcccattgggtaagggcttccggtcgtcaaaagcggggtggggcggaacaattgggggcgcgaaaaggggcgggagaaaaaacataaggggggagcgggctggaggaaaaaaaaagtaggg

SEQ ID NO: 279625 - DNA, 650 bp, Homo sapiens
cgggctgcaggaattcggcacgatgttgtgtaaaaaatccctgagctgccctactgaactaaataggtttcaacttctgttcatacggagaaagtatcagcaactttatgctcaattttgatacaaacatagcaatttagctatactaccgatcataaattaatgagcacccaattttgaatgaaaatataatacacttaatcctctaacttaataggacttagccaattatttttagcttatttctccattttactgacaagagaatgccatttaccgaacatttaataagcaaaataatttcttacacacttacttctcttaacttttgaaaggaatcccttattttttcacccaatttggtatattaacagcacatactcaaggttcactacaaaacaaacagttcctggtaatgatttaaatgtagttatagaaataaataatatgtatggagtcattacttctgaccttgaaatagcctgctggtgactggcattaacatacataactaactattcaattatttccattattaatgttgctgctgctacctttgggcctaaaaccaagtcacctgttgtgtatcaattaccttctttgataaaaggaaataaataaataatgttatcctatttttttgtcataaa

SEQ ID NO: 279626 - DNA, 1161 bp, Homo sapiens
agcggtcttccggccggcgccccgccccctttactgacaggttgcccacctcccccaacgccaccccgcttcgcagtagacggacagaggagtcgtagcggtcgaggcttttgcggctccggcgtgccggaaagtatgttatgcataaaagtggataatttacatgataaatgaaaatggccaattctttaagaggagaagtactaaaactttataaaaatctgctgtatcttggacgagactatccaaaaggagcagactattttaaaaagcgtttgaagaacattttccttaaaaacaaagatgtgaagaatccagagaagatcaaagaacttattgcacagggcgaatttgtaatgaaagagctagaagctttgtacttccttaggaaatacagagctatgaaacaacgctattattcagataccaacaaaactaattgatcattactactttaatttagctatcagtgccagctgtttatgtataccagatgttgtaaaataattctaacttaaaatgggaagatatacatgttgtgtaaaaaatccctgagctgccctactgaactaaataggtttcaacttctgttcatacggagaaagtatcagcaactttatgctcaattttgatacaaacatagcaatttagctatactaccgatcataaattaatgagcacccaattttgaatgaaaatataatacacttaatcctctaacttaataggacttagccaattatttttagcttatttctccattttactgacaagagaatgccatttaccgaacatttaataagcaaaataatttcttacacacttacttctcttaacttttgaaaggaatcccttattttttcacccaatttggtatattaacagcacatactcaaggttcactacaaaacaaacagttcctggtaatgatttaaatgtagttatagaaataaataatatgtatggagtcattacttctgaccttgaaatagcctgctggtgactggcattaacatacataactaactattcaattatttccattattaatgttgctgctgctacctttgggcctaaaaccaagtcacctgttgtgtatcaattaccttctttgataaaaggaaataaataaataatgttatcctatttttttgtcataaa

SEQ ID NO: 279627 - DNA, 896 bp, Homo sapiens
agcggtcttccggccggcgccccgccccctttactgacaggttgcccacctcccccaacgccaccccgcttcgcagtagacggacagaggagtcgtagcggtcgaggcttttgcggctccggcgtgccggaaagtatgttatgcataaaagtggataatttacatgataaatgaaaatggccaattctttaagaggagaagtactaaaactttataaaaatctgctgtatcttggacgagactatccaaaaggagcagactattttaaaaagcgtttgaagaacattttccttaaaaacaaagatgtgaagaatccagagaagatcaaagaacttattgcacagggcgaatttgtaatgaaagagctagaagctttgtacttccttaggaaatacagagctatgaaacaacgctattattcagataccaacaaaactaattgatcattactactttaatttagctatcagtgccagctgtttatgtataccagatgttgtaaaataattctaacttaaaatgggaagatatacatgttgtgtaaaaaatccctgagctgccctactgaactaaataggtttcaacttctgttcatacggagaaagtatcagcaactttatgctcaattttgatacaaacatagcaatttagctatactaccgatcataaattaatgagcacccaattttgaatgaaaatataatacacttaatcctctaacttaataggacttagccaattatttttagcttatttctccattttactgacaagagaatgccatttaccgaacatttaataagcaaaataatttcttacacacttacttctcttaacttttgaaaggaatcccttattttttcacctccttaatataaagtgggagtcctctagag

SEQ ID NO: 279628 - DNA, 1277 bp, Homo sapiens
aagcagtggtatcaacgcagagtgcccattacggccggggactgacaggttgcccacctcccccaacgccaccccgcttcgcagtagacggacagaggagtcgtagcggtcgaggcttttgcggctccggcgtgccggaaagaaaacgtcaattatgacagcaggtaattttatcggaagtgtttataactatatcccagtacgtggaacgaaaaagttatcaagaaatatttattgaatgtaaaaaaggtatgttatgcataaaagtggataatttacatgataaatgaaaatggccaattctttaagaggagaagtactaaaactttataaaaatctgctgtatcttggacgagactatccaaaaggagcagactattttaaaaagcgtttgaagaacattttccttaaaaacaaagatgtgaagaatccagagaagatcaaagaacttattgcacagggcgaatttgtaatgaaagagctagaagctttgtacttccttaggaaatacagagctatgaaacaacgctattattcagataccaacaaaactaattgatcattactactttaatttagctatcagtgccagctgtttatgtataccagatgttgtaaaataattctaacttaaaatgggaagatatacatgttgtgtaaaaaatccctgagctgccctactgaactaaataggtttcaacttctgttcatacggagaaagtatcagcaactttatgctcaattttgatacaaacatagcaatttagctatactaccgatcataaattaatgagcacccaattttgaatgaaaatataatacacttaatcctctaacttaataggacttagccaattatttttagcttatttctccattttactgacaagagaatgccatttaccgaacatttaataagcaaaataatttcttacacacttacttctcttaacttttgaaaggaatcccttattttttcacccaatttggtatattaacagcacatactcaaggttcactacaaaacaaacagttcctggtaatgatttaaatgtagttatagaaataaataatatgtatggagtcattacttctgaccttgaaatagcctgctggtgactggcattaacatacataactaactattcaattatttccattattaatgttgctgctgctacctttgggcctaaaaccaagtcacctgttgtgtatcaattaccttctttgataaaaggaaataaataaataatgttatcctatttttttgtcataaa

SEQ ID NO: 279629 - DNA, 1472 bp, Homo sapiens
aagcagtggtatcaacgcagagtgcccattacggccggggactgacaggttgcccacctcccccaacgccaccccgcttcgcagtagacggacagaggagtcgtagcggtcgaggcttttgcggctccggcgtgccggaaagtgcgtgagtgccgccgccggggagttttgttccatttcccggatcctggggtctggaggcgaaatatgctctgggcgaggaccaccgggtgtgggaagagggttctgagcgtctcctgacgttgacggtttatttcctagagtgtgttgggtctttctgtgagggtttcgagaaggaaacaggcatgcgactggttcatgcagcggacacccggtgggaggcctgggcctctgcggtttaatccagcagggggatggggctcattcggcaatttaaagagagaaataagttggctccagagggtatgttatgcataaaagtggataatttacatgataaatgaaaatggccaattctttaagaggagaagtactaaaactttataaaaatctgctgtatcttggacgagactatccaaaaggagcagactattttaaaaagcgtttgaagaacattttccttaaaaacaaagatgtgaagaatccagagaagatcaaagaacttattgcacagggcgaatttgtaatgaaagagctagaagctttgtacttccttaggaaatacagagctatgaaacaacgctattattcagataccaacaaaactaattgatcattactactttaatttagctatcagtgccagctgtttatgtataccagatgttgtaaaataattctaacttaaaatgggaagatatacatgttgtgtaaaaaatccctgagctgccctactgaactaaataggtttcaacttctgttcatacggagaaagtatcagcaactttatgctcaattttgatacaaacatagcaatttagctatactaccgatcataaattaatgagcacccaattttgaatgaaaatataatacacttaatcctctaacttaataggacttagccaattatttttagcttatttctccattttactgacaagagaatgccatttaccgaacatttaataagcaaaataatttcttacacacttacttctcttaacttttgaaaggaatcccttattttttcacccaatttggtatattaacagcacatactcaaggttcactacaaaacaaacagttcctggtaatgatttaaatgtagttatagaaataaataatatgtatggagtcattacttctgaccttgaaatagcctgctggtgactggcattaacatacataactaactattcaattatttccattattaatgttgctgctgctacctttgggcctaaaaccaagtcacctgttgtgtatcaattaccttctttgataaaaggaaataaataaataatgttatcctatttttttgtcataaa

SEQ ID NO: 279630 - DNA, 1252 bp, Homo sapiens
aagcagtggtatcaacgcagagtgcccattacggccggggactgacaggttgcccacctcccccaacgccaccccgcttcgcagtagacggacagaggagtcgtagcggtcgaggcttttgcggctccggcgtgccggaaagtatgttatgcataaaagtggataatttacatgataaatgaaaatggccaattctttaagaggagaagtactaaaactttataaaaatgtaagtaattatgttgccaattttataaaaatgttattatatgacatggattgtttagaaatatataatctttctttttgaagctgctgtatcttggacgagactatccaaaaggagcagactattttaaaaagcgtttgaagaacattttccttaaaaacaaagatgtgaagaatccagagaagatcaaagaacttattgcacagggcgaatttgtaatgaaagagctagaagctttgtacttccttaggaaatacagagctatgaaacaacgctattattcagataccaacaaaactaattgatcattactactttaatttagctatcagtgccagctgtttatgtataccagatgttgtaaaataattctaacttaaaatgggaagatatacatgttgtgtaaaaaatccctgagctgccctactgaactaaataggtttcaacttctgttcatacggagaaagtatcagcaactttatgctcaattttgatacaaacatagcaatttagctatactaccgatcataaattaatgagcacccaattttgaatgaaaatataatacacttaatcctctaacttaataggacttagccaattatttttagcttatttctccattttactgacaagagaatgccatttaccgaacatttaataagcaaaataatttcttacacacttacttctcttaacttttgaaaggaatcccttattttttcacccaatttggtatattaacagcacatactcaaggttcactacaaaacaaacagttcctggtaatgatttaaatgtagttatagaaataaataatatgtatggagtcattacttctgaccttgaaatagcctgctggtgactggcattaacatacataactaactattcaattatttccattattaatgttgctgctgctacctttgggcctaaaaccaagtcacctgttgtgtatcaattaccttctttgataaaaggaaataaataaataatgttatcctatttttttgtcataaa

SEQ ID NO: 279631 - DNA, 1360 bp, Homo sapiens
aagcagtggtatcaacgcagagtgcccattacggccggggactgacaggttgcccacctcccccaacgccaccccgcttcgcagtagacggacagaggagtcgtagcggtcgaggcttttgcggctccggcgtgccggaaagaaaacgtcaattatgacagcaggtaattttatcggaagtgtttataactatatcccagtacgtggaacgaaaaagttatcaagaaatatttattgaatgtaaaaaaggtatgttatgcataaaagtggataatttacatgataaatgaaaatggccaattctttaagaggagaagtactaaaactttataaaaatgtaagtaattatgttgccaattttataaaaatgttattatatgacatggattgtttagaaatatataatctttctttttgaagctgctgtatcttggacgagactatccaaaaggagcagactattttaaaaagcgtttgaagaacattttccttaaaaacaaagatgtgaagaatccagagaagatcaaagaacttattgcacagggcgaatttgtaatgaaagagctagaagctttgtacttccttaggaaatacagagctatgaaacaacgctattattcagataccaacaaaactaattgatcattactactttaatttagctatcagtgccagctgtttatgtataccagatgttgtaaaataattctaacttaaaatgggaagatatacatgttgtgtaaaaaatccctgagctgccctactgaactaaataggtttcaacttctgttcatacggagaaagtatcagcaactttatgctcaattttgatacaaacatagcaatttagctatactaccgatcataaattaatgagcacccaattttgaatgaaaatataatacacttaatcctctaacttaataggacttagccaattatttttagcttatttctccattttactgacaagagaatgccatttaccgaacatttaataagcaaaataatttcttacacacttacttctcttaacttttgaaaggaatcccttattttttcacccaatttggtatattaacagcacatactcaaggttcactacaaaacaaacagttcctggtaatgatttaaatgtagttatagaaataaataatatgtatggagtcattacttctgaccttgaaatagcctgctggtgactggcattaacatacataactaactattcaattatttccattattaatgttgctgctgctacctttgggcctaaaaccaagtcacctgttgtgtatcaattaccttctttgataaaaggaaataaataaataatgttatcctatttttttgtcataaa

SEQ ID NO: 279632 - DNA, 1181 bp, Homo sapiens
agcgggagagagagcgggaggggctgttgcttgacgagaaggcggactgccccgctgtcaccccggaacttataagtacaagggacacgacggcgcttcggtggcgcgttcgagtgttccggaaccagaccagggaagctaccgtgtctgctgtcgtgcgttggagctgaatcgttggcgtgcaggagtgagcaatgggcggtcgtccgaggtaagagaagtactaaaactttataaaaatctgctgtatcttggacgagactatccaaaaggagcagactattttaaaaagcgtttgaagaacattttccttaaaaacaaagatgtgaagaatccagagaagatcaaagaacttattgcacagggcgaatttgtaatgaaagagctagaagctttgtacttccttaggaaatacagagctatgaaacaacgctattattcagataccaacaaaactaattgatcattactactttaatttagctatcagtgccagctgtttatgtataccagatgttgtaaaataattctaacttaaaatgggaagatatacatgttgtgtaaaaaatccctgagctgccctactgaactaaataggtttcaacttctgttcatacggagaaagtatcagcaactttatgctcaattttgatacaaacatagcaatttagctatactaccgatcataaattaatgagcacccaattttgaatgaaaatataatacacttaatcctctaacttaataggacttagccaattatttttagcttatttctccattttactgacaagagaatgccatttaccgaacatttaataagcaaaataatttcttacacacttacttctcttaacttttgaaaggaatcccttattttttcacccaatttggtatattaacagcacatactcaaggttcactacaaaacaaacagttcctggtaatgatttaaatgtagttatagaaataaataatatgtatggagtcattacttctgaccttgaaatagcctgctggtgactggcattaacatacataactaactattcaattatttccattattaatgttgctgctgctacctttgggcctaaaaccaagtcacctgttgtgtatcaattaccttctttgataaaaggaaataaataaataatgttatcctatttttttgtcataaa

SEQ ID NO: 279633 - DNA, 4993 bp, Homo sapiens
ggatggggaaggtctccggccccaggcgcggcgcgcggggcttctgcccagtttcctgcttctcagccgcggtgtctgccccggcccagagcagtctgtgcaatttagaaactcgataggaggcagcagctggtctcccaccaccctaaaaataatccgttccggcgcactgcgtgtttcgcctaggggaggaaaactgtcatcggagagttctgcgtccgggtttgaaatttacatcttaagacagtgtaggaagtcggtgttttgaaggtagctcaagtgcaccggcaggggtttgaagcagcgtgaagctattgcccaagagtaaaccatataagaagaaatgagcctttcattttgtggtaacaacatttcttcatataatatcaacgatggtgtactacaaaattcctgctttgtggatgccctcaacctggtccctcatgtctttctgttgtttatcacttttccaatattgtttattgggtgggggagccaaagctcaaaagtacaaattcaccacaacacatggcttcattttccgggacataacctgagatggattcttacattcgctctcctgtttgtgcatgtctgtgaaatagcagaaggcattgtttcagactcgcggcgggaatcaaggcacctccacctctttatgccagccgtgatgggattcgttgccactacaacatcgatagtgtattatcataatatcgaaacatcaaattttcctaaattacttttagccctgttcctgtattgggtaatggcctttattacaaaaacaataaaattggttaagtactgtcagtctggcttggacatatcaaacctgcgtttctgcatcacaggcatgatggtcatcttgaatgggctcttgatggctgtggagatcaatgtcattcgagtcaggagatatgtatttttcatgaatcctcagaaagtaaagcctcctgaagacctccaggatctgggagtgagatttcttcaaccatttgtgaatttgctgtcaaaagcaacatactggtggatgaacacacttattatatctgctcacaaaaagcctattgatctgaaggcaattggaaaattgccaatagcaatgagagcagtaacaaattatgtttgcctgaaagatgcatatgaagaacaaaagaaaaaagttgcagatcatccaaatcggactccatctatatggcttgcaatgtacagagcttttgggcgaccaattctacttagtagcacattccgctatctggctgatttactgggttttgctggacctctttgtatttctggaatagttcagcgtgtgaatgaaacccagaatgggacaaataacacaactggaatttcagaaaccctctcatcaaaggaatttcttgaaaacgcttacgttctagcagttcttctcttcttggctcttattctgcaaaggacatttttgcaggcttcctactatgtaaccatagagactggcattaacctccgtggagctctgctggccatgatttataataaaatccttaggctctctacgtctaacttatccatgggggagatgactctggggcagatcaacaacttagtcgccattgaaactaatcaactcatgtggtttttgttcctgtgtcccaatctatgggctatgcctgttcagatcataatgggcgtgattctgctctataatttacttggatcaagtgcattggtcggtgcagctgtcattgtgctccttgcgccaattcagtactttattgctacaaagttggcagaggctcagaaaagtacacttgattattccactgagagactcaagaaaacaaatgaaatattgaaaggcatcaaacttctaaaattgtatgcctgggaacacattttctgcaaaagtgtggaggaaacaagaatgaaagaactatctagtctcaaaacctttgcactatatacatcactctccatcttcatgaatgcagcaattcccatagcagctgttcttgctacatttgtgacccatgcgtatgccagtggaaacaatctgaaacctgcagaggcctttgcttcactgtctctcttccatatcctggtcacaccactgtccctgctcttcacggtggtcagatttgcagtcaaagccatcataagtgttcaaaagctgaatgagtttctcttgagtgatgagattggtgacgacagttggcgaactggtgaaagttcgcttccttttgagtcctgtaagaagcacactggagttcagccaaaaactataaacaggaaacagcctggaagatatcacctggacagctatgagcaatcaacacggcgtctacgtcccgcagaaacagaggacattgcaataaaggtcacaaatggatacttttcatggggcagtggtttagctacattatccaatatagatattcgaattccaacaggtcagttaaccatgattgtgggccaagtaggatgtgggaagtcctctcttctccttgccatcctcggtgagatgcagacattggaaggaaaagttcactggagcaatgtaaatgaatctgagccttcttttgaagcaaccagaagtaggaacaggtactctgtggcatatgcagctcaaaagccttggctattaaatgctacagtagaagaaaatattacttttggaagtccttttaacaaacagaggtacaaagctgtcacagatgcctgttctcttcagccagatattgacttattaccatttggagatcaaactgaaattggagagaggggcatcaacctgagtgggggacagaggcagagaatctgtgtggcacgagcgctgtatcaaaacaccaacattgtctttttggatgatccattctcagccctggacattcacttgagtgatcatttaatgcaggaggggattttgaaattcctgcaagatgacaaaaggacactcgttcttgtgactcacaaattacagtatctgacgcatgctgactggatcatagccatgaaagatggaagtgtcctaagagaaggaactttgaaggacattcaaaccaaagatgttgagctttatgaacactggaaaacacttatgaatcggcaagatcaagaattagaaaaggatatggaagctgaccaaactactttagagaggaaaactctccgacgggccatgtattcaagagaagccaaagcccagatggaggacgaagacgaagaggaagaagaggaggaagatgaggatgataacatgtccactgtaatgaggctcaggactaaaatgccatggaaaacctgctggcgctacctgacatctggaggattcttcctgctcatcctgatgattttctctaagcttttgaagcattcggtcattgtagctatagactattggctggccacatggacatcggagtacagtataaacaatactggaaaagctgatcagacctactatgtggctggctttagcatactctgtggagcaggcattttcctttgccttgttacatccctcactgtagaatggatgggtctcacagctgccaaaaatcttcaccacaaccttctcaataagataatccttggaccaataaggttttttgataccacacccctgggactgattctcaatcgcttttcagctgatactaatatcattgatcagcacatccctccaaccttggaatctctaactcgctcaacactgctctgcctgtctgccattgggatgatttcttatgctactcctgtgttcctggttgctctcctgccccttggtgttgccttttattttatccagaaatactttcgggttgcctctaaggacctccaggaactcgacgatagtacccagctccctctgctctgtcacttctcagaaacagcagaaggactcaccaccattcgggcctttaggcatgaaaccagatttaaacaacgtatgctggaactgacggatacaaacaacattgcctacttatttctctcagctgccaacagatggctggaggtcaggacggattatctgggagcttgcattgtcctcactgcatctatagcatccattagtgggtcttccaattctggattggtaggcttgggtcttctgtatgcacttacgataaccaattatttgaattgggttgtgaggaacttggctgacctggaggtccagatgggtgcagtgaagaaggtgaacagtttcctgactatggagtcagagaactatgaaggcacaatggatccttctcaagttccagaacattggccacaagaaggggagatcaagatacatgatctgtgtgtcagatatgaaaataatctgaaacctgttcttaagcacgtcaaggcttacatcaaacctggacaaaaggtgggcatatgtggtcgcactggcagtgggaaatcatcgttatctctggctttcttcagaatggttgatatatttgatggaaaaattgtcattgatgggatagacatttccaaattaccactgcacacactacgttctagactttcaatcattctgcaggatccaatactattcagtggttccattagatttaatttagatccagagtgcaaatgcacagatgacagactctgggaagccttagaaattgctcagctgaagaatatggtcaaatctctacctggaggtctagatgcggttgtcactgaaggtggggagaattttagcgtgggacagagacagctattttgccttgccagggcctttgtccgcaaaagcagcattcttattatggatgaggcaacagcttccattgacatggccacagagaatattttgcaaaaagtagtaatgacagcctttgcagaccggaccgtggtgacaatggctcaccgtgtctcttctattatggatgcaggccttgttttagtcttttctgagggtattttagtggagtgtgatactgtcccaaatttgttcgcccacaagaatggccccttttccactttggtgatgaccaacaagtag

SEQ ID NO: 279634 - DNA, 4885 bp, Homo sapiens
ggatggggaaggtctccggccccaggcgcggcgcgcggggcttctgcccagtttcctgcttctcagccgcggtgtctgccccggcccagagcagtctgtgcaatttagaaactcgataggaggcagcagctggtctcccaccaccctaaaaataatccgttccggcgcactgcgtgtttcgcctaggggaggaaaactgtcatcggagagttctgcgtccgggtttgaaatttacatcttaagacagtgtaggaagtcggtgttttgaaggtagctcaagtgcaccggcaggggtttgaagcagcgtgaagctattgcccaagagtaaaccatataagaagaaatgagcctttcattttgtggtaacaacatttcttcatataatatcaacgatggtgtactacaaaattcctgctttgtggatgccctcaacctggtccctcatgtctttctgttgtttatcacttttccaatattgtttattgggtgggggagccaaagctcaaaagtacaaattcaccacaacacatggcttcattttccgggacataacctgagatggattcttacattcgctctcctgtttgtgcatgtctgtgaaatagcagaaggcattgtttcagactcgcggcgggaatcaaggcacctccacctctttatgccagccgtgatgggattcgttgccactacaacatcgatagtgtattatcataatatcgaaacatcaaattttcctaaattacttttagccctgttcctgtattgggtaatggcctttattacaaaaacaataaaattggttaagtactgtcagtctggcttggacatatcaaacctgcgtttctgcatcacaggcatgatggtcatcttgaatgggctcttgatggctgtggagatcaatgtcattcgagtcaggagatatgtatttttcatgaatcctcagaaagtaaagcctcctgaagacctccaggatctgggagtgagatttcttcaaccatttgtgaatttgctgtcaaaagcaacatactggtggatgaacacacttattatatctgctcacaaaaagcctattgatctgaaggcaattggaaaattgccaatagcaatgagagcagtaacaaattatgtttgcctgaaagatgcatatgaagaacaaaagaaaaaagttgcagatcatccaaatcggactccatctatatggcttgcaatgtacagagcttttgggcgaccaattctacttagtagcacattccgctatctggctgatttactgggttttgctggacctctttgtatttctggaatagttcagcgtgtgaatgaaacccagaatgggacaaataacacaactggaatttcagaaaccctctcatcaaaggaatttcttgaaaacgcttacgttctagcagttcttctcttcttggctcttattctgcaaaggacatttttgcaggcttcctactatgtaaccatagagactggcattaacctccgtggagctctgctggccatgatttataataaaatccttaggctctctacgtctaacttatccatgggggagatgactctggggcagatcaacaacttagtcgccattgaaactaatcaactcatgtggtttttgttcctgtgtcccaatctatgggctatgcctgttcagatcataatgggcgtgattctgctctataatttacttggatcaagtgcattggtcggtgcagctgtcattgtgctccttgcgccaattcagtactttattgctacaaagttggcagaggctcagaaaagtacacttgattattccactgagagactcaagaaaacaaatgaaatattgaaaggcatcaaacttctaaaattgtatgcctgggaacacattttctgcaaaagtgtggaggaaacaagaatgaaagaactatctagtctcaaaacctttgcactatatacatcactctccatcttcatgaatgcagcaattcccatagcagctgttcttgctacatttgtgacccatgcgtatgccagtggaaacaatctgaaacctgcagaggcctttgcttcactgtctctcttccatatcctggtcacaccactgtccctgctcttcacggtggtcagatttgcagtcaaagccatcataagtgttcaaaagctgaatgagtttctcttgagtgatgagattggtgacgacagttggcgaactggtgaaagttcgcttccttttgagtcctgtaagaagcacactggagttgtcacaaatggatacttttcatggggcagtggtttagctacattatccaatatagatattcgaattccaacaggtcagttaaccatgattgtgggccaagtaggatgtgggaagtcctctcttctccttgccatcctcggtgagatgcagacattggaaggaaaagttcactggagcaatgtaaatgaatctgagccttcttttgaagcaaccagaagtaggaacaggtactctgtggcatatgcagctcaaaagccttggctattaaatgctacagtagaagaaaatattacttttggaagtccttttaacaaacagaggtacaaagctgtcacagatgcctgttctcttcagccagatattgacttattaccatttggagatcaaactgaaattggagagaggggcatcaacctgagtgggggacagaggcagagaatctgtgtggcacgagcgctgtatcaaaacaccaacattgtctttttggatgatccattctcagccctggacattcacttgagtgatcatttaatgcaggaggggattttgaaattcctgcaagatgacaaaaggacactcgttcttgtgactcacaaattacagtatctgacgcatgctgactggatcatagccatgaaagatggaagtgtcctaagagaaggaactttgaaggacattcaaaccaaagatgttgagctttatgaacactggaaaacacttatgaatcggcaagatcaagaattagaaaaggatatggaagctgaccaaactactttagagaggaaaactctccgacgggccatgtattcaagagaagccaaagcccagatggaggacgaagacgaagaggaagaagaggaggaagatgaggatgataacatgtccactgtaatgaggctcaggactaaaatgccatggaaaacctgctggcgctacctgacatctggaggattcttcctgctcatcctgatgattttctctaagcttttgaagcattcggtcattgtagctatagactattggctggccacatggacatcggagtacagtataaacaatactggaaaagctgatcagacctactatgtggctggctttagcatactctgtggagcaggcattttcctttgccttgttacatccctcactgtagaatggatgggtctcacagctgccaaaaatcttcaccacaaccttctcaataagataatccttggaccaataaggttttttgataccacacccctgggactgattctcaatcgcttttcagctgatactaatatcattgatcagcacatccctccaaccttggaatctctaactcgctcaacactgctctgcctgtctgccattgggatgatttcttatgctactcctgtgttcctggttgctctcctgccccttggtgttgccttttattttatccagaaatactttcgggttgcctctaaggacctccaggaactcgacgatagtacccagctccctctgctctgtcacttctcagaaacagcagaaggactcaccaccattcgggcctttaggcatgaaaccagatttaaacaacgtatgctggaactgacggatacaaacaacattgcctacttatttctctcagctgccaacagatggctggaggtcaggacggattatctgggagcttgcattgtcctcactgcatctatagcatccattagtgggtcttccaattctggattggtaggcttgggtcttctgtatgcacttacgataaccaattatttgaattgggttgtgaggaacttggctgacctggaggtccagatgggtgcagtgaagaaggtgaacagtttcctgactatggagtcagagaactatgaaggcacaatggatccttctcaagttccagaacattggccacaagaaggggagatcaagatacatgatctgtgtgtcagatatgaaaataatctgaaacctgttcttaagcacgtcaaggcttacatcaaacctggacaaaaggtgggcatatgtggtcgcactggcagtgggaaatcatcgttatctctggctttcttcagaatggttgatatatttgatggaaaaattgtcattgatgggatagacatttccaaattaccactgcacacactacgttctagactttcaatcattctgcaggatccaatactattcagtggttccattagatttaatttagatccagagtgcaaatgcacagatgacagactctgggaagccttagaaattgctcagctgaagaatatggtcaaatctctacctggaggtctagatgcggttgtcactgaaggtggggagaattttagcgtgggacagagacagctattttgccttgccagggcctttgtccgcaaaagcagcattcttattatggatgaggcaacagcttccattgacatggccacagagaatattttgcaaaaagtagtaatgacagcctttgcagaccggaccgtggtgacaatggctcaccgtgtctcttctattatggatgcaggccttgttttagtcttttctgagggtattttagtggagtgtgatactgtcccaaatttgttcgcccacaagaatggccccttttccactttggtgatgaccaacaagtag

SEQ ID NO: 279635 - DNA, 458 bp, Homo sapiens
ctcataagtttgccactataattgcaggtaagcctttcaggacttaccaaaagcaagtattgttttaattagggagttttggatgaagtcattgttatcatagttacaatggacatactggcatagcagaatatgttaggtttctaggactgaatgtacgcatgtgtgacactttttccagctttctctaaagaactcctttctttgcacagacatttgtgacccatgcgtatgccagtggaaacaatctgaaacctgcagaggcctttgcttcactgtctctcttccatatcctggtcacaccactgtccctgctcttcacggtggtcagatttgcagtcaaagccatcataaggtatgcactgaagtgtctggcattttttgcttattgataatagaaatgacgtgtgctaataggagtatttgaaaaaatataaaaaagaacattaaaatcactg

SEQ ID NO: 279636 - DNA, 608 bp, Homo sapiens
ggatggggaaggtctccggccccaggcgcggcgcgcggggcttctgcccagtttcctgcttctcagccgcggtgtctgccccggcccagagcagtctgtgcaatttagaaactcgataggaggcagcagctggtctcccaccaccctaaaaataatccgttccggcgcactgcgtgtttcgcctaggggaggaaaactgtcatcggagagttctgcgtccgggtttgaaatttacatcttaagacagtgtaggaagtcggtgttttgaaggtagctcaagtgcaccggcaggggtttgaagcagcgtgaagctattgcccaagagtaaaccatataagaagaaatgagcctttcattttgtggtaacaacatttcttcatataatatcaacgatggtgtactacaaaattcctgctttgtggatgccctcaacctggtccctcatgtctttctgttgtttatcacttttccaatattgtttattgatggattcttacattcgctctcctgtttgtgcatgtctgtgaaatagcagaaggcattgtttcagactcgtaagtgatctaagttaaataataccactgcagtataccagtgggtatattgat

SEQ ID NO: 279637 - DNA, 4993 bp, Homo sapiens
ggatggggaaggtctccggccccaggcgcggcgcgcggggcttctgcccagtttcctgcttctcagccgcggtgtctgccccggcccagagcagtctgtgcaatttagaaactcgataggaggcagcagctggtctcccaccaccctaaaaataatccgttccggcgcactgcgtgtttcgcctaggggaggaaaactgtcatcggagagttctgcgtccgggtttgaaatttacatcttaagacagtgtaggaagtcggtgttttgaaggtagctcaagtgcaccggcaggggtttgaagcagcgtgaagctattgcccaagagtaaaccatataagaagaaatgagcctttcattttgtggtaacaacatttcttcatataatatcaacgatggtgtactacaaaattcctgctttgtggatgccctcaacctggtccctcatgtctttctgttgtttatcacttttccaatattgtttattgggtgggggagccaaagctcaaaagtacaaattcaccacaacacatggcttcattttccgggacataacctgagatggattcttacattcgctctcctgtttgtgcatgtctgtgaaatagcagaaggcattgtttcagactcgcggcgggaatcaaggcacctccacctctttatgccagccgtgatgggattcgttgccactacaacatcgatagtgtattatcataatatcgaaacatcaaattttcctaaattacttttagccctgttcctgtattgggtaatggcctttattacaaaaacaataaaattggttaagtactgtcagtctggcttggacatatcaaacctgcgtttctgcatcacaggcatgatggtcatcttgaatgggctcttgatggctgtggagatcaatgtcattcgagtcaggagatatgtatttttcatgaatcctcagaaagtaaagcctcctgaagacctccaggatctgggagtgagatttcttcaaccatttgtgaatttgctgtcaaaagcaacatactggtggatgaacacacttattatatctgctcacaaaaagcctattgatctgaaggcaattggaaaattgccaatagcaatgagagcagtaacaaattatgtttgcctgaaagatgcatatgaagaacaaaagaaaaaagttgcagatcatccaaatcggactccatctatatggcttgcaatgtacagagcttttgggcgaccaattctacttagtagcacattccgctatctggctgatttactgggttttgctggacctctttgtatttctggaatagttcagcgtgtgaatgaaacccagaatgggacaaataacacaactggaatttcagaaaccctctcatcaaaggaatttcttgaaaacgcttacgttctagcagttcttctcttcttggctcttattctgcaaaggacatttttgcaggcttcctactatgtaaccatagagactggcattaacctccgtggagctctgctggccatgatttataataaaatccttaggctctctacgtctaacttatccatgggggagatgactctggggcagatcaacaacttagtcgccattgaaactaatcaactcatgtggtttttgttcctgtgtcccaatctatgggctatgcctgttcagatcataatgggcgtgattctgctctataatttacttggatcaagtgcattggtcggtgcagctgtcattgtgctccttgcgccaattcagtactttattgctacaaagttggcagaggctcagaaaagtacacttgattattccactgagagactcaagaaaacaaatgaaatattgaaaggcatcaaacttctaaaattgtatgcctgggaacacattttctgcaaaagtgtggaggaaacaagaatgaaagaactatctagtctcaaaacctttgcactatatacatcactctccatcttcatgaatgcagcaattcccatagcagctgttcttgctacatttgtgacccatgcgtatgccagtggaaacaatctgaaacctgcagaggcctttgcttcactgtctctcttccatatcctggtcacaccactgtccctgctcttcacggtggtcagatttgcagtcaaagccatcataagtgttcaaaagctgaatgagtttctcttgagtgatgagattggtgacgacagttggcgaactggtgaaagttcgcttccttttgagtcctgtaagaagcacactggagttcagccaaaaactataaacaggaaacagcctggaagatatcacctggacagctatgagcaatcaacacggcgtctacgtcccgcagaaacagaggacattgcaataaaggtcacaaatggatacttttcatggggcagtggtttagctacattatccaatatagatattcgaattccaacaggtcagttaaccatgattgtgggccaagtaggatgtgggaagtcctctcttctccttgccatcctcggtgagatgcagacattggaaggaaaagttcactggagcaatgtaaatgaatctgagccttcttttgaagcaaccagaagtaggaacaggtactctgtggcatatgcagctcaaaagccttggctattaaatgctacagtagaagaaaatattacttttggaagtccttttaacaaacagaggtacaaagctgtcacagatgcctgttctcttcagccagatattgacttattaccatttggagatcaaactgaaattggagagaggggcatcaacctgagtgggggacagaggcagagaatctgtgtggcacgagcgctgtatcaaaacaccaacattgtctttttggatgatccattctcagccctggacattcacttgagtgatcatttaatgcaggaggggattttgaaattcctgcaagatgacaaaaggacactcgttcttgtgactcacaaattacagtatctgacgcatgctgactggatcatagccatgaaagatggaagtgtcctaagagaaggaactttgaaggacattcaaaccaaagatgttgagctttatgaacactggaaaacacttatgaatcggcaagatcaagaattagaaaaggatatggaagctgaccaaactactttagagaggaaaactctccgacgggccatgtattcaagagaagccaaagcccagatggaggacgaagacgaagaggaagaagaggaggaagatgaggatgataacatgtccactgtaatgaggctcaggactaaaatgccatggaaaacctgctggcgctacctgacatctggaggattcttcctgctcatcctgatgattttctctaagcttttgaagcattcggtcattgtagctatagactattggctggccacatggacatcggagtacagtataaacaatactggaaaagctgatcagacctactatgtggctggctttagcatactctgtggagcaggcattttcctttgccttgttacatccctcactgtagaatggatgggtctcacagctgccaaaaatcttcaccacaaccttctcaataagataatccttggaccaataaggttttttgataccacacccctgggactgattctcaatcgcttttcagctgatactaatatcattgatcagcacatccctccaaccttggaatctctaactcgctcaacactgctctgcctgtctgccattgggatgatttcttatgctactcctgtgttcctggttgctctcctgccccttggtgttgccttttattttatccagaaatactttcgggttgcctctaaggacctccaggaactcgacgatagtacccagctccctctgctctgtcacttctcagaaacagcagaaggactcaccaccattcgggcctttaggcatgaaaccagatttaaacaacgtatgctggaactgacggatacaaacaacattgcctacttatttctctcagctgccaacagatggctggaggtcaggacggattatctgggagcttgcattgtcctcactgcatctatagcatccattagtgggtcttccaattctggattggtaggcttgggtcttctgtatgcacttacgataaccaattatttgaattgggttgtgaggaacttggctgacctggaggtccagatgggtgcagtgaagaaggtgaacagtttcctgactatggagtcagagaactatgaaggcacaatggatccttctcaagttccagaacattggccacaagaaggggagatcaagatacatgatctgtgtgtcagatatgaaaataatctgaaacctgttcttaagcacgtcaaggcttacatcaaacctggacaaaaggtgggcatatgtggtcgcactggcagtgggaaatcatcgttatctctggctttcttcagaatggttgatatatttgatggaaaaattgtcattgatgggatagacatttccaaattaccactgcacacactacgttctagactttcaatcattctgcaggatccaatactattcagtggttccattagatttaatttagatccagagtgcaaatgcacagatgacagactctgggaagccttagaaattgctcagctgaagaatatggtcaaatctctacctggaggtctagatgcggttgtcactgaaggtggggagaattttagcgtgggacagagacagctattttgccttgccagggcctttgtccgcaaaagcagcattcttattatggatgaggcaacagcttccattgacatggccacagagaatattttgcaaaaagtagtaatgacagcctttgcagaccggaccgtggtgacaatggctcatcgagtacacactattctgacggcagacctggttattgtgatgaagcgaggaaatattttagaatatgacactccagaaagcctcttggctcaggaaaatggagtatttgcttcttttgttcgcgcagacatgtga

SEQ ID NO: 279638 - DNA, 5053 bp, Homo sapiens
ggatggggaaggtctccggccccaggcgcggcgcgcggggcttctgcccagtttcctgcttctcagccgcggtgtctgccccggcccagagcagtctgtgcaatttagaaactcgataggaggcagcagctggtctcccaccaccctaaaaataatccgttccggcgcactgcgtgtttcgcctaggggaggaaaactgtcatcggagagttctgcgtccgggtttgaaatttacatcttaagacagtgtaggaagtcggtgttttgaaggtagctcaagtgcaccggcaggggtttgaagcagcgtgaagctattgcccaaggaaaagtattgtttgtgaccattgctaaatcaattatcaatgaaaggaaagaaagaaaagagtaaaccatataagaagaaatgagcctttcattttgtggtaacaacatttcttcatataatatcaacgatggtgtactacaaaattcctgctttgtggatgccctcaacctggtccctcatgtctttctgttgtttatcacttttccaatattgtttattgggtgggggagccaaagctcaaaagtacaaattcaccacaacacatggcttcattttccgggacataacctgagatggattcttacattcgctctcctgtttgtgcatgtctgtgaaatagcagaaggcattgtttcagactcgcggcgggaatcaaggcacctccacctctttatgccagccgtgatgggattcgttgccactacaacatcgatagtgtattatcataatatcgaaacatcaaattttcctaaattacttttagccctgttcctgtattgggtaatggcctttattacaaaaacaataaaattggttaagtactgtcagtctggcttggacatatcaaacctgcgtttctgcatcacaggcatgatggtcatcttgaatgggctcttgatggctgtggagatcaatgtcattcgagtcaggagatatgtatttttcatgaatcctcagaaagtaaagcctcctgaagacctccaggatctgggagtgagatttcttcaaccatttgtgaatttgctgtcaaaagcaacatactggtggatgaacacacttattatatctgctcacaaaaagcctattgatctgaaggcaattggaaaattgccaatagcaatgagagcagtaacaaattatgtttgcctgaaagatgcatatgaagaacaaaagaaaaaagttgcagatcatccaaatcggactccatctatatggcttgcaatgtacagagcttttgggcgaccaattctacttagtagcacattccgctatctggctgatttactgggttttgctggacctctttgtatttctggaatagttcagcgtgtgaatgaaacccagaatgggacaaataacacaactggaatttcagaaaccctctcatcaaaggaatttcttgaaaacgcttacgttctagcagttcttctcttcttggctcttattctgcaaaggacatttttgcaggcttcctactatgtaaccatagagactggcattaacctccgtggagctctgctggccatgatttataataaaatccttaggctctctacgtctaacttatccatgggggagatgactctggggcagatcaacaacttagtcgccattgaaactaatcaactcatgtggtttttgttcctgtgtcccaatctatgggctatgcctgttcagatcataatgggcgtgattctgctctataatttacttggatcaagtgcattggtcggtgcagctgtcattgtgctccttgcgccaattcagtactttattgctacaaagttggcagaggctcagaaaagtacacttgattattccactgagagactcaagaaaacaaatgaaatattgaaaggcatcaaacttctaaaattgtatgcctgggaacacattttctgcaaaagtgtggaggaaacaagaatgaaagaactatctagtctcaaaacctttgcactatatacatcactctccatcttcatgaatgcagcaattcccatagcagctgttcttgctacatttgtgacccatgcgtatgccagtggaaacaatctgaaacctgcagaggcctttgcttcactgtctctcttccatatcctggtcacaccactgtccctgctcttcacggtggtcagatttgcagtcaaagccatcataagtgttcaaaagctgaatgagtttctcttgagtgatgagattggtgacgacagttggcgaactggtgaaagttcgcttccttttgagtcctgtaagaagcacactggagttcagccaaaaactataaacaggaaacagcctggaagatatcacctggacagctatgagcaatcaacacggcgtctacgtcccgcagaaacagaggacattgcaataaaggtcacaaatggatacttttcatggggcagtggtttagctacattatccaatatagatattcgaattccaacaggtcagttaaccatgattgtgggccaagtaggatgtgggaagtcctctcttctccttgccatcctcggtgagatgcagacattggaaggaaaagttcactggagcaatgtaaatgaatctgagccttcttttgaagcaaccagaagtaggaacaggtactctgtggcatatgcagctcaaaagccttggctattaaatgctacagtagaagaaaatattacttttggaagtccttttaacaaacagaggtacaaagctgtcacagatgcctgttctcttcagccagatattgacttattaccatttggagatcaaactgaaattggagagaggggcatcaacctgagtgggggacagaggcagagaatctgtgtggcacgagcgctgtatcaaaacaccaacattgtctttttggatgatccattctcagccctggacattcacttgagtgatcatttaatgcaggaggggattttgaaattcctgcaagatgacaaaaggacactcgttcttgtgactcacaaattacagtatctgacgcatgctgactggatcatagccatgaaagatggaagtgtcctaagagaaggaactttgaaggacattcaaaccaaagatgttgagctttatgaacactggaaaacacttatgaatcggcaagatcaagaattagaaaaggatatggaagctgaccaaactactttagagaggaaaactctccgacgggccatgtattcaagagaagccaaagcccagatggaggacgaagacgaagaggaagaagaggaggaagatgaggatgataacatgtccactgtaatgaggctcaggactaaaatgccatggaaaacctgctggcgctacctgacatctggaggattcttcctgctcatcctgatgattttctctaagcttttgaagcattcggtcattgtagctatagactattggctggccacatggacatcggagtacagtataaacaatactggaaaagctgatcagacctactatgtggctggctttagcatactctgtggagcaggcattttcctttgccttgttacatccctcactgtagaatggatgggtctcacagctgccaaaaatcttcaccacaaccttctcaataagataatccttggaccaataaggttttttgataccacacccctgggactgattctcaatcgcttttcagctgatactaatatcattgatcagcacatccctccaaccttggaatctctaactcgctcaacactgctctgcctgtctgccattgggatgatttcttatgctactcctgtgttcctggttgctctcctgccccttggtgttgccttttattttatccagaaatactttcgggttgcctctaaggacctccaggaactcgacgatagtacccagctccctctgctctgtcacttctcagaaacagcagaaggactcaccaccattcgggcctttaggcatgaaaccagatttaaacaacgtatgctggaactgacggatacaaacaacattgcctacttatttctctcagctgccaacagatggctggaggtcaggacggattatctgggagcttgcattgtcctcactgcatctatagcatccattagtgggtcttccaattctggattggtaggcttgggtcttctgtatgcacttacgataaccaattatttgaattgggttgtgaggaacttggctgacctggaggtccagatgggtgcagtgaagaaggtgaacagtttcctgactatggagtcagagaactatgaaggcacaatggatccttctcaagttccagaacattggccacaagaaggggagatcaagatacatgatctgtgtgtcagatatgaaaataatctgaaacctgttcttaagcacgtcaaggcttacatcaaacctggacaaaaggtgggcatatgtggtcgcactggcagtgggaaatcatcgttatctctggctttcttcagaatggttgatatatttgatggaaaaattgtcattgatgggatagacatttccaaattaccactgcacacactacgttctagactttcaatcattctgcaggatccaatactattcagtggttccattagatttaatttagatccagagtgcaaatgcacagatgacagactctgggaagccttagaaattgctcagctgaagaatatggtcaaatctctacctggaggtctagatgcggttgtcactgaaggtggggagaattttagcgtgggacagagacagctattttgccttgccagggcctttgtccgcaaaagcagcattcttattatggatgaggcaacagcttccattgacatggccacagagaatattttgcaaaaagtagtaatgacagcctttgcagaccggaccgtggtgacaatggctcaccgtgtctcttctattatggatgcaggccttgttttagtcttttctgagggtattttagtggagtgtgatactgtcccaaatttgttcgcccacaagaatggccccttttccactttggtgatgaccaacaagtag

SEQ ID NO: 279639 - DNA, 638 bp, Homo sapiens
tgtctcccatgaataaggagcccattaagtgttattcatttaatgttcagcaaatattaattgaatgtaggtcttaaatgaaactcctgtgtgtgtgcaaccagtactgctgtctcagaagtgaggctatagttagtgctgttttgggggccacctttccttctgggcctttgtactgagcgtttagagcgtagatatgttcacccactgagagcggatggtgaatgcctgttcctttagtctttttgtgatgattttgctttttatagggaggacagagtctccgcctgggcaccttctcttaagaactggctttgcacacagccgatgcagtccctgggcactttgaaagcagtgggcaaaagggcaggttacactaaagcaagtcccagatgtcacatcatttcaatgaggagggtatggtgagatgcagctcttcccctccctccagcagggcaaaagaggaggaaaggagaatggagtcacaatgagggagattttggaggccggaagatctagatgtgaggtcctctctgtcagtttctggaagtgtgactgacctagggtccccacataccgaaccaaccagcatctgcagcaccatctcgccaactcctgcccctgtcaccagcactgtg

SEQ ID NO: 279640 - DNA, 741 bp, Homo sapiens
cttacctgcatccttacccgcattctcacctgcctccaccccactgcaagtgaagagcagcaggtagcacaagaaaagcgataccgccttctgccgcatggtggcgccgcgcgcgggctccgtcactagacctgcgaacgggcgagagggagatggtccccggagcatttttggagctcatcagctccgttgttttcccttccagttccaactgaatcagtaaaaagcagcgaggtgtggtgaatggaacccaggatccctctcaggagcctcgggaatccgtttcctctccgcatcagtggcagagatgtccctgccccaaccggtgggtgtgcggattctgtgcggattcgcacggtgtttggcacgtgaaagaaagcacagaagggtgtgtggaaaaagaaactcagtttccctcaccgtacgagaggcttctgacagcagaagtgtgggggtttctccccaccagcaagcaaacaatcagtcctctggtgaacaccagctgagggtccccaaattcaattctgacaccactatgggtagatagtggccgatcccacatgttgagggttcagtcccccagactgccaatcgaaagccctaggttgttttacctgtgtttctgactgactataaactggggttcccacaattccctcctgcagttttactaatttgctagagcagctcacagaactcagggaaacactttacttacatatactggtttctttctttaaa

SEQ ID NO: 279641 - DNA, 2366 bp, Homo sapiens
cccgggaatcgcacaggacccggctcccctcgcctaagctgctggggggcgccatgggccgctaccgcatccgcgtggccaccggggcctggctcttctccgggtcgtacaaccgcgtgcagctttggctggtcgggacgcgcggggaggcggagctggagctgcagctgcggccggcgcggggcgaggaggaggagtttgatcatgacgttgcagaggacttggggctcctgcagttcgtgaggctgcgcaagcaccactggctggtggacgacgcgtggttctgcgaccgcatcacggtgcagggccctggagcctgcgcggaggtggccttcccgtgctaccgctgggtgcagggcgaggacatcctgagcctgcccgagggcaccgcccgcctgccaggagacaatgctttggacatgttccagaagcatcgagagaaggaactgaaagacagacagcagatctactgctgggccacctggaaggaagggttacccctgaccatcgctgcagaccgtaaggatgatctacctccaaatatgagattccatgaggagaagaggctggactttgaatggacactgaaggcaggggctctggagatggccctcaaacgtgtttacaccctcctgagctcctggaactgcctagaagactttgatcagatcttctggggccagaagagtgccctggctgagaaggttcgccagtgctggcaggatgatgagttgttcagctaccagttcctcaatggtgccaaccccatgctgttgagacgctcgacctctctgccctccaggctagtgctgccctcggggatggaagagcttcaggctcaactggagaaagaacttcagaatggttccctgtttgaagctgacttcatccttctggatggaattccagccaacgtgatccgaggagagaagcaatacctggctgcccccctcgttatgctgaagatggagcccaatgggaagctgcagcccatggtcatccagattcagcctcccaaccccagctctccaaccccaacactgttcctgccctcagaccccccacttgcctggctcctggcaaagtcctgggtccgaaattcagatttccaactgcacgagatccagtatcacttgctgaacacgcacctggtggctgaggtcatcgctgtcgccaccatgcggtgcctcccaggactgcaccccatcttcaagttcctgatcccccatatccgctacaccatggaaatcaacacccgggcccggacccaactcatctcagatggaggaatttttgataaggcagtgagcacaggtggagggggccatgtacagttgctccgtcgggcggcagctcagctgacctactgctccctctgtcctcctgacgacctggctgaccggggcctgctgggactcccaggtgctctctatgcccatgatgctttacggctctgggagatcattgccaggtatgtggaggggatcgtccacctcttctaccaaagggatgacatagtgaagggggaccctgagctgcaggcctggtgtcgggagatcacggaggtggggctgtgccaggcccaggaccgaggtttccctgtctccttccagtcccagagtcaactctgccatttcctcaccatgtgcgtcttcacgtgcactgcccagcatgccgccatcaaccagggccagctggactggtatgcctgggtccctaatgctccatgcacaatgcggatgcccccacccaccaccaaggaagatgtgacgatggccacagtgatggggtcactacctgatgtccggcaggcctgtcttcaaatggccatctcatggcatctgagtcgccgccagccagacatggtgcctctggggcaccacaaagaaaaatatttctcaggccccaagcccaaagctgtgctaaaccaattccgaacagatttggaaaagctggaaaaggagattacagcccggaatgagcaacttgactggccctatgaatatctgaagcccagctgcatagagaacagtgtcaccatctgagccctagagtgactctacctgcaagatttcacatcagctttaggactgacatttctatcttgaatttcatgctttcctaaagtctctgctgctaaggctctatttcctcccccagttaaaccccctacattagtatcccactagcccaggggagcagtaaactttctctgcaaagactagatccttttttacgctttgcagaccgcatagtcactgtctcaactactcagctctcctgctgcagcatgaaggcagccacagacaacatggaaatgagtgtgactatgttccaataaaactttatggacactgagatatgaa

SEQ ID NO: 279642 - DNA, 1031 bp, Homo sapiens
tgatacatcatctcatttataatgtaggtatcgtccatattttacaggtgaaaaaaactgaggttcaaataggttaagctggcctatggtaactaagtgtaagtgactgagccaggacttaaacgcatgtctgatgcaaatacgtctaaataaaataaacaaattcatcaattctaaaatatgggcatcccaaaacaacagcctttgttcctctcctcttatgctgtagcttctaactgctattcctttcctgcccaggtttccctgtctccttccagtcccagagtcaactctgccatttcctcaccatgtgcgtcttcacgtgcactgcccagcatgccgccatcaaccagggccagctggactggtatgcctgggtccctaatgctccatgcacaatgcggatgcccccacccaccaccaaggaagatgtgacgatggccacagtgatggggtcactacctgatgtccggcaggcctgtcttcaaatggccatctcatggcatctgagtcgccgccagccagacatggtgcctctggggcaccacaaagaaaaatatttctcaggccccaagcccaaagctgtgctaaaccaattccgaacagatttggaaaagctggaaaaggagattacagcccggaatgagcaacttgactggccctatgaatatctgaagcccagctgcatagagaacagtgtcaccatctgagccctagagtgactctacctgcaagatttcacatcagctttaggactgacatttctatcttgaatttcatgctttcctaaagtctctgctgctaaggctctatttcctcccccagttaaaccccctacattagtatcccactagcccaggggagcagtaaactttctctgcaaagactagatccttttttacgctttgcagaccgcatagtcactgtctcaactactcagctctcctgctgcagcatgaaggcagccacagacaacatggaaatgagtgtgactatgttccaataaaactttatggacactgagatatgaa

SEQ ID NO: 279643 - DNA, 356 bp, Homo sapiens
gacccaaagagcaggttgtgcgggggcgggaacgaggcgatgctgtctttggaggccctgagaaactgaggttgcacaggagcgcggctctgtcctcgaaacggcctcagtcgggtccctcctactaagtctggcctgggtccggcctgcacaggaggaggagtttgatcatgacgttgcagaggacttggggctcctgcagttcgtgaggctgcgcaagcaccactggctggtggacgacgcgtggttctgcgaccgcatcacggtgcagggccctggagcctgcgcggaggtggccttcccgtgctaccgctgggtgcagggcgaggacatcctgagcctgcccgagggcaccg

SEQ ID NO: 279644 - DNA, 1951 bp, Homo sapiens
agctctagcaggatctcctgcggagagagaactgaaagacagacagcagatctactgctgggccacctggaaggaagggttacccctgaccatcgctgcagaccgtaaggatgatctacctccaaatatgagattccatgaggagaagaggctggactttgaatggacactgaaggcaggggctctggagatggccctcaaacgtgtttacaccctcctgagctcctggaactgcctagaagactttgatcagatcttctggggccagaagagtgccctggctgagaaggttcgccagtgctggcaggatgatgagttgttcagctaccagttcctcaatggtgccaaccccatgctgttgagacgctcgacctctctgccctccaggctagtgctgccctcggggatggaagagcttcaggctcaactggagaaagaacttcagaatggttccctgtttgaagctgacttcatccttctggatggaattccagccaacgtgatccgaggagagaagcaatacctggctgcccccctcgttatgctgaagatggagcccaatgggaagctgcagcccatggtcatccagattcagcctcccaaccccagctctccaaccccaacactgttcctgccctcagaccccccacttgcctggctcctggcaaagtcctgggtccgaaattcagatttccaactgcacgagatccagtatcacttgctgaacacgcacctggtggctgaggtcatcgctgtcgccaccatgcggtgcctcccaggactgcaccccatcttcaagttcctgatcccccatatccgctacaccatggaaatcaacacccgggcccggacccaactcatctcagatggaggaatttttgataaggcagtgagcacaggtggagggggccatgtacagttgctccgtcgggcggcagctcagctgacctactgctccctctgtcctcctgacgacctggctgaccggggcctgctgggactcccaggtgctctctatgcccatgatgctttacggctctgggagatcattgccaggtatgtggaggggatcgtccacctcttctaccaaagggatgacatagtgaagggggaccctgagctgcaggcctggtgtcgggagatcacggaggtggggctgtgccaggcccaggaccgaggtttccctgtctccttccagtcccagagtcaactctgccatttcctcaccatgtgcgtcttcacgtgcactgcccagcatgccgccatcaaccagggccagctggactggtatgcctgggtccctaatgctccatgcacaatgcggatgcccccacccaccaccaaggaagatgtgacgatggccacagtgatggggtcactacctgatgtccggcaggcctgtcttcaaatggccatctcatggcatctgagtcgccgccagccagacatggtgcctctggggcaccacaaagaaaaatatttctcaggccccaagcccaaagctgtgctaaaccaattccgaacagatttggaaaagctggaaaaggagattacagcccggaatgagcaacttgactggccctatgaatatctgaagcccagctgcatagagaacagtgtcaccatctgagccctagagtgactctacctgcaagatttcacatcagctttaggactgacatttctatcttgaatttcatgctttcctaaagtctctgctgctaaggctctatttcctcccccagttaaaccccctacattagtatcccactagcccaggggagcagtaaactttctctgcaaagactagatccttttttacgctttgcagaccgcatagtcactgtctcaactactcagctctcctgctgcagcatgaaggcagccacagacaacatggaaatgagtgtgactatgttccaataaaactttatggacactgagatatgaa

SEQ ID NO: 279645 - DNA, 1010 bp, Homo sapiens
cggacgcgtgggtcgacccacgcgtcgcgttgaaggacaccagctgcggaatttgcggctttggcagattgaaatcatggcaggtccagaaagtgatgcgcaataccagttcactggtattaaaaaatatttcaactcttatactctcacaggtagaatgaactgtgtactggccacatatggaagcattgcattgattgtcttatatttcaagttaaggtccaaaaaaactccagctgtgaaagcaacataaatggattttaaactgtctacggttcttaacctcatctgttaagttcccatgcctggagaagctaatgccaactcatcatgtgataattcaatttgtacaataaattatgaacctggaaaagctggttgtctttatttacaagatatcaaaaatataaaaactgtacaaaatgcaacaaaggcaaaaactggcagtgacttggtctaaatcttttagtttcccaaagcaaggctcagtactggaggtaagcaactgaaatgtctgtctgacttcaagtgtactaggttgtatgtagctgttttagctgaagtagaacatggaagctaaatttcttcacctggtttatcgagtgtttgggtgcactcaaaactcaacaggtatataaattcagatgtcagtgggtggctgtacttcctctagatctaagaaaggaaccctacctagttacatacattccattaatcatgggccaagaaaaaaaaagttagtggatcatttaacatagtttttgagtgccatacagtaactacgtttttacagcagaaacatacatgctcataggattcttcagctaaaattcaagatgatagtatatttctgaatttgaatcttgaagcaggatgaattattgaaatcaactttttttctaaatgtaataaattaaaatagcatttgaacagaaaatgcatagtttccacacaatccaaagcaccataaatgtcccctccatgatcataatacctcttattcaactaac

SEQ ID NO: 279646 - DNA, 634 bp, Homo sapiens
atccccatcaccggccgaattaacctcttttcttctgtatgtccacagctgtttgttcccaccgagctgtgctttaggaagctggccagccgggcctcctttaggtgcgctgcagcctttttcaaagcgagtgaatgtggcccggcccctacagttcgccaggcccgctgtaaaagggttagatttcagtctatagacgatcagtgggaaggcctttcctaggaggtaaccagaacagagagctgtaaactccgtgaatgcaagaggctgcttctgttacctgagtggttctcactcatctttgccttccttacctcgtgatctcaccattccagattgaaatcatggcaggtccagaaagtgatgcgcaataccagttcactggtattaaaaaatatttcaactcttatactctcacaggtagaatgaactgtgtactggccacatatggaagcattgcattgattgtcttatatttcaagttaaggtccaaaaaaactccagctgtgaaagcaacataaatggattttaaactgtctacggttcttaacctcatctgttaagttcccatgcctggagaagctaatgccaactcatcatgtgataattcaatttgtacaataaattatgaacc

SEQ ID NO: 279647 - DNA, 630 bp, Homo sapiens
  misc_feature (19)..(19): n is a, c, g, or t
gcggacaatgatggtacantcgttgaaggacaccagctgcggaatttgcggctttggcagattgaaatcatggcaggtccagaaagtgatgcgcaataccagttcactggtattaaaaaatatttcaactcttatactctcacaggtagaatgaactgtgtactggccacatatggaagcattgcattgattgtcttatatttcaagttaaggtccaaaaaaactccagctgtgaaagcaacataaatggattttaaactgtctacggttcttaacctcatctgttaagttcccatgcctggagaagctaatgccaactcatcatgtgataattcaatttgtacaataaattatgaaccaaaaacaaaaaaaaaaaaaaaaaaaaaaaaaaaaacaaaaaaaaaaaaaaaaaaaaaaaaaaaaaaaaaaaaaaaaaaaaaaaaaaaaaaaaaaaaaaaaacgaggggggggggggcaggcagggagagagaggcgcacagccgacaggggggcaggagacacagagaaagaaagaagaaggaggagaagggaggaggagaagaagggatgaaagagggcgaggcaggcaccaagaagaagcagcgggggagagaggaagggaaagaaagt

SEQ ID NO: 279648 - DNA, 413 bp, Homo sapiens
cgggggaggtggcttcttccggcgggcgagaggtggttacattcgttgaaggacaccagctgcggaatttgcggctttggcagattgaaatcatggcaggtccagaaagtgatgcgcaataccagttcactggtattaaaaaatatttcaactcttatactctcacaggtagaatgaactgtgtactggccacatatggaagcattgcattgattgtcttatatttcaagttaaggtccaaaaaaactccagctgtgaaagcaacataaatggattttaaactgtctacggttcttaacctcatctgttaagttcccatgcctggagaagctaatgccaactcatcatgtgataattcaatttgtacaataaattatgaacccggaagaagaaaatatccgggtacgagctca

SEQ ID NO: 279649 - DNA, 881 bp, Homo sapiens
gaatatcgaataagggtgttattgtccatatatagacccaggccccaaaaaaaaagaagtttttttgcccctcaacattaagagataaactggttctaaaaaatttcacccggtcggacagttgaactaccaccaactcaaactaggtccaatttggtgatgagcgacgggggcccccccccccccccacttttataaaatttttttttttttctttttttttttttttgatgaacctggaaaagctggttgtctttatttacaagatatcaaaaatataaaaactgtacaaaatgcaacaaaggcaaaaactggcagtgacttggtctaaatcttttagtttcccaaagcaaggctcagtactggaggtaagcaactgaaatgtctgtctgacttcaagtgtactaggttgtatgtagctgttttagctgaagtagaacatggaagctaaatttcttcacctggtttatcgagtgtttgggtgcactcaaaactcaacaggtatataaattcagatgtcagtgggtggctgtacttcctctagatctaagaaaggaaccctacctagttacatacattccattaatcatgggccaagaaaaaaaaagttagtggatcatttaacatagtttttgagtgccatacagtaactacgtttttacagcagaaacatacatgctcataggattcttcagctaaaattcaagatgatagtatatttctgaatttgaatcttgaagcaggatgaattattgaaatcaactttttttctaaatgtaataaattaaaatagcatttgaacagaaaatgcatagtttccacacaatccaaagcaccataaatgtcccctccatgatcataatacctcttattcaactaac

SEQ ID NO: 279650 - DNA, 321 bp, Homo sapiens
gcgactactactactaaattcgcagcggttcgacgcaggtccagaaagtgatgcgcaataccagttcactggtattaaaaaatatttcaactcttatactctcacaggtagaatgaactgtgtactggccacatatggaagcattgcattgattgtcttatatttcaagttaaggtccaaaaaaactccagctgtgaaagcaacataaatggattttaaactgtctacggttcttaacctcatctgttaagttcccatgcctggagaagctaatgccaactcatcatgtgataattcaatttgtacaataaattatgaacc

SEQ ID NO: 279651 - DNA, 413 bp, Homo sapiens
cgggggaggtggcttcttccggcgggcgagaggtggttacattcgttgaaggacaccagctgcggaatttgcggctttggcagattgaaatcatggcaggtccagaaagtgatgcgcaataccagttcactggtattaaaaaatatttcaactcttatactctcacaggtagaatgaactgtgtactggccacatatggaagcattgcattgattgtcttatatttcaagttaaggtccaaaaaaactccagctgtgaaagcaacataaatggattttaaactgtctacggttcttaacctcatctgttaagttcccatgcctggagaagctaatgccaactcatcatgtgataattcaatttgtacaataaattatgaaccggcagaagcatatttacggcgtaccgaccgt

SEQ ID NO: 279652 - DNA, 365 bp, Homo sapiens
gcgtcgacataccagtgaactggtattgcgcatcactttctggacctgccatgatttcaatctgccaaagccgcaaattccgcagctggtattaaaaaatatttcaactcttatactctcacaggtagaatgaactgtgtactggccacatatggaagcattgcattgattgtcttatatttcaagttaaggtccaaaaaaactccagctgtgaaagcaacataaatggattttaaactgtctacggttcttaacctcatctgttaagttcccatgcctggagaagctaatgccaactcatcatgtgataattcaatttgtacaataaattatgaacctgggagagaaaggaaggaggaaaagtc

SEQ ID NO: 279653 - DNA, 463 bp, Homo sapiens
  misc_feature (64)..(64): n is a, c, g, or t
  misc_feature (67)..(67): n is a, c, g, or t
  misc_feature (94)..(95): n is a, c, g, or t
  misc_feature (100)..(100): n is a, c, g, or t
  misc_feature (176)..(176): n is a, c, g, or t
  misc_feature (249)..(249): n is a, c, g, or t
  misc_feature (263)..(263): n is a, c, g, or t
  misc_feature (291)..(291): n is a, c, g, or t
  misc_feature (307)..(307): n is a, c, g, or t
  misc_feature (309)..(309): n is a, c, g, or t
  misc_feature (313)..(313): n is a, c, g, or t
  misc_feature (315)..(315): n is a, c, g, or t
  misc_feature (318)..(318): n is a, c, g, or t
  misc_feature (325)..(325): n is a, c, g, or t
  misc_feature (397)..(397): n is a, c, g, or t
gcgaattcggccattatggccggggggctttttttcgccggtccgagaggtggctacattcgtnganggacacagctgcggaattgcggcttgnnagatngaaatcatggcaggtccagaaagtgatgcgcaataccagttcactggtattaaaaaatatttcaactcttatactntcacaggtagaatgaactgtgtactggccacatatggaagcattgcattgattgtcttatatttcaagttaangtccaaaaaaactncagctgtgaaagcaacataatggatttnaaactgtctacggttntnaacntnatntgtaagntcccatgcctgaggaagtaatggccactccggatgtgtaaattaaatttgacaataaatattgacctcggtnaaaacaaaaaaacccaccttttctttatagcttcttttcggccctccatgtgccttccccctcccc

SEQ ID NO: 279654 - DNA, 1035 bp, Homo sapiens
  misc_feature (64)..(64): n is a, c, g, or t
  misc_feature (67)..(67): n is a, c, g, or t
  misc_feature (94)..(95): n is a, c, g, or t
  misc_feature (100)..(100): n is a, c, g, or t
  misc_feature (176)..(176): n is a, c, g, or t
  misc_feature (249)..(249): n is a, c, g, or t
  misc_feature (263)..(263): n is a, c, g, or t
  misc_feature (291)..(291): n is a, c, g, or t
  misc_feature (307)..(307): n is a, c, g, or t
  misc_feature (309)..(309): n is a, c, g, or t
  misc_feature (313)..(313): n is a, c, g, or t
  misc_feature (315)..(315): n is a, c, g, or t
  misc_feature (318)..(318): n is a, c, g, or t
  misc_feature (325)..(325): n is a, c, g, or t
  misc_feature (342)..(342): n is a, c, g, or t
  misc_feature (344)..(347): n is a, c, g, or t
  misc_feature (349)..(351): n is a, c, g, or t
  misc_feature (355)..(355): n is a, c, g, or t
gcgaattcggccattatggccggggggctttttttcgccggtccgagaggtggctacattcgtnganggacacagctgcggaattgcggcttgnnagatngaaatcatggcaggtccagaaagtgatgcgcaataccagttcactggtattaaaaaatatttcaactcttatactntcacaggtagaatgaactgtgtactggccacatatggaagcattgcattgattgtcttatatttcaagttaangtccaaaaaaactncagctgtgaaagcaacataatggatttnaaactgtctacggttntnaacntnatntgtaagntcccatgcccggaagangnnnntnnnccgnatcattttcttcttccggccgggccgagaggtggttacattcgttgaaggacaccagctgcggaatttgcggctttggcagattgaaatcatggcaggtccagaaagtgatgcgcaataccagttcactggtattaaaaaatatttcaactcttatactctcacaggtagaatgaactgtgtactggccacatatggaagcattgcattgattgtcttatatttcaagttaaggtccaaaaaaactccagctgtgaaagcaacataaatggattttaaactgtctacggttcttaacctcatctgttaagttcccatgcctggagaagctaatgccaactcatcatgtgataattcaatttgtacaataaattatgaacccggaagaagaaaaaaaaaaaaaaaaaaaaaaaaacaaaaaaaaaaaaaaaaaaaaaaaaaaaaacaaaaaaaaaaaaaaaaaaaaaaaaaaaaaaaaaaaaaaaaaaaaaaaaaaaaaaaaaaaaaaaaacgaggggggggggggcaggcagggagagagaggcgcacagccgacaggggggcaggagacacagagaaagaaagaagaaggaggagaagggaggaggagaagaagggatgaaagagggcgaggcaggcaccaagaagaagcagcgggggagagaggaagggaaagaaagt

SEQ ID NO: 279655 - DNA, 735 bp, Homo sapiens
  misc_feature (64)..(64): n is a, c, g, or t
  misc_feature (67)..(67): n is a, c, g, or t
  misc_feature (94)..(95): n is a, c, g, or t
  misc_feature (100)..(100): n is a, c, g, or t
  misc_feature (176)..(176): n is a, c, g, or t
  misc_feature (249)..(249): n is a, c, g, or t
  misc_feature (263)..(263): n is a, c, g, or t
  misc_feature (291)..(291): n is a, c, g, or t
  misc_feature (307)..(307): n is a, c, g, or t
  misc_feature (309)..(309): n is a, c, g, or t
  misc_feature (313)..(313): n is a, c, g, or t
  misc_feature (315)..(315): n is a, c, g, or t
  misc_feature (318)..(318): n is a, c, g, or t
  misc_feature (325)..(325): n is a, c, g, or t
  misc_feature (342)..(342): n is a, c, g, or t
  misc_feature (344)..(347): n is a, c, g, or t
  misc_feature (349)..(351): n is a, c, g, or t
  misc_feature (355)..(355): n is a, c, g, or t
gcgaattcggccattatggccggggggctttttttcgccggtccgagaggtggctacattcgtnganggacacagctgcggaattgcggcttgnnagatngaaatcatggcaggtccagaaagtgatgcgcaataccagttcactggtattaaaaaatatttcaactcttatactntcacaggtagaatgaactgtgtactggccacatatggaagcattgcattgattgtcttatatttcaagttaangtccaaaaaaactncagctgtgaaagcaacataatggatttnaaactgtctacggttntnaacntnatntgtaagntcccatgcccggaagangnnnntnnnccgnatcattttcttcttccggccgggccgagaggtggttacattcgttgaaggacaccagctgcggaatttgcggctttggcagattgaaatcatggcaggtccagaaagtgatgcgcaataccagttcactggtattaaaaaatatttcaactcttatactctcacaggtagaatgaactgtgtactggccacatatggaagcattgcattgattgtcttatatttcaagttaaggtccaaaaaaactccagctgtgaaagcaacataaatggattttaaactgtctacggttcttaacctcatctgttaagttcccatgcctggagaagctaatgccaactcatcatgtgataattcaatttgtacaataaattatgaacc

SEQ ID NO: 279656 - DNA, 1493 bp, Homo sapiens
cggacgcgtgggtcgacccacgcgtcgcgttgaaggacaccagctgcggaatttgcggctttggcagctgtttgttcccaccgagctgtgctttaggaagctggccagccgggcctcctttaggtgcgctgcagcctttttcaaagcgagtgaatgtggcccggcccctacagttcgccaggcccgctgtaaaagggttagatttcagtctatagacgatcagtgggaaggcctttcctaggaggtaaccagaacagagagctgtaaactccgtgaatgcaagaggctgcttctgttacctgagtggttctcactcatctttgccttccttacctcgtgatctcaccattccagacccagctgagtcactgtcactgcctaccaatctcgaccggacctcgaccggctcgtctgtgctgccaatcgactcggcgtggcgtcggtcgtggtagataggcggtcatgcatacgaattttcagctcttgttctggtgaccttttgaatacgtcttgtctataaaagaaattcatgcctttgtaaaatacacagattgaaatcatggcaggtccagaaagtgatgcgcaataccagttcactggtattaaaaaatatttcaactcttatactctcacaggtagaatgaactgtgtactggccacatatggaagcattgcattgattgtcttatatttcaagttaaggtccaaaaaaactccagctgtgaaagcaacataaatggattttaaactgtctacggttcttaacctcatctgttaagttcccatgcctggagaagctaatgccaactcatcatgtgataattcaatttgtacaataaattatgaacctggaaaagctggttgtctttatttacaagatatcaaaaatataaaaactgtacaaaatgcaacaaaggcaaaaactggcagtgacttggtctaaatcttttagtttcccaaagcaaggctcagtactggaggtaagcaactgaaatgtctgtctgacttcaagtgtactaggttgtatgtagctgttttagctgaagtagaacatggaagctaaatttcttcacctggtttatcgagtgtttgggtgcactcaaaactcaacaggtatataaattcagatgtcagtgggtggctgtacttcctctagatctaagaaaggaaccctacctagttacatacattccattaatcatgggccaagaaaaaaaaagttagtggatcatttaacatagtttttgagtgccatacagtaactacgtttttacagcagaaacatacatgctcataggattcttcagctaaaattcaagatgatagtatatttctgaatttgaatcttgaagcaggatgaattattgaaatcaactttttttctaaatgtaataaattaaaatagcatttgaacagaaaatgcatagtttccacacaatccaaagcaccataaatgtcccctccatgatcataatacctcttattcaactaac

SEQ ID NO: 279657 - DNA, 684 bp, Homo sapiens
cggacgcgtgggtcgacccacgcgtcgcgttgaaggacaccagctgcggaatttgcggctttggcagctgtttgttcccaccgagctgtgctttaggaagctggccagccgggcctcctttaggtgcgctgcagcctttttcaaagcgagtgaatgtggcccggcccctacagttcgccaggcccgctgtaaaagggttagatttcagtctatagacgatcagtgggaaggcctttcctaggaggtaaccagaacagagagctgtaaactccgtgaatgcaagaggctgcttctgttacctgagtggttctcactcatctttgccttccttacctcgtgatctcaccattccagattgaaatcatggcaggtccagaaagtgatgcgcaataccagttcactggtattaaaaaatatttcaactcttatactctcacaggtagaatgaactgtgtactggccacatatggaagcattgcattgattgtcttatatttcaagttaaggtccaaaaaaactccagctgtgaaagcaacataaatggattttaaactgtctacggttcttaacctcatctgttaagttcccatgcctggagaagctaatgccaactcatcatgtgataattcaatttgtacaataaattatgaacctggaacaacaaagacagcacactgaagacag

SEQ ID NO: 279658 - DNA, 1026 bp, Homo sapiens
cgggggaggtggcttcttccggcgggcgagaggtggttacattcgttgaaggacaccagctgcggaatttgcggctttggcagattgaaatcatggcaggtccagaaagtgatgcgcaataccagttcactggtattaaaaaatatttcaactcttatactctcacaggtagaatgaactgtgtactggccacatatggaagcattgcattgattgtcttatatttcaagttaaggtccaaaaaaactccagctgtgaaagcaacataaatggattttaaactgtctacggttcttaacctcatctgttaagttcccatgcctggagaagctaatgccaactcatcatgtgataattcaatttgtacaataaattatgaacctggaaaagctggttgtctttatttacaagatatcaaaaatataaaaactgtacaaaatgcaacaaaggcaaaaactggcagtgacttggtctaaatcttttagtttcccaaagcaaggctcagtactggaggtaagcaactgaaatgtctgtctgacttcaagtgtactaggttgtatgtagctgttttagctgaagtagaacatggaagctaaatttcttcacctggtttatcgagtgtttgggtgcactcaaaactcaacaggtatataaattcagatgtcagtgggtggctgtacttcctctagatctaagaaaggaaccctacctagttacatacattccattaatcatgggccaagaaaaaaaaagttagtggatcatttaacatagtttttgagtgccatacagtaactacgtttttacagcagaaacatacatgctcataggattcttcagctaaaattcaagatgatagtatatttctgaatttgaatcttgaagcaggatgaattattgaaatcaactttttttctaaatgtaataaattaaaatagcatttgaacagaaaatgcatagtttccacacaatccaaagcaccataaatgtcccctccatgatcataatacctcttattcaactaac

SEQ ID NO: 279659 - DNA, 617 bp, Homo sapiens
  misc_feature (522)..(522): n is a, c, g, or t
  misc_feature (555)..(555): n is a, c, g, or t
  misc_feature (617)..(617): n is a, c, g, or t
gcggccgcctactactactactaaattcgcggccgcgtccgttgaaggacaccagctgcggaatttgcggctttggcagattgaaatcatggcaggtccagaaagtgatgcgcaataccagttcactggtattaaaaaatatttcaactcttatactctcacaggtagaatgaactgtgtactggccacatatggaagcattgcattgattgtcttatatttcaagttaaggtccaaaaaaactccagctgtgaaagcaacataaatggattttaaactgtctacggttcttaacctcatctgttaagttcccatgcctggagaagctaatgccaactcatcatgtgataattcaatttgtacaataaattatgaacccggaagaagaaaaaaaaaaaaaaaaaaaacccgttttatgatttactcattatcgccttttgacagctgtgcttgaacacaagtagatgcctgaacttgaattaatccacacatcagtaatggattctatctctctttacattntggtctctatactacattattaatgggttctgngtactgtaaagaatttagctgatcctagggcatgaatggattctctcctgaatatttcactn

SEQ ID NO: 279660 - DNA, 1007 bp, Homo sapiens
  misc_feature (64)..(64): n is a, c, g, or t
  misc_feature (67)..(67): n is a, c, g, or t
  misc_feature (94)..(95): n is a, c, g, or t
  misc_feature (100)..(100): n is a, c, g, or t
  misc_feature (176)..(176): n is a, c, g, or t
  misc_feature (249)..(249): n is a, c, g, or t
  misc_feature (263)..(263): n is a, c, g, or t
  misc_feature (291)..(291): n is a, c, g, or t
  misc_feature (307)..(307): n is a, c, g, or t
  misc_feature (309)..(309): n is a, c, g, or t
  misc_feature (313)..(313): n is a, c, g, or t
  misc_feature (315)..(315): n is a, c, g, or t
  misc_feature (318)..(318): n is a, c, g, or t
  misc_feature (325)..(325): n is a, c, g, or t
  misc_feature (342)..(342): n is a, c, g, or t
  misc_feature (344)..(347): n is a, c, g, or t
  misc_feature (349)..(351): n is a, c, g, or t
  misc_feature (355)..(355): n is a, c, g, or t
  misc_feature (765)..(766): n is a, c, g, or t
  misc_feature (770)..(770): n is a, c, g, or t
  misc_feature (779)..(779): n is a, c, g, or t
  misc_feature (787)..(787): n is a, c, g, or t
  misc_feature (790)..(790): n is a, c, g, or t
gcgaattcggccattatggccggggggctttttttcgccggtccgagaggtggctacattcgtnganggacacagctgcggaattgcggcttgnnagatngaaatcatggcaggtccagaaagtgatgcgcaataccagttcactggtattaaaaaatatttcaactcttatactntcacaggtagaatgaactgtgtactggccacatatggaagcattgcattgattgtcttatatttcaagttaangtccaaaaaaactncagctgtgaaagcaacataatggatttnaaactgtctacggttntnaacntnatntgtaagntcccatgcccggaagangnnnntnnnccgnatcattttcttcttccggccgggccgagaggtggttacattcgttgaaggacaccagctgcggaatttgcggctttggcagattgaaatcatggcaggtccagaaagtgatgcgcaataccagttcactggtattaaaaaatatttcaactcttatactctcacaggtagaatgaactgtgtactggccacatatggaagcattgcattgattgtcttatatttcaagttaaggtccaaaaaaactccagctgtgaaagcaacataaatggattttaaactgtctacggttcttaacctcatctgttaagttcccatgcctggagaagctaatgccaactcatcatgtgataattcaatttgtacaataaattatgaacctaaaaaaaaaaaaaaaaaaaaaaaaaaaanntttntggggggcntgggcccnggnaaaagttttttaaaacaatgtggtggggggggggggcccccgtaggtgttagttgaacggtggccaagaggggtgccaaggaaaaccgggcaggacaaaggggtgggattcctcaccaaaataaaaaaggccggggggaaccgaggcgtctggacaatccaaagggagtccggaggcacaacgggctctacacgggggtcaagggagcggatataat

SEQ ID NO: 279661 - DNA, 1006 bp, Homo sapiens
  misc_feature (64)..(64): n is a, c, g, or t
  misc_feature (67)..(67): n is a, c, g, or t
  misc_feature (94)..(95): n is a, c, g, or t
  misc_feature (100)..(100): n is a, c, g, or t
  misc_feature (176)..(176): n is a, c, g, or t
  misc_feature (249)..(249): n is a, c, g, or t
  misc_feature (263)..(263): n is a, c, g, or t
  misc_feature (291)..(291): n is a, c, g, or t
  misc_feature (307)..(307): n is a, c, g, or t
  misc_feature (309)..(309): n is a, c, g, or t
  misc_feature (313)..(313): n is a, c, g, or t
  misc_feature (315)..(315): n is a, c, g, or t
  misc_feature (318)..(318): n is a, c, g, or t
  misc_feature (325)..(325): n is a, c, g, or t
  misc_feature (342)..(342): n is a, c, g, or t
  misc_feature (344)..(347): n is a, c, g, or t
  misc_feature (349)..(351): n is a, c, g, or t
  misc_feature (355)..(355): n is a, c, g, or t
gcgaattcggccattatggccggggggctttttttcgccggtccgagaggtggctacattcgtnganggacacagctgcggaattgcggcttgnnagatngaaatcatggcaggtccagaaagtgatgcgcaataccagttcactggtattaaaaaatatttcaactcttatactntcacaggtagaatgaactgtgtactggccacatatggaagcattgcattgattgtcttatatttcaagttaangtccaaaaaaactncagctgtgaaagcaacataatggatttnaaactgtctacggttntnaacntnatntgtaagntcccatgcccggaagangnnnntnnnccgnatcattttcttcttccggccgggccgagaggtggttacattcgttgaaggacaccagctgcggaatttgcggctttggcagattgaaatcatggcaggtccagaaagtgatgcgcaataccagttcactggtattaaaaaatatttcaactcttatactctcacaggtagaatgaactgtgtactggccacatatggaagcattgcattgattgtcttatatttcaagttaaggtccaaaaaaactccagctgtgaaagcaacataaatggattttaaactgtctacggttcttaacctcatctgttaagttcccatgcctggagaagctaatgccaactcatcatgtgataattcaatttgtacaataaattatgaaccaaaaacaaaaaaaaaaaaaaaaaaaaaaaaaaaaacaaaaaaaaaaaaaaaaaaaaaaaaaaaaaaaaaaaaaaaaaaaaaaaaaaaaaaaaaaaaaaaaacgaggggggggggggcaggcagggagagagaggcgcacagccgacaggggggcaggagacacagagaaagaaagaagaaggaggagaagggaggaggagaagaagggatgaaagagggcgaggcaggcaccaagaagaagcagcgggggagagaggaagggaaagaaagt

SEQ ID NO: 279662 - DNA, 653 bp, Homo sapiens
cggacgcgtgggtcgacccacgcgtcgcgttgaaggacaccagctgcggaatttgcggctttggcagctgtttgttcccaccgagctgtgctttaggaagctggccagccgggcctcctttaggtgcgctgcagcctttttcaaagcgagtgaatgtggcccggcccctacagttcgccaggcccgctgtaaaagggttagatttcagtctatagacgatcagtgggaaggcctttcctaggaggtaaccagaacagagagctgtaaactccgtgaatgcaagaggctgcttctgttacctgagtggttctcactcatctttgccttccttacctcgtgatctcaccattccagattgaaatcatggcaggtccagaaagtgatgcgcaataccagttcactggtattaaaaaatatttcaactcttatactctcacaggtagaatgaactgtgtactggccacatatggaagcattgcattgattgtcttatatttcaagttaaggtccaaaaaaactccagctgtgaaagcaacataaatggattttaaactgtctacggttcttaacctcatctgttaagttcccatgcctggagaagctaatgccaactcatcatgtgataattcaatttgtacaataaattatgaacc

SEQ ID NO: 279663 - DNA, 641 bp, Homo sapiens
cggacgcgtgggtcgacccacgcgtcgcgttgaaggacaccagctgcggaatttgcggctttggcagctgtttgttcccaccgagctgtgctttaggaagctggccagccgggcctcctttaggtgcgctgcagcctttttcaaagcgagtgaatgtggcccggcccctacagttcgccaggcccgctgtaaaagggttagatttcagtctatagacgatcagtgggaaggcctttcctaggaggtaaccagaacagagagctgtaaactccgtgaatgcaagaggctgcttctgttacctgagtggttctcactcatctttgccttccttacctcgtgatctcaccattccagattgaaatcatggcaggtccagaaagtgatgcgcaataccagttcactggtattaaaaaatatttcaactcttatactctcacaggtagaatgaactgtgtactggccacatatggaagcattgcattgattgtcttatatttcaagttaaggtccaaaaaaactccagctgtgaaagcaacataaatggattttaaactgtctacggttcttaacctcatctgttaagttcccatgcctgggttaggtctacctgggttaggtctacctgggttaggtctacctgg

SEQ ID NO: 279664 - DNA, 1491 bp, Homo sapiens
cggacgcgtgggtcgacccacgcgtcgcgttgaaggacaccagctgcggaatttgcggctttggcagacccagctgagtcactgtcactgcctaccaatctcgaccggacctcgaccggctcgtctgtgctgccaatcgactcggcgtggcgtcggtcgtggtagataggcggtcatgcatacgaattttcagctcttgttctggtgaccttttgaatacgtcttgtctataaaagaaattcatgcctttgtaaaatacacagattgaaatcatggcaggtccagaaagtgatgcgcaataccagttcactggtattaaaaaatatttcaactcttatactctcacaggtagaatgaactgtgtactggccacatatggaagcattgcattgattgtcttatatttcaagttaaggtccaaaaaaactccagctgtgaaagcaacataaatggtttattttcttataatcctccaacccccatttgcccaccctttaaatatctgttgtgttggcaatgggtgatatgtggaaagcctgggcaacaagagcgaactctgtctcaaaaaaaaaaaagtattaatctgagatacactttaatttttttggtgttacatctttgacaatctaataaattcgcattcagtttcagtgggttcatgttaccttagtaattcttgagtgtcttaagagtaaagctggccacatttgtatctaaactgtttgctttgtttataggattttaaactgtctacggttcttaacctcatctgttaagttcccatgcctggagaagctaatgccaactcatcatgtgataattcaatttgtacaataaattatgaacctggaaaagctggttgtctttatttacaagatatcaaaaatataaaaactgtacaaaatgcaacaaaggcaaaaactggcagtgacttggtctaaatcttttagtttcccaaagcaaggctcagtactggaggtaagcaactgaaatgtctgtctgacttcaagtgtactaggttgtatgtagctgttttagctgaagtagaacatggaagctaaatttcttcacctggtttatcgagtgtttgggtgcactcaaaactcaacaggtatataaattcagatgtcagtgggtggctgtacttcctctagatctaagaaaggaaccctacctagttacatacattccattaatcatgggccaagaaaaaaaaagttagtggatcatttaacatagtttttgagtgccatacagtaactacgtttttacagcagaaacatacatgctcataggattcttcagctaaaattcaagatgatagtatatttctgaatttgaatcttgaagcaggatgaattattgaaatcaactttttttctaaatgtaataaattaaaatagcatttgaacagaaaatgcatagtttccacacaatccaaagcaccataaatgtcccctccatgatcataatacctcttattcaactaac

SEQ ID NO: 279665 - DNA, 228 bp, Homo sapiens
atatcagttgcaaatatttctttttctagtttgtttccaatgtttatgtaattctgtcttttccttaaatccccataggttttattttcttataatcctccaacccccatttgcccaccctttaaatatctgttgtgttggcaatgggtgatatgtggaaagcccaaatgccagatcttcatctgatgtagctctccttcgcagacttttttttttttgagatggagt

SEQ ID NO: 279666 - DNA, 1379 bp, Homo sapiens
  misc_feature (64)..(64): n is a, c, g, or t
  misc_feature (67)..(67): n is a, c, g, or t
  misc_feature (94)..(95): n is a, c, g, or t
  misc_feature (100)..(100): n is a, c, g, or t
  misc_feature (176)..(176): n is a, c, g, or t
  misc_feature (249)..(249): n is a, c, g, or t
  misc_feature (263)..(263): n is a, c, g, or t
  misc_feature (291)..(291): n is a, c, g, or t
  misc_feature (307)..(307): n is a, c, g, or t
  misc_feature (309)..(309): n is a, c, g, or t
  misc_feature (313)..(313): n is a, c, g, or t
  misc_feature (315)..(315): n is a, c, g, or t
  misc_feature (318)..(318): n is a, c, g, or t
  misc_feature (325)..(325): n is a, c, g, or t
  misc_feature (342)..(342): n is a, c, g, or t
  misc_feature (344)..(347): n is a, c, g, or t
  misc_feature (349)..(351): n is a, c, g, or t
  misc_feature (355)..(355): n is a, c, g, or t
gcgaattcggccattatggccggggggctttttttcgccggtccgagaggtggctacattcgtnganggacacagctgcggaattgcggcttgnnagatngaaatcatggcaggtccagaaagtgatgcgcaataccagttcactggtattaaaaaatatttcaactcttatactntcacaggtagaatgaactgtgtactggccacatatggaagcattgcattgattgtcttatatttcaagttaangtccaaaaaaactncagctgtgaaagcaacataatggatttnaaactgtctacggttntnaacntnatntgtaagntcccatgcccggaagangnnnntnnnccgnatcattttcttcttccggccgggccgagaggtggttacattcgttgaaggacaccagctgcggaatttgcggctttggcagattgaaatcatggcaggtccagaaagtgatgcgcaataccagttcactggtattaaaaaatatttcaactcttatactctcacaggtagaatgaactgtgtactggccacatatggaagcattgcattgattgtcttatatttcaagttaaggtccaaaaaaactccagctgtgaaagcaacataaatggattttaaactgtctacggttcttaacctcatctgttaagttcccatgcctggagaagctaatgccaactcatcatgtgataattcaatttgtacaataaattatgaacctggaaaagctggttgtctttatttacaagatatcaaaaatataaaaactgtacaaaatgcaacaaaggcaaaaactggcagtgacttggtctaaatcttttagtttcccaaagcaaggctcagtactggaggtaagcaactgaaatgtctgtctgacttcaagtgtactaggttgtatgtagctgttttagctgaagtagaacatggaagctaaatttcttcacctggtttatcgagtgtttgggtgcactcaaaactcaacaggtatataaattcagatgtcagtgggtggctgtacttcctctagatctaagaaaggaaccctacctagttacatacattccattaatcatgggccaagaaaaaaaaagttagtggatcatttaacatagtttttgagtgccatacagtaactacgtttttacagcagaaacatacatgctcataggattcttcagctaaaattcaagatgatagtatatttctgaatttgaatcttgaagcaggatgaattattgaaatcaactttttttctaaatgtaataaattaaaatagcatttgaacagaaaatgcatagtttccacacaatccaaagcaccataaatgtcccctccatgatcataatacctcttattcaactaac

SEQ ID NO: 279667 - DNA, 974 bp, Homo sapiens
  misc_feature (64)..(64): n is a, c, g, or t
  misc_feature (67)..(67): n is a, c, g, or t
  misc_feature (94)..(95): n is a, c, g, or t
  misc_feature (100)..(100): n is a, c, g, or t
  misc_feature (176)..(176): n is a, c, g, or t
  misc_feature (249)..(249): n is a, c, g, or t
  misc_feature (263)..(263): n is a, c, g, or t
  misc_feature (291)..(291): n is a, c, g, or t
  misc_feature (307)..(307): n is a, c, g, or t
  misc_feature (309)..(309): n is a, c, g, or t
  misc_feature (313)..(313): n is a, c, g, or t
  misc_feature (315)..(315): n is a, c, g, or t
  misc_feature (318)..(318): n is a, c, g, or t
  misc_feature (325)..(325): n is a, c, g, or t
  misc_feature (342)..(342): n is a, c, g, or t
  misc_feature (344)..(347): n is a, c, g, or t
  misc_feature (349)..(351): n is a, c, g, or t
  misc_feature (355)..(355): n is a, c, g, or t
  misc_feature (879)..(879): n is a, c, g, or t
  misc_feature (912)..(912): n is a, c, g, or t
  misc_feature (974)..(974): n is a, c, g, or t
gcgaattcggccattatggccggggggctttttttcgccggtccgagaggtggctacattcgtnganggacacagctgcggaattgcggcttgnnagatngaaatcatggcaggtccagaaagtgatgcgcaataccagttcactggtattaaaaaatatttcaactcttatactntcacaggtagaatgaactgtgtactggccacatatggaagcattgcattgattgtcttatatttcaagttaangtccaaaaaaactncagctgtgaaagcaacataatggatttnaaactgtctacggttntnaacntnatntgtaagntcccatgcccggaagangnnnntnnnccgnatcattttcttcttccggccgggccgagaggtggttacattcgttgaaggacaccagctgcggaatttgcggctttggcagattgaaatcatggcaggtccagaaagtgatgcgcaataccagttcactggtattaaaaaatatttcaactcttatactctcacaggtagaatgaactgtgtactggccacatatggaagcattgcattgattgtcttatatttcaagttaaggtccaaaaaaactccagctgtgaaagcaacataaatggattttaaactgtctacggttcttaacctcatctgttaagttcccatgcctggagaagctaatgccaactcatcatgtgataattcaatttgtacaataaattatgaacccggaagaagaaaaaaaaaaaaaaaaaaaacccgttttatgatttactcattatcgccttttgacagctgtgcttgaacacaagtagatgcctgaacttgaattaatccacacatcagtaatggattctatctctctttacattntggtctctatactacattattaatgggttctgngtactgtaaagaatttagctgatcctagggcatgaatggattctctcctgaatatttcactn

SEQ ID NO: 279668 - DNA, 1297 bp, Homo sapiens
cggacgcgtgggtcgacccacgcgtcgcgttgaaggacaccagctgcggaatttgcggctttggcagctgtttgttcccaccgagctgtgctttaggaagctggccagccgggcctcctttaggtgcgctgcagcctttttcaaagcgagtgaatgtggcccggcccctacagttcgccaggcccgctgtaaaagggttagatttcagtctatagacgatcagtgggaaggcctttcctaggaggtaaccagaacagagagctgtaaactccgtgaatgcaagaggctgcttctgttacctgagtggttctcactcatctttgccttccttacctcgtgatctcaccattccagattgaaatcatggcaggtccagaaagtgatgcgcaataccagttcactggtattaaaaaatatttcaactcttatactctcacaggtagaatgaactgtgtactggccacatatggaagcattgcattgattgtcttatatttcaagttaaggtccaaaaaaactccagctgtgaaagcaacataaatggattttaaactgtctacggttcttaacctcatctgttaagttcccatgcctggagaagctaatgccaactcatcatgtgataattcaatttgtacaataaattatgaacctggaaaagctggttgtctttatttacaagatatcaaaaatataaaaactgtacaaaatgcaacaaaggcaaaaactggcagtgacttggtctaaatcttttagtttcccaaagcaaggctcagtactggaggtaagcaactgaaatgtctgtctgacttcaagtgtactaggttgtatgtagctgttttagctgaagtagaacatggaagctaaatttcttcacctggtttatcgagtgtttgggtgcactcaaaactcaacaggtatataaattcagatgtcagtgggtggctgtacttcctctagatctaagaaaggaaccctacctagttacatacattccattaatcatgggccaagaaaaaaaaagttagtggatcatttaacatagtttttgagtgccatacagtaactacgtttttacagcagaaacatacatgctcataggattcttcagctaaaattcaagatgatagtatatttctgaatttgaatcttgaagcaggatgaattattgaaatcaactttttttctaaatgtaataaattaaaatagcatttgaacagaaaatgcatagtttccacacaatccaaagcaccataaatgtcccctccatgatcataatacctcttattcaactaac

SEQ ID NO: 279669 - DNA, 849 bp, Homo sapiens
cggacgcgtgggtcgacccacgcgtcgcgttgaaggacaccagctgcggaatttgcggctttggcagctgtttgttcccaccgagctgtgctttaggaagctggccagccgggcctcctttaggtgcgctgcagcctttttcaaagcgagtgaatgtggcccggcccctacagttcgccaggcccgctgtaaaagggttagatttcagtctatagacgatcagtgggaaggcctttcctaggaggtaaccagaacagagagctgtaaactccgtgaatgcaagaggctgcttctgttacctgagtggttctcactcatctttgccttccttacctcgtgatctcaccattccagacccagctgagtcactgtcactgcctaccaatctcgaccggacctcgaccggctcgtctgtgctgccaatcgactcggcgtggcgtcggtcgtggtagataggcggtcatgcatacgaattttcagctcttgttctggtgaccttttgaatacgtcttgtctataaaagaaattcatgcctttgtaaaatacacagattgaaatcatggcaggtccagaaagtgatgcgcaataccagttcactggtattaaaaaatatttcaactcttatactctcacaggtagaatgaactgtgtactggccacatatggaagcattgcattgattgtcttatatttcaagttaaggtccaaaaaaactccagctgtgaaagcaacataaatggattttaaactgtctacggttcttaacctcatctgttaagttcccatgcctggagaagctaatgccaactcatcatgtgataattcaatttgtacaataaattatgaacc

SEQ ID NO: 279670 - DNA, 1042 bp, Homo sapiens
  misc_feature (64)..(64): n is a, c, g, or t
  misc_feature (67)..(67): n is a, c, g, or t
  misc_feature (94)..(95): n is a, c, g, or t
  misc_feature (100)..(100): n is a, c, g, or t
  misc_feature (176)..(176): n is a, c, g, or t
  misc_feature (249)..(249): n is a, c, g, or t
  misc_feature (263)..(263): n is a, c, g, or t
  misc_feature (291)..(291): n is a, c, g, or t
  misc_feature (307)..(307): n is a, c, g, or t
  misc_feature (309)..(309): n is a, c, g, or t
  misc_feature (313)..(313): n is a, c, g, or t
  misc_feature (315)..(315): n is a, c, g, or t
  misc_feature (318)..(318): n is a, c, g, or t
  misc_feature (325)..(325): n is a, c, g, or t
  misc_feature (342)..(342): n is a, c, g, or t
  misc_feature (344)..(347): n is a, c, g, or t
  misc_feature (349)..(351): n is a, c, g, or t
  misc_feature (355)..(355): n is a, c, g, or t
gcgaattcggccattatggccggggggctttttttcgccggtccgagaggtggctacattcgtnganggacacagctgcggaattgcggcttgnnagatngaaatcatggcaggtccagaaagtgatgcgcaataccagttcactggtattaaaaaatatttcaactcttatactntcacaggtagaatgaactgtgtactggccacatatggaagcattgcattgattgtcttatatttcaagttaangtccaaaaaaactncagctgtgaaagcaacataatggatttnaaactgtctacggttntnaacntnatntgtaagntcccatgcccggaagangnnnntnnnccgnatcattttcttcttccggccgggccgagaggtggttacattcgttgaaggacaccagctgcggaatttgcggctttggcagattgaaatcatggcaggtccagaaagtgatgcgcaataccagttcactggtattaaaaaatatttcaactcttatactctcacaggtagaatgaactgtgtactggccacatatggaagcattgcattgattgtcttatatttcaagttaaggtccaaaaaaactccagctgtgaaagcaacataaatggattttaaactgtctacggttcttaacctcatctgttaagttcccatgcctggagaagctaatgccaactcatcatgtgataattcaatttgtacaataaattatgaacctggaacccctccttcctttcccttccttctctcatccttcttatctcttcctcactcctctctttcttcctttcttcttctcttctcttctcccttctctctccctttctctcctctctctcctcctctcgtccaccccatttcatccctgctcacctcttgtctctctccctttgtctcctttctatcatcacctctacctcttctccctctcactccactctcgtcccctcttctctaccctccttctctctacctctctcttcctcctcctctctctttccatctcctccctcctcctctctcc

SEQ ID NO: 279671 - DNA, 868 bp, Homo sapiens
  misc_feature (64)..(64): n is a, c, g, or t
  misc_feature (67)..(67): n is a, c, g, or t
  misc_feature (94)..(95): n is a, c, g, or t
  misc_feature (100)..(100): n is a, c, g, or t
  misc_feature (176)..(176): n is a, c, g, or t
  misc_feature (249)..(249): n is a, c, g, or t
  misc_feature (263)..(263): n is a, c, g, or t
  misc_feature (291)..(291): n is a, c, g, or t
  misc_feature (307)..(307): n is a, c, g, or t
  misc_feature (309)..(309): n is a, c, g, or t
  misc_feature (313)..(313): n is a, c, g, or t
  misc_feature (315)..(315): n is a, c, g, or t
  misc_feature (318)..(318): n is a, c, g, or t
  misc_feature (325)..(325): n is a, c, g, or t
  misc_feature (342)..(342): n is a, c, g, or t
  misc_feature (344)..(347): n is a, c, g, or t
  misc_feature (349)..(351): n is a, c, g, or t
  misc_feature (355)..(355): n is a, c, g, or t
gcgaattcggccattatggccggggggctttttttcgccggtccgagaggtggctacattcgtnganggacacagctgcggaattgcggcttgnnagatngaaatcatggcaggtccagaaagtgatgcgcaataccagttcactggtattaaaaaatatttcaactcttatactntcacaggtagaatgaactgtgtactggccacatatggaagcattgcattgattgtcttatatttcaagttaangtccaaaaaaactncagctgtgaaagcaacataatggatttnaaactgtctacggttntnaacntnatntgtaagntcccatgcccggaagangnnnntnnnccgnatcattttcttcttccggccgggccgagaggtggttacattcgttgaaggacaccagctgcggaatttgcggctttggcagattgaaatcatggcaggtccagaaagtgatgcgcaataccagttcactggtattaaaaaatatttcaactcttatactctcacaggtagaatgaactgtgtactggccacatatggaagcattgcattgattgtcttatatttcaagttaaggtccaaaaaaactccagctgtgaaagcaacataaatggattttaaactgtctacggttcttaacctcatctgttaagttcccatgcctggagaagctaatgccaactcatcatgtgataattcaatttgtacaataaattatgaacctacccgccctgccgccacatgcagtggaggagaggcctgtggcccgaagagcctggtagcgcctcctggggcagcacgtgggtggcgcaggcttagtaacgccgtggactgcagcgacaatcagtggatggtg

SEQ ID NO: 279672 - DNA, 879 bp, Homo sapiens
  misc_feature (64)..(64): n is a, c, g, or t
  misc_feature (67)..(67): n is a, c, g, or t
  misc_feature (94)..(95): n is a, c, g, or t
  misc_feature (100)..(100): n is a, c, g, or t
  misc_feature (176)..(176): n is a, c, g, or t
  misc_feature (249)..(249): n is a, c, g, or t
  misc_feature (263)..(263): n is a, c, g, or t
  misc_feature (291)..(291): n is a, c, g, or t
  misc_feature (307)..(307): n is a, c, g, or t
  misc_feature (309)..(309): n is a, c, g, or t
  misc_feature (313)..(313): n is a, c, g, or t
  misc_feature (315)..(315): n is a, c, g, or t
  misc_feature (318)..(318): n is a, c, g, or t
  misc_feature (325)..(325): n is a, c, g, or t
  misc_feature (342)..(342): n is a, c, g, or t
  misc_feature (344)..(347): n is a, c, g, or t
  misc_feature (349)..(351): n is a, c, g, or t
  misc_feature (355)..(355): n is a, c, g, or t
gcgaattcggccattatggccggggggctttttttcgccggtccgagaggtggctacattcgtnganggacacagctgcggaattgcggcttgnnagatngaaatcatggcaggtccagaaagtgatgcgcaataccagttcactggtattaaaaaatatttcaactcttatactntcacaggtagaatgaactgtgtactggccacatatggaagcattgcattgattgtcttatatttcaagttaangtccaaaaaaactncagctgtgaaagcaacataatggatttnaaactgtctacggttntnaacntnatntgtaagntcccatgcccggaagangnnnntnnnccgnatcattttcttcttccggccgggccgagaggtggttacattcgttgaaggacaccagctgcggaatttgcggctttggcagattgaaatcatggcaggtccagaaagtgatgcgcaataccagttcactggtattaaaaaatataaaaagaactcttaaaactcaacaagaaaacaaaaaatccaattaaaaaatgtacagaagacacagacacttcacaaaagaagatacacagataagcacatgatatgatgtccatcacacgtcattcgggaacggcaaaataaaacaatgaggagttcccgtagtggctcagcagaaacaaattagactagtaaccatgaggttgccagttcaatacctggccttgctcagtgggctaaggatccagtgttgcagggagctgtggtgtaggtcacagacatggctcagatcttgcatcgctgtggccatggtgtagactggcagctgcagctccaattgacccctaccggaagaaggaaaatgatccgggatcctctaat

SEQ ID NO: 279673 - DNA, 562 bp, Homo sapiens
cggacgcgtgggtcgacccacgcgtcgcgttgaaggacaccagctgcggaatttgcggctttggcagacccagctgagtcactgtcactgcctaccaatctcgaccggacctcgaccggctcgtctgtgctgccaatcgactcggcgtggcgtcggtcgtggtagataggcggtcatgcatacgaattttcagctcttgttctggtgaccttttgaatacgtcttgtctataaaagaaattcatgcctttgtaaaatacacagattgaaatcatggcaggtccagaaagtgatgcgcaataccagttcactggtattaaaaaatatttcaactcttatactctcacaggtagaatgaactgtgtactggccacatatggaagcattgcattgattgtcttatatttcaagttaaggtccaaaaaaactccagctgtgaaagcaacataaatggattttaaactgtctacggttcttaacctcatctgttaagttcccatgcctggagaagctaatgccaactcatcatgtgataattcaatttgtacaataaattatgaacc

SEQ ID NO: 279674 - DNA, 3969 bp, Homo sapiens
aaaatgaaacgtacctaagtattattggacagccggagtattttacagtggttgctgctcaggaaatttgagtgaaggactgcaaaagaggagcaaagcagacccgagagagaaggcagcagtgctcccctgtgacgtgctccatcaccgggcagggaagacaccgctgccacctctccacagccttgttcaagagcactggaaattgatggtacaaaacagaagagggaacggaaaaagacagtctcattcagcagcatgccaacagagaagaagatcagcagtgcaagtgattgtattaattcaatggttgagggttcagaactcaaaaaggttcgctccaactctagaatttatcataggtactttttactggatgctgacatgcagagcctaaggtgggagccatctaagaaggattctgagaaagccaagattgacattaaatccatcaaggaagtgagaacaggaaaaaacacagacatattccgcagcaatggcatttctgaccagatatctgaagattgtgcgttttccgtcatatatggagagaattatgagtcactggatttggttgccaactccgcagatgttgcaaacatctgggttacaggactgcggtacctaatttcttatggaaaacatacacttgatatgttagaaagtagccaagataacatgaggacttcttgggtttcacaaatgtttagtgaaattgatgtagataaccttggacatataactctgtgtaatgctgtgcaatgtatcagaaacctcaatcctggtttaaaaacgagcaaaattgagcttaagttcaaagaattgcataaatcaaaggacaaagctggtaccgaggtcacaaaggaagaatttattgaggtttttcatgagctttgtactagacctgaaatttatttccttttagttcagttttcaagcaataaagaattccttgataccaaggaccttatgatgtttcttgaggcagaacagggtgtggcacatataaatgaggaaataagccttgaaattattcacaaatatgaaccatccaaagagggtcaggaaaagggctggctctccatagacgggttcactaattaccttatgtcacctgactgttatatattcgatccagaacataagaaggtctgtcaggatatgaagcaacctctgtctcattactttataaactcatctcataatacatacttaatagaggatcagttccgaggtccctccgacatcacaggatatattcgagctcttaaaatgggttgccggagtgttgaattagatgtatgggatgggccggacaatgaacctgtaatttacacaggccacaccatgacctctcagatagttttccgcagtgtcattgatattattaacaagtatgcattctttgcttcagagtatcctcttatcttgtgtttagaaaaccactgttccattaaacaacagaaggtaatggttcagcacatgaagaaacttttaggagacaagctctatacaacatcacccaatgttgaggaatcttatctaccatccccagatgtcctgaaagggaaaatactaattaaagcaaagaagctgtcctcaaattgctctggggtagaaggagatgttactgacgaagatgaaggagcagaaatgtctcagaggatgggaaaagagaacatggagcaacccaataatgtgcctgtgaagcgatttcagctttgtaaagaactgtctgaactggtcagcatctgcaaatcagttcagttcaaagaatttcaggtgtcgtttcaggttcagaagtactgggaagtctgttcctttaatgaagtgcttgccagcaagtacgccaatgaaaatccaggggactttgtaaattacaacaaacgttttcttgctagggtttttcccagtccaatgagaattgattccagtaacatgaatcctcaagatttttggaaatgtggttgccaaattgtagccatgaactttcagacaccaggactgatgatggacctgaatattggctggtttaggcagaacggaaactgtggctatgtcctccggccagccatcatgagggaggaggtctccttcttcagcgccaatacaaaagactctgtcccaggggtctcacctcaacttcttcacattaaaatcatcagtgggcagaactttcccaagcccaaaggatcaggtgccaaaggtgatgtggtagatccttatgtctatgttgaaatccatggaatccctgctgattgtgcagaacaaaggacaaaaacagtgcaccagaatggagacgctcccatttttgatgaaagctttgaatttcaaatcaacctgcctgaactggccatggtgcgctttgtagtgctggatgatgactacattggggatgaattcatcggccagtacacaattccctttgaatgtttacagacgggctaccgccatgtccccctgcagtccttaactggagaggtccttgcacatgcttctttatttgtccacgtggctattactaaccgaagaggaggaggaaagcctcataaaaggggcctttctgtgagaaaagggaagaaatccagggaatatgcatctttgagaacactgtggattaaaaccgtggatgaggtattcaagaatgcccagccccctatacgggatgccacagatctgagagaaaacatgcagaatgcggtggtgtcattcaaggagctgtgtggcctctcctctgtggccaatctcatgcagtgcatgttggcggtgtctccccgctttctggggcccgataacacacccctagtggtcctaaatctcagcgagcagtaccccacaatggagctgcagggaattgtgccggaggttctgaagaagatcgtaacaacttatgacatgatgattcagtccctcaaggcgttgattgaaaatgcagatgctgtatatgaaaagatcgtacattgtcagaaggcagccatggaattccatgaacacttgcacagcataggcaccaaggaaggtttgaaggaaagaaaactacaaaaagcagtggagagctttacctggaatattaccatcttaaagggacaagcagatcttttgaaatatgctaagaatgagacattggagaacctgaaacaaatccattttgctgctgtttcatgtggactgaataaaccaggcaccgaaaatgctgatgtccagaagccacgccggagcttggaagtcatacccgaaaaagcaaacgatgaaactggagaatgaggaaacttacaataaaccattatggagtttataactctaggaccaattgtagtcagatgggacatttgctttgcactcactaatgagaataatattcgggattttaaagcacaactggaatagctaattacagtctattaaaactgtgaatgtatgtagcaatcctgcgtgtgaaggcaaataaactctttaacaggcaattatattgctggccaaaatatgctatatttgtatacaaagacattctaactcagttccagtatgaagaaagattattcactctagctccactgagaaacattttcctaagtgaaaacaatttcttaagatggaaatggattggattgtcaaattattatttattggagaaaaaaacctgatctacacatttttacttatatggggttgccagagtctctgggttctagatgattttggtggcatgcttgctgagccataattactaaagagaatgtaagtggacgggttccctgaatccccggggtccttggagagccatcgaggagaatgtgcaattggactgaagctccctggctgaagatacatgccgagtcagcacatgggtagagatgatgtaaaagcagccaatctggaaacaatacattgtaaatagtttttcattgtatgaagtagtgttcacattaaaaagatgttttatgatatttctccaatagcagtacatgt

SEQ ID NO: 279675 - DNA, 1041 bp, Homo sapiens
ttaaaattgacctattcagatgcagtgccaataagaaataattatgccttcttgtggaatcagaatacttctatttcagtgaaagatagatattgttgaagtataacactaagttatgtcatatctaatactgtttaattgcatgttttgttatagggacaagcagatcttttgaaatatgctaagaatgagacattggagaacctgaaacaaatccattttgctgctgtttcatgtggactgaataaaccaggcaccgaaaatgctgatgtccagaagccacgccggagcttggaagtcatacccgaaaaagcaaacgatgaaactggagaatgaggaaacttacaataaaccattatggagtttataactctaggaccaattgtagtcagatgggacatttgctttgcactcactaatgagaataatattcgggattttaaagcacaactggaatagctaattacagtctattaaaactgtgaatgtatgtagcaatcctgcgtgtgaaggcaaataaactctttaacaggcaattatattgctggccaaaatatgctatatttgtatacaaagacattctaactcagttccagtatgaagaaagattattcactctagctccactgagaaacattttcctaagtgaaaacaatttcttaagatggaaatggattggattgtcaaattattatttattggagaaaaaaacctgatctacacatttttacttatatggggttgccagagtctctgggttctagatgattttggtggcatgcttgctgagccataattactaaagagaatgtaagtggacgggttccctgaatccccggggtccttggagagccatcgaggagaatgtgcaattggactgaagctccctggctgaagatacatgccgagtcagcacatgggtagagatgatgtaaaagcagccaatctggaaacaatacattgtaaatagtttttcattgtatgaagtagtgttcacattaaaaagatgttttatgatatttctccaatagcagtacatgt

SEQ ID NO: 279676 - DNA, 3644 bp, Homo sapiens
  misc_feature (40)..(40): n is a, c, g, or t
ccgcgcgcggcggcccgaggcggcggcggggacgcggggncgcgaggacgcggctttgtgcaggcgggtcgcggggcgcccatggcggagtgcggccgggggggcgccgccggcggggccctgcccacctccccgggcccggccctcggcgccaagggcgccctgaaagccggagtgggggaaggcggtggcgggggaggtcgcctcggccacgggcgggcgcgctatgacagcggcggggtttccaacggagactgcagcctcggcgtgtccggggacgaagcccgggctagccctaccaggggaccccgcggcgttgcgctcgccccgacccccagcgcggtcgtctgtaccctcccccgggagagcaagccgggcggcctgccccgccggagcagcatcatcaaggatggtacaaaacagaagagggaacggaaaaagacagtctcattcagcagcatgccaacagagaagaagatcagcagtgcaagtgattgtattaattcaatggttgagggttcagaactcaaaaaggttcgctccaactctagaatttatcataggtactttttactggatgctgacatgcagagcctaaggtgggagccatctaagaaggattctgagaaagccaagattgacattaaatccatcaaggaagtgagaacaggaaaaaacacagacatattccgcagcaatggcatttctgaccagatatctgaagattgtgcgttttccgtcatatatggagagaattatgagtcactggatttggttgccaactccgcagatgttgcaaacatctgggttacaggactgcggtacctaatttcttatggaaaacatacacttgatatgttagaaagtagccaagataacatgaggacttcttgggtttcacaaatgtttagtgaaattgatgtagataaccttggacatataactctgtgtaatgctgtgcaatgtatcagaaacctcaatcctggtttaaaaacgagcaaaattgagcttaagttcaaagaattgcataaatcaaaggacaaagctggtaccgaggtcacaaaggaagaatttattgaggtttttcatgagctttgtactagacctgaaatttatttccttttagttcagttttcaagcaataaagaattccttgataccaaggaccttatgatgtttcttgaggcagaacagggtgtggcacatataaatgaggaaataagccttgaaattattcacaaatatgaaccatccaaagagggtcaggaaaagggctggctctccatagacgggttcactaattaccttatgtcacctgactgttatatattcgatccagaacataagaaggtctgtcaggatatgaagcaacctctgtctcattactttataaactcatctcataatacatacttaatagaggatcagttccgaggtccctccgacatcacaggatatattcgagctcttaaaatgggttgccggagtgttgaattagatgtatgggatgggccggacaatgaacctgtaatttacacaggccacaccatgacctctcagatagttttccgcagtgtcattgatattattaacaagtatgcattctttgcttcagagtatcctcttatcttgtgtttagaaaaccactgttccattaaacaacagaaggtaatggttcagcacatgaagaaacttttaggagacaagctctatacaacatcacccaatgttgaggaatcttatctaccatccccagatgtcctgaaagggaaaatactaattaaagcaaagaagctgtcctcaaattgctctggggtagaaggagatgttactgacgaagatgaaggagcagaaatgtctcagaggatgggaaaagagaacatggagcaacccaataatgtgcctgtgaagcgatttcagctttgtaaagaactgtctgaactggtcagcatctgcaaatcagttcagttcaaagaatttcaggtgtcgtttcaggttcagaagtactgggaagtctgttcctttaatgaagtgcttgccagcaagtacgccaatgaaaatccaggggactttgtaaattacaacaaacgttttcttgctagggtttttcccagtccaatgagaattgattccagtaacatgaatcctcaagatttttggaaatgtggttgccaaattgtagccatgaactttcagacaccaggactgatgatggacctgaatattggctggtttaggcagaacggaaactgtggctatgtcctccggccagccatcatgagggaggaggtctccttcttcagcgccaatacaaaagactctgtcccaggggtctcacctcaacttcttcacattaaaatcatcagtgggcagaactttcccaagcccaaaggatcaggtgccaaaggtgatgtggtagatccttatgtctatgttgaaatccatggaatccctgctgattgtgcagaacaaaggacaaaaacagtgcaccagaatggagacgctcccatttttgatgaaagctttgaatttcaaatcaacctgcctgaactggccatggtgcgctttgtagtgctggatgatgactacattggggatgaattcatcggccagtacacaattccctttgaatgtttacagacgggctaccgccatgtccccctgcagtccttaactggagaggtccttgcacatgcttctttatttgtccacgtggctattactaaccgaagaggaggaggaaagcctcataaaaggggcctttctgtgagaaaagggaagaaatccagggaatatgcatctttgagaacactgtggattaaaaccgtggatgaggtattcaagaatgcccagccccctatacgggatgccacagatctgagagaaaacatgcagaatgcggtggtgtcattcaaggagctgtgtggcctctcctctgtggccaatctcatgcagtgcatgttggcggtgtctccccgctttctggggcccgataacacacccctagtggtcctaaatctcagcgagcagtaccccacaatggagctgcagggaattgtgccggaggttctgaagaagatcgtaacaacttatgacatgatgattcagtccctcaaggcgttgattgaaaatgcagatgctgtatatgaaaagatcgtacattgtcagaaggcagccatggaattccatgaacacttgcacagcataggcaccaaggaaggtttgaaggaaagaaaactacaaaaagcagtggagagctttacctggaatattaccatcttaaagataagaaagacaggaaggaggagtatttttgtgcctcagactcccataatggtatgagtaccctcctccttctcctccctcacactgcatgtgatttggaagaaaagtgtctgctggcccccagggaatggaaggtgctaatctttgctgtcttcaacatccaagcatgtggccattacacaggtggcagagggcaggggaagtcttagctgccgcactggatccctcacctcagaagtaagtcaactttttttctctaatagatagttggacaaaaggactttgaaaaaattagccagatgtagaatccctgttgttttgcccctacgtctgaataaaagcaatgacttgtgattgtt

SEQ ID NO: 279677 - DNA, 4170 bp, Homo sapiens
  misc_feature (40)..(40): n is a, c, g, or t
ccgcgcgcggcggcccgaggcggcggcggggacgcggggncgcgaggacgcggctttgtgcaggcgggtcgcggggcgcccatggcggagtgcggccgggggggcgccgccggcggggccctgcccacctccccgggcccggccctcggcgccaagggcgccctgaaagccggagtgggggaaggcggtggcgggggaggtcgcctcggccacgggcgggcgcgctatgacagcggcggggtttccaacggagactgcagcctcggcgtgtccggggacgaagcccgggctagccctaccaggggaccccgcggcgttgcgctcgccccgacccccagcgcggtcgtctgtaccctcccccgggagagcaagccgggcggcctgccccgccggagcagcatcatcaaggatggtacaaaacagaagagggaacggaaaaagacagtctcattcagcagcatgccaacagagaagaagatcagcagtgcaagtgattgtattaattcaatggttgagggttcagaactcaaaaaggttcgctccaactctagaatttatcataggtactttttactggatgctgacatgcagagcctaaggtgggagccatctaagaaggattctgagaaagccaagattgacattaaatccatcaaggaagtgagaacaggaaaaaacacagacatattccgcagcaatggcatttctgaccagatatctgaagattgtgcgttttccgtcatatatggagagaattatgagtcactggatttggttgccaactccgcagatgttgcaaacatctgggttacaggactgcggtacctaatttcttatggaaaacatacacttgatatgttagaaagtagccaagataacatgaggacttcttgggtttcacaaatgtttagtgaaattgatgtagataaccttggacatataactctgtgtaatgctgtgcaatgtatcagaaacctcaatcctggtttaaaaacgagcaaaattgagcttaagttcaaagaattgcataaatcaaaggacaaagctggtaccgaggtcacaaaggaagaatttattgaggtttttcatgagctttgtactagacctgaaatttatttccttttagttcagttttcaagcaataaagaattccttgataccaaggaccttatgatgtttcttgaggcagaacagggtgtggcacatataaatgaggaaataagccttgaaattattcacaaatatgaaccatccaaagagggtcaggaaaagggctggctctccatagacgggttcactaattaccttatgtcacctgactgttatatattcgatccagaacataagaaggtctgtcaggatatgaagcaacctctgtctcattactttataaactcatctcataatacatacttaatagaggatcagttccgaggtccctccgacatcacaggatatattcgagctcttaaaatgggttgccggagtgttgaattagatgtatgggatgggccggacaatgaacctgtaatttacacaggccacaccatgacctctcagatagttttccgcagtgtcattgatattattaacaagtatgcattctttgcttcagagtatcctcttatcttgtgtttagaaaaccactgttccattaaacaacagaaggtaatggttcagcacatgaagaaacttttaggagacaagctctatacaacatcacccaatgttgaggaatcttatctaccatccccagatgtcctgaaagggaaaatactaattaaagcaaagaagctgtcctcaaattgctctggggtagaaggagatgttactgacgaagatgaaggagcagaaatgtctcagaggatgggaaaagagaacatggagcaacccaataatgtgcctgtgaagcgatttcagctttgtaaagaactgtctgaactggtcagcatctgcaaatcagttcagttcaaagaatttcaggtgtcgtttcaggttcagaagtactgggaagtctgttcctttaatgaagtgcttgccagcaagtacgccaatgaaaatccaggggactttgtaaattacaacaaacgttttcttgctagggtttttcccagtccaatgagaattgattccagtaacatgaatcctcaagatttttggaaatgtggttgccaaattgtagccatgaactttcagacaccaggactgatgatggacctgaatattggctggtttaggcagaacggaaactgtggctatgtcctccggccagccatcatgagggaggaggtctccttcttcagcgccaatacaaaagactctgtcccaggggtctcacctcaacttcttcacattaaaatcatcagtgggcagaactttcccaagcccaaaggatcaggtgccaaaggtgatgtggtagatccttatgtctatgttgaaatccatggaatccctgctgattgtgcagaacaaaggacaaaaacagtgcaccagaatggagacgctcccatttttgatgaaagctttgaatttcaaatcaacctgcctgaactggccatggtgcgctttgtagtgctggatgatgactacattggggatgaattcatcggccagtacacaattccctttgaatgtttacagacgggctaccgccatgtccccctgcagtccttaactggagaggtccttgcacatgcttctttatttgtccacgtggctattactaaccgaagaggaggaggaaagcctcataaaaggggcctttctgtgagaaaagggaagaaatccagggaatatgcatctttgagaacactgtggattaaaaccgtggatgaggtattcaagaatgcccagccccctatacgggatgccacagatctgagagaaaacatgcagaatgcggtggtgtcattcaaggagctgtgtggcctctcctctgtggccaatctcatgcagtgcatgttggcggtgtctccccgctttctggggcccgataacacacccctagtggtcctaaatctcagcgagcagtaccccacaatggagctgcagggaattgtgccggaggttctgaagaagatcgtaacaacttatgacatgatgattcagtccctcaaggcgttgattgaaaatgcagatgctgtatatgaaaagatcgtacattgtcagaaggcagccatggaattccatgaacacttgcacagcataggcaccaaggaaggtttgaaggaaagaaaactacaaaaagcagtggagagctttacctggaatattaccatcttaaagggacaagcagatcttttgaaatatgctaagaatgagacattggagaacctgaaacaaatccattttgctgctgtttcatgtggactgaataaaccaggcaccgaaaatgctgatgtccagaagccacgccggagcttggaagtcatacccgaaaaagcaaacgatgaaactggagaatgaggaaacttacaataaaccattatggagtttataactctaggaccaattgtagtcagatgggacatttgctttgcactcactaatgagaataatattcgggattttaaagcacaactggaatagctaattacagtctattaaaactgtgaatgtatgtagcaatcctgcgtgtgaaggcaaataaactctttaacaggcaattatattgctggccaaaatatgctatatttgtatacaaagacattctaactcagttccagtatgaagaaagattattcactctagctccactgagaaacattttcctaagtgaaaacaatttcttaagatggaaatggattggattgtcaaattattatttattggagaaaaaaacctgatctacacatttttacttatatggggttgccagagtctctgggttctagatgattttggtggcatgcttgctgagccataattactaaagagaatgtaagtggacgggttccctgaatccccggggtccttggagagccatcgaggagaatgtgcaattggactgaagctccctggctgaagatacatgccgagtcagcacatgggtagagatgatgtaaaagcagccaatctggaaacaatacattgtaaatagtttttcattgtatgaagtagtgttcacattaaaaagatgttttatgatatttctccaatagcagtacatgt

SEQ ID NO: 279678 - DNA, 1387 bp, Homo sapiens
ctccctgctcagggcactggggggctctccacccactgccactctcaggctggcatgcgagaatgcccagccccctatacgggatgccacagatctgagagaaaacatgcagaatgcggtggtgtcattcaaggagctgtgtggcctctcctctgtggccaatctcatgcagtgcatgttggcggtgtctccccgctttctggggcccgataacacacccctagtggtcctaaatctcagcgagcagtaccccacaatggagctgcagggaattgtgccggaggttctgaagaagatcgtaacaacttatgacatgatgattcagtccctcaaggcgttgattgaaaatgcagatgctgtatatgaaaagatcgtacattgtcagaaggcagccatggaattccatgaacacttgcacagcataggcaccaaggaaggtttgaaggaaagaaaactacaaaaagcagtggagagctttacctggaatattaccatcttaaagggacaagcagatcttttgaaatatgctaagaatgagacattggagaacctgaaacaaatccattttgctgctgtttcatgtggactgaataaaccaggcaccgaaaatgctgatgtccagaagccacgccggagcttggaagtcatacccgaaaaagcaaacgatgaaactggagaatgaggaaacttacaataaaccattatggagtttataactctaggaccaattgtagtcagatgggacatttgctttgcactcactaatgagaataatattcgggattttaaagcacaactggaatagctaattacagtctattaaaactgtgaatgtatgtagcaatcctgcgtgtgaaggcaaataaactctttaacaggcaattatattgctggccaaaatatgctatatttgtatacaaagacattctaactcagttccagtatgaagaaagattattcactctagctccactgagaaacattttcctaagtgaaaacaatttcttaagatggaaatggattggattgtcaaattattatttattggagaaaaaaacctgatctacacatttttacttatatggggttgccagagtctctgggttctagatgattttggtggcatgcttgctgagccataattactaaagagaatgtaagtggacgggttccctgaatccccggggtccttggagagccatcgaggagaatgtgcaattggactgaagctccctggctgaagatacatgccgagtcagcacatgggtagagatgatgtaaaagcagccaatctggaaacaatacattgtaaatagtttttcattgtatgaagtagtgttcacattaaaaagatgttttatgatatttctccaatagcagtacatgt

SEQ ID NO: 279679 - DNA, 437 bp, Homo sapiens
ccatctcgactaaaaatacaaggcttcttcttctgcattgtacaggatcaggaagaaaggaaggggaaaatgtgaagtgtttctctatttaatgaatcagctgtggccaacttgttcagatgcgtctggactttcttccttccagtgggtttgtggtcttgcttgactttaggagtgaagccgcagaccttcgcagtgagtgttacagctcttaaaggtggcagtccggagttgttcgttcctctcggtgggttcgtggtctcactgacttcaggagtgaagctacagaccttcacgccacctctgtactccaggccatcaaatgccagcctcctgtaaatacactctgatttcctgaaaacactcttattcccctccaaactacaaagtgatctttaataaatgcaaattgatcagtcatctgatcaaaatctgtt

SEQ ID NO: 279680 - DNA, 1181 bp, Homo sapiens
gctgagcccaccaccgggggccgcggttcagctccgccgggcgccccaggctgccgagtccgctgggtcctacgcgaccgctgacccgcagcgccgccggctcccgtcgccgtagccaccgccagctcggtgcagcccaggcgtttccgggttcccgcggtcccgtcccccaaatgctccggcttccgcctcggctctggcaaatgccgttcccggctcggctctggcagccccagctcggcacttggcagctctgtccctaaggcgacgcacctgggctgctctgctggcagcccctggttcctgcttcaccgtcgcgtggaggcctggggcactgctttctgctacacctctcctaggagcgcgaaacagatggagtgacactcgtcgagggcctctgcgggactgtctgtttgcagagggtgccaaggtgtccactgcgtaaggaagggcaaagtcctttggggcaaagaaccctgagaggaacggggagatggattttgaaagcaaacgaaccctctcctaaaagtgactgtcactgacctgaaaacaaccagattagctatggcaaaggctgccaaccaaccagtggtctgcaagaaggcttgttcttccacttcacccaccctgactgagatcttgagactgaaggaaacccaaagccgtaccaccaatgggcctagtgtcatcaaccgggagaggaaaaagaaaactgggcccagaggattgcagagttatgagggaccaaccccttcctggctgcatggatcacagcattaccttttaaaagtgttccagtagctgtgttggaaaccctctaaccacggcagcccattcaggtgatgaacaggctgaaatcagtacttcaggttcagctggattatcaaataagcgaataggattatctctttttgttaactcagggctgctataaattaagcctatgtctctttatattgcaaatgattaaaaccatgtccaagagagacatacttagaaaaaaagtgatattgaagaaaaataagtaactgtattagagtagaataactggttttaaaattttctgcaatacagtcttgagaaaattcctggatggtaaaatacatattagatcttaatacatgcccagttttttttgaaaccaaaatgtgcctgttagatgatgataacagcatgcctcg

SEQ ID NO: 279681 - DNA, 940 bp, Homo sapiens
gctgagcccaccaccgggggccgcggttcagctccgccgggcgccccaggctgccgagtccgctgggtcctacgcgaccgctgacccgcagcgccgccggctcccgtcgccgtagccaccgccagctcggtgcagcccaggcgtttccgggttcccgcggtcccgtcccccaaatgctccggcttccgcctcggctctggcaaatgccgttcccggctcggctctggcagccccagctcggcacttggcagctctgtccctaaggcgacgcacctgggctgctctgctggcagcccctggttcctgcttcaccgtcgcgtggaggcctggggcactgctttctgctacacctctcctaggagcgcgaaacagatggagtgacactcgtcgagggcctctgcgggactgtctgtttgcagagggtgccaaggtgtccactgcgtaaggaagggcaaagtcctttggggcaaagaaccctgagaggaacggggagatggattttgaaagcaaacgaaccctctcctaaaagtgactgtcactgacctgaaaacaaccagattagctatggcaaaggctgccaaccaaccagtggtctgcaagaaggcttgttcttccacttcacccaccctgactgagatcttgagactgaaggaaacccaaagccgtaccaccaatgggcctagtgtcatcaaccgggagaggaaaaagaaaactgggcccagaggattgcagagttatgagggaccaaccccttcctggctgcatggatcacagcattaccttttaaaagtgttccagtagctgtgttggaaaccctctaaccacggcagcccattcagccatgtaagcaagtacctttcacctcccgccatgattctgaggcctcccccgccatgtggaactgtaggtccaattaaacttctttttcttcccagtctcg

SEQ ID NO: 279682 - DNA, 577 bp, Homo sapiens
tactccaatacagaatgggaaagaggaattcccaagtagtaaggtatcccagagccggaacatttcatctaatcttcccctgcctttagactgggatttgtatcaccagcttcctggttctcagacctttggaatcagaattacaaacacctctagactctcaattataccactggctttcctgggtatccagctttcaaacagcatattgtgggatatctcagcctccataaatgtgtgagccaattactcataataaatctcctctatctatgtttatatatctcctattggttctgtttctctagagaaccctaatacagtcctcataagttttgaggtactcttaattgtatttttaagaattaattagatactttttaaatgttcaaaatgtctcaataaaaggtattatgaagcatgtgctttttgttaccacttaattaacaggatgcttcataacagactaaaagtaataagatctaatattaccattattaataatttgacaaatttattctcctaagtttactacctagaaatatatacatacacacatatatagctatatatatag

SEQ ID NO: 279683 - DNA, 2992 bp, Homo sapiens
  misc_feature (1031)..(1031): n is a, c, g, or t
  misc_feature (1735)..(1735): n is a, c, g, or t
  misc_feature (2088)..(2088): n is a, c, g, or t
  misc_feature (2095)..(2095): n is a, c, g, or t
ttttttttttaagatttaaaacattttttattaaaactgtacaataatttacaaacgagtaaaaaattctctggtatatatcataggaatcacaatacaaaaatatttgtaaaatcttgtagatcaccatacaaacctattttaggcctgtgaatactgcttagcatggaacggaatgtcacgtggttagagggtgactatgaagggagtgcctgggagaatacacacactacctggcatgccgccgtaagaaaacaggcccggttagtttttgcataaatttacaataaagctttttaaaaaatatacagtaaacaaatatatgatttgatacctatattcacaatatgagtttcctgaggctaaactgaattccattactgtgataaaacacacactctctctcagggtttcaaggatgggatgacggtgagttggcgaatgcgtcagtgcctccaaacccacacttgggcactctcttctttttgacttctagtatcggtgttcacaagccctgtaaggcactcggggtatcctgaaggctacagattctgcaagggcagagactttaaggaacagccatagtccttctccagctcaaaatctggaccatgggcacaaggtaaacaacacactggtgtcaacaaaggaatctgctatttatgtggatttttactttagacaaactaaagtatctatgttgttctgtgtgttgaacacagagtgtgatgatgttaatataatgtaaatgttgatgtaacagtacatttctggcaacatttcagggtccttcctcttgccttattagggggtgatgcattcatacagacttcccctgttagaagagctagcagtaagacagcccaagtacttggaggaaattcactctagcccattggtttggaaaagaaggtatagcctgcaatttagaaatgcaccttatttttaaatacttgaattctgctgctgctcactggaccaggaggagtcagtgataaatgctcatatttacctttttgggggcaaaaacncagttctgaaatgctgggtattgtaatcagatgtaaagaaggtgcctatgatagacgagtgaaaacaatgatatctaaggagaggaactgacgctccaactagatgtgtgctttcaggaatggggcagagacgcgatgcagtttggatgttattcagcacattccttgcaccttctcccgttcctatatacatactttttacatataaacaattacaacttcataaggatttggtacatatttacatgcttctctttgccgtatagtttgccttattattacagaactgtgattaagagtgtctgtggtggatagaggtgtatgaagtgctccagacatatatacaacatgctaaaccatgatgacccaaataaacatgagggatgtgaatctgggaatgtgagtttcactgcacatctttagatccgaaacagctggcccatgcagctgttgttcccatgcaggtacacattgggaccatgccaggagctctcccagaggaggaggccaggctggcagggagccaggtagagttacaacatatttctggatgcctgcatcgtagagtccatcggacttcaacccagcggttcacccacagcgccacggtagcttttattaacacaaggctattgtgtgccattcagttgtgagtataataaatgtgccaagaagatgcagtcgttaaaatgagacaaaactangcacagaggactaaacaggatttcagactcgagacgcaaaccccgaggtcaggctcagctagagacactgaactggcccagtatcttgccgagtaaatcaggaactgtggcttgaatgacaacagaaatggatgggtctttcttggacaagtgctgattaatagtgcattttccagcaaaaatcctgcagccaccaaagaaaaagcatatctgtctgatactattagcttttccctgatttcaacctagggagccatgcctggtccgcagccaccgtgtcatctgccccaaagtcagacatttcttctgacacaaatataaaatgagcctaatacttccagacaacccagtcntccctanggcagctgagtcgtgtcttttatacaatgctgccagtaacagtcacacctggctgcacagctggctgcctcaacttctaggtgcctcgaaatggctaaatcccacgaatggctcttctggttgcgtgaaaacatgcataaacgcatgcttgtgcacacaagtgagcacacacacacacctcctgtcaattcagctctgagagcagaaccttagcccacctagggtgggaggacacagaagttccatctgcagccagtcaggctccatccacaggctggacgaagctcccgggctgcgtcccgggtctcccagcaggaatggaaatcacacctaacgttgccttcaccaatgcactgcttcctctctgaaaaagagtggagaaaacgccgtttagtgcgacgacctggggaatgtgtgtgacccaccacaggtcagcactcaaggcagttggggccttgaccaggcactggctctgcacaggatggtcactgagccaatggcaggcactgccctcatgggtccagcaccagctacagcgccacgtcctgagcctccagcccgggagacgcacctggcacccaccgaaggccacactctcaggaagatgagtccatgctcctcacaaagcccctacagaagtgaccttggatctttctcaccatgtctgggccagcagcccggtttctacccaacttccctcattgcttagaaagtgggcctctgctaagttcaaagtttttattacctttccattttttcatgtttttgaagaagttatgaaggatctgcttttcacaagggcgggccccggatcagtccctggggcatggcagcatcgggtgggaggccacgtgggctgaggggcgggagcgagggcacgctgggacagaggcagag

SEQ ID NO: 279684 - DNA, 675 bp, Homo sapiens
gctctcgaaggcgtcctccacgcagcggaacacgcagccaagcttgggccgggccagaggcctcgcgggctcctgaggctgccgcgcggtcacggcaggagcgggcgacagaatccggtctcggagcctcctgtagcgagccacaggagggagcctcccaggtggtcgaccggagccaggtgctgccaggcacccgactgcagagcttgccctccaggtgatctcgcagtatcggtgttcacaagccctgtaaggcactcggggtatcctgaaggctacagattctgcaagggcagagactttaaggaacagccatagtccttctccagctcaaaatctggaccatgggcacaaggttgtcccggaaccatcgatctctagaaggtacaggaggaaggggacctgccagtccagccctcatattttacagagggaaaaggtgaagccccatgtaaaacagggatttccctcggtgacacttccaggctgagaagggccggggatctggacacctacccagaaacactcccaccctgtcaatgcctctctgaattatgtgatcaactgcctggagtatgaactaggcacatgcaaatagagaacagaggtcttgttgaaaatataatgctgaattttaaaaactcactccccaaattaaaggaacaagaccagagc

SEQ ID NO: 279685 - DNA, 2725 bp, Homo sapiens
  misc_feature (764)..(764): n is a, c, g, or t
  misc_feature (1468)..(1468): n is a, c, g, or t
  misc_feature (1821)..(1821): n is a, c, g, or t
  misc_feature (1828)..(1828): n is a, c, g, or t
gctctcgaaggcgtcctccacgcagcggaacacgcagccaagcttgggccgggccagaggcctcgcgggctcctgaggctgccgcgcggtcacggcaggagcgggcgacagaatccggtctcggagcctcctgtagcgagccacaggagggagcctcccaggtggtcgaccggagccaggtgctgccaggcacccgactgcagagcttgccctccaggtgatctcgcagtatcggtgttcacaagccctgtaaggcactcggggtatcctgaaggctacagattctgcaagggcagagactttaaggaacagccatagtccttctccagctcaaaatctggaccatgggcacaaggtaaacaacacactggtgtcaacaaaggaatctgctatttatgtggatttttactttagacaaactaaagtatctatgttgttctgtgtgttgaacacagagtgtgatgatgttaatataatgtaaatgttgatgtaacagtacatttctggcaacatttcagggtccttcctcttgccttattagggggtgatgcattcatacagacttcccctgttagaagagctagcagtaagacagcccaagtacttggaggaaattcactctagcccattggtttggaaaagaaggtatagcctgcaatttagaaatgcaccttatttttaaatacttgaattctgctgctgctcactggaccaggaggagtcagtgataaatgctcatatttacctttttgggggcaaaaacncagttctgaaatgctgggtattgtaatcagatgtaaagaaggtgcctatgatagacgagtgaaaacaatgatatctaaggagaggaactgacgctccaactagatgtgtgctttcaggaatggggcagagacgcgatgcagtttggatgttattcagcacattccttgcaccttctcccgttcctatatacatactttttacatataaacaattacaacttcataaggatttggtacatatttacatgcttctctttgccgtatagtttgccttattattacagaactgtgattaagagtgtctgtggtggatagaggtgtatgaagtgctccagacatatatacaacatgctaaaccatgatgacccaaataaacatgagggatgtgaatctgggaatgtgagtttcactgcacatctttagatccgaaacagctggcccatgcagctgttgttcccatgcaggtacacattgggaccatgccaggagctctcccagaggaggaggccaggctggcagggagccaggtagagttacaacatatttctggatgcctgcatcgtagagtccatcggacttcaacccagcggttcacccacagcgccacggtagcttttattaacacaaggctattgtgtgccattcagttgtgagtataataaatgtgccaagaagatgcagtcgttaaaatgagacaaaactangcacagaggactaaacaggatttcagactcgagacgcaaaccccgaggtcaggctcagctagagacactgaactggcccagtatcttgccgagtaaatcaggaactgtggcttgaatgacaacagaaatggatgggtctttcttggacaagtgctgattaatagtgcattttccagcaaaaatcctgcagccaccaaagaaaaagcatatctgtctgatactattagcttttccctgatttcaacctagggagccatgcctggtccgcagccaccgtgtcatctgccccaaagtcagacatttcttctgacacaaatataaaatgagcctaatacttccagacaacccagtcntccctanggcagctgagtcgtgtcttttatacaatgctgccagtaacagtcacacctggctgcacagctggctgcctcaacttctaggtgcctcgaaatggctaaatcccacgaatggctcttctggttgcgtgaaaacatgcataaacgcatgcttgtgcacacaagtgagcacacacacacacctcctgtcaattcagctctgagagcagaaccttagcccacctagggtgggaggacacagaagttccatctgcagccagtcaggctccatccacaggctggacgaagctcccgggctgcgtcccgggtctcccagcaggaatggaaatcacacctaacgttgccttcaccaatgcactgcttcctctctgaaaaagagtggagaaaacgccgtttagtgcgacgacctggggaatgtgtgtgacccaccacaggtcagcactcaaggcagttggggccttgaccaggcactggctctgcacaggatggtcactgagccaatggcaggcactgccctcatgggtccagcaccagctacagcgccacgtcctgagcctccagcccgggagacgcacctggcacccaccgaaggccacactctcaggaagatgagtccatgctcctcacaaagcccctacagaagtgaccttggatctttctcaccatgtctgggccagcagcccggtttctacccaacttccctcattgcttagaaagtgggcctctgctaagttcaaagtttttattacctttccattttttcatgtttttgaagaagttatgaaggatctgcttttcacaagggcgggccccggatcagtccctggggcatggcagcatcgggtgggaggccacgtgggctgaggggcgggagcgagggcacgctgggacagaggcagag

SEQ ID NO: 279686 - DNA, 805 bp, Homo sapiens
tcgacggcgacgcgaatctacgcgacgcgacgcggagctcggagcagcgttccttccctctcgtagaggctcaggcgcaggcaccgccccacggcgaggcgcgtcccttagcagagcccgccctgtctctgcggcagcctatcgacgccagcccgcgggccgatcctgttcccgcccccgaccggagcctttcgggtggctccgcccacagcgggcgtttcctcaagccacgcctgcgcaggtcgtcgggggagactgatgaagagacgactatccccagaccgtattttaactactatggcgctgtgtaagaagcaacctgagaagtgtggatgaaaagctacaggtagagccctgggcccaagacggtggcttggacaacatgctaaataaactataaactagatggtatttgaagctacgagagtagataaaaatgacaggaggaccaaggagaaacttgggaacgccaatgtttaagaaacgggaaagcaaaaaaaaaaaaaaacacacacaaaaaaacaatgtaaccagagccacaaaaaccagaatcacagcaagggattctgatgtttacattatgtcctgtttccatgttgacacattacacaaggacagtttttttctaattgcttaatttttcatcatcttccatccgatttactgaaccatccttaactttaggatgaatcctttcatttaacaaatgtgttttgaatgtccactatgtgccagacactgttctaggtgctaggaaaacagctgtgaacaaaaccaataaaaatctctttcctcatggaattta

SEQ ID NO: 279687 - DNA, 392 bp, Homo sapiens
ctcctccttcttgcaggaatatgtttcagttatttgcaacctaaaggaatctgactagaatgtaaaatcattgacctagtaatatgattgctagtctgagcctggaggtagctcccgtttacttccaaggcttgccaaagattcaaatggagttaccaggaattgtaagtttagtcagtctgaattatgcaaaatgttaaccaaaagctacactgacctttgatgtctgaatttcctcatcaacaggctaatccttgacagaaacactggaaggatttcttctctgcaaaactaccctcttccttcacgctgaatcatcagaaagaggagccggctgcatccctaaattcatcccttattttaattaacccaaggatgacatggaggccttg

SEQ ID NO: 279688 - DNA, 943 bp, Homo sapiens
tcgacggcgacgcgaatctacgcgacgcgacgcggagctcggagcagcgttccttccctctcgtagaggctcaggcgcaggcaccgccccacggcgaggcgcgtcccttagcagagcccgccctgtctctgcggcagcctatcgacgccagcccgcgggccgatcctgttcccgcccccgaccggagcctttcgggtggctccgcccacagcgggcgtttcctcaagccacgcctgcgcaggtcgtcgggggagactgatgaagagacgactatccccagaccgtattttaactactatggcgctgtgtaagaagcaacctgagaagtgtggatgaaaagctacagcttccctgctgaaataccttagtgagaatgcataaaaaccaactctaaatgatgcacaaagccaccgagagctaatccttgacagaaacactggaaggatttcttctctgcaaaactaccctcttccttcacgctgaatcatcagaaagaggagccggctgcatccctaaattcatcccttattttaattaacccaaggatgacatggaggccttggagaccctatacagtgctgtgtgttcagcagtaaatatccacccattgtagtcaggagccagcatcttcatcatcctttcttgttagaacaaacttgtccaacccatggcccacgggccacatgtggcctaggacggctttgaatgcggcccaacacaaatttgtaaagtttcttaaaacattaggagatttttttgtgatttttttaagctcatcagctattgtgttagagtattttatgtgtggcccaagacaattcttcttcttccaatgtggcccagggaagccgaaagatcggacacccctatgttagaacaccaaggtctattactttgaagttgttatcctggattaccaatcagaatttgtgttttcaccatt

SEQ ID NO: 279689 - DNA, 721 bp, Homo sapiens
tctatttacaattagttgcatattatgcaatttgatgggttttccagagtttatttagtcctgtctcccaatctcccaacctgggttattttcaatcttttgttgataagtaaacaatgctgcaaaaaataacctgcatatatatcacttcatattaatacaggcacctactgatgggactaaacagggctctgcgcatgacaggtagtaagagcacaaggaattctataggacagatttccaagagcagaactgctggatcaaatggcgttctgaaatcaagattccagaggctacaggtatctgcatacagtacctgaatctgctccaggacttctcgccgcatctccacagccatatggtatacatgatgatcagagtcattgtacattacagcattttggaacatcagcatcaggtctcgcaggaattgggccatggtgcgaatccgacccttagagagatttctcttcaggctagttaagtccatgggtctgcaggtggccaagaaaaaacaaagaaaatcaaaccttcatgtggaacatatgataacctaacacgttctcttgaagaactaaccagttcttaatgaaaacagtagcaaagataacaaccctcatcagataataaaatagcaacagcagttaatatttgcctgtttacaatgggccaaacactgtatttctatactaactcacttaatcctctcaataaacctgta

SEQ ID NO: 279690 - DNA, 628 bp, Homo sapiens
tctatttacaattagttgcatattatgcaatttgatgggttttccagagtttatttagtcctgtctcccaatctcccaacctgggttattttcaatcttttgttgataagtaaacaatgctgcaaaaaataacctgcatatatatcacttcatattaatacaggcacctactgatgggactaaacagggctctgcgcatgacaggtagtaagagcacaaggaattctataggacagatttccaagagcagaactgctggatcaaatggtaagtccatctgttgtattggtagataactgccagattccctttgataggggttgtgccatttacttttatatttttgccaaatggaatctcagtgtagttttaacttgctttttttcccacctaaagattgagcatcttttcatatatttaaaaaatgtttttccttttctgtgaccatccatctgttctgcccatttttctactaatttatttttatctttttctaggagctctttatgtattaagaagacaagccctttgtctatgagttgcaaatctttttcccaagtttgttgtgttttgactttgcttatggtgtttatttcattgtgcagaaattttttgtttatataatctt

SEQ ID NO: 279691 - DNA, 867 bp, Homo sapiens
ctcgccgtcagccgccgcctccatgtgcgagcagaggatgtgctgcagctgcgtgtactccacctccgtcatctccaccaggctcagtgagccctttggctgcacaggtcacggtctggagctgttggaggaggctgctcagagctgttgctgccccaccagacacttggccaaggggcctgcaccggtctgcgcgggaacgtcccaccggcgtctgctcatggctgggctgtggacccatacgcttgttcggaagccaagctctggcccacaggcgaccagaggaagctcgcaggccaggcgccagctccccgagcctgtccctgcagccgcgctgtgtgcaggcacgtgggccaccgcgtctcctccactggcactgctgggtctgggccgccaagcccacctgcccacctgcatcctcagcagcagcacgccccgcagtcggcgggtgcacactctgctgcagcctggatgggctggggcctcggggctcactccccaaccatgagactccttcaccgcagttgaggctgttgcagtggtctcgggctcccactcagccccaggagagggtctgaagggggtgagtccctcctcccgaccttcctgcccatcgtctccagagctggatggtgctgggtccccacagggagcgagacagctgccccgtgacggaaggatgtggggacccgcacccggccggtctcaccctgggctcagcatgagttcagggaggggtccaaagggcactcctgcccacgcccaggcaaaccagcaacaagaaactgggtggccagggcgtccgtgcacgaccccaaacttctccgcgttagaaaaaggctgatgaagacccgagacagaaacttc

SEQ ID NO: 279692 - DNA, 294 bp, Homo sapiens
gctgtgtgtgcccttgtctcacacgccgtgtgtgtccgcgcccttttgtggcgtggcagcttatgtgcgtgcagacagacgccctgtatgtgtgcctccctccacgacagcctccgtgcgcgcgcgcctgcgtgtgtggcaggacatggcctgtgcctttcagctctgtgagaggctatttctgggtatgtgagtctttgtttgccgctctgtgagaaagtgagggcaataggggaagtatttcagaaagagggacagggattgtgctcatgagaacaggaagagaatgaatgt

SEQ ID NO: 279693 - DNA, 263 bp, Homo sapiens
gctgtgtgtgcccttgtctcacacgccgtgtgtgtccgcgcccttttgtggcgtggcagcttatgtgcgtgcagacagacgccctgtatgtgtgcctccctccacgacagcctccgtgcgcgcgcgcctgcgtgtgtggcaggacatggcctgtgcctttcagctctgtgagaggctatttctggatgctggctgcatccagatgttggctgccagggatctggggggcagccttgtggcttctggtcgacttgggatctgct

SEQ ID NO: 279694 - DNA, 1089 bp, Homo sapiens
acagagactctgaggaagcagtcacctcaggcctctccatcctagagacggcagaaggacaaacatctcctgctggcacaaggaagtcataactcatgtgagtggagccatgtgggattaagaagtgataggagagcttgctgtctgtctctgctctccactgtgtgaggatacaacaggaagacagccatctggtgaggaagagagggccctcgccagataccggacctgctgacaccttgatcttggacttcccatcttccaggaaggcctgacctcagttgttccagggtaaagaatttgggcagtgcccacacccacgctgttggataacatttcttcaccataccagtgagggtgaatgtgtacacgcccagcttcctgcctgttactctccacagtatgcgaagaatatccctgacttctagccctgtgcgccttcttttgtttctgctgttgctactaatagccttggagatcatggtgtacaacagtgacaacaacatggtcaaacctctgggcctcctggggaagaaggtaaatgccaccagcacttggggagaattgacccaaacgctgggagaagtggggcgagacctcaggatgctcctttgtgacatcaaaccccagataaagaccagtgatccttccactctgcaagtcgagatgttttgtcaacgtgaagcagaacggtgcactggtgcatcctggcagttcgccaccaatggagagaaatccctcctctttgacgcaatgaacatgacctggacagtaattaatcatgaagccagtaagatcaaggagacatggaagaaagacagagggctggaaaagtatttcaggaagctctcaaagggagactgcgatcactggctcagggaattcttagggcactgggaggcaatgccagaaccgacagtgtcaccagtaaatgcttcagatatccactggtcttcttctagtctaccagatagatggatcatcctgggggcattcatcctgttagttttaatgggaattgttctcatctgtgtctggtggcaaaatggtgagtggcaggctggtctctggcccttgaggacgtcttag

SEQ ID NO: 279695 - DNA, 1176 bp, Homo sapiens
acagagactctgaggaagcagtcacctcaggcctctccatcctagagacggcagaaggacaaacatctcctgctggcacaaggaagtcataactcatgtgagtggagccatgtgggattaagaagtgataggagagcttgctgtctgtctctgctctccactgtgtgaggatacaacaggaagacagccatctggtgaggaagagagggccctcgccagataccggacctgctgacaccttgatcttggacttcccatcttccaggaaggcctgacctcagttgttccagggtaaagaatttgggcagtgcccacacccacgctgttggataacatttcttcaccataccagtgagggtgaatgtgtacacgcccagcttcctgcctgttactctccacagtatgcgaagaatatccctgacttctagccctgtgcgccttcttttgtttctgctgttgctactaatagccttggagatcatggtggtggtcactctctttgcttcaacttcactataaaatcattgtccagacctggacagccctggtgtgaagcgcaggtcttcttgaataaaaatcttttccttcagtacaacagtgacaacaacatggtcaaacctctgggcctcctggggaagaaggtaaatgccaccagcacttggggagaattgacccaaacgctgggagaagtggggcgagacctcaggatgctcctttgtgacatcaaaccccagataaagaccagtgatccttccactctgcaagtcgagatgttttgtcaacgtgaagcagaacggtgcactggtgcatcctggcagttcgccaccaatggagagaaatccctcctctttgacgcaatgaacatgacctggacagtaattaatcatgaagccagtaagatcaaggagacatggaagaaagacagagggctggaaaagtatttcaggaagctctcaaagggagactgcgatcactggctcagggaattcttagggcactgggaggcaatgccagaaccgacagtgtcaccagtaaatgcttcagatatccactggtcttcttctagtctaccagatagatggatcatcctgggggcattcatcctgttagttttaatgggaattgttctcatctgtgtctggtggcaaaatggcagaagatccacctagaggtgat

SEQ ID NO: 279696 - DNA, 1005 bp, Homo sapiens
caatgtttgcgtgcaaatgctgccgcaaagcagtcccaataccccacctagaaagatgagccagtgatttgggagaccaagaggcaggaaaccatcccaccttctccaacccatcaccaaatctgttgctggaagacaccaagtaaatcccagggtcttaatgaggcaccatcaggccagccctgtggagtgatggggacatagctgggtttccctgagctactctattggggtgggagcagggggacagaagatggtgacagtggctcctctcacccctaggtctctgaaggtccagacagcactgatggcgagctttgggtccgcacactctggaaagaagagagaagtgaaggctctaggtagggagaacagagagccactgggcacaggcttctctcctcttgtttaaagaagcccagggagggatagagctctgactggacagaagactgtactctgcagcctgccttcctagagttgggttgtcactgtcctgcagggggcagcagccaccagcaaacaccactgcctgcaggagcctgggctgactggttgggactcaccgaagatcccttcttcctgggcggtggcctgcaggaactggaacagctgctctgtgtagcccaactctgcagaagagagaagacctagacctggcacccagcacagacacagcctgcctcgaggactgcaagggaacaagggcctcaccagtatcgggcagctggccctggcggaggaaggcggcagcctgtgcaaaggccttgagcagcgggctgagcaggcggcagaggaaaagaaagaaatctgggcagtgtgactgctggctgagctggaggggacaggccggggtgagtgcagctccccaccgcctccctaccacctccctccaggggcagctttttgaaacacaccctgaagtaccggccgtcagcctctccgaagtcatcactgtcactatcagtaaagtccccactcggtttccacaaaaaaaattctgct

SEQ ID NO: 279697 - DNA, 1027 bp, Homo sapiens
ggggaaagggaaacctttccatgtattccagtttgtaccttttacatggacatgagttacctaagggggagaggaaatcaacactggataaataaaagccctgctctgatagcaaaggacaatagtcagtgattttcacaatgactctgatggttgatagagctaggaaatagatttcagaaagcaaaacctttagctgctgcaggatctgcccagcctgcccgggattgcccacctgttcccagccagaccctctcacctgctctggtctctacagagccttggctgcccagttgccagtcctaccacggtcggaggtaaccttcctggctccagtcacatggccagataaggtggtgtgtgtgggcatgaattatgtggaccactgcaaagaacagaacgtgcccgtgcccaaggagcccatcatcttcagcaagtttgccagctccatcgtggggccctatgatgaggtggtcctcccaccacagagccaggtcagtgcctccccactgccctccctagtcactgggcccatcacaagggcattctgagctcagtattgagcctactggagccacctctcgctcaatagtgcattcaacagaaactctacaggattatacacacagtagtaacactggccttggaaaaaaaaagttaatgtacgtgttttcctggttacaaaagcaatacaccttcactgtagataaaacagagataaacatttaaaaattatgtcacccataatcccactgcccatggctcagaatattaatgtttttctgtctaccttcctattgtttctccactcctgtatatgtttatactgtacatatacttaccttttacttaagactccatcaggagcattttttcatgccattaaatattctccctgacatatttaggttaccttggagttttgtgatgtacagggtagtttatattcctgagtaccttactgctggatacttgtttccagttttttgtttctataaataaatgtcgcaatgaacatccttatgta

SEQ ID NO: 279698 - DNA, 810 bp, Homo sapiens
acgtcaccggacgcgcccgcttctcgctggagtgcgcaccgagcggcagtgacttcgccgctgctgtagttccccggctggatgcggtgactggtgccagtgctcaggcgcccgctgcccttgacctcccgccccgcgagccctaactcagcgcaggaggaccggctgccgccgccgccgccgccagagccttggctgcccagttgccagtcctaccacggtcggaggtaaccttcctggctccagtcacatggccagataaggtggtgtgtgtgggcatgaattatgtggaccactgcaaagaacagaacgtgcccgtgcccaaggagcccatcatcttcagcaagtttgccagctccatcgtggggccctatgatgaggtggtcctcccaccacagagccaggtgacctcaatttggccaatgagggaccttcaagtttgttccatccccaagcttttagcatatatttgctttctggccaagacgttccaggctcatcatgtactgtctgtcttggaccaaggaacccggtgctccttactggggagtggtattagagaccaacatctggatgtcaggtgtacttataccaactctggttattattagaaagagccaccaattttaaaggccaaattatatctattttatagtgtattttatggattatgggagaggctgagcattttttcatgttttgtggccatgtccgttacctttttgtgaattgcttactcaagtcctttgtgggatctttctcttactaaagtgagttaatagattaaaacacttaaaatagtgcctgaca

SEQ ID NO: 279699 - DNA, 345 bp, Homo sapiens
acgtcaccggacgcgcccgcttctcgctggagtgcgcaccgagcggcagtgacttcgccgctgctgtagttccctggcggaggaaggcggcagcctgtgcaaaggccttgagcagcgggctgagcaggcggcagaggaaaagaaagaaatctgggcagtgtgactgctggctgagctggaggggacaggccggggtgagtgcagctccccaccgcctccctaccacctccctccaggggcagctttttgaaacacaccctgaagtaccggccgtcagcctctccgaagtcatcactgtcactatcagtaaagtccccactcggtttccacaaaaaaaattctgct

SEQ ID NO: 279700 - DNA, 1117 bp, Homo sapiens
acgtcaccggacgcgcccgcttctcgctggagtgcgcaccgagcggcagtgacttcgccgctgctgtagttccccggctggatgcggtgactggtgccagtgctcaggcgcccgctgcccttgacctcccgccccgcgagccctaactcagcgcaggaggaccggctgccgccgccgccgccgccagatccacacaacttaaagatctgctgtcgagtgaatggggaagtggtccagagcagcaacaccaaccagatggtattcaagacagaggacctgatagcctgggtgtcccagtttgttaccttttacccaggggatgtcatcctgactgggacccccccacctccacccaggtgtcggtgtattcaggaaacctcctgtctttctcaaggtctctgaaggtccagacagcactgatggcgagctttgggtccgcacactctggaaagaagagagaagtgaaggctctaggtagggagaacagagagccactgggcacaggcttctctcctcttgtttaaagaagcccagggagggatagagctctgactggacagaagactgtactctgcagcctgccttcctagagttgggttgtcactgtcctgcagggggcagcagccaccagcaaacaccactgcctgcaggagcctgggctgactggttgggactcaccgaagatcccttcttcctgggcggtggcctgcaggaactggaacagctgctctgtgtagcccaactctgcagaagagagaagacctagacctggcacccagcacagacacagcctgcctcgaggactgcaagggaacaagggcctcaccagtatcgggcagctggccctggcggaggaaggcggcagcctgtgcaaaggccttgagcagcgggctgagcaggcggcagaggaaaagaaagaaatctgggcagtgtgactgctggctgagctggaggggacaggccggggtgagtgcagctccccaccgcctccctaccacctccctccaggggcagctttttgaaacacaccctgaagtaccggccgtcagcctctccgaagtcatcactgtcactatcagtaaagtccccactcggtttccacaaaaaaaattctgct

SEQ ID NO: 279701 - DNA, 1834 bp, Homo sapiens
acgtcaccggacgcgcccgcttctcgctggagtgcgcaccgagcggcagtgacttcgccgctgctgtagttccccggctggatgcggtgactggtgccagtgctcaggcgcccgctgcccttgacctcccgccccgcgagccctaactcagcgcaggaggaccggctgccgccgccgccgccgccagagccttggctgcccagttgccagtcctaccacggtcggaggtaaccttcctggctccagtcacatggccagataaggtggtgtgtgtgggcatgaattatgtggaccactgcaaagaacagaacgtgcccgtgcccaaggagcccatcatcttcagcaagtttgccagctccatcgtggggccctatgatgaggtggtcctcccaccacagagccaggaggtagattgggaagtggagctggccgtggtcattggaaagaaaggcaagcacatcaaggtgaagtggaaaaggtgggctcccaggccagagtgcagcagagtccccagctcctgcctctcctagttctgacctcgctcaccaacacatggtgccagctgtccctgacactaggaagcagtcagcctccttgctccctgacactgcctttcccttcacccacctttggctggctctggctactaacatgggataacagctttgagatcccttgccacaggtgttggtgtcacccatgatctatcctcctgtatggccaaatcccctgcccccataggccacagatgccatggcccacgtggccggcttcactgtggctcatgacgtgagtgctcgtgactggctaacaagatgcaatgggaaacagtggctgctgggaaaaaccttcgacaccttctgccctctgggccctgccttggtgaccaaggacagtgtagcagatccacacaacttaaagatctgctgtcgagtgaatggggaagtggtccagagcagcaacaccaaccagatggtattcaagacagaggacctgatagcctgggtgtcccagtttgttaccttttacccaggggatgtcatcctgactgggacccccccacctccacccaggtgtcggtgtattcaggaaacctcctgtctttctcaaggtctctgaaggtccagacagcactgatggcgagctttgggtccgcacactctggaaagaagagagaagtgaaggctctaggtagggagaacagagagccactgggcacaggcttctctcctcttgtttaaagaagcccagggagggatagagctctgactggacagaagactgtactctgcagcctgccttcctagagttgggttgtcactgtcctgcagggggcagcagccaccagcaaacaccactgcctgcaggagcctgggctgactggttgggactcaccgaagatcccttcttcctgggcggtggcctgcaggaactggaacagctgctctgtgtagcccaactctgcagaagagagaagacctagacctggcacccagcacagacacagcctgcctcgaggactgcaagggaacaagggcctcaccagtatcgggcagctggccctggcggaggaaggcggcagcctgtgcaaaggccttgagcagcgggctgagcaggcggcagaggaaaagaaagaaatctgggcagtgtgactgctggctgagctggaggggacaggccggggtgagtgcagctccccaccgcctccctaccacctccctccaggggcagctttttgaaacacaccctgaagtaccggccgtcagcctctccgaagtcatcactgtcactatcagtaaagtccccactcggtttccacaaaaaaaattctgct

SEQ ID NO: 279702 - DNA, 1614 bp, Homo sapiens
acgtcaccggacgcgcccgcttctcgctggagtgcgcaccgagcggcagtgacttcgccgctgctgtagttccccggctggatgcggtgactggtgccagtgctcaggcgcccgctgcccttgacctcccgccccgcgagccctaactcagcgcaggaggaccggctgccgccgccgccgccgccagagccttggctgcccagttgccagtcctaccacggtcggaggtaaccttcctggctccagtcacatggccagataaggtggtgtgtgtgggcatgaattatgtggaccactgcaaagaacagaacgtgcccgtgcccaaggagcccatcatcttcagcaagtttgccagctccatcgtggggccctatgatgaggtggtcctcccaccacagagccaggaggtagattgggaagtggagctggccgtggtcattggaaagaaaggcaagcacatcaaggtgttggtgtcacccatgatctatcctcctgtatggccaaatcccctgcccccataggccacagatgccatggcccacgtggccggcttcactgtggctcatgacgtgagtgctcgtgactggctaacaagatgcaatgggaaacagtggctgctgggaaaaaccttcgacaccttctgccctctgggccctgccttggtgaccaaggacagtgtagcagatccacacaacttaaagatctgctgtcgagtgaatggggaagtggtccagagcagcaacaccaaccagatggtattcaagacagaggacctgatagcctgggtgtcccagtttgttaccttttacccaggggatgtcatcctgactgggacccccccacctccacccaggtgtcggtgtattcaggaaacctcctgtctttctcaaggtctctgaaggtccagacagcactgatggcgagctttgggtccgcacactctggaaagaagagagaagtgaaggctctaggtagggagaacagagagccactgggcacaggcttctctcctcttgtttaaagaagcccagggagggatagagctctgactggacagaagactgtactctgcagcctgccttcctagagttgggttgtcactgtcctgcagggggcagcagccaccagcaaacaccactgcctgcaggagcctgggctgactggttgggactcaccgaagatcccttcttcctgggcggtggcctgcaggaactggaacagctgctctgtgtagcccaactctgcagaagagagaagacctagacctggcacccagcacagacacagcctgcctcgaggactgcaagggaacaagggcctcaccagtatcgggcagctggccctggcggaggaaggcggcagcctgtgcaaaggccttgagcagcgggctgagcaggcggcagaggaaaagaaagaaatctgggcagtgtgactgctggctgagctggaggggacaggccggggtgagtgcagctccccaccgcctccctaccacctccctccaggggcagctttttgaaacacaccctgaagtaccggccgtcagcctctccgaagtcatcactgtcactatcagtaaagtccccactcggtttccacaaaaaaaattctgct

SEQ ID NO: 279703 - DNA, 1250 bp, Homo sapiens
acgtcaccggacgcgcccgcttctcgctggagtgcgcaccgagcggcagtgacttcgccgctgctgtagttccccggctggatgcggtgactggtgccagtgctcaggcgcccgctgcccttgacctcccgccccgcgagccctaactcagcgcaggaggaccggctgccgccgccgccgccgccaggaggtagattgggaagtggagctggccgtggtcattggaaagaaaggcaagcacatcaagtggctgctgggaaaaaccttcgacaccttctgccctctgggccctgccttggtgaccaaggacagtgtagcagatccacacaacttaaagatctgctgtcgagtgaatggggaagtggtccagagcagcaacaccaaccagatggtattcaagacagaggacctgatagcctgggtgtcccagtttgttaccttttacccaggggatgtcatcctgactgggacccccccacctccacccaggtgtcggtgtattcaggaaacctcctgtctttctcaaggtctctgaaggtccagacagcactgatggcgagctttgggtccgcacactctggaaagaagagagaagtgaaggctctaggtagggagaacagagagccactgggcacaggcttctctcctcttgtttaaagaagcccagggagggatagagctctgactggacagaagactgtactctgcagcctgccttcctagagttgggttgtcactgtcctgcagggggcagcagccaccagcaaacaccactgcctgcaggagcctgggctgactggttgggactcaccgaagatcccttcttcctgggcggtggcctgcaggaactggaacagctgctctgtgtagcccaactctgcagaagagagaagacctagacctggcacccagcacagacacagcctgcctcgaggactgcaagggaacaagggcctcaccagtatcgggcagctggccctggcggaggaaggcggcagcctgtgcaaaggccttgagcagcgggctgagcaggcggcagaggaaaagaaagaaatctgggcagtgtgactgctggctgagctggaggggacaggccggggtgagtgcagctccccaccgcctccctaccacctccctccaggggcagctttttgaaacacaccctgaagtaccggccgtcagcctctccgaagtcatcactgtcactatcagtaaagtccccactcggtttccacaaaaaaaattctgct

SEQ ID NO: 279704 - DNA, 977 bp, Homo sapiens
acgtcaccggacgcgcccgcttctcgctggagtgcgcaccgagcggcagtgacttcgccgctgctgtagttccccggctggatgcggtgactggtgccagtgctcaggcgcccgctgcccttgacctcccgccccgcgagccctaactcagcgcaggaggaccggctgccgccgccgccgccgccagatccacacaacttaaagatctgctgtcgagtgaatggggaagtggtccagagcagcaacaccaaccagatggtattcaagacagaggacctgatagcctgggtgtcccagtttgttaccttttacccaggggatgtcatcctgactgggacccccccacctccacccaggtgtcggtgtattcaggaaacctcctgtctttctcaaggtctctgaaggtccagacagcactgatggcgagctttgggtccgcacactctggaaagaagagagaagtgaaggctctagggggcagcagccaccagcaaacaccactgcctgcaggagcctgggctgactggttgggactcaccgaagatcccttcttcctgggcggtggcctgcaggaactggaacagctgctctgtgtagcccaactctgcagaagagagaagacctagacctggcacccagcacagacacagcctgcctcgaggactgcaagggaacaagggcctcaccagtatcgggcagctggccctggcggaggaaggcggcagcctgtgcaaaggccttgagcagcgggctgagcaggcggcagaggaaaagaaagaaatctgggcagtgtgactgctggctgagctggaggggacaggccggggtgagtgcagctccccaccgcctccctaccacctccctccaggggcagctttttgaaacacaccctgaagtaccggccgtcagcctctccgaagtcatcactgtcactatcagtaaagtccccactcggtttccacaaaaaaaattctgct

SEQ ID NO: 279705 - DNA, 1395 bp, Homo sapiens
  misc_feature (1186)..(1186): n is a, c, g, or t
  misc_feature (1214)..(1214): n is a, c, g, or t
  misc_feature (1240)..(1240): n is a, c, g, or t
  misc_feature (1269)..(1269): n is a, c, g, or t
  misc_feature (1275)..(1275): n is a, c, g, or t
  misc_feature (1325)..(1325): n is a, c, g, or t
  misc_feature (1328)..(1328): n is a, c, g, or t
acgtcaccggacgcgcccgcttctcgctggagtgcgcaccgagcggcagtgacttcgccgctgctgtagttccccggctggatgcggtgactggtgccagtgctcaggcgcccgctgcccttgacctcccgccccgcgagccctaactcagcgcaggaggaccggctgccgccgccgccgccgccaggtagaccaggcctggctgggttaggccagaagggtgtccctggcgcaggtctcccgcggagggcagaactagaaccaggttcccggccgtttccgaccacacggatggggcggacccatgtgagccctcactaattgcaggggacgaagctgggcatatggggaaactgggggtttccaggcgagtggacggtgggatgggatccgacgtgcacacccacgtttcaggctactgtttccacctcacgtcgccgcccctttgcttatggactcttgcagagttggattgagctcggactgtgtgacatagtggttgttgcagaagccccagggccactttctgactagtaccttgggcacctgacgtcatccctttgagtctcagtgtcctcttctgtaaagtgagggcgctttacctgaggggattgctgtaaggttggaatgaacctgcatgtgtgagtcatgtgggaagggaacagtcaatggggcctggggttctcttggagagctggtaaccagcctcgtccctgaggcaacagccagagggcgcctgtagtttccccacgcatggctgttagcagggcctctgcaggatctcctgtgggaggtccctacttctcactacaatctttagggcctttggaggatttcctatggaaggtccccacttctcaccacaacattctgggttaaaatgtccttggtaggaagatggggctgaagctagattttcttgcttgcattacaagcttctgaaccaaggacttcaatgtcacctggacttggattcacatcccagctccttcccttcctagctttaagactgtgtaaccttgggcaaatcccttaaccgctttaagccttaactgtttcatctgtaaaatgggactaacagtacctaccttccacaagcgtcaagaattaaatcaggcctggcgcggtggctcacgcctgtaataccaacaatttgggaggccgaggcaggcggatcacaaggtcnggagatcgagaccgtcctggctaacacngtgaaacaccgtctctactaaaaatncaaaaattagctgggcgtggcggcgtgcncctgtngtctcagctgctggggaggctgaggcaggagaatggcgtgaacccgggangcngagcttgcagtgagccaagatcgtgccactgcattccagcctgggcgacagagcgagactccatctc

SEQ ID NO: 279706 - DNA, 1815 bp, Homo sapiens
ggggaaagggaaacctttccatgtattccagtttgtaccttttacatggacatgagttacctaagggggagaggaaatcaacactggataaataaaagccctgctctgatagcaaaggacaatagtcagtgattttcacaatgactctgatggttgatagagctaggaaatagatttcagaaagcaaaacctttagctgctgcaggatctgcccagcctgcccgggattgcccacctgttcccagccagaccctctcacctgctctggtctctacagagccttggctgcccagttgccagtcctaccacggtcggaggtaaccttcctggctccagtcacatggccagataaggtggtgtgtgtgggcatgaattatgtggaccactgcaaagaacagaacgtgcccgtgcccaaggagcccatcatcttcagcaagtttgccagctccatcgtggggccctatgatgaggtggtcctcccaccacagagccaggaggtagattgggaagtggagctggccgtggtcattggaaagaaaggcaagcacatcaaggtgaagtggaaaaggtgggctcccaggccagagtgcagcagagtccccagctcctgcctctcctagttctgacctcgctcaccaacacatggtgccagctgtccctgacactaggaagcagtcagcctccttgctccctgacactgcctttcccttcacccacctttggctggctctggctactaacatgggataacagctttgagatcccttgccacaggtgttggtgtcacccatgatctatcctcctgtatggccaaatcccctgcccccataggccacagatgccatggcccacgtggccggcttcactgtggctcatgacgtgagtgctcgtgactggctaacaagatgcaatgggaaacagtggctgctgggaaaaaccttcgacaccttctgccctctgggccctgccttggtgaccaaggacagtgtagcagatccacacaacttaaagatctgctgtcgagtgaatggggaagtggtccagagcagcaacaccaaccagatggtattcaagacagaggacctgatagcctgggtgtcccagtttgttaccttttacccaggggatgtcatcctgactgggacccccccacctccacccaggtgtcggtgtattcaggaaacctcctgtctttctcaaggtctctgaaggtccagacagcactgatggcgagctttgggtccgcacactctggaaagaagagagaagtgaaggctctaggtagggagaacagagagccactgggcacaggcttctctcctcttgtttaaagaagcccagggagggatagagctctgactggacagaagactgtactctgcagcctgccttcctagagttgggttgtcactgtcctgcagggggcagcagccaccagcaaacaccactgcctgcaggagcctgggctgactggttgggactcaccgaagatcccttcttcctgggcggtggcctgcaggaactggaacagctgctctgtgtagcccaactctgcagaagagagaagacctagacctggcacccacgggctgagcaggcggcagaggaaaagaaagaaatctgggcagtgtgactgctggctgagctggaggggacaggccggggtgagtgcagctccccaccgcctccctaccacctccctccaggggcagctttttgaaacacaccctgaagtaccggccgtcagcctctccgaagtcatcactgtcactatcagtaaagtccccactcggtttccacaaaaaaaattctgct

SEQ ID NO: 279707 - DNA, 342 bp, Homo sapiens
tgctgtagacagatgccctttttcaaggcaaaaaccctagccatttttctcttctccttcagagtctgcaacatcctctcaactcatccaagtgactactgcctggtgctcttggggatgcagggaggcctgagaaggccaatgtctatacagaaagttctaacatagtgcactgagtcaatgtgggcactttaaagccctttcacctgccaagtcacgaagcacccctatagttgtgtttgtaaaatactggggggtttgaaggggaaaagggataactccaaggtaccatctttgcatttcagatccacacaacttaaagatctgctgtcgagtgaatgg

SEQ ID NO: 279708 - DNA, 1924 bp, Homo sapiens
ggggaaagggaaacctttccatgtattccagtttgtaccttttacatggacatgagttacctaagggggagaggaaatcaacactggataaataaaagccctgctctgatagcaaaggacaatagtcagtgattttcacaatgactctgatggttgatagagctaggaaatagatttcagaaagcaaaacctttagctgctgcaggatctgcccagcctgcccgggattgcccacctgttcccagccagaccctctcacctgctctggtctctacagagccttggctgcccagttgccagtcctaccacggtcggaggtaaccttcctggctccagtcacatggccagataaggtggtgtgtgtgggcatgaattatgtggaccactgcaaagaacagaacgtgcccgtgcccaaggagcccatcatcttcagcaagtttgccagctccatcgtggggccctatgatgaggtggtcctcccaccacagagccaggaggtagattgggaagtggagctggccgtggtcattggaaagaaaggcaagcacatcaaggtgaagtggaaaaggtgggctcccaggccagagtgcagcagagtccccagctcctgcctctcctagttctgacctcgctcaccaacacatggtgccagctgtccctgacactaggaagcagtcagcctccttgctccctgacactgcctttcccttcacccacctttggctggctctggctactaacatgggataacagctttgagatcccttgccacaggtgttggtgtcacccatgatctatcctcctgtatggccaaatcccctgcccccataggccacagatgccatggcccacgtggccggcttcactgtggctcatgacgtgagtgctcgtgactggctaacaagatgcaatgggaaacagtggctgctgggaaaaaccttcgacaccttctgccctctgggccctgccttggtgaccaaggacagtgtagcagatccacacaacttaaagatctgctgtcgagtgaatggggaagtggtccagagcagcaacaccaaccagatggtattcaagacagaggacctgatagcctgggtgtcccagtttgttaccttttacccaggggatgtcatcctgactgggacccccccacctccacccaggtgtcggtgtattcaggaaacctcctgtctttctcaaggtctctgaaggtccagacagcactgatggcgagctttgggtccgcacactctggaaagaagagagaagtgaaggctctaggtagggagaacagagagccactgggcacaggcttctctcctcttgtttaaagaagcccagggagggatagagctctgactggacagaagactgtactctgcagcctgccttcctagagttgggttgtcactgtcctgcagggggcagcagccaccagcaaacaccactgcctgcaggagcctgggctgactggttgggactcaccgaagatcccttcttcctgggcggtggcctgcaggaactggaacagctgctctgtgtagcccaactctgcagaagagagaagacctagacctggcacccagcacagacacagcctgcctcgaggactgcaagggaacaagggcctcaccagtatcgggcagctggccctggcggaggaaggcggcagcctgtgcaaaggccttgagcagcgggctgagcaggcggcagaggaaaagaaagaaatctgggcagtgtgactgctggctgagctggaggggacaggccggggtgagtgcagctccccaccgcctccctaccacctccctccaggggcagctttttgaaacacaccctgaagtaccggccgtcagcctctccgaagtcatcactgtcactatcagtaaagtccccactcggtttccacaaaaaaaattctgct

SEQ ID NO: 279709 - DNA, 1686 bp, Homo sapiens
ggggaaagggaaacctttccatgtattccagtttgtaccttttacatggacatgagttacctaagggggagaggaaatcaacactggataaataaaagccctgctctgatagcaaaggacaatagtcagtgattttcacaatgactctgatggttgatagagctaggaaatagatttcagaaagcaaaacctttagctgctgcaggatctgcccagcctgcccgggattgcccacctgttcccagccagaccctctcacctgctctggtctctacagagccttggctgcccagttgccagtcctaccacggtcggaggtaaccttcctggctccagtcacatggccagataaggtggtgtgtgtgggcatgaattatgtggaccactgcaaagaacagaacgtgcccgtgcccaaggagcccatcatcttcagcaagtttgccagctccatcgtggggccctatgatgaggtggtcctcccaccacagagccaggaggtagattgggaagtggagctggccgtggtcattggaaagaaaggcaagcacatcaaggtgaagtggaaaaggtgggctcccaggccagagtgcagcagagtccccagctcctgcctctcctagttctgacctcgctcaccaacacatggtgccagctgtccctgacactaggaagcagtcagcctccttgctccctgacactgcctttcccttcacccacctttggctggctctggctactaacatgggataacagctttgagatcccttgccacaggtgttggtgtcacccatgatctatcctcctgtatggccaaatcccctgcccccataggccacagatgccatggcccacgtggccggcttcactgtggctcatgacgtgagtgctcgtgactggctaacaagatgcaatgggaaacagtggctgctgggaaaaaccttcgacaccttctgccctctgggccctgccttggtgaccaaggacagtgtagcagatccacacaacttaaagatctgctgtcgagtgaatggggaagtggtccagagcagcaacaccaaccagatggtattcaagacagaggacctgatagcctgggtgtcccagtttgttaccttttacccaggggatgtcatcctgactgggacccccccacctccacccaggtgtcggtgtattcaggaaacctcctgtctttctcaaggtctctgaaggtccagacagcactgatggcgagctttgggtccgcacactctggaaagaagagagaagtgaaggctctaggaactggaacagctgctctgtgtagcccaactctgcagaagagagaagacctagacctggcacccagcacagacacagcctgcctcgaggactgcaagggaacaagggcctcaccagtatcgggcagctggccctggcggaggaaggcggcagcctgtgcaaaggccttgagcagcgggctgagcaggcggcagaggaaaagaaagaaatctgggcagtgtgactgctggctgagctggaggggacaggccggggtgagtgcagctccccaccgcctccctaccacctccctccaggggcagctttttgaaacacaccctgaagtaccggccgtcagcctctccgaagtcatcactgtcactatcagtaaagtccccactcggtttccacaaaaaaaattctgct

SEQ ID NO: 279710 - DNA, 2503 bp, Homo sapiens
acttctggggcagccgtgagcagcgggcacacgggcagccacgaaagcagcagcgagggtggtgcaaacacctcataactacaccgaatccagtagcgcctggcgcccccggcgcgcaaggccgcctctactccgcctcatctttgtcccaagtcctttcacagcctgccttcctcaaacggcccgatgcgcccccgtctttgccggagtaagcagaccgccagcagccggcccgcaggtcagtcgaccctctctggatgcaggtcgccgggaaaacccggagcggagcatccctcgggccgggaaacgccctcggcgcgcacccactggcgcgcatgctcagtccgcgcggcggctgcgagtaggaagctccgcgcggcggcgggggcggcgacggcgactggcgggtgggagtggaggcaccggctggcgggcgggggtacagggacggggcaggggctcccgctccaggttccttgaagcacttccgaccgcgaagcccggcgcgagaagcgagctaacccaagagccaacaacgagcgcggagagggcagcggactgagcggagccgccggccagagcgggctcggagcccgggtctccgccgctcgggacccggctaggcggcggcgggggcggcgatgttccactgcatccccctgtggcggtgcaaccgtcatgtggagagcatcgacaagcgccactgctcgctggtctacgtccccgaggagatctaccgctatgcccggagcctggaggagctgctgctggacgccaaccagctccgcgagctgcccgagcaatttttccagctagtcaaattacgaaagcttggacttagtgataatgaaattcagcggctccctccagaaatagcaaacttcatgcagctggtggaactagatgtgtctcgaaatgagattcctgaaattccagaaagcatttcattctgtaaagcactgcaggtagctgacttcagcggaaacccactgactaggttgccagaaagctttcctgaattacagaatttaacatgtctttctgtaaatgacatctcactacagtctctacctgaaaatattggcaatctttataacctggcttcactggaactgagagagaatcttcttacatatcttcctgactctcttacccagctgcgaagactagaagaacttgatttaggaaacaatgaaatatataatttgccagaatcaattggagccctcttacatctaaaagatctctggttggatggaaatcaactgtcagaattacctcaggaaataggaaatctgaagaacctgctgtgtttagatgtctctgaaaacaggttggaaagacttcctgaagaaatcagtggcctgacttcattaacggatttagtcatttcccagaacttattagaaacgattccggatggcattggaaaactaaagaaactgtcaatcttgaaggtggatcagaatagactcacacagttgcctgaagcagttggggaatgtgaaagtctcactgagttagttcttacagaaaatcagctcctgaccctgcctaaaagcattggaaaactaaagaagttgagcaacttgaatgcagacagaaataaattagtgtccttaccaaaagaggtatgtgcttttagagaaatcacatgataataattatgaagaaataataataatacataagggatcaaaaatgtcaaatgctttgaaaagacgcatgtgttgttttttaaaggtgtgaactctaaatctgtgagtatagagccaactggaggaattatgtcaaagaatgatcatcagtaacattaaggagagttggaaaaggtgaatttataggattttaaatgggagaaagaaagagattgacattttgggtttgatatacagagaatggtgacaccattggcagaaattgataatttgggagtttgacagaggaagtggatgcctttgggtttgatttttgaatttaatgtgaaattaagctccatcccataagcaattggaattataaaaattgatcttgatgcaaccatatttctgggcagagatttacattgggccatgctcatgtcttggatgaggttgaacaaactgttcacaaaggcatacacatagaggaaggtgaatgggaagctaaagccagcttcctaggactttttttttggttagtagtctaagcacgagaaaatgagacatcaccatctgttgtggagagtagctgtatggactgagaggcatttaaattctggcaagggaggtggaaatgctgacaatgaggaggaagcttatagtgggtcaaacaaggaggtgtctagtgtgttgtttaaaaagaaggcttacaattagccaggcgtggtggcgggcgcctgtagtcccagctactcgggaggctgaggcaagagaattgcctgaacccgggaggctaaggttgcagtgagccgagaccacgccactgcactccagcccgggtgacagagcgagactctatctca

SEQ ID NO: 279711 - DNA, 2476 bp, Homo sapiens
acttctggggcagccgtgagcagcgggcacacgggcagccacgaaagcagcagcgagggtggtgcaaacacctcataactacaccgaatccagtagcgcctggcgcccccggcgcgcaaggccgcctctactccgcctcatctttgtcccaagtcctttcacagcctgccttcctcaaacggcccgatgcgcccccgtctttgccggagtaagcagaccgccagcagccggcccgcaggtcagtcgaccctctctggatgcaggtcgccgggaaaacccggagcggagcatccctcgggccgggaaacgccctcggcgcgcacccactggcgcgcatgctcagtccgcgcggcggctgcgagtaggaagctccgcgcggcggcgggggcggcgacggcgactggcgggtgggagtggaggcaccggctggcgggcgggggtacagggacggggcaggggctcccgctccaggttccttgaagcacttccgaccgcgaagcccggcgcgagaagcgagctaacccaagagccaacaacgagcgcggagagggcagcggactgagcggagccgccggccagagcgggctcggagcccgggtctccgccgctcgggacccggctaggcggcggcgggggcggcgatgttccactgcatccccctgtggcggtgcaaccgtcatgtggagagcatcgacaagcgccactgctcgctggtctacgtccccgaggagatctaccgctatgcccggagcctggaggagctgctgctggacgccaaccagctccgcgagctgcccgagcaatttttccagctagtcaaattacgaaagcttggacttagtgataatgaaattcagcggctccctccagaaatagcaaacttcatgcagctggtggaactagatgtgtctcgaaatgagattcctgaaattccagaaagcatttcattctgtaaagcactgcaggtagctgacttcagcggaaacccactgactaggttgccagaaagctttcctgaattacagaatttaacatgtctttctgtaaatgacatctcactacagtctctacctgaaaatattggcaatctttataacctggcttcactggaactgagagagaatcttcttacatatcttcctgactctcttacccagctgcgaagactagaagaacttgatttaggaaacaatgaaatatataatttgccagaatcaattggagccctcttacatctaaaagatctctggttggatggaaatcaactgtcagaattacctcaggaaataggaaatctgaagaacctgctgtgtttagatgtctctgaaaacaggttggaaagacttcctgaagaaatcagtggcctgacttcattaacggatttagtcatttcccagaacttattagaaacgattccggatggcattggaaaactaaagaaactgtcaatcttgaaggtggatcagaatagactcacacagttgcctgaagcagttggggaatgtgaaagtctcactgagttagttcttacagaaaatcagctcctgaccctgcctaaaagcattggaaaactaaagaagttgagcaacttgaatgcagacagaaataaattagtgtccttaccaaaagagatcggcgggtgctgcagcctcactgtgttctgtgtacgtgacaacagactaactcggatacctgcagaggtgtcacaggcaacagaacttcatgtcctggatgtggcagggaacaggttgctgcatctacctttatccctgactgccttgaagttgaaggctctgtggctatctgacaaccagtcccagcccctgcttacattccagacagacacagactacaccacaggagagaagattttaacctgtgtcttacttcctcagctgccttctgaacctacttgtcaagagaatctgcctcgctgtggtgcactggagaacttggtaaatgatgtctctgatgaagcctggaacgagcgtgctgtcaacagagtcagtgcgatccgatttgtggaggatgagaaagatgaagaagacaatgagacgagaacacttctaaggcgagccactccacacccaggggagttaaagcacatgaaaaagacagtggagaatttacggaatgacatgaatgctgctaaaggactggactcaaacaaaaacgaggtcaatcatgccattgaccgagtgaccacttctgtgtagagtttcacctccaagttttacctcctgtgtcttcctctgctgtcgagacgttcctgtctgcttcccgggagcctcacgtgctccttgtcctaaccagcccccgcgcgccatcttcccgtggagtgtggggaagctgctgtctcccaggaagtgccttactcatcccgcaaccagtcagcgcaccagtggtctcccggtgtgattttttttttttttaatttcagttgtttgtaataagtagaatacactactgtaaacat

SEQ ID NO: 279712 - DNA, 3338 bp, Homo sapiens
gctaggtactgacacctggcacttgtgcccggtcagcaatttttccagctagtcaaattacgaaagcttggacttagtgataatgaaattcagcggctccctccagaaatagcaaacttcatgcagctggtggaactagatgtgtctcgaaatgagattcctgaaattccagaaagcatttcattctgtaaagcactgcaggtagctgacttcagcggaaacccactgactaggttgccagaaagctttcctgaattacagaatttaacatgtctttctgtaaatgacatctcactacagtctctacctgaaaatattggcaatctttataacctggcttcactggaactgagagagaatcttcttacatatcttcctgactctcttacccagctgcgaagactagaagaacttgatttaggaaacaatgaaatatataatttgccagaatcaattggagccctcttacatctaaaagatctctggttggatggaaatcaactgtcagaattacctcaggaaataggaaatctgaagaacctgctgtgtttagatgtctctgaaaacaggttggaaagacttcctgaagaaatcagtggcctgacttcattaacggatttagtcatttcccagaacttattagaaacgattccggatggcattggaaaactaaagaaactgtcaatcttgaaggtggatcagaatagactcacacagttgcctgaagcagttggggaatgtgaaagtctcactgagttagttcttacagaaaatcagctcctgaccctgcctaaaagcattggaaaactaaagaagttgagcaacttgaatgcagacagaaataaattagtgtccttaccaaaagagatcggcgggtgctgcagcctcactgtgttctgtgtacgtgacaacagactaactcggatacctgcagaggtgtcacaggcaacagaacttcatgtcctggatgtggcagggaacaggttgctgcatctacctttatccctgactgccttgaagttgaaggctctgtggctatctgacaaccagtcccagcccctgcttacattccagacagacacagactacaccacaggagagaagattttaacctgtgtcttacttcctcagctgccttctgaacctacttgtcaagagaatctgcctcgctgtggtgcactggagaacttggtaaatgatgtctctgatgaagcctggaacgagcgtgctgtcaacagagtcagtgcgatccgatttgtggaggatgagaaagatgaagaagacaatgagacgagaacacttctaaggcgagccactccacacccaggggagttaaagcacatgaaaaagacagtggagaatttacggaatgacatgaatgctgctaaaggactggactcaaacaaaaacgaggtcaatcatgccattgaccgagtgaccacttctgtgtagagtttcacctccaagttttacctcctgtgtcttcctctgctgtcgagacgttcctgtctgcttcccgggagcctcacgtgctccttgtcctaaccagcccccgcgcgccatcttcccgtggagtgtggggaagctgctgtctcccaggaagtgccttactcatcccgcaaccagtcagcgcaccagtggtctcccggtgtgattttttttttttttaatttcagttgtttgtaataagtagaatacactactgtaaacatacgacctttgtttttgtcttatgttggggtaaaggaaagcaggaaggggaatttttatcctcctcccttccgtaaagtgctgggatattttgaatcccccaagttcccttggacctactgatgagagatagttttatgtatggggaaaaatggatactttttaaaccttttttggcagctcagatggtgtaaattttaaaattttgtataggtatttcataacaaaaatatgtatttcttttttgttattttatcttgaaaacggtacatattttagtatttgtgcagaaaaacaagtcctaaagtatttgtttttatttgtaccatccacttgtgccttactgtatcctgtgtcatgtccaatcagttgtaaacaatggcatctttgaacagtgtgatgagaataggaatgtggtgttttaaagcagtgttgcattttaatcagtaatctacctggtggatttgtttttaaccaaaaagatgaattatcaatgatttgtaattatatcggttgattttttttgaaaagatgaaccaaaggatttgactgctaatattttattccttacactttttttctgaataagtctctcataatgagtgcagtgtcagactgtgcctactctgatggtatgtgccatttgtaaaataaaatagagcagaaaaacacaaaaagagaacactggttcagacattcagtgggcaagtaaattatggactgcaaaataatgatttttattcaagaaagctttaaaagttttatatccagatatacaaccacaataaagcaaaataacctactatcaaaatagaaatgttgctatctttataagtgcaatttaatttgtaaatagagtttgaatcaaagtatcacaaaatactgcttcaagatttaattttaaatctgctaatttaagggatattgggaaaagttttggtgtgtttctgttgatttcttttttgtatgctgtgataaaagagaaatgaaaagtgccagtcactgtgtggtgtctaggaaaatcatatatatttttttctccaagaaataaattcatcctggacattggcatacagctttttaaaattattactttgtatgttcaagtgatagcaggtagccaaattctttgacagtgtgctctggtctgttaaatatctaaattacccgtcagttgtgagtgacctcctgtgggacttgcattcacatggggcagagcccagaattgcctttgactctggctagtaattttgggttgtggctatctggcccaattggactccttataaacccgtcttcaaccaaccaaatacaatacttttttttacttctatacatttacttattgggttcacttagctttttagtctgtgtgtatgtaaatatgtgtgtattttaaaaactatttatggagctgaaagtacataacacataagtgagtttcggctggtcagttttataccttgttccctaatctgtgcataccaattttcttttctctgttttaagatttttgacatcctctattttgttttaagcttataaagataatgccactatctcatgggctgattatatataagcaaattggttttatttaatgagaattgtcttgacgtggaagaaca

SEQ ID NO: 279713 - DNA, 2583 bp, Homo sapiens
ggacgcgtgggtcggacgcgtgggtcgcggacgcgtgggtcgacccacgcgtccgaagaagttgagcaacttgaatgcagacagaaataaattagtgtccttaccaaaagagatcggcgggtgctgcagcctcactgtgttctgtgtacgtgacaacagactaactcggatacctgcagaggtgtcacaggcaacagaacttcatgtcctggatgtggcagggaacaggttgctgcatctacctttatccctgactgccttgaagttgaaggctctgtggctatctgacaaccagtcccagcccctgcttacattccagacagacacagactacaccacaggagagaagattttaacctgtgtcttacttcctcagctgccttctgaacctacttgtcaagagaatctgcctcgctgtggtgcactggagaacttggtaaatgatgtctctgatgaagcctggaacgagcgtgctgtcaacagagtcagtgcgatccgatttgtggaggatgagaaagatgaagaagacaatgagacgagaacacttctaaggcgagccactccacacccaggggagttaaagcacatgaaaaagacagtggagaatttacggaatgacatgaatgctgctaaaggactggactcaaacaaaaacgaggtcaatcatgccattgaccgagtgaccacttctgtgtagagtttcacctccaagttttacctcctgtgtcttcctctgctgtcgagacgttcctgtctgcttcccgggagcctcacgtgctccttgtcctaaccagcccccgcgcgccatcttcccgtggagtgtggggaagctgctgtctcccaggaagtgccttactcatcccgcaaccagtcagcgcaccagtggtctcccggtgtgattttttttttttttaatttcagttgtttgtaataagtagaatacactactgtaaacatacgacctttgtttttgtcttatgttggggtaaaggaaagcaggaaggggaatttttatcctcctcccttccgtaaagtgctgggatattttgaatcccccaagttcccttggacctactgatgagagatagttttatgtatggggaaaaatggatactttttaaaccttttttggcagctcagatggtgtaaattttaaaattttgtataggtatttcataacaaaaatatgtatttcttttttgttattttatcttgaaaacggtacatattttagtatttgtgcagaaaaacaagtcctaaagtatttgtttttatttgtaccatccacttgtgccttactgtatcctgtgtcatgtccaatcagttgtaaacaatggcatctttgaacagtgtgatgagaataggaatgtggtgttttaaagcagtgttgcattttaatcagtaatctacctggtggatttgtttttaaccaaaaagatgaattatcaatgatttgtaattatatcggttgattttttttgaaaagatgaaccaaaggatttgactgctaatattttattccttacactttttttctgaataagtctctcataatgagtgcagtgtcagactgtgcctactctgatggtatgtgccatttgtaaaataaaatagagcagaaaaacacaaaaagagaacactggttcagacattcagtgggcaagtaaattatggactgcaaaataatgatttttattcaagaaagctttaaaagttttatatccagatatacaaccacaataaagcaaaataacctactatcaaaatagaaatgttgctatctttataagtgcaatttaatttgtaaatagagtttgaatcaaagtatcacaaaatactgcttcaagatttaattttaaatctgctaatttaagggatattgggaaaagttttggtgtgtttctgttgatttcttttttgtatgctgtgataaaagagaaatgaaaagtgccagtcactgtgtggtgtctaggaaaatcatatatatttttttctccaagaaataaattcatcctggacattggcatacagctttttaaaattattactttgtatgttcaagtgatagcaggtagccaaattctttgacagtgtgctctggtctgttaaatatctaaattacccgtcagttgtgagtgacctcctgtgggacttgcattcacatggggcagagcccagaattgcctttgactctggctagtaattttgggttgtggctatctggcccaattggactccttataaacccgtcttcaaccaaccaaatacaatacttttttttacttctatacatttacttattgggttcacttagctttttagtctgtgtgtatgtaaatatgtgtgtattttaaaaactatttatggagctgaaagtacataacacataagtgagtttcggctggtcagttttataccttgttccctaatctgtgcataccaattttcttttctctgttttaagatttttgacatcctctattttgttttaagcttataaagataatgccactatctcatgggctgattatatataagcaaattggttttatttaatgagaattgtcttgacgtggaagaaca

SEQ ID NO: 279714 - DNA, 2602 bp, Homo sapiens
tgctctgtaatctggaggttctaatgggagaagtgagagcagaaaagggaagcacaggaacctactgaggaatccacttgcaaagagtatgttgcgtcttaaaaacataacaccgtttttacattttgaaaccaatctcaggaagctccttttaatttttcctcattttgttgatagggattgatttgattacaaaatttgaggttgtgatgtctcttttttttaaaaaaaaaaaaaaaaaaaacaggttgctgcatctacctttatccctgactgccttgaagttgaaggctctgtggctatctgacaaccagtcccagcccctgcttacattccagacagacacagactacaccacaggagagaagattttaacctgtgtcttacttcctcagctgccttctgaacctacttgtcaagagaatctgcctcgctgtggtgcactggagaacttggtaaatgatgtctctgatgaagcctggaacgagcgtgctgtcaacagagtcagtgcgatccgatttgtggaggatgagaaagatgaagaagacaatgagacgagaacacttctaaggcgagccactccacacccaggggagttaaagcacatgaaaaagacagtggagaatttacggaatgacatgaatgctgctaaaggactggactcaaacaaaaacgaggtcaatcatgccattgaccgagtgaccacttctgtgtagagtttcacctccaagttttacctcctgtgtcttcctctgctgtcgagacgttcctgtctgcttcccgggagcctcacgtgctccttgtcctaaccagcccccgcgcgccatcttcccgtggagtgtggggaagctgctgtctcccaggaagtgccttactcatcccgcaaccagtcagcgcaccagtggtctcccggtgtgattttttttttttttaatttcagttgtttgtaataagtagaatacactactgtaaacatacgacctttgtttttgtcttatgttggggtaaaggaaagcaggaaggggaatttttatcctcctcccttccgtaaagtgctgggatattttgaatcccccaagttcccttggacctactgatgagagatagttttatgtatggggaaaaatggatactttttaaaccttttttggcagctcagatggtgtaaattttaaaattttgtataggtatttcataacaaaaatatgtatttcttttttgttattttatcttgaaaacggtacatattttagtatttgtgcagaaaaacaagtcctaaagtatttgtttttatttgtaccatccacttgtgccttactgtatcctgtgtcatgtccaatcagttgtaaacaatggcatctttgaacagtgtgatgagaataggaatgtggtgttttaaagcagtgttgcattttaatcagtaatctacctggtggatttgtttttaaccaaaaagatgaattatcaatgatttgtaattatatcggttgattttttttgaaaagatgaaccaaaggatttgactgctaatattttattccttacactttttttctgaataagtctctcataatgagtgcagtgtcagactgtgcctactctgatggtatgtgccatttgtaaaataaaatagagcagaaaaacacaaaaagagaacactggttcagacattcagtgggcaagtaaattatggactgcaaaataatgatttttattcaagaaagctttaaaagttttatatccagatatacaaccacaataaagcaaaataacctactatcaaaatagaaatgttgctatctttataagtgcaatttaatttgtaaatagagtttgaatcaaagtatcacaaaatactgcttcaagatttaattttaaatctgctaatttaagggatattgggaaaagttttggtgtgtttctgttgatttcttttttgtatgctgtgataaaagagaaatgaaaagtgccagtcactgtgtggtgtctaggaaaatcatatatatttttttctccaagaaataaattcatcctggacattggcatacagctttttaaaattattactttgtatgttcaagtgatagcaggtagccaaattctttgacagtgtgctctggtctgttaaatatctaaattacccgtcagttgtgagtgacctcctgtgggacttgcattcacatggggcagagcccagaattgcctttgactctggctagtaattttgggttgtggctatctggcccaattggactccttataaacccgtcttcaaccaaccaaatacaatacttttttttacttctatacatttacttattgggttcacttagctttttagtctgtgtgtatgtaaatatgtgtgtattttaaaaactatttatggagctgaaagtacataacacataagtgagtttcggctggtcagttttataccttgttccctaatctgtgcataccaattttcttttctctgttttaagatttttgacatcctctattttgttttaagcttataaagataatgccactatctcatgggctgattatatataagcaaattggttttatttaatgagaattgtcttgacgtggaagaaca

SEQ ID NO: 279715 - DNA, 2677 bp, Homo sapiens
taacattttgcagagatttttatgaacatatggggctgcgttttgtaagatttaaattaatgattgttggtcatcagtgagaccggtgagttatgtggtataagtttatgcatcctttttatactgtttggtaaacaaggtactctgatcctactccatctcccctagaaaactggaaaaaagatgtattttctttctcaccatagatcggcgggtgctgcagcctcactgtgttctgtgtacgtgacaacagactaactcggatacctgcagaggtgtcacaggcaacagaacttcatgtcctggatgtggcagggaacaggttgctgcatctacctttatccctgactgccttgaagttgaaggctctgtggctatctgacaaccagtcccagcccctgcttacattccagacagacacagactacaccacaggagagaagattttaacctgtgtcttacttcctcagctgccttctgaacctacttgtcaagagaatctgcctcgctgtggtgcactggagaacttggtaaatgatgtctctgatgaagcctggaacgagcgtgctgtcaacagagtcagtgcgatccgatttgtggaggatgagaaagatgaagaagacaatgagacgagaacacttctaaggcgagccactccacacccaggggagttaaagcacatgaaaaagacagtggagaatttacggaatgacatgaatgctgctaaaggactggactcaaacaaaaacgaggtcaatcatgccattgaccgagtgaccacttctgtgtagagtttcacctccaagttttacctcctgtgtcttcctctgctgtcgagacgttcctgtctgcttcccgggagcctcacgtgctccttgtcctaaccagcccccgcgcgccatcttcccgtggagtgtggggaagctgctgtctcccaggaagtgccttactcatcccgcaaccagtcagcgcaccagtggtctcccggtgtgattttttttttttttaatttcagttgtttgtaataagtagaatacactactgtaaacatacgacctttgtttttgtcttatgttggggtaaaggaaagcaggaaggggaatttttatcctcctcccttccgtaaagtgctgggatattttgaatcccccaagttcccttggacctactgatgagagatagttttatgtatggggaaaaatggatactttttaaaccttttttggcagctcagatggtgtaaattttaaaattttgtataggtatttcataacaaaaatatgtatttcttttttgttattttatcttgaaaacggtacatattttagtatttgtgcagaaaaacaagtcctaaagtatttgtttttatttgtaccatccacttgtgccttactgtatcctgtgtcatgtccaatcagttgtaaacaatggcatctttgaacagtgtgatgagaataggaatgtggtgttttaaagcagtgttgcattttaatcagtaatctacctggtggatttgtttttaaccaaaaagatgaattatcaatgatttgtaattatatcggttgattttttttgaaaagatgaaccaaaggatttgactgctaatattttattccttacactttttttctgaataagtctctcataatgagtgcagtgtcagactgtgcctactctgatggtatgtgccatttgtaaaataaaatagagcagaaaaacacaaaaagagaacactggttcagacattcagtgggcaagtaaattatggactgcaaaataatgatttttattcaagaaagctttaaaagttttatatccagatatacaaccacaataaagcaaaataacctactatcaaaatagaaatgttgctatctttataagtgcaatttaatttgtaaatagagtttgaatcaaagtatcacaaaatactgcttcaagatttaattttaaatctgctaatttaagggatattgggaaaagttttggtgtgtttctgttgatttcttttttgtatgctgtgataaaagagaaatgaaaagtgccagtcactgtgtggtgtctaggaaaatcatatatatttttttctccaagaaataaattcatcctggacattggcatacagctttttaaaattattactttgtatgttcaagtgatagcaggtagccaaattctttgacagtgtgctctggtctgttaaatatctaaattacccgtcagttgtgagtgacctcctgtgggacttgcattcacatggggcagagcccagaattgcctttgactctggctagtaattttgggttgtggctatctggcccaattggactccttataaacccgtcttcaaccaaccaaatacaatacttttttttacttctatacatttacttattgggttcacttagctttttagtctgtgtgtatgtaaatatgtgtgtattttaaaaactatttatggagctgaaagtacataacacataagtgagtttcggctggtcagttttataccttgttccctaatctgtgcataccaattttcttttctctgttttaagatttttgacatcctctattttgttttaagcttataaagataatgccactatctcatgggctgattatatataagcaaattggttttatttaatgagaattgtcttgacgtggaagaaca

SEQ ID NO: 279716 - DNA, 2128 bp, Homo sapiens
acttctggggcagccgtgagcagcgggcacacgggcagccacgaaagcagcagcgagggtggtgcaaacacctcataactacaccgaatccagtagcgcctggcgcccccggcgcgcaaggccgcctctactccgcctcatctttgtcccaagtcctttcacagcctgccttcctcaaacggcccgatgcgcccccgtctttgccggagtaagcagaccgccagcagccggcccgcaggtcagtcgaccctctctggatgcaggtcgccgggaaaacccggagcggagcatccctcgggccgggaaacgccctcggcgcgcacccactggcgcgcatgctcagtccgcgcggcggctgcgagtaggaagctccgcgcggcggcgggggcggcgacggcgactggcgggtgggagtggaggcaccggctggcgggcgggggtacagggacggggcaggggctcccgctccaggttccttgaagcacttccgaccgcgaagcccggcgcgagaagcgagctaacccaagagccaacaacgagcgcggagagggcagcggactgagcggagccgccggccagagcgggctcggagcccgggtctccgccgctcgggacccggctaggcggcggcgggggcggcgatgttccactgcatccccctgtggcggtgcaaccgtcatgtggagagcatcgacaagcgccactgctcgctggtctacgtccccgaggagatctaccgctatgcccggagcctggaggagctgctgctggacgccaaccagctccgcgagctgcccgagcaatttttccagctagtcaaattacgaaagcttggacttagtgataatgaaattcagcggctccctccagaaatagcaaacttcatgcagctggtggaactagatgtgtctcgaaatgagattcctgaaattccagaaagcatttcattctgtaaagcactgcaggtagctgacttcagcggaaacccactgactaggttgccagaaagctttcctgaattacagaatttaacatgtctttctgtaaatgacatctcactacagtctctacctgaaaatattggcaagcagaagacaactagctgacacctgttcagccagcaagttggtgtttttctgaaatgtacactgatgttttatctttatgccattagacttgctaattaaaaattctgcccttaaactctcaggaggagaagaagacaggaagccctcaatacactctaggtgtatggtatcagttgcagagaaaacagtggtattttattgtgaatttcatgcatgtacaattcacttttgctgtatcaagtgtcagatatttataatgtaacaatttttgtgctgggcatggtggctcacacctgtaatgccagccttttgggaggctgaggtgggaggattccttgagcccaggagttcaagaccagcctgggcaacatgacgataacccatctctacaaaaacaaaaaaaaaattagctgggcctggtggcccaaacctgtagtcccagctacttggaaggttgaggaggaaggatcacttgagcccagaaggttgaggctgcagtgagccatgattgtgccactgaattccagcctgggtgacagagcaagaccccatccccgctttgccccccctacacaaaaaaatcttaaatatagtagctgtttaaacacccaaactaacactgtcctcctcttgctcctcaggatgtctggagtttaattcccttattactctcccttccattcattcttagtctgcagctgcctagatggttctcctttctagcctctgattcctacccctctccttttttcccattttgtgtctttttaaaaagtcttaatgctttgagataaaatatattattaaaccagagtgtccctctcaccctctactgtactattttaatggaaagtattattttagaatacattttttataatgttcattattatatattttctgttaatatctgtacctgcttttgtcagtgttcaagatttttttgttttgttttgtttgtggacttaatcagcttctgttactattatagcattgtggatactgattgtttactgaataaaatgccactttgatcttga

SEQ ID NO: 279717 - DNA, 3281 bp, Homo sapiens
acttctggggcagccgtgagcagcgggcacacgggcagccacgaaagcagcagcgagggtggtgcaaacacctcataactacaccgaatccagtagcgcctggcgcccccggcgcgcaaggccgcctctactccgcctcatctttgtcccaagtcctttcacagcctgccttcctcaaacggcccgatgcgcccccgtctttgccggagtaagcagaccgccagcagccggcccgcaggtcagtcgaccctctctggatgcaggtcgccgggaaaacccggagcggagcatccctcgggccgggaaacgccctcggcgcgcacccactggcgcgcatgctcagtccgcgcggcggctgcgagtaggaagctccgcgcggcggcgggggcggcgacggcgactggcgggtgggagtggaggcaccggctggcgggcgggggtacagggacggggcaggggctcccgctccaggttccttgaagcacttccgaccgcgaagcccggcgcgagaagcgagctaacccaagagccaacaacgagcgcggagagggcagcggactgagcggagccgccggccagagcgggctcggagcccgggtctccgccgctcgggacccggctaggcggcggcgggggcggcgatgttccactgcatccccctgtggcggtgcaaccgtcatgtggagagcatcgacaagcgccactgctcgctggtctacgtccccgaggagatctaccgctatgcccggagcctggaggagctgctgctggacgccaaccagctccgcgagctgcccgagcaatttttccagctagtcaaattacgaaagcttggacttagtgataatgaaattcagcggctccctccagaaatagcaaacttcatgcagctggtggaactagatgtgtctcgaaatgagattcctgaaattccagaaagcatttcattctgtaaagcactgcaggtagctgacttcagcggaaacccactgactaggttgccagaaagctttcctgaattacagaatttaacatgtctttctgtaaatgacatctcactacagtctctacctgaaaatattggcaatctttataacctggcttcactggaactgagagagaatcttcttacatatcttcctgactctcttacccagctgcgaagactagaagaacttgatttaggaaacaatgaaatatataatttgccagaatcaattggagccctcttacatctaaaagatctctggttggatggaaatcaactgtcagaattacctcaggaaataggaaatctgaagaacctgctgtgtttagatgtctctgaaaacaggttggaaagacttcctgaagaaatcagtggcctgacttcattaacggatttagtcatttcccagaacttattagaaacgattccggatggcattggaaaactaaagaaactgtcaatcttgaaggtggatcagaatagactcacacagttgcctgaagcagttggggaatgtgaaagtctcactgagttagttcttacagaaaatcagctcctgaccctgcctaaaagcattggaaaactaaagaagttgagcaacttgaatgcagacagaaataaattagtgtccttaccaaaagagatcggcgggtgctgcagcctcactgtgttctgtgtacgtgacaacagactaactcggatacctgcagaggtgtcacaggcaacagaacttcatgtcctggatgtggcagggaacaggttgctgcatctacctttatccctgactgccttgaagttgaaggctctgtggctatctgacaaccagtcccagcccctgcttacattccagacagacacagactacaccacaggagagaagattttaacctgtgtcttacttcctcagctgccttctgaacctacttgtcaagagaatctgcctcgctgtggtgcactggagaacttggtaaatgatgtctctgatgaagcctggaacgagcgtgctgtcaacagagtcagtgcgatccgatttgtggaggatgagaaagatgaagaagacaatgagacgagaacacttctaaggcgagccactccacacccaggggagttaaagcacatgaaaaagacagtggagaatttacggaatgacatgaatgctgctaaaggactggactcaaacaaaaacgaggtcaatcatgccattgaccgagtgaccacttctgtgtagagtttcacctccaagttttacctcctgtgtcttcctctgctgtcgagacgttcctgtctgcttcccgggagcctcacgtgctccttgtcctaaccagcccccgcgcgccatcttcccgtggagtgtggggaagctgctgtctcccaggaagtgccttactcatcccgcaaccagtcagcgcaccagtggtctcccggtgtgattttttttttttttaatttcagttgtttgtaataagtagaatacactactgtaaacatacgacctttgtttttgtcttatgttggggtaaaggaaagcaggaaggggaatttttatcctcctcccttccgtaaagtgctgggatattttgaatcccccaagttcccttggacctactgatgagagatagttttatgtatggggaaaaatggatactttttaaaccttttttggcagctcagatggtgtaaattttaaaattttgtataggtatttcataacaaaaatatgtatttcttttttgttattttatcttgaaaacggtacatattttagtatttgtgcagaaaaacaagtcctaaagtatttgtttttatttgtaccatccacttgtgccttactgtatcctgtgtcatgtccaatcagttgtaaacaatggcatctttgaacagtgtgatgagaataggaatgtggtgttttaaagcagtgttgcattttaatcagtaatctacctggtggatttgtttttaaccaaaaagatgaattatcaatgatttgtaattatatcggttgattttttttgaaaagatgaaccaaaggatttgactgctaatattttattccttacactttttttctgaataagtctctcataatgagtgcagtgtcagactgtgcctactctgatggtatgtgccatttgtaaaataaaatagagcagaaaaacacaaaaagagaacactggttcagacattcagtgggcaagtaaattatggactgcaaaataatgatttttattcaagaaagctttaaaagttttatatccagatatacaaccacaataaagcaaaataacctactatc

SEQ ID NO: 279718 - DNA, 4102 bp, Homo sapiens
acttctggggcagccgtgagcagcgggcacacgggcagccacgaaagcagcagcgagggtggtgcaaacacctcataactacaccgaatccagtagcgcctggcgcccccggcgcgcaaggccgcctctactccgcctcatctttgtcccaagtcctttcacagcctgccttcctcaaacggcccgatgcgcccccgtctttgccggagtaagcagaccgccagcagccggcccgcaggtcagtcgaccctctctggatgcaggtcgccgggaaaacccggagcggagcatccctcgggccgggaaacgccctcggcgcgcacccactggcgcgcatgctcagtccgcgcggcggctgcgagtaggaagctccgcgcggcggcgggggcggcgacggcgactggcgggtgggagtggaggcaccggctggcgggcgggggtacagggacggggcaggggctcccgctccaggttccttgaagcacttccgaccgcgaagcccggcgcgagaagcgagctaacccaagagccaacaacgagcgcggagagggcagcggactgagcggagccgccggccagagcgggctcggagcccgggtctccgccgctcgggacccggctaggcggcggcgggggcggcgatgttccactgcatccccctgtggcggtgcaaccgtcatgtggagagcatcgacaagcgccactgctcgctggtctacgtccccgaggagatctaccgctatgcccggagcctggaggagctgctgctggacgccaaccagctccgcgagctgcccgagcaatttttccagctagtcaaattacgaaagcttggacttagtgataatgaaattcagcggctccctccagaaatagcaaacttcatgcagctggtggaactagatgtgtctcgaaatgagattcctgaaattccagaaagcatttcattctgtaaagcactgcaggtagctgacttcagcggaaacccactgactaggttgccagaaagctttcctgaattacagaatttaacatgtctttctgtaaatgacatctcactacagtctctacctgaaaatattggcaatctttataacctggcttcactggaactgagagagaatcttcttacatatcttcctgactctcttacccagctgcgaagactagaagaacttgatttaggaaacaatgaaatatataatttgccagaatcaattggagccctcttacatctaaaagatctctggttggatggaaatcaactgtcagaattacctcaggaaataggaaatctgaagaacctgctgtgtttagatgtctctgaaaacaggttggaaagacttcctgaagaaatcagtggcctgacttcattaacggatttagtcatttcccagaacttattagaaacgattccggatggcattggaaaactaaagaaactgtcaatcttgaaggtggatcagaatagactcacacagttgcctgaagcagttggggaatgtgaaagtctcactgagttagttcttacagaaaatcagctcctgaccctgcctaaaagcattggaaaactaaagaagttgagcaacttgaatgcagacagaaataaattagtgtccttaccaaaagagatcggcgggtgctgcagcctcactgtgttctgtgtacgtgacaacagactaactcggatacctgcagaggtgtcacaggcaacagaacttcatgtcctggatgtggcagggaacaggttgctgcatctacctttatccctgactgccttgaagttgaaggctctgtggctatctgacaaccagtcccagcccctgcttacattccagacagacacagactacaccacaggagagaagattttaacctgtgtcttacttcctcagctgccttctgaacctacttgtcaagagaatctgcctcgctgtggtgcactggagaacttggtaaatgatgtctctgatgaagcctggaacgagcgtgctgtcaacagagtcagtgcgatccgatttgtggaggatgagaaagatgaagaagacaatgagacgagaacacttctaaggcgagccactccacacccaggggagttaaagcacatgaaaaagacagtggagaatttacggaatgacatgaatgctgctaaaggactggactcaaacaaaaacgaggtcaatcatgccattgaccgagtgaccacttctgtgtagagtttcacctccaagttttacctcctgtgtcttcctctgctgtcgagacgttcctgtctgcttcccgggagcctcacgtgctccttgtcctaaccagcccccgcgcgccatcttcccgtggagtgtggggaagctgctgtctcccaggaagtgccttactcatcccgcaaccagtcagcgcaccagtggtctcccggtgtgattttttttttttttaatttcagttgtttgtaataagtagaatacactactgtaaacatacgacctttgtttttgtcttatgttggggtaaaggaaagcaggaaggggaatttttatcctcctcccttccgtaaagtgctgggatattttgaatcccccaagttcccttggacctactgatgagagatagttttatgtatggggaaaaatggatactttttaaaccttttttggcagctcagatggtgtaaattttaaaattttgtataggtatttcataacaaaaatatgtatttcttttttgttattttatcttgaaaacggtacatattttagtatttgtgcagaaaaacaagtcctaaagtatttgtttttatttgtaccatccacttgtgccttactgtatcctgtgtcatgtccaatcagttgtaaacaatggcatctttgaacagtgtgatgagaataggaatgtggtgttttaaagcagtgttgcattttaatcagtaatctacctggtggatttgtttttaaccaaaaagatgaattatcaatgatttgtaattatatcggttgattttttttgaaaagatgaaccaaaggatttgactgctaatattttattccttacactttttttctgaataagtctctcataatgagtgcagtgtcagactgtgcctactctgatggtatgtgccatttgtaaaataaaatagagcagaaaaacacaaaaagagaacactggttcagacattcagtgggcaagtaaattatggactgcaaaataatgatttttattcaagaaagctttaaaagttttatatccagatatacaaccacaataaagcaaaataacctactatcaaaatagaaatgttgctatctttataagtgcaatttaatttgtaaatagagtttgaatcaaagtatcacaaaatactgcttcaagatttaattttaaatctgctaatttaagggatattgggaaaagttttggtgtgtttctgttgatttcttttttgtatgctgtgataaaagagaaatgaaaagtgccagtcactgtgtggtgtctaggaaaatcatatatatttttttctccaagaaataaattcatcctggacattggcatacagctttttaaaattattactttgtatgttcaagtgatagcaggtagccaaattctttgacagtgtgctctggtctgttaaatatctaaattacccgtcagttgtgagtgacctcctgtgggacttgcattcacatggggcagagcccagaattgcctttgactctggctagtaattttgggttgtggctatctggcccaattggactccttataaacccgtcttcaaccaaccaaatacaatacttttttttacttctatacatttacttattgggttcacttagctttttagtctgtgtgtatgtaaatatgtgtgtattttaaaaactatttatggagctgaaagtacataacacataagtgagtttcggctggtcagttttataccttgttccctaatctgtgcataccaattttcttttctctgttttaagatttttgacatcctctattttgttttaagcttataaagataatgccactatctcatgggctgattatatataagcaaattggttttatttaatgagaattgtcttgacgtggaagaaca

SEQ ID NO: 279719 - DNA, 2881 bp, Homo sapiens
taccacccacacccgacacacgacaccccaccacaccagcaccacaccacacacacaccacccacctaccaacggctaggtacgaggctgtgtgttattcggccgaggacaggttggaaagacttcctgaagaaatcagtggcctgacttcattaacggatttagtcatttcccagaacttattagaaacgattccggatggcattggaaaactaaagaaactgtcaatcttgaaggtggatcagaatagactcacacagttgcctgaagcagttggggaatgtgaaagtctcactgagttagttcttacagaaaatcagctcctgaccctgcctaaaagcattggaaaactaaagaagttgagcaacttgaatgcagacagaaataaattagtgtccttaccaaaagagatcggcgggtgctgcagcctcactgtgttctgtgtacgtgacaacagactaactcggatacctgcagaggtgtcacaggcaacagaacttcatgtcctggatgtggcagggaacaggttgctgcatctacctttatccctgactgccttgaagttgaaggctctgtggctatctgacaaccagtcccagcccctgcttacattccagacagacacagactacaccacaggagagaagattttaacctgtgtcttacttcctcagctgccttctgaacctacttgtcaagagaatctgcctcgctgtggtgcactggagaacttggtaaatgatgtctctgatgaagcctggaacgagcgtgctgtcaacagagtcagtgcgatccgatttgtggaggatgagaaagatgaagaagacaatgagacgagaacacttctaaggcgagccactccacacccaggggagttaaagcacatgaaaaagacagtggagaatttacggaatgacatgaatgctgctaaaggactggactcaaacaaaaacgaggtcaatcatgccattgaccgagtgaccacttctgtgtagagtttcacctccaagttttacctcctgtgtcttcctctgctgtcgagacgttcctgtctgcttcccgggagcctcacgtgctccttgtcctaaccagcccccgcgcgccatcttcccgtggagtgtggggaagctgctgtctcccaggaagtgccttactcatcccgcaaccagtcagcgcaccagtggtctcccggtgtgattttttttttttttaatttcagttgtttgtaataagtagaatacactactgtaaacatacgacctttgtttttgtcttatgttggggtaaaggaaagcaggaaggggaatttttatcctcctcccttccgtaaagtgctgggatattttgaatcccccaagttcccttggacctactgatgagagatagttttatgtatggggaaaaatggatactttttaaaccttttttggcagctcagatggtgtaaattttaaaattttgtataggtatttcataacaaaaatatgtatttcttttttgttattttatcttgaaaacggtacatattttagtatttgtgcagaaaaacaagtcctaaagtatttgtttttatttgtaccatccacttgtgccttactgtatcctgtgtcatgtccaatcagttgtaaacaatggcatctttgaacagtgtgatgagaataggaatgtggtgttttaaagcagtgttgcattttaatcagtaatctacctggtggatttgtttttaaccaaaaagatgaattatcaatgatttgtaattatatcggttgattttttttgaaaagatgaaccaaaggatttgactgctaatattttattccttacactttttttctgaataagtctctcataatgagtgcagtgtcagactgtgcctactctgatggtatgtgccatttgtaaaataaaatagagcagaaaaacacaaaaagagaacactggttcagacattcagtgggcaagtaaattatggactgcaaaataatgatttttattcaagaaagctttaaaagttttatatccagatatacaaccacaataaagcaaaataacctactatcaaaatagaaatgttgctatctttataagtgcaatttaatttgtaaatagagtttgaatcaaagtatcacaaaatactgcttcaagatttaattttaaatctgctaatttaagggatattgggaaaagttttggtgtgtttctgttgatttcttttttgtatgctgtgataaaagagaaatgaaaagtgccagtcactgtgtggtgtctaggaaaatcatatatatttttttctccaagaaataaattcatcctggacattggcatacagctttttaaaattattactttgtatgttcaagtgatagcaggtagccaaattctttgacagtgtgctctggtctgttaaatatctaaattacccgtcagttgtgagtgacctcctgtgggacttgcattcacatggggcagagcccagaattgcctttgactctggctagtaattttgggttgtggctatctggcccaattggactccttataaacccgtcttcaaccaaccaaatacaatacttttttttacttctatacatttacttattgggttcacttagctttttagtctgtgtgtatgtaaatatgtgtgtattttaaaaactatttatggagctgaaagtacataacacataagtgagtttcggctggtcagttttataccttgttccctaatctgtgcataccaattttcttttctctgttttaagatttttgacatcctctattttgttttaagcttataaagataatgccactatctcatgggctgattatatataagcaaattggttttatttaatgagaattgtcttgacgtggaagaaca

SEQ ID NO: 279720 - DNA, 3550 bp, Homo sapiens
gcggaatcctaaaccagcccaatttacatccattcatgaatctgtgacgtcagcaagcctttgggctcctttgcggtgggctggaggattgtgtgggtggaatccccctcccctttatttttccaattctgcaaggcttttaaaattcaccttacatcttttcaaagcaagaaaatggaacagcatgtgtaggaattcttcgttgttgttttggagccctctcttaagtcagaactctgtcccaaaaatcttctgagtgtcatctcaggactttggttatactcatggcacgatggccaactttcaggagcacctgagctgctcctcttctccacacttacccttcagtgaaagcaaaaccttcaatggactacaagatgagctcacagctatggggaaccacccttctcccaagctgctcgaggaccagcaggaaaaggggatggtacgaacagagctaatcgagagcgtgcacagccccgtcaccacaacagtgttgacgagcgtaagtgaggattccagggaccagtttgagaacagcgttcttcagctaagggaacacgatgaatcagagacggcggtgtctcaggggaacagcaacacggtggacggagagagcacaagcggaactgaagacataaagattcagttcagcaggtcaggcagtggcagtggtgggtttcttgaaggactatttggatgcttaaggcctgtatggaatatcattgggaaggcatattccactgattacaaattgcagcagcaagatacttgggaagtgccatttgaggagatctcagagctgcagtggctgggtagtggagcccaaggagcggtcttcttgggcaagttccgggcggaagaggtggccatcaagaaagtgagagaacagaatgagacggatatcaagcatttgaggaagttgaagcaccctaacatcatcgcattcaagggtgtttgtactcaggccccatgttattgtattatcatggaatactgtgcccatggacaactctacgaggtcttacgagctggcaggaagatcacacctcgattgctagtagactggtccacaggaattgcaagtggaatgaattatttgcacctccataaaattattcatcgtgatctcaaatcacctaatgttttagtgacccacacagatgcggtaaaaatttcagattttggtacatctaaggaactcagtgacaaaagtaccaagatgtcatttgctggcacggtcgcatggatggcgccagaggtgatacggaatgaacctgtctctgaaaaagttgatatatggtcttttggagtggtgctttgggagctgctgacaggagagatcccttacaaagatgtagattcttcagccattatctggggtgttggaagcaacagcctccaccttccagttccttccacttgccctgatggattcaaaatccttatgaaacagacgtggcagagtaaacctcgaaaccgaccttcttttcggcagacactcatgcatttagacattgcctctgcagatgtacttgccaccccacaagaaacttacttcaagtctcaggctgaatggagagaagaagtgaaaaaacattttgagaagatcaaaagtgaaggaacttgtatacaccggttagatgaagaactgattcgaaggcgcagagaagagctcaggcatgcgctggatattcgtgaacactatgagcggaagcttgagcgggcgaataatttatacatggaattgagtgccatcatgctgcagctagaaatgcgggagaaggagctcattaagcgtgagcaagcagtggaaaagaagtatcctgggacctacaaacgacaccctgttcgtcctatcatccatcccaatgccatggagaaactcatgaaaaggaaaggagtgcctcacaaatctgggatgcagaccaaacggccagacttgttgagatcagaagggatccccaccacagaagtggctcccactgcatcccctttgtccggaagtcccaaaatgtccacttctagcagcaagagccgatatcgaagcaaaccacgccaccgccgagggaatagcagaggcagccatagtgactttgccgcaatcttgaaaaaccagccagcccaggaaaattcaccccatcccacttacctgcaccaagctcaatcccaatacccttctcttcatcaccataattctctgcagcagcaataccagcagccccctcctgccatgtcccagagtcaccatcccagactcaatatgcacggacaggacatagcaacctgcgccaacaacctgaggtatttcggcccagcagcagccctgcggagcccactcagcaaccatgctcagagacagctgcccggctcgagccctgacctcatctccacagccatggctgcagactgctggagaagttctgagcctgacaagggccaagctggtccctggggctgttgccaggctgacgcttatgacccctgccttcagtgcaggccagaacagtatgggtccttagacataccctctgctgagccagtggggaggagccctgacctttccaagtcaccagcacataatcctctcttggaaaacgcccagagttctgagaaaacggaagaaaatgaattcagcggctgtaggtctgagtcatccctcggcacctctcatctcggcacccctccagcgctacctcgaaaaacaaggcctctgcagaagagtggagatgactcctcagaagaggaagaaggggaagtagatagtgaagttgaatttccacgaagacagaggccccatcgctgtatcagcagctgccagtcatattcaacctttagctctgagaatttctctgtgtctgatggagaagagggaaataccagtgaccactcaaacagtcctgatgagttagctgataaacttgaagaccgcttggcagagaagctagacgacctgctgtcccagacgccagagattcccattgacatatcctcacactcggatgggctctctgacaaggagtgtgccgtgcgccgtgtgaagactcagatgtctctgggcaagctgtgtgtggaggaacgtggctatgagaaccccatgcagtttgaagaatcggactgtgactcttcagatggggagtgttctgatgccacagttaggaccaataaacactacagctctgctacctggtaatgaaggaatacacatcctgaagatctcgtgactatactggcatttcagatccaccccacccccagactcatcccactctctcccagcattttgtctgggaagagagactaccccatctttaccaccccctagaaatgagctgcaataacaggaacatgagacttcgcaaatctctggaaaataatatccaaatgaaattaagtctcactgaacatttcaatcaagaatggcagggatctattttattgaatattctagctactgtaacattgatatttatttttgtttgacattttaacactttgtactgcaaagagtgaactatatatgagatagagagacaataatttcttgcaa

SEQ ID NO: 279721 - DNA, 947 bp, Homo sapiens
ctggcggctgctggtagttccatgctgtctgttcagacttcagcttggtgttttggagccctctcttaagtcagaactctgtcccaaaaatcttctgagtgtcatctcaggactttggttatactcatggcacgatggccaactttcaggagcacctgagctgctcctcttctccacacttacccttcagtgaaagcaaaaccttcaatggactacaagatgagctcacagctatggggaaccacccttctcccaagctgctcgaggaccagcaggaaaaggggatggtacgaacagagctaatcgagagcgtgcacagccccgtcaccacaacagtgttgacgagcgtaagtgaggattccagggaccagtttgagaacagcgttcttcagctaagggaacacgatgaatcagagacggcggtgtctcaggggaacagcaacacggtggacggagagagcacaagcggaactgaagacataaagattcagttcagcagatacttgggaagtgccatttgaggagatctcagagctgcagtggctgggtagtggagcccaaggagcggtcttcttgggcaagttccgggcggaagaggtggccatcaagaaagtgagagaacagaatgagacggatatcaagcatttgaggaagttgaagcaccctaacatcatcgcattcaagggtgtttgtactcaggccccatgttattgtattatcatggaatactgtgcccatggacaactctacgaggtcttacgagctggcaggaagatcacacctcgattgctagtagactggtccacaggaattgcaagtggaatgaattatttgcacctccataaaattattcatcgtgatctcaaatcacctaagtgagttctggggctaatgtttcagctattttggtttgttgttttgaaatacagaatttttatcaacctcag

SEQ ID NO: 279722 - DNA, 2074 bp, Homo sapiens
gccttcagtcccgttgtgtggacatttcaaggatgtggccattgatgttgttaaatgtgttgctagcccactagaaacttacttcaagtctcaggctgaatggagagaagaagtgaaaaaacattttgagaagatcaaaagtgaaggaacttgtatacaccggttagatgaagaactgattcgaaggcgcagagaagagctcaggcatgcgctggatattcgtgaacactatgagcggaagcttgagcgggcgaataatttatacatggaattgagtgccatcatgctgcagctagaaatgcgggagaaggagctcattaagcgtgagcaagcagtggaaaagaagtatcctgggacctacaaacgacaccctgttcgtcctatcatccatcccaatgccatggagaaactcatgaaaaggaaaggagtgcctcacaaatctgggatgcagaccaaacggccagacttgttgagatcagaagggatccccaccacagaagtggctcccactgcatcccctttgtccggaagtcccaaaatgtccacttctagcagcaagagccgatatcgaagcaaaccacgccaccgccgagggaatagcagaggcagccatagtgactttgccgcaatcttgaaaaaccagccagcccaggaaaattcaccccatcccacttacctgcaccaagctcaatcccaatacccttctcttcatcaccataattctctgcagcagcaataccagcagccccctcctgccatgtcccagagtcaccatcccagactcaatatgcacggacaggacatagcaacctgcgccaacaacctgaggtatttcggcccagcagcagccctgcggagcccactcagcaaccatgctcagagacagctgcccggctcgagccctgacctcatctccacagccatggctgcagactgctggagaagttctgagcctgacaagggccaagctggtccctggggctgttgccaggctgacgcttatgacccctgccttcagtgcaggccagaacagtatgggtccttagacataccctctgctgagccagtggggaggagccctgacctttccaagtcaccagcacataatcctctcttggaaaacgcccagagttctgagaaaacggaagaaaatgaattcagcggctgtaggtctgagtcatccctcggcacctctcatctcggcacccctccagcgctacctcgaaaaacaaggcctctgcagaagagtggagatgactcctcagaagaggaagaaggggaagtagatagtgaagttgaatttccacgaagacagaggccccatcgctgtatcagcagctgccagtcatattcaacctttagctctgagaatttctctgtgtctgatggagaagagggaaataccagtgaccactcaaacagtcctgatgagttagctgataaacttgaagaccgcttggcagagaagctagacgacctgctgtcccagacgccagagattcccattgacatatcctcacactcggatgggctctctgacaaggagtgtgccgtgcgccgtgtgaagactcagatgtctctgggcaagctgtgtgtggaggaacgtggctatgagaaccccatgcagtttgaagaatcggactgtgactcttcagatggggagtgttctgatgccacagttaggaccaataaacactacagctctgctacctggtaatgaaggaatacacatcctgaagatctcgtgactatactggcatttcagatccaccccacccccagactcatcccactctctcccagcattttgtctgggaagagagactaccccatctttaccaccccctagaaatgagctgcaataacaggaacatgagacttcgcaaatctctggaaaataatatccaaatgaaattaagtctcactgaacatttcaatcaagaatggcagggatctattttattgaatattctagctactgtaacattgatatttatttttgtttgacattttaacactttgtactgcaaagagtgaactatatatgagatagagagacaataatttcttgcaa

SEQ ID NO: 279723 - DNA, 1943 bp, Homo sapiens
  misc_feature (1619)..(1619): n is a, c, g, or t
  misc_feature (1624)..(1624): n is a, c, g, or t
gcggaatcctaaaccagcccaatttacatccattcatgaatctgtgacgtcagcaagcctttgggctcctttgcggtgggctggaggattgtgtgggtggaatccccctcccctttatttttccaattctgcaaggcttttaaaattcaccttacatcttttcaaagcaagaaaatggaacagcatgtgtaggaattcttcgttgttgttttggagccctctcttaagtcagaactctgtcccaaaaatcttctgagtgtcatctcaggactttggttatactcatggcacgatggccaactttcaggagcacctgagctgctcctcttctccacacttacccttcagtgaaagcaaaaccttcaatggactacaagatgagctcacagctatggggaaccacccttctcccaagctgctcgaggaccagcaggaaaaggggatggtacgaacagagctaatcgagagcgtgcacagccccgtcaccacaacagtgttgacgagcgtaagtgaggattccagggaccagtttgagaacagcgttcttcagctaagggaacacgatgaatcagagacggcggtgtctcaggggaacagcaacacggtggacggagagagcacaagcggaactgaagacataaagattcagttcagcaggtcaggcagtggcagtggtgggtttcttgaaggactatttggatgcttaaggcctgtatggaatatcattgggaaggcatattccactgattacaaattgcagcagcaagatacttgggaagtgccatttgaggagatctcagagctgcagtggctgggtagtggagcccaaggagcggtcttcttgggcaagttccgggcggaagaggtggccatcaagaaagtgagagaacagaatgagacggatatcaagcatttgaggaagttgaagcaccctaacatcatcgcattcaatgttttagtgacccacacagatgcggtaaaaatttcagattttggtacatctaaggaactcagtgacaaaagtaccaagatgtcatttgctggcacggtcgcatggatggcgccagaggtgatacggaatgaacctgtctctgaaaaagttgatatatggtcttttggagtggtgctttgggagctgctgacaggagagatcccttacaaagatgtagattcttcagccattatctggggtgttggaagcaacagcctccaccttccagttccttccacttgccctgatggattcaaaatccttatgaaacagacgtggcagagtaaacctcgaaaccgaccttcttttcggcagacactcatgcatttagacattgcctctgcagatgtacttgccaccccacaagaaacttacttcaagtctcaggctgaatggagagaagaagtgaaaaaacattttgagaagatcaaaagtgaaggaacttgtatacaccggttagatgaagaactgattcgaaggcgcagagaagagctcaggcatgcgctggatattcgtgaacactatgagcggaagcttgagcgggcgaataatttatacatggaattgagtgccatcatgctgcagctagaaatgcgggagaaggagctcattaagcgtgagcagcagnggaangaagatccggggaccctaaaaggaacaccggtacgcacaataatcatatccaaagtgcagggagacactcatggacacgggaacaaggagggtgcgcaccaacaactttgggggaaggcggaccccaaagggggcagaacggtgaacacagaaagggactccacaaaataaagagggtacaccagggataccctgtaacgggagacaaaaaagagccacatcaacaaacagaaataaaaacaagaacaacaaaagagggcacgatacgaccacgagagacacgaccacagaacacagaggagaatagaaaagcaacacc

SEQ ID NO: 279724 - DNA, 465 bp, Homo sapiens
cagagttgtcccagatgtttctgtttttcttatagcagtattagaattttaaaactgggtatatgtactaatttgatttcaattaatagagaactaaaatacaaatcagtctttctgaaacatcttctgtccatgttcccggcgctactgtaggtcttttggagtggtgctttgggagctgctgacaggagagatcccttacaaagatgtagattcttcagccattatctggggtgttggaagcaacagcctccaccttccagttccttccacttgccctgatggattcaaaatccttatgaaacagacgtggtaagaatattgtctctaaaacaatagggaggtctctaatgtgtatttggagtaaatatcctggtggtggaaagaataggagctttggagtaggagaatcttgggttcaaatactagctctgcccctttctatctgtgcaattttgggcacgt

SEQ ID NO: 279725 - DNA, 315 bp, Homo sapiens
ccgccccccacccccgccccggccctttgtacagcaattgcaacaagtgggagcagagggtgagaggagccggggccaccagggagggagggcgcgccggcagccggaagggagtggggagggcacgagccggggagagcggtgttggccatggagacgtggggagactggaggccgaggcttggggacccgactgtcatcagggtcttccgccagaccctgggcgctgcgccctcagaggccgatgaaaagaagcagaagggagaggtgagtaagtcgcagctccgggcgccggctcccgggaccccgtggggc

SEQ ID NO: 279726 - DNA, 1522 bp, Homo sapiens
cgggcggcgcgggcggcgcgggggcgctggggctggaggggcggggcgcgcgcgctccctcgctggcggagcggctgggcggcgggccgggcccggggccgcttggaatggcgcctcctccgccttcgccccaactgcttctcctggcagccctcgcgaggctcctgggtcccagcgaggtgatggctggaccggcggaggaggcgggagcccattgtcccgagagcctgtggcctctgcctccgcaggtgtcaccaagagtgacctacacacgagtgagcccagggcaggctgaggatgtcaccttcctctaccacccctgtgcccatccctggctgaagctccagcttgccctcctggcctatgcttgtatggctaacccttccctcacccctgacttcagcctcacgcaggatcggcccctggtgctgactgcatgggggctggcgctggagatggcctgggtagagccagcctgggctgcccactggctgatgaggaggcggaggaggaagcagaggaagaagaaggcatggatctactgtgaaagcctttcagggcctgctccctccgagccaactcccggtagagggaggctgtgccgaagagggtgtgtgcaggccctggctctggcctttgctctgcggagctggcggccccctggcacagaggtgacatctcaagggcccaggcagccctcttctagtggtgccaagaggcggaggctgcgggctgcccttggtccccagcccactcgctcagccctgaggtttccctctgcttccccagggagcttgaaggccaagcagtccatggcgggaatccctggtagggagagtaatgccccatctgtgcccactgtctccctgctgccgggggcgcctggaggcaatgccagctccaggacagaggctcaggtgcccaacgggcaaggcagcccagggggctgtgtctgttcaagtcaggcttccccggcccctcgcgcagcagcgcctccacgggcagcccggggccccaccccacgcactgaagaggccgcctgggctgccatggccctgaccttcctgctggtgctgctcaccctggccacgctctgcacacggctgcacagaaacttccgacgcggggagagcatctactgggggcccacagcggacagccaggacacagtggctgctgtgctgaagcggaggctgctgcagccctcgcgccgggtcaagcgctcgcgccggagacccctcctcccgcccacgccggacagcggcccggaaggcgagagctcggagtgacggcctgggacctgccactgtggcgtgcggctcctccccgcgccgcgaggccgcgacctctgccacgtggaccgcgcgcggggcgctccctggtggcgatggcgcggcactggccgagcactgcgggggctttcctccttgttggttgctgagtgggcggccaaggggagaaaaggagccgcttctgcctcccttgccaaaactccgtttctaattaaattatttttagtaga

SEQ ID NO: 279727 - DNA, 2345 bp, Homo sapiens
gcggccgcgcgcgcgctctgccctcgggcggccctgctctcccccgcccggccccgcaaccccgcaataacttggctgggcggggtccggcactgggctagagaggtcgagcgcggcgtcttgagccgctggcgggaggctgctgcttccccgcctgcatcagtgcgggtcccgtggactcctcgcccccgtccccgcgagctcggggctccacatcaaggaaatcctcagcccgggagtggcttccccagaaacagcagccccaagcctccgagagtcagtcggagaaaaggacacactcaggcgccctgcgacagggatgcccgtccgacctacaaggaacgcctcgtaaaccggggtgcatgggagaccacggaaataacacgttctcgctgtttccaagctttgggataggcatctcgaccctcgctctctacccacgtttcccccccaaatcctggagagggaaccagaaccagcgccccgctgcggggcgggccggccagcgcacctcctgggggtgaggcctgtggcgtccccatctcgcggcgaccaatctctttctagacgcgcgcctgccaccgctgggcgacggcggaggtggggaagacagcagcctctcggctagctccggcctcccggggcttctgggtttggagagtttggggagcggagacacctcccgaggctcctccgcgttggaccctatttgcgagggcgggagcggggtgggccgacggcgaagctccagaggtgggaccctctcccttcagcagctcttcctgacttcatgattctgcccctcttctcattgcaggtcacaccgacaaatctgaagcgggtttgccaggggagtgtacccgtctccccagcctgggccacccggtccacagggattccatttccggccttacactccgctccacgatctcatccaggcgctgcagctgtgcagctgctctacagactgcagggacctgctgagacgaatccccggacgaggtgatggctggaccggcggaggaggcgggagcccattgtcccgagagcctgtggcctctgcctccgcaggtgtcaccaagagtgacctacacacgagtgagcccagggcaggctgaggatgtcaccttcctctaccacccctgtgcccatccctggctgaagctccagcttgccctcctggcctatgcttgtatggctaacccttccctcacccctgacttcagcctcacgcaggatcggcccctggtgctgactgcatgggggctggcgctggagatggcctgggtagagccagcctgggctgcccactggctgatgaggaggcggaggaggaagcagaggaagaagaaggcatggatctactgtgaaagcctttcagggcctgctccctccgagccaactcccggtagagggaggctgtgccgaagagggtgtgtgcaggccctggctctggcctttgctctgcggagctggcggccccctggcacagaggtgacatctcaagggcccaggcagccctcttctagtggtgccaagaggcggaggctgcgggctgcccttggtccccagcccactcgctcagccctgaggtttccctctgcttccccagggagcttgaaggccaagcagtccatggcgggaatccctggtagggagagtaatgccccatctgtgcccactgtctccctgctgccgggggcgcctggaggcaatgccagctccaggacagaggctcaggtgcccaacgggcaaggcagcccagggggctgtgtctgttcaagtcaggcttccccggcccctcgcgcagcagcgcctccacgggcagcccggggccccaccccacgcactgaagaggccgcctgggctgccatggccctgaccttcctgctggtgctgctcaccctggccacgctctgcacacggctgcacagaaacttccgacgcggggagagcatctactgggggcccacagcggacagccaggacacagtggctgctgtgctgaagcggaggctgctgcagccctcgcgccgggtcaagcgctcgcgccggagacccctcctcccgcccacgccggacagcggcccggaaggcgagagctcggagtgacggcctgggacctgccactgtggcgtgcggctcctccccgcgccgcgaggccgcgacctctgccacgtggaccgcgcgcggggcgctccctggtggcgatggcgcggcactggccgagcactgcgggggctttcctccttgttggttgctgagtgggcggccaaggggagaaaaggagccgcttctgcctcccttgccaaaactccgtttctaattaaattatttttagtaga

SEQ ID NO: 279728 - DNA, 2370 bp, Homo sapiens
gcggccgcgcgcgcgctctgccctcgggcggccctgctctcccccgcccggccccgcaaccccgcaataacttggctgggcggggtccggcactgggctagagaggtcgagcgcggcgtcttgagccgctggcgggaggctgctgcttccccgcctgcatcagtgcgggtcccgtggactcctcgcccccgtccccgcgagctcggggctccacatcaaggaaatcctcagcccgggagtggcttccccagaaacagcagccccaagcctccgagagtcagtcggagaaaaggacacactcaggcgccctgcgacagggatgcccgtccgacctacaaggaacgcctcgtaaaccggggtgcatgggagaccacggaaataacacgttctcgctgtttccaagctttgggataggcatctcgaccctcgctctctacccacgtttcccccccaaatcctggagagggaaccagaaccagcgccccgctgcggggcgggccggccagcgcacctcctgggggtgaggcctgtggcgtccccatctcgcggcgaccaatctctttctagacgcgcgcctgccaccgctgggcgacggcggaggtggggaagacagcagcctctcggctagctccggcctcccggggcttctgggtttggagagtttggggagcggagacacctcccgaggctcctccgcgttggaccctatttgcgagggcgggagcggggtgggccgacggcgaagctccagaggtgggaccctctcccttcagcagctcttcctgacttcatgattctgcccctcttctcattgcaggtcacaccgacaaatctgaagcgggtttgccaggggagtgtacccgtctccccagcctgggccacccggtccacagggattccatttccggccttacactccgctccacgatctcatccaggcgctgcagctgtgcagctgctctacagactgcagggacctgctgagacgaatccccggacgaggtgatggctggaccggcggaggaggcgggagcccattgtcccgagagcctgtggcctctgcctccgcaggtgtcaccaagagtgacctacacacgagtgagcccagggcaggctgaggatgtcaccttcctctaccacccctgtgcccatccctggctgaagctccagcttgccctcctggcctatgcttgtatggctaacccttccctcacccctgacttcagcctcacgcaggatcggctctaacagttacctcctctcgtagcccctggtgctgactgcatgggggctggcgctggagatggcctgggtagagccagcctgggctgcccactggctgatgaggaggcggaggaggaagcagaggaagaagaaggcatggatctactgtgaaagcctttcagggcctgctccctccgagccaactcccggtagagggaggctgtgccgaagagggtgtgtgcaggccctggctctggcctttgctctgcggagctggcggccccctggcacagaggtgacatctcaagggcccaggcagccctcttctagtggtgccaagaggcggaggctgcgggctgcccttggtccccagcccactcgctcagccctgaggtttccctctgcttccccagggagcttgaaggccaagcagtccatggcgggaatccctggtagggagagtaatgccccatctgtgcccactgtctccctgctgccgggggcgcctggaggcaatgccagctccaggacagaggctcaggtgcccaacgggcaaggcagcccagggggctgtgtctgttcaagtcaggcttccccggcccctcgcgcagcagcgcctccacgggcagcccggggccccaccccacgcactgaagaggccgcctgggctgccatggccctgaccttcctgctggtgctgctcaccctggccacgctctgcacacggctgcacagaaacttccgacgcggggagagcatctactgggggcccacagcggacagccaggacacagtggctgctgtgctgaagcggaggctgctgcagccctcgcgccgggtcaagcgctcgcgccggagacccctcctcccgcccacgccggacagcggcccggaaggcgagagctcggagtgacggcctgggacctgccactgtggcgtgcggctcctccccgcgccgcgaggccgcgacctctgccacgtggaccgcgcgcggggcgctccctggtggcgatggcgcggcactggccgagcactgcgggggctttcctccttgttggttgctgagtgggcggccaaggggagaaaaggagccgcttctgcctcccttgccaaaactccgtttctaattaaattatttttagtaga

SEQ ID NO: 279729 - DNA, 2128 bp, Homo sapiens
gcggccgcgcgcgcgctctgccctcgggcggccctgctctcccccgcccggccccgcaaccccgcaataacttggctgggcggggtccggcactgggctagagaggtcgagcgcggcgtcttgagccgctggcgggaggctgctgcttccccgcctgcatcagtgcgggtcccgtggactcctcgcccccgtccccgcgagctcggggctccacatcaaggaaatcctcagcccgggagtggcttccccagaaacagcagccccaagcctccgagagtcagtcggagaaaaggacacactcaggcgccctgcgacagggatgcccgtccgacctacaaggaacgcctcgtaaaccggggtgcatgggagaccacggaaataacacgttctcgctgtttccaagctttgggataggcatctcgaccctcgctctctacccacgtttcccccccaaatcctggagagggaaccagaaccagcgccccgctgcggggcgggccggccagcgcacctcctgggggtgaggcctgtggcgtccccatctcgcggcgaccaatctctttctagacgcgcgcctgccaccgctgggcgacggcggaggtcacaccgacaaatctgaagcgggtttgccaggggagtgtacccgtctccccagcctgggccacccggtccacagggattccatttccggccttacactccgctccacgatctcatccaggcgctgcagctgtgcagctgctctacagactgcagggacctgctgagacgaatccccggacgaggtgatggctggaccggcggaggaggcgggagcccattgtcccgagagcctgtggcctctgcctccgcaggtgtcaccaagagtgacctacacacgagtgagcccagggcaggctgaggatgtcaccttcctctaccacccctgtgcccatccctggctgaagctccagcttgccctcctggcctatgcttgtatggctaacccttccctcacccctgacttcagcctcacgcaggatcggcccctggtgctgactgcatgggggctggcgctggagatggcctgggtagagccagcctgggctgcccactggctgatgaggaggcggaggaggaagcagaggaagaagaaggcatggatctactgtgaaagcctttcagggcctgctccctccgagccaactcccggtagagggaggctgtgccgaagagggtgtgtgcaggccctggctctggcctttgctctgcggagctggcggccccctggcacagaggtgacatctcaagggcccaggcagccctcttctagtggtgccaagaggcggaggctgcgggctgcccttggtccccagcccactcgctcagccctgaggtttccctctgcttccccagggagcttgaaggccaagcagtccatggcgggaatccctggtagggagagtaatgccccatctgtgcccactgtctccctgctgccgggggcgcctggaggcaatgccagctccaggacagaggctcaggtgcccaacgggcaaggcagcccagggggctgtgtctgttcaagtcaggcttccccggcccctcgcgcagcagcgcctccacgggcagcccggggccccaccccacgcactgaagaggccgcctgggctgccatggccctgaccttcctgctggtgctgctcaccctggccacgctctgcacacggctgcacagaaacttccgacgcggggagagcatctactgggggcccacagcggacagccaggacacagtggctgctgtgctgaagcggaggctgctgcagccctcgcgccgggtcaagcgctcgcgccggagacccctcctcccgcccacgccggacagcggcccggaaggcgagagctcggagtgacggcctgggacctgccactgtggcgtgcggctcctccccgcgccgcgaggccgcgacctctgccacgtggaccgcgcgcggggcgctccctggtggcgatggcgcggcactggccgagcactgcgggggctttcctccttgttggttgctgagtgggcggccaaggggagaaaaggagccgcttctgcctcccttgccaaaactccgtttctaattaaattatttttagtaga

SEQ ID NO: 279730 - DNA, 2134 bp, Homo sapiens
gcggccgcgcgcgcgctctgccctcgggcggccctgctctcccccgcccggccccgcaaccccgcaataacttggctgggcggggtccggcactgggctagagaggtcgagcgcggcgtcttgagccgctggcgggaggctgctgcttccccgcctgcatcagtgcgggtcccgtggactcctcgcccccgtccccgcgagctcggggctccacatcaaggaaatcctcagcccgggagtggcttccccagaaacagcagccccaagcctccgagagtcagtcggagaaaaggacacactcaggcgccctgcgacagggatgcccgtccgacctacaaggaacgcctcgtaaaccggggtgcatgggagaccacggaaataacacgttctcgctgtttccaagctttgggataggcatctcgaccctcgctctctacccacgtttcccccccaaatcctggagagggaaccagaaccagcgccccgctgcggggcgggccggccagcgcacctcctgggggtcacaccgacaaatctgaagcgggtttgccaggggagtgtacccgtctccccagcctgggccacccggtccacagggattccatttccggccttacactccgctccacgatctcatccaggcgctgcagctgtgcagctgctctacagactgcagggacctgctgagacgaatccccggacgaggaaaggggccccccgcctgccctactgagccttgcgcgctgacccggttcctacacttaacttttccggcttcgggtttaagacgcgtgatggctggaccggcggaggaggcgggagcccattgtcccgagagcctgtggcctctgcctccgcaggtgtcaccaagagtgacctacacacgagtgagcccagggcaggctgaggatgtcaccttcctctaccacccctgtgcccatccctggctgaagctccagcttgccctcctggcctatgcttgtatggctaacccttccctcacccctgacttcagcctcacgcaggatcggcccctggtgctgactgcatgggggctggcgctggagatggcctgggtagagccagcctgggctgcccactggctgatgaggaggcggaggaggaagcagaggaagaagaaggcatggatctactgtgaaagcctttcagggcctgctccctccgagccaactcccggtagagggaggctgtgccgaagagggtgtgtgcaggccctggctctggcctttgctctgcggagctggcggccccctggcacagaggtgacatctcaagggcccaggcagccctcttctagtggtgccaagaggcggaggctgcgggctgcccttggtccccagcccactcgctcagccctgaggtttccctctgcttccccagggagcttgaaggccaagcagtccatggcgggaatccctggtagggagagtaatgccccatctgtgcccactgtctccctgctgccgggggcgcctggaggcaatgccagctccaggacagaggctcaggtgcccaacgggcaaggcagcccagggggctgtgtctgttcaagtcaggcttccccggcccctcgcgcagcagcgcctccacgggcagcccggggccccaccccacgcactgaagaggccgcctgggctgccatggccctgaccttcctgctggtgctgctcaccctggccacgctctgcacacggctgcacagaaacttccgacgcggggagagcatctactgggggcccacagcggacagccaggacacagtggctgctgtgctgaagcggaggctgctgcagccctcgcgccgggtcaagcgctcgcgccggagacccctcctcccgcccacgccggacagcggcccggaaggcgagagctcggagtgacggcctgggacctgccactgtggcgtgcggctcctccccgcgccgcgaggccgcgacctctgccacgtggaccgcgcgcggggcgctccctggtggcgatggcgcggcactggccgagcactgcgggggctttcctccttgttggttgctgagtgggcggccaaggggagaaaaggagccgcttctgcctcccttgccaaaactccgtttctaattaaattatttttagtaga

SEQ ID NO: 279731 - DNA, 1631 bp, Homo sapiens
cgtagggccagggcaggccggcctcgaaccactctcggcagcgcagcacgggcgagatgcaggcggcgcctgtcacgtagctggaggagccgcactcgcccaggtcacaccgacaaatctgaagcgggtttgccaggggagtgtacccgtctccccagcctgggccacccggtccacagggattccatttccggccttacactccgctccacgatctcatccaggcgctgcagctgtgcagctgctctacagactgcagggacctgctgagacgaatccccggacgaggtgatggctggaccggcggaggaggcgggagcccattgtcccgagagcctgtggcctctgcctccgcaggtgtcaccaagagtgacctacacacgagtgagcccagggcaggctgaggatgtcaccttcctctaccacccctgtgcccatccctggctgaagctccagcttgccctcctggcctatgcttgtatggctaacccttccctcacccctgacttcagcctcacgcaggatcggcccctggtgctgactgcatgggggctggcgctggagatggcctgggtagagccagcctgggctgcccactggctgatgaggaggcggaggaggaagcagaggaagaagaaggcatggatctactgtgaaagcctttcagggcctgctccctccgagccaactcccggtagagggaggctgtgccgaagagggtgtgtgcaggccctggctctggcctttgctctgcggagctggcggccccctggcacagaggtgacatctcaagggcccaggcagccctcttctagtggtgccaagaggcggaggctgcgggctgcccttggtccccagcccactcgctcagccctgaggtttccctctgcttccccagggagcttgaaggccaagcagtccatggcgggaatccctggtagggagagtaatgccccatctgtgcccactgtctccctgctgccgggggcgcctggaggcaatgccagctccaggacagaggctcaggtgcccaacgggcaaggcagcccagggggctgtgtctgttcaagtcaggcttccccggcccctcgcgcagcagcgcctccacgggcagcccggggccccaccccacgcactgaagaggccgcctgggctgccatggccctgaccttcctgctggtgctgctcaccctggccacgctctgcacacggctgcacagaaacttccgacgcggggagagcatctactgggggcccacagcggacagccaggacacagtggctgctgtgctgaagcggaggctgctgcagccctcgcgccgggtcaagcgctcgcgccggagacccctcctcccgcccacgccggacagcggcccggaaggcgagagctcggagtgacggcctgggacctgccactgtggcgtgcggctcctccccgcgccgcgaggccgcgacctctgccacgtggaccgcgcgcggggcgctccctggtggcgatggcgcggcactggccgagcactgcgggggctttcctccttgttggttgctgagtgggcggccaaggggagaaaaggagccgcttctgcctcccttgccaaaactccgtttctaattaaattatttttagtaga

SEQ ID NO: 279732 - DNA, 1681 bp, Homo sapiens
acctacggctagtgtcgaggctgcgtgttaatcggccgaggagcggctgggcggcgggccgggcccggggccgcttggaatggcgcctcctccgccttcgccccaactgcttctcctggcagccctcgcgaggctcctgggtcccagcgaggtaaggtgacccgctcctgggaaggcctcggcccgcgagctcaaagcgctttgccaaaagttcgtcctggaaggagtggcgcgccgagggggacgcggagttcttccgctggcgggctgggcctggggagagagagggcagggcctcgccgcgtccagcgccccaactcttcgctttggacccacaggtgatggctggaccggcggaggaggcgggagcccattgtcccgagagcctgtggcctctgcctccgcaggtgtcaccaagagtgacctacacacgagtgagcccagggcaggctgaggatgtcaccttcctctaccacccctgtgcccatccctggctgaagctccagcttgccctcctggcctatgcttgtatggctaacccttccctcacccctgacttcagcctcacgcaggatcggcccctggtgctgactgcatgggggctggcgctggagatggcctgggtagagccagcctgggctgcccactggctgatgaggaggcggaggaggaagcagaggaagaagaaggcatggatctactgtgaaagcctttcagggcctgctccctccgagccaactcccggtagagggaggctgtgccgaagagggtgtgtgcaggccctggctctggcctttgctctgcggagctggcggccccctggcacagaggtgacatctcaagggcccaggcagccctcttctagtggtgccaagaggcggaggctgcgggctgcccttggtccccagcccactcgctcagccctgaggtttccctctgcttccccagggagcttgaaggccaagcagtccatggcgggaatccctggtagggagagtaatgccccatctgtgcccactgtctccctgctgccgggggcgcctggaggcaatgccagctccaggacagaggctcaggtgcccaacgggcaaggcagcccagggggctgtgtctgttcaagtcaggcttccccggcccctcgcgcagcagcgcctccacgggcagcccggggccccaccccacgcactgaagaggccgcctgggctgccatggccctgaccttcctgctggtgctgctcaccctggccacgctctgcacacggctgcacagaaacttccgacgcggggagagcatctactgggggcccacagcggacagccaggacacagtggctgctgtgctgaagcggaggctgctgcagccctcgcgccgggtcaagcgctcgcgccggagacccctcctcccgcccacgccggacagcggcccggaaggcgagagctcggagtgacggcctgggacctgccactgtggcgtgcggctcctccccgcgccgcgaggccgcgacctctgccacgtggaccgcgcgcggggcgctccctggtggcgatggcgcggcactggccgagcactgcgggggctttcctccttgttggttgctgagtgggcggccaaggggagaaaaggagccgcttctgcctcccttgccaaaactccgtttctaattaaattatttttagtaga

SEQ ID NO: 279733 - DNA, 1571 bp, Homo sapiens
cgggcggcgcgggcggcgcgggggcgctggggctggaggggcggggcgcgcgcgctccctcgctggcggagcggctgggcggcgggccgggcccggggccgcttggaatggcgcctcctccgccttcgccccaactgcttctcctggcagccctcgcgaggctcctgggtcccagcgaggtgatggctggaccggcggaggaggcgggagcccattgtcccgagagcctgtggcctctgcctccgcaggtgtcaccaagagtgacctacacacgagtgagcccagggcaggctgaggatgtcaccttcctctaccacccctgtgcccatccctggctgaagctccagcttgccctcctggcctatgcttgtatggctaacccttccctcacccctgacttcagcctcacgcaggatcggcccctggtgctgactgcatgggggctggcgctggagatggcctgggtagagccagcctgggctgcccactggctgatgaggaggcggaggaggaagcagaggaagaagaaggcatggatctactgtgaaagcctttcagggcctgctccctccgagccaactcccggtagagggaggctgtgccgaagagggtgtgtgcaggccctggctctggcctttgctctgcggagctggcggccccctggcacagaggtgacatctcaagggcccaggcagccctcttctagtggtgccaagaggcggaggctgcgggctgcccttggtccccagcccactcgctcagccctgaggtttccctctgcttccccagggagcttgaaggccaagcagtccatggcgggaatccctggtagggagagtaatgccccatctgtgcccactgtctccctgctgccgggggcgcctggaggcaatgccagctccaggacagaggctcaggtgcccaacgggcaaggcagcccagggggctgtgtctgttcaagtcaggcttccccggcccctcgcgcagcagcgcctccacgggcagcccggggccccaccccacgcactgaagaggccgcctgggctgccatggccctgaccttcctgctggtgctgctcaccctggccacgctctgcacacggctgcacagaaacttccgacgcggggagagcatctactgggggcccacagcggacagccaggacacagtggctgctgtgctgaagcggaggctgctgcagccctcgcgccgggtcaagcgctcgcgccggagacccctcctcccgcccacgccggacagcggcccggaaggcgagagctcggagtgacggcctgggacctgccactgtggcgtgcggctcctccccgcgccgcgaggccgcgacctctgccacgtggaccgcgcgcggggcgctccctggtggcgatggcgcggcactggccgagcactgcgggggctttcctccttgttggttgctgagtgggcggccaaggggagaaaaggagccgcttctgcctcccttgccaaaactccgtttctaattaaattatttttagtagacccttatctctctagtacgacacaccccccccccccttcgcccccacgc

SEQ ID NO: 279734 - DNA, 1356 bp, Homo sapiens
cgggcggcgcgggcggcgcgggggcgctggggctggaggggcggggcgcgcgcgctccctcgctggcggagcggctgggcggcgggccgggcccggggccgcttggaatggcgcctcctccgccttcgccccaactgcttctcctggcagccctcgcgaggctcctgggtcccagcgaggtgatggctggaccggcggaggaggcgggagcccattgtcccgagagcctgtggcctctgcctccgcaggtgtcaccaagagtgacctacacacgagtgagcccagggcaggctgaggatgtcaccttcctctaccacccctgtgcccatccctggctgaagctccagcttgccctcctggcctatgcttgtatggctaacccttccctcacccctgacttcagcctcacgcaggatcggcccctggtgctgactgcatgggggctggcgctggagatggcctgggtagagccagcctgggctgcccactggctgatgaggaggcggaggaggaagcagaggaagaagaaggcatggatctactgtgaaagcctttcagggcctgctccctccgagccaactcccggtagagggaggctgtgccgaagagggtgtgtgcaggccctggctctggcctttgctctgcggagctggcggccccctggcacagaggtgacatctcaagggcccaggcagccctcttctagtggtgccaagaggcggaggctgcgggctgcccttggtccccagcccactcgctcagccctgaggtttccctctgcttccccagggagcttgaaggccaagcagtccatggcgggaatccctggtagggagagtaatgccccatctgtgcccactgtctccctgctgccgggggcgcctggaggcaatgccagctccaggacagaggctcaggtgcccaacgggcaaggcagcccagggggctgtgtctgttcaagtcaggcttccccggcccctcgcgcagcagcgcctccacgggcagcccggggccccaccccacgcactgaagaggccgcctgggctgccatggccctgaccttcctgctggtgctgctcaccctggccacgctctgcacacggctgcacagaaacttccgacgcggggagagcatctactgtgtggcgtgcggctcctccccgcgccgcgaggccgcgacctctgccacgtggaccgcgcgcggggcgctccctggtggcgatggcgcggcactggccgagcactgcgggggctttcctccttgttggttgctgagtgggcggccaaggggagaaaaggagccgcttctgcctcccttgccaaaactccgtttctaattaaattatttttagtaga

SEQ ID NO: 279735 - DNA, 1624 bp, Homo sapiens
gcggccgcgcgcgcgctctgccctcgggcggccctgctctcccccgcccggccccgcaaccccgcaataacttggctgggcggggtccggcactgggctagagaggtcgagcgcggcgtcttgagccgctggcgggaggctgctgcttccccgcctgcatcagtgcgggtcccgtggactcctcgcccccgtccccgcgagctcggggctccacatcaaggaaatcctcagcccgggagtggcttccccagaaacagcagccccaagcctccgagagtcagtcggagaaaaggacacactcaggcgccctgcgacagggatgcccgtccgacctacaaggaacgcctcgtaaaccggggtgcatgggagaccacggaaataacacgttctcgctgtttccaagctttgggataggcatctcgaccctcgctctctacccacgtttcccccccaaatcctggagagggaaccagaaccagcgccccgctgcggggcgggccggccagcgcacctcctgggggtgaggcctgtggcgtccccatctcgcggcgaccaatctctttctagacgcgcgcctgccaccgctgggcgacggcggaggtggggaagacagcagcctctcggctagctccggcctcccggggcttctgggtttggagagtttggggagcggagacacctcccgaggctcctccgcgttggaccctatttgcgagggcgggagcggggtgggccgacggcgaagctccagaggtgggaccctctcccttcagcagctcttcctgacttcatgattctgcccctcttctcattgcaggtcacaccgacaaatctgaagcgggtttgccaggggagtgtacccgtctccccagcctgggccacccggtccacagggattccatttccggccttacactccgctccacgatctcatccaggcgctgcagctgtgcagctgctctacagactgcagggacctgctgagacgaatccccggacgaggtgatggctggaccggcggaggaggcgggagcccattgtcccgagagcctgtggcctctgcctccgcaggtgtcaccaagagtgacctacacacgagtgagcccagggcaggctgaggatgtcaccttcctctaccacccctgtgcccatccctggctgaagctccagcttgccctcctggcctatgcttgtatggctaacccttccctcacccctgacttcagcctcacgcaggatcggcccctggtgctgactgcatgggggctggcgctggagatggcctgggtagagccagcctgggctgcccactggctgatgaggaggcggaggaggaagcagaggaagaagaaggcatggatctactgtgaaagcctttcagggcctgctccctccgagccaactcccggtagagggaggctgtgccgaagagggtgtgtgcaggccctggctctggcctttgctctgcggagctggcggccccctggcacagaggtgacatctcaagggcccaggcagccctcttctagtggtgccaagaggcggaggctgcgggctgcccttggtccccagcccactcgctcagcctgggatgggcacaggggtggtagaggaaggtgacatc

SEQ ID NO: 279736 - DNA, 366 bp, Homo sapiens
acctacggctagtgtcgaggctgcgtgttaatcggccgaggagcggctgggcggcgggccgggcccggggccgcttggaatggcgcctcctccgccttcgccccaactgcttctcctggcagccctcgcgaggctcctgggtcccagcgaggtgatggctggaccggcggaggaggcgggagcccattgtcccgagagcctgtggcctctgcctccgcaggtgtcaccaagagtgacctacacacgagtgagcccagggcaggtgagtacaagcaggggcccaccacccttggtgtccacgcctggagacaggcgctcctagcaggcttcgctgcctgttctgctgatcggccccattccttacca

SEQ ID NO: 279737 - DNA, 2174 bp, Homo sapiens
gcggccgcgcgcgcgctctgccctcgggcggccctgctctcccccgcccggccccgcaaccccgcaataacttggctgggcggggtccggcactgggctagagaggtcgagcgcggcgtcttgagccgctggcgggaggctgctgcttccccgcctgcatcagtgcgggtcccgtggactcctcgcccccgtccccgcgagctcggggctccacatcaaggaaatcctcagcccgggagtggcttccccagaaacagcagccccaagcctccgagagtcagtcggagaaaaggacacactcaggcgccctgcgacagggatgcccgtccgacctacaaggaacgcctcgtaaaccggggtgcatgggagaccacggaaataacacgttctcgctgtttccaagctttgggataggcatctcgaccctcgctctctacccacgtttcccccccaaatcctggagagggaaccagaaccagcgccccgctgcggggcgggccggccagcgcacctcctgggggtgaggcctgtggcgtccccatctcgcggcgaccaatctctttctagacgcgcgcctgccaccgctgggcgacggcggaggtcacaccgacaaatctgaagcgggtttgccaggggagtgtacccgtctccccagcctgggccacccggtccacagggattccatttccggccttacactccgctccacgatctcatccaggcgctgcagctgtgcagctgctctacagactgcagggacctgctgagacgaatccccggacgaggaaaggggccccccgcctgccctactgagccttgcgcgctgacccggtgatggctggaccggcggaggaggcgggagcccattgtcccgagagcctgtggcctctgcctccgcaggtgtcaccaagagtgacctacacacgagtgagcccagggcaggctgaggatgtcaccttcctctaccacccctgtgcccatccctggctgaagctccagcttgccctcctggcctatgcttgtatggctaacccttccctcacccctgacttcagcctcacgcaggatcggcccctggtgctgactgcatgggggctggcgctggagatggcctgggtagagccagcctgggctgcccactggctgatgaggaggcggaggaggaagcagaggaagaagaaggcatggatctactgtgaaagcctttcagggcctgctccctccgagccaactcccggtagagggaggctgtgccgaagagggtgtgtgcaggccctggctctggcctttgctctgcggagctggcggccccctggcacagaggtgacatctcaagggcccaggcagccctcttctagtggtgccaagaggcggaggctgcgggctgcccttggtccccagcccactcgctcagccctgaggtttccctctgcttccccagggagcttgaaggccaagcagtccatggcgggaatccctggtagggagagtaatgccccatctgtgcccactgtctccctgctgccgggggcgcctggaggcaatgccagctccaggacagaggctcaggtgcccaacgggcaaggcagcccagggggctgtgtctgttcaagtcaggcttccccggcccctcgcgcagcagcgcctccacgggcagcccggggccccaccccacgcactgaagaggccgcctgggctgccatggccctgaccttcctgctggtgctgctcaccctggccacgctctgcacacggctgcacagaaacttccgacgcggggagagcatctactgggggcccacagcggacagccaggacacagtggctgctgtgctgaagcggaggctgctgcagccctcgcgccgggtcaagcgctcgcgccggagacccctcctcccgcccacgccggacagcggcccggaaggcgagagctcggagtgacggcctgggacctgccactgtggcgtgcggctcctccccgcgccgcgaggccgcgacctctgccacgtggaccgcgcgcggggcgctccctggtggcgatggcgcggcactggccgagcactgcgggggctttcctccttgttggttgctgagtgggcggccaaggggagaaaaggagccgcttctgcctcccttgccaaaactccgtttctaattaaattatttttagtaga

SEQ ID NO: 279738 - DNA, 1494 bp, Homo sapiens
acctacggctagtgtcgaggctgcgtgttaatcggccgaggagcggctgggcggcgggccgggcccggggccgcttggaatggcgcctcctccgccttcgccccaactgcttctcctggcagccctcgcgaggctcctgggtcccagcgaggtgatggctggaccggcggaggaggcgggagcccattgtcccgagagcctgtggcctctgcctccgcaggtgtcaccaagagtgacctacacacgagtgagcccagggcaggctgaggatgtcaccttcctctaccacccctgtgcccatccctggctgaagctccagcttgccctcctggcctatgcttgtatggctaacccttccctcacccctgacttcagcctcacgcaggatcggcccctggtgctgactgcatgggggctggcgctggagatggcctgggtagagccagcctgggctgcccactggctgatgaggaggcggaggaggaagcagaggaagaagaaggcatggatctactgtgaaagcctttcagggcctgctccctccgagccaactcccggtagagggaggctgtgccgaagagggtgtgtgcaggccctggctctggcctttgctctgcggagctggcggccccctggcacagaggtgacatctcaagggcccaggcagccctcttctagtggtgccaagaggcggaggctgcgggctgcccttggtccccagcccactcgctcagccctgaggtttccctctgcttccccagggagcttgaaggccaagcagtccatggcgggaatccctggtagggagagtaatgccccatctgtgcccactgtctccctgctgccgggggcgcctggaggcaatgccagctccaggacagaggctcaggtgcccaacgggcaaggcagcccagggggctgtgtctgttcaagtcaggcttccccggcccctcgcgcagcagcgcctccacgggcagcccggggccccaccccacgcactgaagaggccgcctgggctgccatggccctgaccttcctgctggtgctgctcaccctggccacgctctgcacacggctgcacagaaacttccgacgcggggagagcatctactgggggcccacagcggacagccaggacacagtggctgctgtgctgaagcggaggctgctgcagccctcgcgccgggtcaagcgctcgcgccggagacccctcctcccgcccacgccggacagcggcccggaaggcgagagctcggagtgacggcctgggacctgccactgtggcgtgcggctcctccccgcgccgcgaggccgcgacctctgccacgtggaccgcgcgcggggcgctccctggtggcgatggcgcggcactggccgagcactgcgggggctttcctccttgttggttgctgagtgggcggccaaggggagaaaaggagccgcttctgcctcccttgccaaaactccgtttctaattaaattatttttagtaga

SEQ ID NO: 279739 - DNA, 1998 bp, Homo sapiens
ccgccccccacccccgccccggccctttgtacagcaattgcaacaagtgggagcagagggtgagaggagccggggccaccagggagggagggcgcgccggcagccggaagggagtggggagggcacgagccggggagagcggtgttggccatggagacgtggggagactggaggccgaggcttggggacccgactgtcatcagggtcttccgccagaccctgggcgctgcgccctcagaggccgatgaaaagaagcagaagggagagctttgggataggcatctcgaccctcgctctctacccacgtttcccccccaaatcctggagagggaaccagaaccagcgccccgctgcggggcgggccggccagcgcacctcctgggggtcacaccgacaaatctgaagcgggtttgccaggggagtgtacccgtctccccagcctgggccacccggtccacagggattccatttccggccttacactccgctccacgatctcatccaggcgctgcagctgtgcagctgctctacagactgcagggacctgctgagacgaatccccggacgaggaaaggggccccccgcctgccctactgagccttgcgcgctgacccggttcctacacttaacttttccggcttcgggtttaagacgcgtgatggctggaccggcggaggaggcgggagcccattgtcccgagagcctgtggcctctgcctccgcaggtgtcaccaagagtgacctacacacgagtgagcccagggcaggctgaggatgtcaccttcctctaccacccctgtgcccatccctggctgaagctccagcttgccctcctggcctatgcttgtatggctaacccttccctcacccctgacttcagcctcacgcaggatcggcccctggtgctgactgcatgggggctggcgctggagatggcctgggtagagccagcctgggctgcccactggctgatgaggaggcggaggaggaagcagaggaagaagaaggcatggatctactgtgaaagcctttcagggcctgctccctccgagccaactcccggtagagggaggctgtgccgaagagggtgtgtgcaggccctggctctggcctttgctctgcggagctggcggccccctggcacagaggtgacatctcaagggcccaggcagccctcttctagtggtgccaagaggcggaggctgcgggctgcccttggtccccagcccactcgctcagccctgaggtttccctctgcttccccagggagcttgaaggccaagcagtccatggcgggaatccctggtagggagagtaatgccccatctgtgcccactgtctccctgctgccgggggcgcctggaggcaatgccagctccaggacagaggctcaggtgcccaacgggcaaggcagcccagggggctgtgtctgttcaagtcaggcttccccggcccctcgcgcagcagcgcctccacgggcagcccggggccccaccccacgcactgaagaggccgcctgggctgccatggccctgaccttcctgctggtgctgctcaccctggccacgctctgcacacggctgcacagaaacttccgacgcggggagagcatctactgggggcccacagcggacagccaggacacagtggctgctgtgctgaagcggaggctgctgcagccctcgcgccgggtcaagcgctcgcgccggagacccctcctcccgcccacgccggacagcggcccggaaggcgagagctcggagtgacggcctgggacctgccactgtggcgtgcggctcctccccgcgccgcgaggccgcgacctctgccacgtggaccgcgcgcggggcgctccctggtggcgatggcgcggcactggccgagcactgcgggggctttcctccttgttggttgctgagtgggcggccaaggggagaaaaggagccgcttctgcctcccttgccaaaactccgtttctaattaaattatttttagtaga

SEQ ID NO: 279740 - DNA, 1636 bp, Homo sapiens
cgggcggcgcgggcggcgcgggggcgctggggctggaggggcggggcgcgcgcgctccctcgctggcggagcggctgggcggcgggccgggcccggggccgcttggaatggcgcctcctccgccttcgccccaactgcttctcctggcagccctcgcgaggctcctgggtcccagcgaggtgatggctggaccggcggaggaggcgggagcccattgtcccgagagcctgtggcctctgcctccgcaggtgtcaccaagagtgacctacacacgagtgagcccagggcaggctgaggatgtcaccttcctctaccacccctgtgcccatccctggctgaagctccagcttgccctcctggcctatgcttgtatggctaacccttccctcacccctgacttcagcctcacgcaggatcggcccctggtgctgactgcatgggggctggcgctggagatggcctgggtagagccagcctgggctgcccactggctgatgaggaggcggaggaggaagcagaggaagaagaaggcatggatctactgtgaaagcctttcagggcctgctccctccgagccaactcccggtagagggaggctgtgccgaagagggtgtgtgcaggccctggctctggcctttgctctgcggagctggcggccccctggcacagaggtgacatctcaagggcccaggcagccctcttctagtggtgccaagaggcggaggctgcgggctgcccttggtccccagcccactcgctcagccctgaggtttccctctgcttccccagggagcttgaaggccaagcagtccatggcgggaatccctggtagggagagtaatgccccatctgtgcccactgtctccctgctgccgggggcgcctggaggcaatgccagctccaggacagaggctcaggtgcccaacgggcaaggcagcccagggggctgtgtctgttcaagtcaggcttccccggcccctcgcgcagcagcgcctccacgggcagcccggggccccaccccacgcactgaagaggccgcctgggctgccatggccctgaccttcctgctggtgctgctcaccctggccacgctctgcacacggctgcacagaaacttccgacgcggggagagcatctactgggggcccacagcggacagccaggacacagtggctggtgaggagttccctccctaccctacccgaggcccccgccccacctcgcgtcgcccgccgccccccgtagcttccctgccctcccgcccttgactgctcggcgcccggcccacagctgtgctgaagcggaggctgctgcagccctcgcgccgggtcaagcgctcgcgccggagacccctcctcccgcccacgccggacagcggcccggaaggcgagagctcggagtgacggcctgggacctgccactgtggcgtgcggctcctccccgcgccgcgaggccgcgacctctgccacgtggaccgcgcgcggggcgctccctggtggcgatggcgcggcactggccgagcactgcgggggctttcctccttgttggttgctgagtgggcggccaaggggagaaaaggagccgcttctgcctcccttgccaaaactccgtttctaattaaattatttttagtaga

SEQ ID NO: 279741 - DNA, 1430 bp, Homo sapiens
cgggcggcgcgggcggcgcgggggcgctggggctggaggggcggggcgcgcgcgctccctcgctggcggagcggctgggcggcgggccgggcccggggccgcttggaatggcgcctcctccgccttcgccccaactgcttctcctggcagccctcgcgaggctcctgggtcccagcgaggtgatggctggaccggcggaggaggcgggagcccattgtcccgagagcctgtggcctctgcctccgcaggtgtcaccaagagtgacctacacacgagtgagcccagggcaggctgaggatgtcaccttcctctaccacccctgtgcccatccctggctgaagctccagcttgccctcctggcctatgcttgtatggctaacccttccctcacccctgacttcagcctcacgcaggatcggcccctggtgctgactgcatgggggctggcgctggagatggcctgggtagagccagcctgggctgcccactggctgatgaggaggcggaggaggaagcagaggaagaagaaggcatggatctactgtgaaagcctttcagggcctgctccctccgagccaactcccggtagagggaggctgtgccgaagagggtgtgtgcaggccctggctctggcctttgctctgcggagctggcggccccctggcacagaggtgacatctcaagggcccaggcagccctcttctagtggtgccaagaggcggaggctgcgggctgcccttggtccccagcccactcgctcagccctgaggtttccctctgcttccccagggagcttgaaggccaagcagtccatggcgggaatccctggtagggagagtaatgccccatctgtgcccactgtctccctgctgccgggggcgcctggaggcaatgccagctccaggacagaggctcaggtgcccaacgggcaaggcagcccagggggctgtgtctgttcaagtcaggcttccccggcccctcgcgcagcagcgcctccacgggcagcccggggccccaccccacgcactgaagaggccgcctgggctgccatggccctgaccttcctgctggtgctgctcaccctggccacgctctgcacacggctgcacagaaacttccgacgcggggagagcatctactgggggcccacagcggacagccaggacacagtggctgctgtgctgaagcggaggctgctgcagccctcgcgccgggtcaagcgctcgcgccggagacccctcctcccgcccacgccggacagcggcccggaaggcgagagctcggagtgacggcctgggacctgccactggccgagcactgcgggggctttcctccttgttggttgctgagtgggcggccaaggggagaaaaggagccgcttctgcctcccttgccaaaactccgtttctaattaaattatttttagtaga

SEQ ID NO: 279742 - DNA, 1325 bp, Homo sapiens
cgggcggcgcgggcggcgcgggggcgctggggctggaggggcggggcgcgcgcgctccctcgctggcggagcggctgggcggcgggccgggcccggggccgcttggaatggcgcctcctccgccttcgccccaactgcttctcctggcagccctcgcgaggctcctgggtcccagcgaggtgatggctggaccggcggaggaggcgggagcccattgtcccgagagcctgtggcctctgcctccgcaggtgtcaccaagagtgacctacacacgagtgagcccagggcaggctgaggatgtcaccttcctctaccacccctgtgcccatccctggctgaagctccagcttgccctcctggcctatgcttgtatggctaacccttccctcacccctgacttcagcctcacgcaggatcggcccctggtgctgactgcatgggggctggcgctggagatggcctgggtagagccagcctgggctgcccactggctgatgaggaggcggaggaggaagcagaggaagaagaaggcatggatctactgtgaaagcctttcagggcctgctccctccgagccaactcccggtagagggaggctgtgccgaagagggtgtgtgcaggccctggctctggcctttgctctgcggagctggcggccccctggcacagaggtgacatctcaagggcccaggcagccctcttctagtggtgccaagaggcggaggctgcgggctgcccttggtccccagcccactcgctcagccctgaggtttccctctgcttccccagggagcttgaaggccaagcagtccatggcgggaatccctggtagggagagtaatgccccatctgtgcccactgtctccctgctgccgggggcgcctggaggcaatgccagctccaggacagaggctcaggtgcccaacgggcaaggcagcccagggggctgtgtctgttcaagtcaggcttccccggcccctcgcgcagcagcgcctccacgggcagcccggggccccaccccacgcactgaagaggccgcctgggctgccatggccctgaccttcctgctggtgctgctcaccctggccacgctctgcacacggctgcacagaaacttccgacgcggggagagcatctactggccgcgacctctgccacgtggaccgcgcgcggggcgctccctggtggcgatggcgcggcactggccgagcactgcgggggctttcctccttgttggttgctgagtgggcggccaaggggagaaaaggagccgcttctgcctcccttgccaaaactccgtttctaattaaattatttttagtaga

SEQ ID NO: 279743 - DNA, 625 bp, Homo sapiens
gaagtaactctgccaacaccttgatctcagatttctagcctccaaagacaatgtcaagagaatgagaagacaagcctcagaatgagaagaaacatttgtaaaagatacatctaataaagcagttttatccaaaatatataatacaaagatctcttgagactcaacattaaggaagcaaacaaccagaataaaaaatgagctccagatactaacagccacctcatcaaagacaatacacagataacaaattaccatatgaaaatgtggtctctatcatatgtcatcatggaaattcaaattaaagccacagtgagataccactacacacctataagaatagccaaaatccagaatacagacaacaccatacgctaatgaggattaggagcaacaggaactcgtattcatgctggtgggaatgcagcaaggaacatttccctctctggatacatgtgtttcagatcacaaagccatagatgagaggagtctctctttctaaatcactttttgaagaacacctactcaagagagtcacctgaccccgttggaatataagatgtgtgggaaatctaccttattgcattaaactactcagatttttgtgtggttggttaaacagtattaa

SEQ ID NO: 279744 - DNA, 411 bp, Homo sapiens
gaagtaactctgccaacaccttgatctcagatttctagcctccaaaggtggtggaatatctgagaatccacatactgtaacgaatgatgagaaaaatccagcttcttgctattgctgttaccatccatcagcatggatggacaaaggaaggaagcagatttgctagaagccaagcatcatagagtcaactagaagaagctgaaatcacagcagacctgtcttgtgaaagctggggatgtggacaagatgacagtcattgaagtactctgtgtgaaaaacagagaatgtgtaaactaaatattctggcttgtccctcccaccttccaaattgcctctagttcctcttgttaactgagctaaatggcaagccaacttgcagagcctggaaataaagcttgtaggactcatacc

SEQ ID NO: 279745 - DNA, 354 bp, Homo sapiens
ctacaggtgctcgaaaagttttccctcgatactcttcaatctggcttctactgctctatcatttaactgaaatggaacagacacggggttttgccatggtgtcaaactcttggactcaagcaatccgcccaccttggcctcccaaagtgctgagattacagagctcagagtggagttcatgcaaatcccatttattctctaactggtggagctgagactgctgaagctgggtaagaggccaagatgtggaactcatactacatatattatgaaaatcctgccatctgcagaaaagaaatacaaaagatggtgttaggaccctctccaaattaaaattctgaatttccatgaaag

SEQ ID NO: 279746 - DNA, 2168 bp, Homo sapiens
atagcttaaacatgtaattagtatcaccacaaatgagaagaatgaaaggatcacattttccccctcgttttcccttgaagtcatgaacggttggttctgctgtgactttggggcttagttttcagtagaagtgttgtcctgctctgctgctgttactgcgggactgctaattcaggctaactcaggcggcgggcgctgtgtgctctgaacatcaaaccgcgggtgaggcgtcaacccaggagtttattttgtgatcagagtggaaccactacacttcactttcccctcacctccacctctgagggagcaacgaatacaaaggtagacccccaaaagctttgaatagctgtcgcctactttcccgcggccctcttcattttttcgtctcccgctgccgccgccgccgccgcctctggatctggacggacccagtggccgctgccgcctccgcagggccgggcactactttccgtctgcggtggttccgccgaccctcccgcggctgctgccccgcccgcgccggcggaaggagacgcgctgcgcgccgccgctgcccggggagggagacggagcagtactggccgcggcgcggtggcggcggctgggctgcctcggggtcttcgacggccgcgttgggttttgtttcagttttcttgtgtggcgctgcagcacaaggctgcgaatctgggagtccaaaggagtgtttgcggggagggcccgaggtcgctgtgtccggggcagagcggccggttcgtcccgagtctgcgctctttcgggtccgctgctgtgtcccggtccgctctcctcagcatgagcggccggtaggagtgaggtttcatcggttccctcgcactggaggaggcagcggccgcttcggcagcgacagctatggcggtagagacgcgggcagagctggtgggtaagcggttcctgtgtgtggcggtcggcgacgaggcacgttcggagcgctgggagagcggacgcggctggcgaagctggcgagcgggggtcatccgagccgtgtcacacagggacagccgcaatccggacctggcggtgtatgtggaatttgatgatcttgaatgggataaacgagagtgggttaaagtttatgaagatttttcaactttcttggtggaataccacttaatctgggccaaaaggaatgaccctagccagactcagggatcaaagagcaaacagattcagtggcctgcattgactttcaaacctctggttgaaagaaatatacccagttcagtcactgcagtagaattccttgtagataagcaactggattttttaactgaagatagtgcctttcagccctaccaggacgacatagacagcctaaacccagttctcagggacaacccgcagcttcatgaggaagtgaaagtctgggtaaaggaacaaaaggttcaggagatttttatgcaaggtccttattccttaaatggatacagagtgagagtatatagacaagactctgccacccagtggtttactggcataattactcatcatgatctcttcacccgcaccatgatcgttatgaatgatcaggtactagaaccacagaatgtcgatccttctatggttcaaatgacctttctagatgatgttgttcactctttgttaaaaggtgaaaatattggcattacatcacgacgcaggtctcgtgccaatcaaaacgtcaacgctgttcacagccattatacacgtgcccaagcaaatagtcccagaccagcaatgaactcccaagctgctgtaccaaaacagaatacacaccagcaacagcaacaaagaagtatccgtccgaataagaggaagggctcagatagcagtataccagatgaagagaagatgaaggaggaaaaatatgattatatatcacgaggagaaaatcctaaaggtaaaaacaaacacttgatgaataaaagaaggaaacctgaggaggatgaaaagaaactaaatatgaaaagacttcgaactgacaatgtttcagacttttctgagagcagtgactcagaaaattcaaataagagaataatagataattcctcagaacagaagccagagaatgaattgaaaaataaaaatacttcaaaaataaatggagaagaaggaaaaccccataataatgagaaggcaggagaagagaccct

SEQ ID NO: 279747 - DNA, 2001 bp, Homo sapiens
atagcttaaacatgtaattagtatcaccacaaatgagaagaatgaaaggatcacattttccccctcgttttcccttgaagtcatgaacggttggttctgctgtgactttggggcttagttttcagtagaagtgttgtcctgctctgctgctgttactgcgggactgctaattcaggctaactcaggcggcgggcgctgtgtgctctgaacatcaaaccgcgggtgaggcgtcaacccaggagtttattttgtgatcagagtggaaccactacacttcactttcccctcacctccacctctgagggagcaacgaatacaaaggtagacccccaaaagctttgaatagctgtcgcctactttcccgcggccctcttcattttttcgtctcccgctgccgccgccgccgccgcctctggatctggacggacccagtggccgcctgcctcggggtcttcgacggccgcgttgggttttgtttcagttttcttgtgtggcgctgcagcacaaggctgcgaatctgggagtccaaaggagtgtttgcggggagggcccgaggtcgctgtgtccggggcagagcggccggttcgtcccgagtctgcgctctttcgggtccgctgctgtgtcccggtccgctctcctcagcatgagcggccggtaggagtgaggtttcatcggttccctcgcactggaggaggcagcggccgcttcggcagcgacagctatggcggtagagacgcgggcagagctggtgggtaagcggttcctgtgtgtggcggtcggcgacgaggcacgttcggagcgctgggagagcggacgcggctggcgaagctggcgagcgggggtcatccgagccgtgtcacacagggacagccgcaatccggacctggcggtgtatgtggaatttgatgatcttgaatgggataaacgagagtgggttaaagtttatgaagatttttcaactttcttggtggaataccacttaatctgggccaaaaggaatgaccctagccagactcagggatcaaagagcaaacagattcagtggcctgcattgactttcaaacctctggttgaaagaaatatacccagttcagtcactgcagtagaattccttgtagataagcaactggattttttaactgaagatagtgcctttcagccctaccaggacgacatagacagcctaaacccagttctcagggacaacccgcagcttcatgaggaagtgaaagtctgggtaaaggaacaaaaggttcaggagatttttatgcaaggtccttattccttaaatggatacagagtgagagtatatagacaagactctgccacccagtggtttactggcataattactcatcatgatctcttcacccgcaccatgatcgttatgaatgatcaggtactagaaccacagaatgtcgatccttctatggttcaaatgacctttctagatgatgttgttcactctttgttaaaaggtgaaaatattggcattacatcacgacgcaggtctcgtgccaatcaaaacgtcaacgctgttcacagccattatacacgtgcccaagcaaatagtcccagaccagcaatgaactcccaagctgctgtaccaaaacagaatacacaccagcaacagcaacaaagaagtatccgtccgaataagaggaagggctcagatagcagtataccagatgaagagaagatgaaggaggaaaaatatgattatatatcacgaggagaaaatcctaaaggtaaaaacaaacacttgatgaataaaagaaggaaacctgaggaggatgaaaagaaactaaatatgaaaagacttcgaactgacaatgtttcagacttttctgagagcagtgactcagaaaattcaaataagagaataatagataattcctcagaacagaagccagagaatgaattgaaaaataaaaatacttcaaaaataaatggagaagaaggaaaaccccataataatgagaaggcaggagaagagaccct

SEQ ID NO: 279748 - DNA, 1973 bp, Homo sapiens
atagcttaaacatgtaattagtatcaccacaaatgagaagaatgaaaggatcacattttccccctcgttttcccttgaagtcatgaacggttggttctgctgtgactttggggcttagttttcagtagaagtgttgtcctgctctgctgctgttactgcgggactgctaattcaggctaactcaggcggcgggcgctgtgtgctctgaacatcaaaccgcgggtgaggcgtcaacccaggagtttattttgtgatcagagtggaaccactacacttcactttcccctcacctccacctctgagggagcaacgaatacaaaggtagacccccaaaagctttgaatagctgtcgcctactttcccgcggccctcttcattttttcgtctcccgctgccgccgccgccgccgcctctggatctggacggacccagtggccgcgggttttgtttcagttttcttgtgtggcgctgcagcacaaggctgcgaatctgggagtccaaaggagtgtttgcggggagggcccgaggtcgctgtgtccggggcagagcggccggttcgtcccgagtctgcgctctttcgggtccgctgctgtgtcccggtccgctctcctcagcatgagcggccggtaggagtgaggtttcatcggttccctcgcactggaggaggcagcggccgcttcggcagcgacagctatggcggtagagacgcgggcagagctggtgggtaagcggttcctgtgtgtggcggtcggcgacgaggcacgttcggagcgctgggagagcggacgcggctggcgaagctggcgagcgggggtcatccgagccgtgtcacacagggacagccgcaatccggacctggcggtgtatgtggaatttgatgatcttgaatgggataaacgagagtgggttaaagtttatgaagatttttcaactttcttggtggaataccacttaatctgggccaaaaggaatgaccctagccagactcagggatcaaagagcaaacagattcagtggcctgcattgactttcaaacctctggttgaaagaaatatacccagttcagtcactgcagtagaattccttgtagataagcaactggattttttaactgaagatagtgcctttcagccctaccaggacgacatagacagcctaaacccagttctcagggacaacccgcagcttcatgaggaagtgaaagtctgggtaaaggaacaaaaggttcaggagatttttatgcaaggtccttattccttaaatggatacagagtgagagtatatagacaagactctgccacccagtggtttactggcataattactcatcatgatctcttcacccgcaccatgatcgttatgaatgatcaggtactagaaccacagaatgtcgatccttctatggttcaaatgacctttctagatgatgttgttcactctttgttaaaaggtgaaaatattggcattacatcacgacgcaggtctcgtgccaatcaaaacgtcaacgctgttcacagccattatacacgtgcccaagcaaatagtcccagaccagcaatgaactcccaagctgctgtaccaaaacagaatacacaccagcaacagcaacaaagaagtatccgtccgaataagaggaagggctcagatagcagtataccagatgaagagaagatgaaggaggaaaaatatgattatatatcacgaggagaaaatcctaaaggtaaaaacaaacacttgatgaataaaagaaggaaacctgaggaggatgaaaagaaactaaatatgaaaagacttcgaactgacaatgtttcagacttttctgagagcagtgactcagaaaattcaaataagagaataatagataattcctcagaacagaagccagagaatgaattgaaaaataaaaatacttcaaaaataaatggagaagaaggaaaaccccataataatgagaaggcaggagaagagaccct

SEQ ID NO: 279749 - DNA, 1406 bp, Homo sapiens
atagcttaaacatgtaattagtatcaccacaaatgagaagaatgaaaggatcacattttccccctcgttttcccttgaagtcatgaacggttggttctgctgtgactttggggcttagttttcagtagaagtgttgtcctgctctgctgctgttactgcgggactgctaattcaggctaactcaggcggcgggcgctgtgtgctctgaacatcaaaccgcgggtgaggcgtcaacccaggagtttattttgtgatcagagtggaaccactacacttcactttcccctcacctccacctctgagggagcaacgaatacaaaggtagacccccaaaagctttgaatagctgtcgcctactttcccgcggccctcttcattttttcgtctcccgctgccgccgccgccgccgcctctggatctggacggacccagtggccgctgccgcctccgcagggccgggcactactttccgtctgcggtggttccgccgaccctcccgcggctgctgccccgcccgcgccggcggaaggagacgcgctgcgcgccgccgctgcccggggagggagacggagcagtactggccgcggcgcggtggcggcggctgggctgcctcggggtcttcgacggccgcgttgggttttgtttcagttttcttgtgtggcgctgcagcacaaggctgcgaatctgggagtccaaaggagtgtttgcggggagggcccgaggtcgctgtgtccggggcagagcggccggttcgtcccgagtctgcgctctttcgggtccgctgctgtgtcccggtccgctctcctcagcatgagcggccggtaggagtgaggtttcatcggttccctcgcactggaggaggcagcggccgcttcggcagcgacagctatggcggtagagacgcgggcagagctggtgggtaagcggttcctgtgtgtggcggtcggcgacgaggcacgttcggagcgctgggagagcggacgcggctggcgaagctggcgagcgggggtcatccgagccgtgtcacacagggacagccgcaatccggacctggcggtgtatgtggaatttgatgatcttgaatgggataaacgagagtgggttaaagtttatgaagatttttcaactttcttggtggaataccacttaatctgggccaaaaggaatgaccctagccagactcagggatcaaagagcaaacagattcagtggcctgcattggtaagatctattcctgtttcattaagcattttcatttgttcgtttaaaacaaagaacaacaacaacaaaacaaaggccaggtttggtgactgacacctgtaaaactagcactttgagaggctgaagcaggacaattgcttgaagccaggagttggagatcagcctgggcaaaaaagcgagacccc

SEQ ID NO: 279750 - DNA, 1230 bp, Homo sapiens
cgccgcgccgcaccgcacgcagccgagcagcgccacagccgccgccgccgtcgcagccgcagtcgccgcagctaggccctcggccgtcgcagggagctccgcagcgacgtggaccaaggtgtatgtggaatttgatgatcttgaatgggataaacgagagtgggttaaagtttatgaagatttttcaactttcttggtggaataccacttaatctgggccaaaaggaatgaccctagccagactcagggatcaaagagcaaacagattcagtggcctgcattgactttcaaacctctggttgaaagaaatatacccagttcagtcactgcagtagaattccttgtagataagcaactggattttttaactgaagatagtgcctttcagccctaccaggacgacatagacagcctaaacccagttctcagggacaacccgcagcttcatgaggaagtgaaagtctgggtaaaggaacaaaaggttcaggagatttttatgcaaggtccttattccttaaatggatacagagtgagagtatatagacaagactctgccacccagtggtttactggcataattactcatcatgatctcttcacccgcaccatgatcgttatgaatgatcaggtactagaaccacagaatgtcgatccttctatggttcaaatgacctttctagatgatgttgttcactctttgttaaaaggtgaaaatattggcattacatcacgacgcaggtctcgtgccaatcaaaacgtcaacgctgttcacagccattatacacgtgcccaagcaaatagtcccagaccagcaatgaactcccaagctgctgtaccaaaacagaatacacaccagcaacagcaacaaagaagtatccgtccgaataagaggaagggctcagatagcagtataccagatgaagagaagatgaaggaggaaaaatatgattatatatcacgaggagaaaatcctaaaggtaaaaacaaacacttgatgaataaaagaaggaaacctgaggaggatgaaaagaaactaaatatgaaaagacttcgaactgacaatgtttcagacttttctgagagcagtgactcagaaaattcaaataagagaataatagataattcctcagaacagaagccagagaatgaattgaaaaataaaaatacttcaaaaataaatggagaagaaggaaaaccccataataatgagaaggcaggagaagagaccct

SEQ ID NO: 279751 - DNA, 1923 bp, Homo sapiens
atagcttaaacatgtaattagtatcaccacaaatgagaagaatgaaaggatcacattttccccctcgttttcccttgaagtcatgaacggttggttctgctgtgactttggggcttagttttcagtagaagtgttgtcctgctctgctgctgttactgcgggactgctaattcaggctaactcaggcggcgggcgctgtgtgctctgaacatcaaaccgcgggtgaggcgtcaacccaggagtttattttgtgatcagagtggaaccactacacttcactttcccctcacctccacctctgagggagcaacgaatacaaaggtagacccccaaaagctttgaatagctgtcgcctactttcccgcggccctcttcattttttcgtctcccgctgcccctcccgcggctgctgccccgcccgcgccggcggaaggagacgctgggagtccaaaggagtgtttgcggggagggcccgaggtcgctgtgtccggggcagagcggccggttcgtcccgagtctgcgctctttcgggtccgctgctgtgtcccggtccgctctcctcagcatgagcggccggtaggagtgaggtttcatcggttccctcgcactggaggaggcagcggccgcttcggcagcgacagctatggcggtagagacgcgggcagagctggtgggtaagcggttcctgtgtgtggcggtcggcgacgaggcacgttcggagcgctgggagagcggacgcggctggcgaagctggcgagcgggggtcatccgagccgtgtcacacagggacagccgcaatccggacctggcggtgtatgtggaatttgatgatcttgaatgggataaacgagagtgggttaaagtttatgaagatttttcaactttcttggtggaataccacttaatctgggccaaaaggaatgaccctagccagactcagggatcaaagagcaaacagattcagtggcctgcattgactttcaaacctctggttgaaagaaatatacccagttcagtcactgcagtagaattccttgtagataagcaactggattttttaactgaagatagtgcctttcagccctaccaggacgacatagacagcctaaacccagttctcagggacaacccgcagcttcatgaggaagtgaaagtctgggtaaaggaacaaaaggttcaggagatttttatgcaaggtccttattccttaaatggatacagagtgagagtatatagacaagactctgccacccagtggtttactggcataattactcatcatgatctcttcacccgcaccatgatcgttatgaatgatcaggtactagaaccacagaatgtcgatccttctatggttcaaatgacctttctagatgatgttgttcactctttgttaaaaggtgaaaatattggcattacatcacgacgcaggtctcgtgccaatcaaaacgtcaacgctgttcacagccattatacacgtgcccaagcaaatagtcccagaccagcaatgaactcccaagctgctgtaccaaaacagaatacacaccagcaacagcaacaaagaagtatccgtccgaataagaggaagggctcagatagcagtataccagatgaagagaagatgaaggaggaaaaatatgattatatatcacgaggagaaaatcctaaaggtaaaaacaaacacttgatgaataaaagaaggaaacctgaggaggatgaaaagaaactaaatatgaaaagacttcgaactgacaatgtttcagacttttctgagagcagtgactcagaaaattcaaataagagaataatagataattcctcagaacagaagccagagaatgaattgaaaaataaaaatacttcaaaaataaatggagaagaaggaaaaccccataataatgagaaggcaggagaagagaccct

SEQ ID NO: 279752 - DNA, 1321 bp, Homo sapiens
atagcttaaacatgtaattagtatcaccacaaatgagaagaatgaaaggatcacattttccccctcgttttcccttgaagtcatgaacggttggttctgctgtgactttggggcttagttttcagtagaagtgttgtcctgctctgctgctgttactgcgggactgctaattcaggctaactcaggcggcgggcgctgtgtgctctgaacatcaaaccgcgggtgaggcgtcaacccaggagtttattttgtgatcagagtggaaccactacacttcactttcccctcacctccacctctgagggagcaacgaatacaaaggtagacccccaaaagctttgaatagctgtcgcctactttcccgcggccctcttcattttttcgtctcccgctgccgccgccgccgccgcctctggatctggacggacccagtggccgctgccgcctccgcagggccgggcactactttccgtctgcggtggttccgccgaccctcccgcggctgctgccccgcccgcgccggcggaaggagacgcgctgcgcgccgccgctgcccggggagggagacggagcagtactggccgcggcgcggtggcggcggctgggctgcctcggggtcttcgacggccgcgttgggttttgtttcagttttcttgtgtggcgctgcagcacaaggctgcgaatctgggagtccaaaggagtgtttgcggggagggcccgaggtcgctgtgtccggggcagagcggccggttcgtcccgagtctgcgctctttcgggtccgctgctgtgtcccggtccgctctcctcagcatgagcggccggtaggagtgaggtttcatcggttccctcgcactggaggaggcagcggccgcttcggcagcgacagctatggcggtagagacgcgggcagagctggtgggtaagcggttcctgtgtgtggcggtcggcgacgaggcacgttcggagcgctgggagagcggacgcggctggcgaagctggcgagcgggggtcatccgagccgtgtcacacagggacagccgcaatccggacctggcggtaagagagcgagcgccccccttttcccctgccgcgcccgcacccggctctcgcagacgtaccttgcaggcttccctctggcgcctcgctcagcccggccaactggcggtcacgcccctctgccgaacccttggcgcgtttgcccgcatcccttgcctgggtccctgcgtctctccgagcggcttcccctgtggaggtggtgtcggagcaggactcccgggatagccgcggaggctgccctggcccccatcccggaggggtcgac

SEQ ID NO: 279753 - DNA, 1178 bp, Homo sapiens
atagcttaaacatgtaattagtatcaccacaaatgagaagaatgaaaggatcacattttccccctcgttttcccttgaagtcatgaacggttggttctgctgtgactttggggcttagttttcagtagaagtgttgtcctgctctgctgctgttactgcgggactgctaattcaggctaactcaggcggcgggcgctgtgtgctctgaacatcaaaccgcgggtgaggcgtcaacccaggagtttattttgtgatcagagtggaaccactacacttcactttcccctcacctccacctctgagggagcaacgaatacaaaggtagacccccaaaagctttgaatagctgtcgcctactttcccgcggccctcttcattttttcgtctcccgctgccgccgccgccgccgcctctggatctggacggacccagtggccgctgccgcctccgcagggccgggcactactttccgtctgcggtggttccgccgaccctcccgcggctgctgccccgcccgcgccggcggaaggagacgcgctgcgcgccgccgctgcccggggagggagacggagcagtactggccgcggcgcggtggcggcggctgggctgcctcggggtcttcgacggccgcgttgggttttgtttcagttttcttgtgtggcgctgcagcacaaggctgcgaatctgaggtttcatcggttccctcgcactggaggaggcagcggccgcttcggcagcgacagctatggcggtagagacgcgggcagagctggtgggtaagcggttcctgtgtgtggcggtcggcgacgaggcacgttcggagcgctgggagagcggacgcggctggcgaagctggcgagcgggggtcatccgagccgtgtcacacagggacagccgcaatccggacctggcggtaagagagcgagcgccccccttttcccctgccgcgcccgcacccggctctcgcagacgtaccttgcaggcttccctctggcgcctcgctcagcccggccaactggcggtcacgcccctctgccgaacccttggcgcgtttgcccgcatcccttgcctgggtccctgcgtctctccgagcggcttcccctgtggaggtggtgtcggagcaggactcccgggatagccgcggaggctgccctggcccccatcccggaggggtcgac

SEQ ID NO: 279754 - DNA, 1189 bp, Homo sapiens
atcggcacgagggggtttggtgcggccactccaaggccaaagccgcctccttggcctgtagagacgccaaggaggcgggtttggtgcggccactccaaggccaaagcgagaaaatcttactgcgcacgcgcaatagacagccgatggagccaccgatggagccgtccggaggggagcaagagcccggagccgtcaggttcctggacctgccctgggaagacgtgctgctcccacacgtcctgaaccgggtcccgctgcgccagctgctccggctgcagcgcgttagccgggccttccggtcgctggtgcagcttcacctggccgggctgcgtcgcttcgatgccgcgcaggtgggtccgcagatcccgcgggccgcattggcccggctgctgcgggatgccgaggggctgcaggagctggcactggcgccgtgtcacgaatggctgtcagacgaggacctggtgccggtgctggcgcggaatccgcagctgcggagtgtggcgttgggcggctgcgggcaactgagtcgccgggcgcttggggctttggccgagggctgcccacgcctgcagcgcctgtcgctcgcgcactgtgactgggtggacgggctggcgctgcgcggcctcgctgatcgctgcccggccctggaggagctggatctcaccgcctgccgccagctcaaggacgaggccatcgtgtacctggcgcagaggcgcggcgctggtctccgcagcctctctctggccgtcaacgccaacgtgggggacgccgcggttcaagagttggctcggaactgcccagaactccaccaccttgacctcaccggctgcctccgcgtcggaagcgacggtgtcaggacattggccgagtactgccccgtgctgcgttcgctgcgggtgcggcactgccaccatgtggcggagtccagcctgagccgcttgcggaagcgcggcgtggacatcgacgtggagccgccgctgcaccaggccctggtgctgctgcaggatatggcgggcttcgcaccttttgtcaacctgcaggtctgacccgcctgccaatcggagcacagctggactgtgtggctggggcctgacactgagctgtagggaaactgaactgtgaggacctctggtgagaggccagtgccctgccccaccctggagcttcaaataaagagctttttaccccc

SEQ ID NO: 279755 - DNA, 403 bp, Homo sapiens
cggccgcgccaagcacacggtatgggtgtagactggacccgccccctaaatccaggagaccatcaactatggaaaggagatctagggaacaccgtcttgaacccgccaggggttttgagtctcggacccaggagatccaaccctgaccaccctcccaggatgcagcagggggatgttaaatcagacttcaggaagaacttccttgctgcctgagttaggtgtcgtcacgcctgcccaggggtaagaggttagacgggatgaactagggaccggaagacgtgggggaccggcaacccttgtgcccttggccagggtagaagggggccctgctattttaagaaagagccgctggagttactatggcaactactctctttgggagggccagggcgggcagatggtg

SEQ ID NO: 279756 - DNA, 2215 bp, Homo sapiens
tgtcctcccagctaccccctccctaagcaggctgaggaagaagagatagcaagccctcacctaacttgacccctttcttgtctctccccgctgctagcttctcccttctcgctgccttgcggggtggggaaacgtggaaggaattctgggaaaaccagatgtctgggttctctattcccgtctggcttgattctggacaaggggcttcctctccagggcctcggtttccccatctttaaaatggactgatagcatagacctgcccacctttcagaggtgcccgaagccttgacgagataacagatgagaagtggttttcgttgtgatgagccagctgaagcggttgcaccggagcgccagaccgtcagcggtgcagtggctctcgcgtccttcacatccccccacacccatcccgtggatgatgggggaaggcactactcctggggttccccgaagcggatcctgggactgggacctggggacgcggactctggacctttggaggaaatgaaagggacccagttggaaatatagtctttcttcgcgccccctacatctctctccagcgggggaacgcggcccaaactgttacgaagtggaagaggctggatagctcttcataattaatcaggaatgggaggtttgagcaggtttacttgatgagggaaacattatagcctcgccaattcattcattatttcaacaattacttattgaacacctgctacgtggcagacagtaagagcctggatagtttctccccgtttttcaaagtcgctaaacgcgaccagagggcagaggagaggccggtaacctaagagtcctggctccgccccctccgcgtttggccttgcctgctcctcccaccaccacttcgctcagaggcggctactggctcaagaggacgacagaagccagtctctgatgcccaccgcattctccagcttcaggcctcaagccctgtagccgagaaggcgaggcctaatgttacaccaccggtctgttccgcctccgtttcggggtccacccgaaaagctttcagatcggatcctcggtgagacggcactcgattaaataggtctgtctctacagccaaggaggcgggtttggtgcggccactccaaggccaaagcgagaaaatcttactgcgcacgcgcaatagacagccgatggagccaccgatggagccgtccggaggggagcaagagcccggagccgtcaggttcctggacctgccctgggaagacgtgctgctcccacacgtcctgaaccgggtcccgctgcgccagctgctccggctgcagcgcgttagccgggccttccggtcgctggtgcagcttcacctggccgggctgcgtcgcttcgatgccgcgcaggtgggtccgcagatcccgcgggccgcattggcccggctgctgcgggatgccgaggggctgcaggagctggcactggcgccgtgtcacgaatggctgtcagacgaggacctggtgccggtgctggcgcggaatccgcagctgcggagtgtggcgttgggcggctgcgggcaactgagtcgccgggcgcttggggctttggccgagggctgcccacgcctgcagcgcctgtcgctcgcgcactgtgactgggtggacgggctggcgctgcgcggcctcgctgatcgctgcccggccctggaggagctggatctcaccgcctgccgccagctcaaggacgaggccatcgtgtacctggcgcagaggcgcggcgctggtctccgcagcctctctctggccgtcaacgccaacgtgggggacgccgcggttcaagagttggctcggaactgcccagaactccaccaccttgacctcaccggctgcctccgcgtcggaagcgacggtgtcaggacattggccgagtactgccccgtgctgcgttcgctgcgggtgcggcactgccaccatgtggcggagtccagcctgagccgcttgcggaagcgcggcgtggacatcgacgtggagccgccgctgcaccaggccctggtgctgctgcaggatatggcgggcttcgcaccttttgtcaacctgcaggtctgacccgcctgccaatcggagcacagctggactgtgtggctggggcctgacactgagctgtagggaaactgaactgtgaggacctctggtgagaggccagtgccctgccccaccctggagcttcaaataaagagctttttaccccc

SEQ ID NO: 279757 - DNA, 1364 bp, Homo sapiens
cggccgcgccaagcacacggtatgggtgtagactggacccgccccctaaatccaggagaccatcaactatggaaaggagatctagggaacaccgtcttgaacccgccaggggttttgagtctcggacccaggagatccaaccctgaccaccctcccaggatgcagcagggggatgttaaatcagacttcaggaagaacttccttgctgcctgagttaggtgtcgtcacgcctgcccaggggccaaggaggcgggtttggtgcggccactccaaggccaaagcgagaaaatcttactgcgcacgcgcaatagacagccgatggagccaccgatggagccgtccggaggggagcaagagcccggagccgtcaggttcctggacctgccctgggaagacgtgctgctcccacacgtcctgaaccgggtcccgctgcgccagctgctccggctgcagcgcgttagccgggccttccggtcgctggtgcagcttcacctggccgggctgcgtcgcttcgatgccgcgcaggtgggtccgcagatcccgcgggccgcattggcccggctgctgcgggatgccgaggggctgcaggagctggcactggcgccgtgtcacgaatggctgtcagacgaggacctggtgccggtgctggcgcggaatccgcagctgcggagtgtggcgttgggcggctgcgggcaactgagtcgccgggcgcttggggctttggccgagggctgcccacgcctgcagcgcctgtcgctcgcgcactgtgactgggtggacgggctggcgctgcgcggcctcgctgatcgctgcccggccctggaggagctggatctcaccgcctgccgccagctcaaggacgaggccatcgtgtacctggcgcagaggcgcggcgctggtctccgcagcctctctctggccgtcaacgccaacgtgggggacgccgcggttcaagagttggctcggaactgcccagaactccaccaccttgacctcaccggctgcctccgcgtcggaagcgacggtgtcaggacattggccgagtactgccccgtgctgcgttcgctgcgggtgcggcactgccaccatgtggcggagtccagcctgagccgcttgcggaagcgcggcgtggacatcgacgtggagccgccgctgcaccaggccctggtgctgctgcaggatatggcgggcttcgcaccttttgtcaacctgcaggtctgacccgcctgccaatcggagcacagctggactgtgtggctggggcctgacactgagctgtagggaaactgaactgtgaggacctctggtgagaggccagtgccctgccccaccctggagcttcaaataaagagctttttaccccc

SEQ ID NO: 279758 - DNA, 2785 bp, Homo sapiens
cggccgcgccaagcacacggtatgggtgtagactggacccgccccctaaatccaggagaccatcaactatggaaaggagatctagggaacaccgtcttgaacccgccaggggttttgagtctcggacccaggagatccaaccctgaccaccctcccaggatgcagcagggggatgttaaatcagacttcaggaagaacttccttgctgcctgagttaggtgtcgtcacgcctgcccagggcttctcccttctcgctgccttgcggggtggggaaacgtggaaggaattctgggaaaaccagatgtctgggttctctattcccgtctggcttgattctggacaaggggcttcctctccagggcctcggtttccccatctttaaaatggactgatagcatagacctgcccacctttcagaggtgcccgaagccttgacgagataacagatgagaagtggttttcgttgtgatgagccagctgaagcggttgcaccggagcgccagaccgtcagcggtgcagtggctctcgcgtccttcacatccccccacacccatcccgtggatgatgggggaaggcactactcctggggttccccgaagcggatcctgggactgggacctggggacgcggactctggacctttggaggaaatgaaagggacccagttggaaatatagtctttcttcgcgccccctacatctctctccagcgggggaacgcggcccaaactgttacgaagtggaagaggctggatagctcttcataattaatcaggaatgggaggtttgagcaggtttacttgatgagggaaacattatagcctcgccaattcattcattatttcaacaattacttattgaacacctgctacgtggcagacagtaagagcctggatagtttctccccgtttttcaaagtcgctaaacgcgaccagagggcagaggagaggccggtaacctaagagtcctggctccgccccctccgcgtttggccttgcctgctcctcccaccaccacttcgctcagaggcggctactggctcaagaggacgacagaagccagtctctgatgcccaccgcattctccagcttcaggcctcaagccctgtagccgagaaggcgaggcctaatgttacaccaccggtctgttccgcctccgtttcggggtccacccgaaaagctttcagatcggatcctcggtgagacggcactcgattaaataggtctgtctctacagccaaggaggcgggtttggtgcggccactccaaggccaaagcgagaaaatcttactgcgcacgcgcaatagacagccgatggagccaccgatggagccgtccggaggggagcaagagcccggagccgtcaggttcctggacctgccctgggaagacgtgctgctcccacacgtcctgaaccgggtcccgctgcgccagctgctccggctgcagcgcgttagccgggccttccggtcgctggtgcagcttcacctggccgggctgcgtcgcttcgatgccgcgcaggtgggtccgcagatcccgcgggccgcattggcccggctgctgcgggatgccgaggggctgcaggagctggcactggcgccgtgtcacgaatggctgtcagacgaggacctggtgccggtgctggcgcggaatccgcagctgcggagtgtggcgttgggcggctgcgggcaactgagtcgccgggcgcttggggctttggccgagggctgcccacgcctgcagcgcctgtcgctcgcgcactgtgactgggtggacgggctggcgctgcgcggcctcgctgatcgctgcccggccctggaggagctggatctcaccgcctgccgccagctcaaggacgaggccatcgtgtacctggcgcagaggcgcggcgctggtctccgcagcctctctctggccgtcaacgccaacgtgggggacgccgcggttcaagagttggctcggaactgcccagaactccaccaccttgacctcaccggctgcctccgcgtcggaagcgacggtgtcaggacattggccgagtactgccccgtgctgcgttcgctgcgggtgcggcactgccaccatgtggcggagtccagcctgagccgcttgcggaagcgcggcgtggacatcgacgtggagccgccgctgcaccaggccctggtgctgctgcaggatatggcgggcttcgcaccttttgtcaacctgcaggtctgacccgcctgccaatcggagcacagctggactgtgtggctggggcctgacactgagctgtagggaaactgaactgtgaggacctctggtgagaggccagtgccctgccccaccctggagcttcaaataaagagctttttacccccaaaaaaaaaaaaaaaaaaacaaaaaaaacaaaaaaagaagaagagaaaaaaaaaacgaaaacaagaaacagaaaacaaaacatacagccatcattactcacaacaccaacatacatcaaacacacaacatacatacaactccaatacttctcgtaccccttctcccaccacacacgacgccttctctcgccctatataccaccaccataccactatccaccacctcccttaccctacccccacgcgccacgggcgacacgcgaccgcggggcggccatagcgggcgagggagtcgggcggggcggtggtacgtagtgcctatggctactcgacctcccgtggcgaggccccacagcgcccgaccaccccctctacgcgtgggcatctacctgcccgcggcgcgtggacggagcattcccggacacag

SEQ ID NO: 279759 - DNA, 1610 bp, Homo sapiens
tgtcctcccagctaccccctccctaagcaggctgaggaagaagagatagcaagccctcacctaacttgacccctttcttgtctctccccgctgctagcttctcccttctcgctgccttgcggggtggggaaacgtggaaggaattctgggaaaaccagatgtctgggttctctattcccgtctggcttgattctggacaaggggcttcctctccagggcctcggtttccccatctttaaaatggactgatagcatagacctgcccacctttcagaggtgcccgaagccttgacgagataacagatgagaagtggttttcgttgtgatgagccagctgaagcggttgcaccggagcgccagaccgtcagcggtgcagtggctctcgcgtccttcacatccccccacacccatcccgtggatgatgggggaaggcactactcctggggttccccgaagcggatcctgggactgggacctggggacgcggccaaggaggcgggtttggtgcggccactccaaggccaaagcgagaaaatcttactgcgcacgcgcaatagacagccgatggagccaccgatggagccgtccggaggggagcaagagcccggagccgtcaggttcctggacctgccctgggaagacgtgctgctcccacacgtcctgaaccgggtcccgctgcgccagctgctccggctgcagcgcgttagccgggccttccggtcgctggtgcagcttcacctggccgggctgcgtcgcttcgatgccgcgcaggtgggtccgcagatcccgcgggccgcattggcccggctgctgcgggatgccgaggggctgcaggagctggcactggcgccgtgtcacgaatggctgtcagacgaggacctggtgccggtgctggcgcggaatccgcagctgcggagtgtggcgttgggcggctgcgggcaactgagtcgccgggcgcttggggctttggccgagggctgcccacgcctgcagcgcctgtcgctcgcgcactgtgactgggtggacgggctggcgctgcgcggcctcgctgatcgctgcccggccctggaggagctggatctcaccgcctgccgccagctcaaggacgaggccatcgtgtacctggcgcagaggcgcggcgctggtctccgcagcctctctctggccgtcaacgccaacgtgggggacgccgcggttcaagagttggctcggaactgcccagaactccaccaccttgacctcaccggctgcctccgcgtcggaagcgacggtgtcaggacattggccgagtactgccccgtgctgcgttcgctgcgggtgcggcactgccaccatgtggcggagtccagcctgagccgcttgcggaagcgcggcgtggacatcgacgtggagccgccgctgcaccaggccctggtgctgctgcaggatatggcgggcttcgcaccttttgtcaacctgcaggtctgacccgcctgccaatcggagcacagctggactgtgtggctggggcctgacactgagctgtagggaaactgaactgtgaggacctctggtgagaggccagtgccctgccccaccctggagcttcaaataaagagctttttaccccc

SEQ ID NO: 279760 - DNA, 2869 bp, Homo sapiens
cggccgcgccaagcacacggtatgggtgtagactggacccgccccctaaatccaggagaccatcaactatggaaaggagatctagggaacaccgtcttgaacccgccaggggttttgagtctcggacccaggagatccaaccctgaccaccctcccaggatgcagcagggggatgttaaatcagacttcaggaagaacttccttgctgcctgagttaggtgtcgtcacgcctgcccagggcttctcccttctcgctgccttgcggggtggggaaacgtggaaggaattctgggaaaaccagatgtctgggttctctattcccgtctggcttgattctggacaaggggcttcctctccagggcctcggtttccccatctttaaaatggactgatagcatagacctgcccacctttcagaggtgcccgaagccttgacgagataacagatgagaagtggttttcgttgtgatgagccagctgaagcggttgcaccggagcgccagaccgtcagcggtgcagtggctctcgcgtccttcacatccccccacacccatcccgtggatgatgggggaaggcactactcctggggttccccgaagcggatcctgggactgggacctggggacgcggactctggacctttggaggaaatgaaagggacccagttggaaatatagtctttcttcgcgccccctacatctctctccagcgggggaacgcggcccaaactgttacgaagtggaagaggctggatagctcttcataattaatcaggaatgggaggtttgagcaggtttacttgatgagggaaacattatagcctcgccaattcattcattatttcaacaattacttattgaacacctgctacgtggcagacagtaagagcctggatagtttctccccgtttttcaaagtcgctaaacgcgaccagagggcagaggagaggccggtaacctaagagtcctggctccgccccctccgcgtttggccttgcctgctcctcccaccaccacttcgctcagaggcggctactggctcaagaggacgacagaagccagtctctgatgcccaccgcattctccagcttcaggcctcaagccctgtagccgagaaggcgaggcctaatgttacaccaccggtctgttccgcctccgtttcggggtccacccgaaaagctttcagatcggatcctcggtgagacggcactcgattaaataggtctgtctctacagccaaggaggcgggtttggtgcggccactccaaggccaaagcgagaaaatcttactgcgcacgcgcaatagacagccgatggagccaccgatggagccgtccggaggggagcaagagcccggagccgtcaggttcctggacctgccctgggaagacgtgctgctcccacacgtcctgaaccgggtcccgctgcgccagctgctccggctgcagcgcgttagccgggccttccggtcgctggtgcagcttcacctggccgggctgcgtcgcttcgatgccgcgcaggtgggtccgcagatcccgcgggccgcattggcccggctgctgcgggatgccgaggggctgcaggagctggcactggcgccgtgtcacgaatggctgtcagacgaggacctggtgccggtgctggcgcggaatccgcagctgcggagtgtggcgttgggcggctgcgggcaactgagtcgccgggcgcttggggctttggccgagggctgcccacgcctgcagcgcctgtcgctcgcgcactgtgactgggtggacgggctggcgctgcgcggcctcgctgatcgctgcccggccctggaggagctggatctcaccgcctgccgccagctcaaggacgaggccatcgtgtacctggcgcagaggcgcggcgctggtctccgcagcctctctctggccgtcaacgccaacgtgggggacgccgcggttcaagagttggctcggaactgcccagaactccaccaccttgacctcaccggctgcctccgcgtcggaagcgacggtgtcaggtgcctgggcctgatagggcgggaggagggcagtcacttagcctctgctggtatggggcgggctgtagttgttaaaaggccggactgagggttctgaatcttcctgcaaaccacagcacccccattctgaacagaaagggcctctaggattgcctaggccagagagcccatagtttaaaaacttttttcaaccaatgtttacacattgggagatttcacatagaaagtcgacttctggcttttcttcaacaagggggagatcttgcaatcctaggcggagctgagggccaggttccccccttaaatgagacaggaagtctccagctcactggaagccaatccaggcgcctcccttgtgtagggacggaaaaagtatgcccctgccccgagctggagggagaccgggattttgccggagccagtccgaggctgagtgagcccgggcctccaccttaccccaccaaaggtgtggtggcctcatgtccctagcctcaccctgctcctccctcaggacattggccgagtactgccccgtgctgcgttcgctgcgggtgcggcactgccaccatgtggcggagtccagcctgagccgcttgcggaagcgcggcgtggacatcgacgtggagccgccgctgcaccaggccctggtgctgctgcaggatatggcgggcttcgcaccttttgtcaacctgcaggtctgacccgcctgccaatcggagcacagctggactgtgtggctggggcctgacactgagctgtagggaaactgaactgtgaggacctctggtgagaggccagtgccctgccccaccctggagcttcaaataaagagctttttaccccc

SEQ ID NO: 279761 - DNA, 584 bp, Homo sapiens
ggccgagagggaagaggaacctgagggaggggagccgagccggggctgggtctgggggccgctcttgggagctggggcgcaggaacataacggaggcggactcgcaggtaatagtggccccgggacgccagtgccaacgcccctttactcgcaggttcctggacctgccctgggaagacgtgctgctcccacacgtcctgaaccgggtcccgctgcgccagctgctccggctgcagcgcgttagccgggccttccggtcgctggtgcagcttcacctggccgggctgcgtcgcttcgatgccgcgcaggtgagccgggggctgaagccccgcccctgcctgggtaccgccccgcctctagcccagcccccagccccgcagtatgcccttctggacccccttgggccgccggggctgcccggaagggatccacgcaccaaagggcaaatactcggtagcgactcagagggaaagtggggtctctcctgggagagcaggaggctgccagaaaagaactcaggtcaggggtgcataggcggctgaggagtgcgggacgggctgagagttggggtgcctccccgcccg

SEQ ID NO: 279762 - DNA, 2358 bp, Homo sapiens
cggccgcgccaagcacacggtatgggtgtagactggacccgccccctaaatccaggagaccatcaactatggaaaggagatctagggaacaccgtcttgaacccgccaggggttttgagtctcggacccaggagatccaaccctgaccaccctcccaggatgcagcagggggatgttaaatcagacttcaggaagaacttccttgctgcctgagttaggtgtcgtcacgcctgcccagggcttctcccttctcgctgccttgcggggtggggaaacgtggaaggaattctgggaaaaccagatgtctgggttctctattcccgtctggcttgattctggacaaggggcttcctctccagggcctcggtttccccatctttaaaatggactgatagcatagacctgcccacctttcagaggtgcccgaagccttgacgagataacagatgagaagtggttttcgttgtgatgagccagctgaagcggttgcaccggagcgccagaccgtcagcggtgcagtggctctcgcgtccttcacatccccccacacccatcccgtggatgatgggggaaggcactactcctggggttccccgaagcggatcctgggactgggacctggggacgcggactctggacctttggaggaaatgaaagggacccagttggaaatatagtctttcttcgcgccccctacatctctctccagcgggggaacgcggcccaaactgttacgaagtggaagaggctggatagctcttcataattaatcaggaatgggaggtttgagcaggtttacttgatgagggaaacattatagcctcgccaattcattcattatttcaacaattacttattgaacacctgctacgtggcagacagtaagagcctggatagtttctccccgtttttcaaagtcgctaaacgcgaccagagggcagaggagaggccggtaacctaagagtcctggctccgccccctccgcgtttggccttgcctgctcctcccaccaccacttcgctcagaggcggctactggctcaagaggacgacagaagccagtctctgatgcccaccgcattctccagcttcaggcctcaagccctgtagccgagaaggcgaggcctaatgttacaccaccggtctgttccgcctccgtttcggggtccacccgaaaagctttcagatcggatcctcggtgagacggcactcgattaaataggtctgtctctacagccaaggaggcgggtttggtgcggccactccaaggccaaagcgagaaaatcttactgcgcacgcgcaatagacagccgatggagccaccgatggagccgtccggaggggagcaagagcccggagccgtcaggttcctggacctgccctgggaagacgtgctgctcccacacgtcctgaaccgggtcccgctgcgccagctgctccggctgcagcgcgttagccgggccttccggtcgctggtgcagcttcacctggccgggctgcgtcgcttcgatgccgcgcaggtgggtccgcagatcccgcgggccgcattggcccggctgctgcgggatgccgaggggctgcaggagctggcactggcgccgtgtcacgaatggctgtcagacgaggacctggtgccggtgctggcgcggaatccgcagctgcggagtgtggcgttgggcggctgcgggcaactgagtcgccgggcgcttggggctttggccgagggctgcccacgcctgcagcgcctgtcgctcgcgcactgtgactgggtggacgggctggcgctgcgcggcctcgctgatcgctgcccggccctggaggagctggatctcaccgcctgccgccagctcaaggacgaggccatcgtgtacctggcgcagaggcgcggcgctggtctccgcagcctctctctggccgtcaacgccaacgtgggggacgccgcggttcaagagttggctcggaactgcccagaactccaccaccttgacctcaccggctgcctccgcgtcggaagcgacggtgtcaggacattggccgagtactgccccgtgctgcgttcgctgcgggtgcggcactgccaccatgtggcggagtccagcctgagccgcttgcggaagcgcggcgtggacatcgacgtggagccgccgctgcaccaggccctggtgctgctgcaggatatggcgggcttcgcaccttttgtcaacctgcaggtctgacccgcctgccaatcggagcacagctggactgtgtggctggggcctgacactgagctgtagggaaactgaactgtgaggacctctggtgagaggccagtgccctgccccaccctggagcttcaaataaagagctttttaccccc

SEQ ID NO: 279763 - DNA, 2265 bp, Homo sapiens
cggccgcgccaagcacacggtatgggtgtagactggacccgccccctaaatccaggagaccatcaactatggaaaggagatctagggaacaccgtcttgaacccgccaggggttttgagtctcggacccaggagatccaaccctgaccaccctcccaggatgcagcagggggatgttaaatcagacttcaggaagaacttccttgctgcctgagttaggtgtcgtcacgcctgcccagggcttctcccttctcgctgccttgcggggtggggaaacgtggaaggaattctgggaaaaccagatgtctgggttctctattcccgtctggcttgattctggacaaggggcttcctctccagggcctcggtttccccatctttaaaatggactgatagcatagacctgcccacctttcagaggtgcccgaagccttgacgagataacagatgagaagtggttttcgttgtgatgagccagctgaagcggttgcaccggagcgccagaccgtcagcggtgcagtggctctcgcgtccttcacatccccccacacccatcccgtggatgatgggggaaggcactactcctggggttccccgaagcggatcctgggactgggacctggggacgcggactctggacctttggaggaaatgaaagggacccagttggaaatatagtctttcttcgcgccccctacatctctctccagcgggggaacgcggcccaaactgttacgaagtggaagaggctggatagctcttcataattaatcaggaatgggaggtttgagcaggtttacttgatgagggaaacattatagcctcgccaattcattcattatttcaacaattacttattgaacacctgctacgtggcagacagtaagagcctggatagtttctccccgtttttcaaagtcgctaaacgcgaccagagggcagaggagaggccggtaacctaagagtcctggctccgccccctccgcgtttggccttgcctgctcctcccaccaccacttcgctcagaggcggctactggctcaagaggacgacagaagccagtctctgatgcccaccgcattctccagcttcaggcctcaagccctgtagccgagaaggcgaggcctaatgttacaccaccggccaaggaggcgggtttggtgcggccactccaaggccaaagcgagaaaatcttactgcgcacgcgcaatagacagccgatggagccaccgatggagccgtccggaggggagcaagagcccggagccgtcaggttcctggacctgccctgggaagacgtgctgctcccacacgtcctgaaccgggtcccgctgcgccagctgctccggctgcagcgcgttagccgggccttccggtcgctggtgcagcttcacctggccgggctgcgtcgcttcgatgccgcgcaggtgggtccgcagatcccgcgggccgcattggcccggctgctgcgggatgccgaggggctgcaggagctggcactggcgccgtgtcacgaatggctgtcagacgaggacctggtgccggtgctggcgcggaatccgcagctgcggagtgtggcgttgggcggctgcgggcaactgagtcgccgggcgcttggggctttggccgagggctgcccacgcctgcagcgcctgtcgctcgcgcactgtgactgggtggacgggctggcgctgcgcggcctcgctgatcgctgcccggccctggaggagctggatctcaccgcctgccgccagctcaaggacgaggccatcgtgtacctggcgcagaggcgcggcgctggtctccgcagcctctctctggccgtcaacgccaacgtgggggacgccgcggttcaagagttggctcggaactgcccagaactccaccaccttgacctcaccggctgcctccgcgtcggaagcgacggtgtcaggacattggccgagtactgccccgtgctgcgttcgctgcgggtgcggcactgccaccatgtggcggagtccagcctgagccgcttgcggaagcgcggcgtggacatcgacgtggagccgccgctgcaccaggccctggtgctgctgcaggatatggcgggcttcgcaccttttgtcaacctgcaggtctgacccgcctgccaatcggagcacagctggactgtgtggctggggcctgacactgagctgtagggaaactgaactgtgaggacctctggtgagaggccagtgccctgccccaccctggagcttcaaataaagagctttttaccccc

SEQ ID NO: 279764 - DNA, 2005 bp, Homo sapiens
cggccgcgccaagcacacggtatgggtgtagactggacccgccccctaaatccaggagaccatcaactatggaaaggagatctagggaacaccgtcttgaacccgccaggggttttgagtctcggacccaggagatccaaccctgaccaccctcccaggatgcagcagggggatgttaaatcagacttcaggaagaacttccttgctgcctgagttaggtgtcgtcacgcctgcccagggcttctcccttctcgctgccttgcggggtggggaaacgtggaaggaattctgggaaaaccagatgtctgggttctctattcccgtctggcttgattctggacaaggggcttcctctccagggcctcggtttccccatctttaaaatggactgatagcatagacctgcccacctttcagaggtgcccgaagccttgacgagataacagatgagaagtggttttcgttgtgatgagccagctgaagcggttgcaccggagcgccagaccgtcagcggtgcagtggctctcgcgtccttcacatccccccacacccatcccgtggatgatgggggaaggcactactcctggggttccccgaagcggatcctgggactgggacctggggacgcggactctggacctttggaggaaatgaaagggacccagttggaaatatagtctttcttcgcgccccctacatctctctccagcgggggaacgcggcccaaactgttacgaagtggaagaggctggatagctcttcataattaatcaggaatgggaggtttgagcaggtttacttgatgagggaaacattatagcctcgccaattcattcattatttcaacaattacttattgaacacctgctacgtggcagacagccaaggaggcgggtttggtgcggccactccaaggccaaagcgagaaaatcttactgcgcacgcgcaatagacagccgatggagccaccgatggagccgtccggaggggagcaagagcccggagccgtcaggttcctggacctgccctgggaagacgtgctgctcccacacgtcctgaaccgggtcccgctgcgccagctgctccggctgcagcgcgttagccgggccttccggtcgctggtgcagcttcacctggccgggctgcgtcgcttcgatgccgcgcaggtgggtccgcagatcccgcgggccgcattggcccggctgctgcgggatgccgaggggctgcaggagctggcactggcgccgtgtcacgaatggctgtcagacgaggacctggtgccggtgctggcgcggaatccgcagctgcggagtgtggcgttgggcggctgcgggcaactgagtcgccgggcgcttggggctttggccgagggctgcccacgcctgcagcgcctgtcgctcgcgcactgtgactgggtggacgggctggcgctgcgcggcctcgctgatcgctgcccggccctggaggagctggatctcaccgcctgccgccagctcaaggacgaggccatcgtgtacctggcgcagaggcgcggcgctggtctccgcagcctctctctggccgtcaacgccaacgtgggggacgccgcggttcaagagttggctcggaactgcccagaactccaccaccttgacctcaccggctgcctccgcgtcggaagcgacggtgtcaggacattggccgagtactgccccgtgctgcgttcgctgcgggtgcggcactgccaccatgtggcggagtccagcctgagccgcttgcggaagcgcggcgtggacatcgacgtggagccgccgctgcaccaggccctggtgctgctgcaggatatggcgggcttcgcaccttttgtcaacctgcaggtctgacccgcctgccaatcggagcacagctggactgtgtggctggggcctgacactgagctgtagggaaactgaactgtgaggacctctggtgagaggccagtgccctgccccaccctggagcttcaaataaagagctttttaccccc

SEQ ID NO: 279765 - DNA, 1147 bp, Homo sapiens
ggccgagagggaagaggaacctgagggaggggagccgagccggggctgggtctgggggccgctcttgggagctggggcgcaggaacataacggaggcggactcgcaggtaatagtggccccgggacgccagtgccaacgcccctttactcgcaggttcctggacctgccctgggaagacgtgctgctcccacacgtcctgaaccgggtcccgctgcgccagctgctccggctgcagcgcgttagccgggccttccggtcgctggtgcagcttcacctggccgggctgcgtcgcttcgatgccgcgcaggtgggtccgcagatcccgcgggccgcattggcccggctgctgcgggatgccgaggggctgcaggagctggcactggcgccgtgtcacgaatggctgtcagacgaggacctggtgccggtgctggcgcggaatccgcagctgcggagtgtggcgttgggcggctgcgggcaactgagtcgccgggcgcttggggctttggccgagggctgcccacgcctgcagcgcctgtcgctcgcgcactgtgactgggtggacgggctggcgctgcgcggcctcgctgatcgctgcccggccctggaggagctggatctcaccgcctgccgccagctcaaggacgaggccatcgtgtacctggcgcagaggcgcggcgctggtctccgcagcctctctctggccgtcaacgccaacgtgggggacgccgcggttcaagagttggctcggaactgcccagaactccaccaccttgacctcaccggctgcctccgcgtcggaagcgacggtgtcaggacattggccgagtactgccccgtgctgcgttcgctgcgggtgcggcactgccaccatgtggcggagtccagcctgagccgcttgcggaagcgcggcgtggacatcgacgtggagccgccgctgcaccaggccctggtgctgctgcaggatatggcgggcttcgcaccttttgtcaacctgcaggtctgacccgcctgccaatcggagcacagctggactgtgtggctggggcctgacactgagctgtagggaaactgaactgtgaggacctctggtgagaggccagtgccctgccccaccctggagcttcaaataaagagctttttaccccc

SEQ ID NO: 279766 - DNA, 2407 bp, Homo sapiens
cggccgcgccaagcacacggtatgggtgtagactggacccgccccctaaatccaggagaccatcaactatggaaaggagatctagggaacaccgtcttgaacccgccaggggttttgagtctcggacccaggagatccaaccctgaccaccctcccaggatgcagcagggggatgttaaatcagacttcaggaagaacttccttgctgcctgagttaggtgtcgtcacgcctgcccagggcttctcccttctcgctgccttgcggggtggggaaacgtggaaggaattctgggaaaaccagatgtctgggttctctattcccgtctggcttgattctggacaaggggcttcctctccagggcctcggtttccccatctttaaaatggactgatagcatagacctgcccacctttcagaggtgcccgaagccttgacgagataacagatgagaagtggttttcgttgtgatgagccagctgaagcggttgcaccggagcgccagaccgtcagcggtgcagtggctctcgcgtccttcacatccccccacacccatcccgtggatgatgggggaaggcactactcctggggttccccgaagcggatcctgggactgggacctggggacgcggactctggacctttggaggaaatgaaagggacccagttggaaatatagtctttcttcgcgccccctacatctctctccagcgggggaacgcggcccaaactgttacgaagtggaagaggctggatagctcttcataattaatcaggaatgggaggtttgagcaggtttacttgatgagggaaacattatagcctcgccaattcattcattatttcaacaattacttattgaacacctgctacgtggcagacagtaagagcctggatagtttctccccgtttttcaaagtcgctaaacgcgaccagagggcagaggagaggccggtaacctaagagtcctggctccgccccctccgcgtttggccttgcctgctcctcccaccaccacttcgctcagaggcggctactggctcaagaggacgacagaagccagtctctgatgcccaccgcattctccagcttcaggcctcaagccctgtagccgagaaggcgaggcctaatgttacaccaccggtctgttccgcctccgtttcggggtccacccgaaaagctttcagatcggatcctcggtgagacggcactcgattaaataggtctgtctctacagccaaggaggcgggtttggtgcggccactccaaggccaaagcgagaaaatcttactgcgcacgcgcaatagacagccgatggagccaccgatggagccgtccggaggggagcaagagcccggagccgtcaggttcctggacctgccctgggaagacgtgctgctcccacacgtcctgaaccgggtcccgctgcgccagctgctccggctgcagcgcgttagccgggccttccggtcgctggtgcagcttcacctggccgggctgcgtcgcttcgatgccgcgcaggtgggtccgcagatcccgcgggccgcattggcccggctgctgcgggatgccgaggggctgcaggagctggcactggcgccgtgtcacgaatggctgtcagacgaggacctggtgccggtgctggcgcggaatccgcagctgcggagtgtggcgttgggcggctgcgggcaactgagtcgccgggcgcttggggctttggccgagggctgcccacgcctgcagcgcctgtcgctcgcgcactgtgactgggtggacgggctggcgctgcgcggcctcgctgatcgctgcccggccctggaggagctggatctcaccgcctgccgccagctcaaggacgaggccatcgtgtacctggcgcagaggcgcggcgctggtctccgcagcctctctctggccgtcaacgccaacgtgggggacgccgcggttcaagagttggctcggaactgcccagaactccaccaccttgacctcaccggctgcctccgcgtcggaagcgacggtgtcaggtgcctgggcctgatagggcgggaggagggcagtcacttagcctctgctggtatggggcgggctgtagttgttaaaaggccggactgagggttctgaatcttcctgcaaaccacagcacccccattctgaacagaaagggcctctaggattgcctaggccagagagcccatagtttaaaaacttttttcaaccaatgtttacacattgggagatttcacatagaaagtcgacttctggcttttcttcaacaagggggagatcttgcaatcctaggcggagctgagggccaatcgttgcaacgatggtcctcagctgaggtgtccaacttgaggtgactgtgaatatgaggcctgaggcagatctaactgctgtgaagaggct

SEQ ID NO: 279767 - DNA, 1066 bp, Homo sapiens
ggttcggacaccggcggcggctgcctggcctttccatgagcccgcggcggaccctcccgcgccccctctcgctctgcctctccctctgcctctgcctctgcctggccgcggctctgggaagtgcgcagtccgggtcgtgtagggataaaaagaactgtaaggtggtcttttcccagcaggaactgaggaagcggctaacacccctgcagtaccatgtcactcaggagaaagggaccgaaagtgcctttgaaggagaatacacacatcacaaagatcctggaatatataaatgtgttgtttgtggaactccattgtttaagtcagaaaccaaatttgactccggttcaggttggccttcattccacgatgtgatcaattctgaggcaatcacattcacagatgacttttcctatgggatgcacagggtggaaacaagctgctctcagtgtggtgctcaccttgggcacatttttgatgatgggcctcgtccaactgggaaaagatactgcataaattcggctgccttgtcttttacacctgcggatagcagtggcaccgccgagggaggcagtggggtcgccagcccggcccaggcagacaaagcggagctctagagtaatggagagtgatggaaacaaagtgtacttaatgcacagcttattaaaaaaatcaaaattgttatcttaatagatatattttttcaaaaactataagggcagttttgtgctattgatattttttcttcttttgcttaaacagaagccctggccatccatgtattttgcaattgactagatcaagaactgtttatagctttagcaaatggagacagctttgtgaaacttcttcacaagccacttataccctttggcattcttttctttgagcacatggcttcttttgcagtttttccccctttgattcagaagcagagggttcatggtcttcaaacatgaaaatagagatctcctctgcagtgtagagaccagagctgggcagtgcagggcatggagacctgcaagacacatggccttgaggcctttgcacagacccacctaagataagg

SEQ ID NO: 279768 - DNA, 848 bp, Homo sapiens
gaacagtgtaaggattggtatacacagtagttttcagaacaaaggttcatcagtgaaagggaggcatgctgcttgttggaatagagactggagatctattaggtaagtactcctttaaaattctgggaaggttggccttcattccacgatgtgatcaattctgaggcaatcacattcacagatgacttttcctatgggatgcacagggtggaaacaagctgctctcagtgtggtgctcaccttgggcacatttttgatgatgggcctcgtccaactgggaaaagatactgcataaattcggctgccttgtcttttacacctgcggatagcagtggcaccgccgagggaggcagtggggtcgccagcccggcccaggcagacaaagcggagctctagagtaatggagagtgatggaaacaaagtgtacttaatgcacagcttattaaaaaaatcaaaattgttatcttaatagatatattttttcaaaaactataagggcagttttgtgctattgatattttttcttcttttgcttaaacagaagccctggccatccatgtattttgcaattgactagatcaagaactgtttatagctttagcaaatggagacagctttgtgaaacttcttcacaagccacttataccctttggcattcttttctttgagcacatggcttcttttgcagtttttccccctttgattcagaagcagagggttcatggtcttcaaacatgaaaatagagatctcctctgcagtgtagagaccagagctgggcagtgcagggcatggagacctgcaagacacatggccttgaggcctttgcacagacccacctaagataagg

SEQ ID NO: 279769 - DNA, 682 bp, Homo sapiens
ggttcggacaccggcggcggctgcctggcctttccatgagcccgcggcggaccctcccgcgccccctctcgctctgcctctccctctgcctctgcctctgcctggccgcggctctgggaagtgcgcagtccgggtcgtgtagggataaaaagaactgtaaggtggtcttttcccagcaggaactgaggaagcggctaacacccctgcagtaccatgtcactcaggagaaagggaccgaaagtgcctttgaaggagaatacacacatcacaaagatcctggaatatataaatgtgttgtttgtggaactccattgtttaagttcttgtgcctgctgtgtcccaggttggccttcattccacgatgtgatcaattctgaggcaatcacattcacagatgacttttcctatgggatgcacagggtggaaacaagctgctctcagcaagaaggacctcaccagatgctgcccctcaatcttggatttcctggcctccagaactgtgagccaataaatttctattcattctgaattaaccagtctgtggtattctcttatagcagcacaaaatgaactgagacaggtgtgctcactcagtgaaaatgttttgaactgcatgcttatgcttatgaattgttaacttctctgcgtgcatgttacatttcaataaaaaaagtttactcag

SEQ ID NO: 279770 - DNA, 1948 bp, Homo sapiens
cggcggccgcgtcgggaccggccgcgatgggaccggaggcggcgcgggcggcggcggcgcagacaaaggcacgggcggcgtggagggcggcgcggagggcgcgggcccgggagccagggagcgagcggggcgcccggcagcgcggagtcagcgccgcgggggccgcacccgactcgcgcctggacactcgcggggcgccgacctggcagggggccaaaccagtgctcctgccacctctctggctgccccctagagcctgcccatcccagcctgaccaatgtccacagccagggagcagccaatcttcagcacacgggcgcacgtgttccaaattgacccagccaccaagcgaaactggatcccagcgggcaagcacgcactcactgtctcctatttctacgatgccacccgcaatgtgtaccgcatcatcagcatcggaggcgccaaggccatcatcaacagcactgtcactcccaacatgaccttcaccaaaacttcccagaagttcgggcagtgggccgacagtcgcgccaacacagtctacggcctgggctttgcctctgaacagcatctgacacagtttgccgagaagttccaggaagtgaaggaagcagccaggctggccagggagaaatctcaggatggcggggagctcaccagtccagccctggggctcgcctcccaccaggtgcccccgagccctctcgtcagtgccaacggccccggcgaggaaaaactgttccgcagccagagcgctgatgcccccggccccacagagcgcgagcggctaaagaagatgttgtctgagggctccgtgggcgaggtacagtgggaggccgagtttttcgcactgcaggacagcaacaacaagctggcaggcgccctgcgagaggccaacgccgccgcagcccagtggaggcagcagctggaggctcagcgtgcagaggccgagcggctgcggcagcgggtggctgagctggaggctcaggcagcttcagaggtgacccccaccggtgagaaggaggggctgggccagggccagtcgctggaacagctggaagctctggtgcaaaccaaggaccaggagattcagaccctgaagagtcagactggggggccccgcgaggccctggaggctgccgagcgtgaggagactcagcagaaggtgcaggacctggagacccgcaatgcggagttggagcaccagctgcgggcgatggagcgcagcctggaggaggcacgggcagagcgggagcgggcgcgggctgaggtgggccgggcagcgcagctgctggacgtcaggctgtttgagctgagtgagctgcgtgagggcctggcccgcctggctgaggctgcgccctgagccggggctggttttctatgaacgattccggcctgggatgcgggccaggctgcaggcggcatagttgggcccattcgtcctggaaagggactggggggtcccaacttagccctgggtgggccgggccgggctgggctggggtgggccccagtcggctctggttgttggcagctttggggctgtttttgagcttctcattgtgtagaatttctagatcccccgattacatttctaagcgtgaaaaaaaaaaaaaaaaaaaaaaaaaaaaaaaaaaaaaaaaaaaaggggggggggggaaaaggattttcccggggggggcccacaatttagaggggataacccagtttttttgtacaaggggggcccatatagggggaggatattaaaaggagaagcgaagacggggggggtttaaacagagtgtggagtgggaacaagtgtcatgaggagattggggaaggaaccatcttgggggggtgcacatattgggacacactcatagaaatttaagcttagggaaattaaatttgagggttagggttaacagagatatgtgggtagaaatggcagggatgttggaattgt

SEQ ID NO: 279771 - DNA, 2184 bp, Homo sapiens
aggggtccggacgtcccggacccagggactggaggggtggcagggggtcctcgaagtttaggagtctaggacaacgcggaggaccggggtcccggacccagttagaggaggagtcacgaagggagtccccggagttaccgacctggggttggaggaggcagaagaggtgtcccccgaagttctggacccagagacagggggcgtcgcgggaatctcggaagttccagggtcagagcccgcgtcccggagttggggcgtgcactgggtgtcctgcctcgggtggggatgggatcctgaattaatattaacccccccgtcccccgcactcgggtgcatgggatggggcctcatccaccggccagattggggatcccgggcaccgggcggtgtcggacccccctccgggagccccgtggccggcggcatccgaggcgcatgactagttggggccaaaccagtgctcctgccacctctctggctgccccctagagcctgcccatcccagcctgaccaatgtccacagccagggagcagccaatcttcagcacacgggcgcacgtgttccaaattgacccagccaccaagcgaaactggatcccagcgggcaagcacgcactcactgtctcctatttctacgatgccacccgcaatgtgtaccgcatcatcagcatcggaggcgccaaggccatcatcaacagcactgtcactcccaacatgaccttcaccaaaacttcccagaagttcgggcagtgggccgacagtcgcgccaacacagtctacggcctgggctttgcctctgaacagcatctgacacagtttgccgagaagttccaggaagtgaaggaagcagccaggctggccagggagaaatctcaggatggcggggagctcaccagtccagccctggggctcgcctcccaccaggtgcccccgagccctctcgtcagtgccaacggccccggcgaggaaaaactgttccgcagccagagcgctgatgcccccggccccacagagcgcgagcggctaaagaagatgttgtctgagggctccgtgggcgaggtacagtgggaggccgagtttttcgcactgcaggacagcaacaacaagctggcaggcgccctgcgagaggccaacgccgccgcagcccagtggaggcagcagctggaggctcagcgtgcagaggccgagcggctgcggcagcgggtggctgagctggaggctcaggcagcttcagaggtgacccccaccggtgagaaggaggggctgggccagggccagtcgctggaacagctggaagctctggtgcaaaccaaggaccaggagattcagaccctgaagagtcagactggggggccccgcgaggccctggaggctgccgagcgtgaggagactcagcagaaggtgcaggacctggagacccgcaatgcggagttggagcaccagctgcgggcgatggagcgcagcctggaggaggcacgggcagagcgggagcgggcgcgggctgaggtgggccgggcagcgcagctgctggacgtcaggctgtttgagctgagtgagctgcgtgagggcctggcccgcctggctgaggctgcgccctgagccggggctggttttctatgaacgattccggcctgggatgcgggccaggctgcaggcggcatagttgggcccattcgtcctggaaagggactggggggtcccaacttagccctgggtgggccgggccgggctgggctggggtgggccccagtcggctctggttgttggcagctttggggctgtttttgagcttctcattgtgtagaatttctagatcccccgattacatttctaagcgtgaaaaaaaaaaaaaaaaaaaaaaaaaaaaaaaaaaaaaaaaaaaaggggggggggggaaaaggattttcccggggggggcccacaatttagaggggataacccagtttttttgtacaaggggggcccatatagggggaggatattaaaaggagaagcgaagacggggggggtttaaacagagtgtggagtgggaacaagtgtcatgaggagattggggaaggaaccatcttgggggggtgcacatattgggacacactcatagaaatttaagcttagggaaattaaatttgagggttagggttaacagagatatgtgggtagaaatggcagggatgttggaattgt

SEQ ID NO: 279772 - DNA, 1814 bp, Homo sapiens
cggcggccgcgtcgggaccggccgcgatgggaccggaggcggcgcgggcggcggcggcgcagacaaaggcacgggcgggccaaaccagtgctcctgccacctctctggctgccccctagagcctgcccatcccagcctgaccaatgtccacagccagggagcagccaatcttcagcacacgggcgcacgtgttccaaattgacccagccaccaagcgaaactggatcccagcgggcaagcacgcactcactgtctcctatttctacgatgccacccgcaatgtgtaccgcatcatcagcatcggaggcgccaaggccatcatcaacagcactgtcactcccaacatgaccttcaccaaaacttcccagaagttcgggcagtgggccgacagtcgcgccaacacagtctacggcctgggctttgcctctgaacagcatctgacacagtttgccgagaagttccaggaagtgaaggaagcagccaggctggccagggagaaatctcaggatggcggggagctcaccagtccagccctggggctcgcctcccaccaggtgcccccgagccctctcgtcagtgccaacggccccggcgaggaaaaactgttccgcagccagagcgctgatgcccccggccccacagagcgcgagcggctaaagaagatgttgtctgagggctccgtgggcgaggtacagtgggaggccgagtttttcgcactgcaggacagcaacaacaagctggcaggcgccctgcgagaggccaacgccgccgcagcccagtggaggcagcagctggaggctcagcgtgcagaggccgagcggctgcggcagcgggtggctgagctggaggctcaggcagcttcagaggtgacccccaccggtgagaaggaggggctgggccagggccagtcgctggaacagctggaagctctggtgcaaaccaaggaccaggagattcagaccctgaagagtcagactggggggccccgcgaggccctggaggctgccgagcgtgaggagactcagcagaaggtgcaggacctggagacccgcaatgcggagttggagcaccagctgcgggcgatggagcgcagcctggaggaggcacgggcagagcgggagcgggcgcgggctgaggtgggccgggcagcgcagctgctggacgtcaggctgtttgagctgagtgagctgcgtgagggcctggcccgcctggctgaggctgcgccctgagccggggctggttttctatgaacgattccggcctgggatgcgggccaggctgcaggcggcatagttgggcccattcgtcctggaaagggactggggggtcccaacttagccctgggtgggccgggccgggctgggctggggtgggccccagtcggctctggttgttggcagctttggggctgtttttgagcttctcattgtgtagaatttctagatcccccgattacatttctaagcgtgaaaaaaaaaaaaaaaaaaaaaaaaaaaaaaaaaaaaaaaaaaaaggggggggggggaaaaggattttcccggggggggcccacaatttagaggggataacccagtttttttgtacaaggggggcccatatagggggaggatattaaaaggagaagcgaagacggggggggtttaaacagagtgtggagtgggaacaagtgtcatgaggagattggggaaggaaccatcttgggggggtgcacatattgggacacactcatagaaatttaagcttagggaaattaaatttgagggttagggttaacagagatatgtgggtagaaatggcagggatgttggaattgt

SEQ ID NO: 279773 - DNA, 2427 bp, Homo sapiens
aggggtccggacgtcccggacccagggactggaggggtggcagggggtcctcgaagtttaggagtctaggacaacgcggaggaccggggtcccggacccagttagaggaggagtcacgaagggagtccccggagttaccgacctggggttggaggaggcagaagaggtgtcccccgaagttctggacccagagacagggggcgtcgcgggaatctcggaagttccagggtcagagcccgcgtcccggagttggggcgtgcactgggtgtcctgcctcgggtggggatgggatcctgaattaatattaacccccccgtcccccgcactcgggtgcatgggatggggcctcatccaccggccagattggggatcccgggcaccgggcggtgtcggacccccctccgggagccccgtggccggcggcatccgaggcgcatgactagttggggccaaaccagtgctcctgccacctctctggctgccccctagagcctgcccatcccagcctgaccaatgtccacagccagggagcagccaatcttcagcacacgggcgcacgtgttccaaattgacccagccaccaagcgaaactggatcccagcgggcaagcacgcactcactgtctcctatttctacgatgccacccgcaatgtgtaccgcatcatcagcatcggaggcgccaaggtcagggtggggtctgggtggggcagaggcaccaggagtcctggtgacaaccttgggtctggtggctggcttgctgtgtgcccaagggacaggaaaccctaagccttcccaggccctagtctctatctcctgaaagggttcagagtaaagaccttcaagaccctaatacaaggtaatacctggggggtttcatgtttgttagtatctgtcccatctaccttgaactttgttccccgaccctaggccatcatcaacagcactgtcactcccaacatgaccttcaccaaaacttcccagaagttcgggcagtgggccgacagtcgcgccaacacagtctacggcctgggctttgcctctgaacagcatctgacacagtttgccgagaagttccaggaagtgaaggaagcagccaggctggccagggagaaatctcaggatggcggggagctcaccagtccagccctggggctcgcctcccaccaggtgcccccgagccctctcgtcagtgccaacggccccggcgaggaaaaactgttccgcagccagagcgctgatgcccccggccccacagagcgcgagcggctaaagaagatgttgtctgagggctccgtgggcgaggtacagtgggaggccgagtttttcgcactgcaggacagcaacaacaagctggcaggcgccctgcgagaggccaacgccgccgcagcccagtggaggcagcagctggaggctcagcgtgcagaggccgagcggctgcggcagcgggtggctgagctggaggctcaggcagcttcagaggtgacccccaccggtgagaaggaggggctgggccagggccagtcgctggaacagctggaagctctggtgcaaaccaaggaccaggagattcagaccctgaagagtcagactggggggccccgcgaggccctggaggctgccgagcgtgaggagactcagcagaaggtgcaggacctggagacccgcaatgcggagttggagcaccagctgcgggcgatggagcgcagcctggaggaggcacgggcagagcgggagcgggcgcgggctgaggtgggccgggcagcgcagctgctggacgtcaggctgtttgagctgagtgagctgcgtgagggcctggcccgcctggctgaggctgcgccctgagccggggctggttttctatgaacgattccggcctgggatgcgggccaggctgcaggcggcatagttgggcccattcgtcctggaaagggactggggggtcccaacttagccctgggtgggccgggccgggctgggctggggtgggccccagtcggctctggttgttggcagctttggggctgtttttgagcttctcattgtgtagaatttctagatcccccgattacatttctaagcgtgaaaaaaaaaaaaaaaaaaaaaaaaaaaaaaaaaaaaaaaaaaaaggggggggggggaaaaggattttcccggggggggcccacaatttagaggggataacccagtttttttgtacaaggggggcccatatagggggaggatattaaaaggagaagcgaagacggggggggtttaaacagagtgtggagtgggaacaagtgtcatgaggagattggggaaggaaccatcttgggggggtgcacatattgggacacactcatagaaatttaagcttagggaaattaaatttgagggttagggttaacagagatatgtgggtagaaatggcagggatgttggaattgt

SEQ ID NO: 279774 - DNA, 1831 bp, Homo sapiens
aggggtccggacgtcccggacccagggactggaggggtggcagggggtcctcgaagtttaggagtctaggacaacgcggaggaccggggtcccggacccagttagaggaggagtcacgaagggagtccccggagttaccgacctggggttggaggaggcagaagaggtgtcccccgaagttctggacccagagacagggggcgtcgcgggaatctcggaagttccagggtcagagcccgcgtcccggagttggggcgtgcactgggtgtcctgcctcgggtggggatgggatcctgaattaatattaacccccccgtcccccgcactcgggtgcatgggatggggcctcatccaccggccagattggggatcccgggcaccgggcggtgtcggacccccctccgggagccccgtggccggcggcatccgaggcgcatgactagttggggccaaaccagtgctcctgccacctctctggctgccccctagagcctgcccatcccagcctgaccaatgtccacagccagggagcagccaatcttcagcacacgggcgcacgtgttccaaattgacccagccaccaagcgaaactggatcccagcgggcaagcacgcactcactgtctcctatttctacgatgccacccgcaatgtgtaccgcatcatcagcatcggaggcgccaaggccatcatcaacagcactgtcactcccaacatgaccttcaccaaaacttcccagaagttcgggcagtgggccgacagtcgcgccaacacagtctacggcctgggctttgcctctgaacagcatctgacacagtttgccgagaagttccaggaagtgaaggaagcagccaggctggccagggagaaatgcagcttcagaggtgacccccaccggtgagaaggaggggctgggccagggccagtcgctggaacagctggaagctctggtgcaaaccaaggaccaggagattcagaccctgaagagtcagactggggggccccgcgaggccctggaggctgccgagcgtgaggagactcagcagaaggtgcaggacctggagacccgcaatgcggagttggagcaccagctgcgggcgatggagcgcagcctggaggaggcacgggcagagcgggagcgggcgcgggctgaggtgggccgggcagcgcagctgctggacgtcaggctgtttgagctgagtgagctgcgtgagggcctggcccgcctggctgaggctgcgccctgagccggggctggttttctatgaacgattccggcctgggatgcgggccaggctgcaggcggcatagttgggcccattcgtcctggaaagggactggggggtcccaacttagccctgggtgggccgggccgggctgggctggggtgggccccagtcggctctggttgttggcagctttggggctgtttttgagcttctcattgtgtagaatttctagatcccccgattacatttctaagcgtgaaaaaaaaaaaaaaaaaaaaaaaaaaaaaaaaaaaaaaaaaaaaggggggggggggaaaaggattttcccggggggggcccacaatttagaggggataacccagtttttttgtacaaggggggcccatatagggggaggatattaaaaggagaagcgaagacggggggggtttaaacagagtgtggagtgggaacaagtgtcatgaggagattggggaaggaaccatcttgggggggtgcacatattgggacacactcatagaaatttaagcttagggaaattaaatttgagggttagggttaacagagatatgtgggtagaaatggcagggatgttggaattgt

SEQ ID NO: 279775 - DNA, 1779 bp, Homo sapiens
ggacgaagagaaaaaacgagaaaaaaaaaacaaagccaagggcgagaaggaaaaaagagaaacaagacaagaagagaagagaagacaaagaagaaacaagcaaggagatattttatataggatcgagtgcctggtgttatgtgtcggctatgagggcgtggagggcggcgcggagggcgcgggcccgggagccagggagcgagcggggcgcccggcagcgcggagtcagcgccgcgggggccgcacccgactcgcgcctggacactcgcggggcgccgacctggcagggcggccggaccctgcaagggggggccaaaaccaagtggctctttgcaacctctctggcgttggcccccttaagaggctgggccaatccaagcttgaccaatggttcccacaggcccaaggaggcagcccaaattttctcagccaacaccgggcgcacttttgttcccaaatattgacccccaaggccacgcggcgccaacgaggaagcgcggagcggcggtacaagacaggattggttgggtcgtgaggggccctccggggggggcgacggcgcaacaggggggagacgcgccggaaggttttttccggcactgggcagaggaaccagcaaacccaaacaaaggctgtggaagggcgccctgtgggagagagggccaaggccggcgggaggccccaagtggtgcggccacggcagggttgggagggcgcttccaacgggtgaaagagaggcccgagcggttttgcggcgcacgggggtggctgacgcttggaagggcctcagcggcaagcttcaaaagagttgagccccccacgggtgtgaacaagggacgggcgcttggtgccagggccccggtccgtggaaacccagcttgggaagccctcggggtgcaaccccaggggcccagggagattcagaccctgaagagtcagactggggggccccgcgaggccctggaggctgccgagcgtgaggagactcagcagaaggtgcaggacctggagacccgcaatgcggagttggagcaccagctgcgggcgatggagcgcagcctggaggaggcacgggcagagcgggagcgggcgcgggctgaggtgggccgggcagcgcagctgctggacgtcaggctgtttgagctgagtgagctgcgtgagggcctggcccgcctggctgaggctgcgccctgagccggggctggttttctatgaacgattccggcctgggatgcgggccaggctgcaggcggcatagttgggcccattcgtcctggaaagggactggggggtcccaacttagccctgggtgggccgggccgggctgggctggggtgggccccagtcggctctggttgttggcagctttggggctgtttttgagcttctcattgtgtagaatttctagatcccccgattacatttctaagcgtgaaaaaaaaaaaaaaaaaaaaaaaaaaaaaaaaaaaaaaaaaaaaggggggggggggaaaaggattttcccggggggggcccacaatttagaggggataacccagtttttttgtacaaggggggcccatatagggggaggatattaaaaggagaagcgaagacggggggggtttaaacagagtgtggagtgggaacaagtgtcatgaggagattggggaaggaaccatcttgggggggtgcacatattgggacacactcatagaaatttaagcttagggaaattaaatttgagggttagggttaacagagatatgtgggtagaaatggcagggatgttggaattgt

SEQ ID NO: 279776 - DNA, 1442 bp, Homo sapiens
ggacgaagagaaaaaacgagaaaaaaaaaacaaagccaagggcgagaaggaaaaaagagaaacaagacaagaagagaagagaagacaaagaagaaacaagcaaggagatattttatataggatcgagtgcctggtgttatgtgtcggctatgagggcgtggagggcggcgcggagggcgcgggcccgggagccagggagcgagcggggcgcccggcagcgcggagtcagcgccgcgggggccgcacccgactcgcgcctggacactcgcggggcgccgacctggcagggggccaaaccagtgctcctgccacctctctggctgccccctagagcctgcccatcccagcctgaccaatgtccacagccagggagcagccaatcttcagcacacgggcgcacgtgttccaaattgacccagccaccaagcgaaactggatcccagcgggcaagcacgcactcactgtctcctatttctacgatgccacccgcaatgtgtaccgcatcatcagcatcggaggcgccaaggccatcatcaacagcactgtcactcccaacatgaccttcaccaaaacttcccagaagttcgggcagtgggccgacagtcgcgccaacacagtctacggcctgggctttgcctctgaacagcatctgacacagtttgccgagaagttccaggaagtgaaggaagcagccaggctggccagggagaaatctcaggatggcggggagctcaccagtccagccctggggctcgcctcccaccaggtgcccccgagccctctcgtcagtgccaacggccccggcgaggaaaaactgttccgcagccagagcgctgatgcccccggccccacagagcgcgagcggtggttttctatgaacgattccggcctgggatgcgggccaggctgcaggcggcatagttgggcccattcgtcctggaaagggactggggggtcccaacttagccctgggtgggccgggccgggctgggctggggtgggccccagtcggctctggttgttggcagctttggggctgtttttgagcttctcattgtgtagaatttctagatcccccgattacatttctaagcgtgaaaaaaaaaaaaaaaaaaaaaaaaaaaaaaaaaaaaaaaaaaaaggggggggggggaaaaggattttcccggggggggcccacaatttagaggggataacccagtttttttgtacaaggggggcccatatagggggaggatattaaaaggagaagcgaagacggggggggtttaaacagagtgtggagtgggaacaagtgtcatgaggagattggggaaggaaccatcttgggggggtgcacatattgggacacactcatagaaatttaagcttagggaaattaaatttgagggttagggttaacagagatatgtgggtagaaatggcagggatgttggaattgt

SEQ ID NO: 279777 - DNA, 1506 bp, Homo sapiens
aggggtccggacgtcccggacccagggactggaggggtggcagggggtcctcgaagtttaggagtctaggacaacgcggaggaccggggtcccggacccagttagaggaggagtcacgaagggagtccccggagttaccgacctggggttggaggaggcagaagaggtgtcccccgaagttctggacccagagacagggggcgtcgcgggaatctcggaagttccagggtcagagcccgcgtcccggagttggggcgtgcactgggtgtcctgcctcgggtggggatgggatcctgaattaatattaacccccccgtcccccgcactcgggtgcatgggatggggcctcatccaccggccagattggggatcccgggcaccgggcggtgtcggacccccctccgggagccccgtggccggcggcatccgaggcgcatgactagttggggccaaaccagtgctcctgccacctctctggctgccccctagagcctgcccatcccagcctgaccaatgtccacagccagggagcagccaatcttcagcacacgggcgcacgtgttccaaattgacccagccaccaagcgaaactggatcccagcgggcaagcacgcactcactgtctcctatttctacgatgccacccgcaatgtgtaccgcatcatcagcatcggaggcgccaaggtcagggtggggtctgggtggggcagaggcaccaggagtcctggtgacaaccttgggtctggtggctggcttgctgtgtgcccaagggacaggaaaccctaagccttcccaggccctagtctctatctcctgaaagggttcagagtaaagaccttcaagaccctaatacaaggtaatacctggggggtttcatgtttgttagtatctgtcccatctaccttgaactttgttccccgaccctaggccatcatcaacagcactgtcactcccaacatgaccttcaccaaaacttcccagaagttcgggcagtgggccgacagtcgcgccaacacagtctacggcctgggctttgcctctgaacagcatctgacacagtttgccgagaagttccaggaagtgaaggaagcagccaggctggccagggagaaatctcattgtgtagaatttctagatcccccgattacatttctaagcgtgaaaaaaaaaaaaaaaaaaaaaaaaaaaaaaaaaaaaaaaaaaaaggggggggggggaaaaggattttcccggggggggcccacaatttagaggggataacccagtttttttgtacaaggggggcccatatagggggaggatattaaaaggagaagcgaagacggggggggtttaaacagagtgtggagtgggaacaagtgtcatgaggagattggggaaggaaccatcttgggggggtgcacatattgggacacactcatagaaatttaagcttagggaaattaaatttgagggttagggttaacagagatatgtgggtagaaatggcagggatgttggaattgt

SEQ ID NO: 279778 - DNA, 2026 bp, Homo sapiens
ggacgaagagaaaaaacgagaaaaaaaaaacaaagccaagggcgagaaggaaaaaagagaaacaagacaagaagagaagagaagacaaagaagaaacaagcaaggagatattttatataggatcgagtgcctggtgttatgtgtcggctatgagggcgtggagggcggcgcggagggcgcgggcccgggagccagggagcgagcggggcgcccggcagcgcggagtcagcgccgcgggggccgcacccgactcgcgcctggacactcgcggggcgccgacctggcagggggccaaaccagtgctcctgccacctctctggctgccccctagagcctgcccatcccagcctgaccaatgtccacagccagggagcagccaatcttcagcacacgggcgcacgtgttccaaattgacccagccaccaagcgaaactggatcccagcgggcaagcacgcactcactgtctcctatttctacgatgccacccgcaatgtgtaccgcatcatcagcatcggaggcgccaaggccatcatcaacagcactgtcactcccaacatgaccttcaccaaaacttcccagaagttcgggcagtgggccgacagtcgcgccaacacagtctacggcctgggctttgcctctgaacagcatctgacacagtttgccgagaagttccaggaagtgaaggaagcagccaggctggccagggagaaatctcaggatggcggggagctcaccagtccagccctggggctcgcctcccaccaggtgcccccgagccctctcgtcagtgccaacggccccggcgaggaaaaactgttccgcagccagagcgctgatgcccccggccccacagagcgcgagcggctaaagaagatgttgtctgagggctccgtgggcgaggtacagtgggaggccgagtttttcgcactgcaggacagcaacaacaagctggcaggcgccctgcgagaggccaacgccgccgcagcccagtggaggcagcagctggaggctcagcgtgcagaggccgagcggctgcggcagcgggtggctgagctggaggctcaggcagcttcagaggtgacccccaccggtgagaaggaggggctgggccagggccagtcgctggaacagctggaagctctggtgcaaaccaaggaccaggagattcagaccctgaagagtcagactggggggccccgcgaggccctggaggctgccgagcgtgaggagactcagcagaaggtgcaggacctggagacccgcaatgcggagttggagcaccagctgcgggcgatggagcgcagcctggaggaggcacgggcagagcgggagcgggcgcgggctgaggtgggccgggcagcgcagctgctggacgtcaggctgtttgagctgagtgagctgcgtgagggcctggcccgcctggctgaggctgcgccctgagccggggctggttttctatgaacgattccggcctgggatgcgggccaggctgcaggcggcatagttgggcccattcgtcctggaaagggactggggggtcccaacttagccctgggtgggccgggccgggctgggctggggtgggccccagtcggctctggttgttggcagctttggggctgtttttgagcttctcattgtgtagaatttctagatcccccgattacatttctaagcgtgaaaaaaaaaaaaaaaaaaaaaaaaaaaaaaaaaaaaaaaaaaaaggggggggggggaaaaggattttcccggggggggcccacaatttagaggggataacccagtttttttgtacaaggggggcccatatagggggaggatattaaaaggagaagcgaagacggggggggtttaaacagagtgtggagtgggaacaagtgtcatgaggagattggggaaggaaccatcttgggggggtgcacatattgggacacactcatagaaatttaagcttagggaaattaaatttgagggttagggttaacagagatatgtgggtagaaatggcagggatgttggaattgt

SEQ ID NO: 279779 - DNA, 1850 bp, Homo sapiens
ttgattgaaagttccatgacgggcacacctggtgatgggtcctgagatggaacctgcttggcctccctcagcctggcctgagggacactcatagtccctcctctctccctaggggccaaaccagtgctcctgccacctctctggctgccccctagagcctgcccatcccagcctgaccaatgtccacagccagggagcagccaatcttcagcacacgggcgcacgtgttccaaattgacccagccaccaagcgaaactggatcccagcgggcaagcacgcactcactgtctcctatttctacgatgccacccgcaatgtgtaccgcatcatcagcatcggaggcgccaaggccatcatcaacagcactgtcactcccaacatgaccttcaccaaaacttcccagaagttcgggcagtgggccgacagtcgcgccaacacagtctacggcctgggctttgcctctgaacagcatctgacacagtttgccgagaagttccaggaagtgaaggaagcagccaggctggccagggagaaatctcaggatggcggggagctcaccagtccagccctggggctcgcctcccaccaggtgcccccgagccctctcgtcagtgccaacggccccggcgaggaaaaactgttccgcagccagagcgctgatgcccccggccccacagagcgcgagcggctaaagaagatgttgtctgagggctccgtgggcgaggtacagtgggaggccgagtttttcgcactgcaggacagcaacaacaagctggcaggcgccctgcgagaggccaacgccgccgcagcccagtggaggcagcagctggaggctcagcgtgcagaggccgagcggctgcggcagcgggtggctgagctggaggctcaggcagcttcagaggtgacccccaccggtgagaaggaggggctgggccagggccagtcgctggaacagctggaagctctggtgcaaaccaaggaccaggagattcagaccctgaagagtcagactggggggccccgcgaggccctggaggctgccgagcgtgaggagactcagcagaaggtgcaggacctggagacccgcaatgcggagttggagcaccagctgcgggcgatggagcgcagcctggaggaggcacgggcagagcgggagcgggcgcgggctgaggtgggccgggcagcgcagctgctggacgtcaggctgtttgagctgagtgagctgcgtgagggcctggcccgcctggctgaggctgcgccctgagccggggctggttttctatgaacgattccggcctgggatgcgggccaggctgcaggcggcatagttgggcccattcgtcctggaaagggactggggggtcccaacttagccctgggtgggccgggccgggctgggctggggtgggccccagtcggctctggttgttggcagctttggggctgtttttgagcttctcattgtgtagaatttctagatcccccgattacatttctaagcgtgaaaaaaaaaaaaaaaaaaaaaaaaaaaaaaaaaaaaaaaaaaaaggggggggggggaaaaggattttcccggggggggcccacaatttagaggggataacccagtttttttgtacaaggggggcccatatagggggaggatattaaaaggagaagcgaagacggggggggtttaaacagagtgtggagtgggaacaagtgtcatgaggagattggggaaggaaccatcttgggggggtgcacatattgggacacactcatagaaatttaagcttagggaaattaaatttgagggttagggttaacagagatatgtgggtagaaatggcagggatgttggaattgt

SEQ ID NO: 279780 - DNA, 2076 bp, Homo sapiens
aggggtccggacgtcccggacccagggactggaggggtggcagggggtcctcgaagtttaggagtctaggacaacgcggaggaccggggtcccggacccagttagaggaggagtcacgaagggagtccccggagttaccgacctggggttggaggaggcagaagaggtgtcccccgaagttctggacccagagacagggggcgtcgcgggaatctcggaagttccagggtcagagcccgcgtcccggagttggggcgtgcactgggtgtcctgcctcgggtggggatgggatcctgaattaatattaacccccccgtcccccgcactcgggtgcatgggatggggcctcatccaccggccagattggggatcccgggcaccgggcggtgtcggacccccctccgggagccccgtggccggcggcatccgaggcgcatgactagttggggccaaaccagtgctcctgccacctctctggctgccccctagagcctgcccatcccagcctgaccaatgtccacagccagggagcagccaatcttcagcacacgggcgcacgtgttccaaattgacccagccaccaagcgaaactggatcccagcgggcaagcacgcactcactgtctcctatttctacgatgccacccgcaatgtgtaccgcatcatcagcatcggaggcgccaaggccatcatcaacagcactgtcactcccaacatgaccttcaccaaaacttcccagaagttcgggcagtgggccgacagtcgcgccaacacagtctacggcctgggctttgcctctgaacagcatctgacacaggtgcccccgagccctctcgtcagtgccaacggccccggcgaggaaaaactgttccgcagccagagcgctgatgcccccggccccacagagcgcgagcggctaaagaagatgttgtctgagggctccgtgggcgaggtacagtgggaggccgagtttttcgcactgcaggacagcaacaacaagctggcaggcgccctgcgagaggccaacgccgccgcagcccagtggaggcagcagctggaggctcagcgtgcagaggccgagcggctgcggcagcgggtggctgagctggaggctcaggcagcttcagaggtgacccccaccggtgagaaggaggggctgggccagggccagtcgctggaacagctggaagctctggtgcaaaccaaggaccaggagattcagaccctgaagagtcagactggggggccccgcgaggccctggaggctgccgagcgtgaggagactcagcagaaggtgcaggacctggagacccgcaatgcggagttggagcaccagctgcgggcgatggagcgcagcctggaggaggcacgggcagagcgggagcgggcgcgggctgaggtgggccgggcagcgcagctgctggacgtcaggctgtttgagctgagtgagctgcgtgagggcctggcccgcctggctgaggctgcgccctgagccggggctggttttctatgaacgattccggcctgggatgcgggccaggctgcaggcggcatagttgggcccattcgtcctggaaagggactggggggtcccaacttagccctgggtgggccgggccgggctgggctggggtgggccccagtcggctctggttgttggcagctttggggctgtttttgagcttctcattgtgtagaatttctagatcccccgattacatttctaagcgtgaaaaaaaaaaaaaaaaaaaaaaaaaaaaaaaaaaaaaaaaaaaaggggggggggggaaaaggattttcccggggggggcccacaatttagaggggataacccagtttttttgtacaaggggggcccatatagggggaggatattaaaaggagaagcgaagacggggggggtttaaacagagtgtggagtgggaacaagtgtcatgaggagattggggaaggaaccatcttgggggggtgcacatattgggacacactcatagaaatttaagcttagggaaattaaatttgagggttagggttaacagagatatgtgggtagaaatggcagggatgttggaattgt

SEQ ID NO: 279781 - DNA, 1322 bp, Homo sapiens
aggggtccggacgtcccggacccagggactggaggggtggcagggggtcctcgaagtttaggagtctaggacaacgcggaggaccggggtcccggacccagttagaggaggagtcacgaagggagtccccggagttaccgacctggggttggaggaggcagaagaggtgtcccccgaagttctggacccagagacagggggcgtcgcgggaatctcggaagttccagggtcagagcccgcgtcccggagttggggcgtgcactgggtgtcctgcctcgggtggggatgggatcctgaattaatattaacccccccgtcccccgcactcgggtgcatgggatggggcctcatccaccggccagattggggatcccgggcaccgggcggtgtcggacccccctccgggagccccgtggccggcggcatccgaggcgcatgactagttggggccaaaccagtgctcctgccacctctctggctgccccctagagcctgcccatcccagcctgaccaatgtccacagccagggagcagccaatcttcagcacacgggcgcacgtgttccaaattgacccagccaccaagcgaaactggatcccagcgggcaagcacgcactcactgtctcctatttctacgatgccacccgcaatgtgtaccgcatcatcagcatcggaggcgccaaggccatcatcaacagcactgtcactcccaacatgaccttcaccaaaacttcccagaagttcgggcagtgggccgacagtcgcgccaacacagtctacggcctgggctttgcctctgaacagcatctgacacagtttgccgagaagttccaggaagtgaaggaagcagccaggctggccagggagaaatgctggggtgggccccagtcggctctggttgttggcagctttggggctgtttttgagcttctcattgtgtagaatttctagatcccccgattacatttctaagcgtgaaaaaaaaaaaaaaaaaaaaaaaaaaaaaaaaaaaaaaaaaaaaggggggggggggaaaaggattttcccggggggggcccacaatttagaggggataacccagtttttttgtacaaggggggcccatatagggggaggatattaaaaggagaagcgaagacggggggggtttaaacagagtgtggagtgggaacaagtgtcatgaggagattggggaaggaaccatcttgggggggtgcacatattgggacacactcatagaaatttaagcttagggaaattaaatttgagggttagggttaacagagatatgtgggtagaaatggcagggatgttggaattgt

SEQ ID NO: 279782 - DNA, 383 bp, Homo sapiens
taggcccctgtggggtgtgcattttattcctggtgtgttgggcgccctaggatggctctgggcagaagagggacatgaaggtggtcagactctggatgcctcgggcaggactggtgatttgttggggcccccaaccctgcccaccctttcctggcaggacctggagacccgcaatgcggagttggagcaccagctgcgggcgatggagcgcagcctggaggaggcacgggcagagcgggagcgggcgcgggctgaggtgggccgggcagcgcagctgctggacgtcaggctgtttgagctgagtgagctgcgtgagggcctggcccgcctggctgaggctgcgccctgagccggggctggttttctatgaacgattccggcct

SEQ ID NO: 279783 - DNA, 696 bp, Homo sapiens
ggtgaactttggaataattttcttctcaccaataataattggatattctggctcggtgcagtggttcatgcttgtaatcccagcactttgaggggccaaggcaggaggatcgcttgaagccaggcgttcaagaccagcctgggcaacacagacctcatttctaccaaaaaaaccacaaaaagttagctggactggtggtacatgcctatagtcctagctattcaggaggctgaggtgggaggatgccttgagcctaggagttcaaggttacattgagctatgattacactactgcactccagcctgggtgacagagcaagaccccatctcaaatcataatgatgatgagtggatattttctcagtagctgtggagacaggatgattgatagcaagagtgcctgctctaactaaagcacctttctcaagcttttttaaaaaaactatctttgtggaaaaattcaaaagtatctgtttttattgccattttctcagatgcgtcttttttggtggtgacagagtaactatcacctgggcttaagaaatgaagatgttcttgttgtttcctaagactcctcggttcagttttactggtatggaatcctaagggtaaatcaatacactattttaaagggaaagattaaattcttaatctctaagaaaacaaattttgtataaaacaagagccaaagaactg

SEQ ID NO: 279784 - DNA, 1577 bp, Homo sapiens
gccctatctctttgaacaagttgccaaggatctagccaagaaagaagcagaacagtggtatctagacaccctgaagcaggctgggctggaggaagactttgtgagaaacaagggtcaaggcacccgggctgttcaagagaaagagaccaaaatcaaggattttcccaggttccaagaaactacaaaactcagcatcagagatccagagcagggtttagaaggatctctagaacagcctgcaagccccaggaaagtactggaggagctgtctcatcagtcaccagaaaatctcgtatcacttgcttaatcactacacttaaaattactgcttttgaaaaatattaagcagctaacttgggtttgagtcaaggcagggaaaacttgggttttgagtcatggctactgttagaggatggacaaatgaagagtagcagattaacaggccaggcgcagtggctcacgcctgtaatcccaacactttgggaggctgaggcaggcagatcatctgaggtcaggagtttgagaccagtccagccaacacggcaaaactccacctctactaaaaatacaaaaattagctgggcgtgatgacacgtgcctgtaatcctagctacttgggaagctgaggcaggagaatcacttgaacccaagaggcagaggttgtaatgagctgagatcactccacagcactccagcctgggcagcagagcaaaactctgtctgagaaaaaaaaagagcagcagataacagagaatagttcaaggaaatcaaagtggggaggctcaggtggagggatggtagcctaaagttaagggttcctgctttgtgcctcacacttagagaattaggtacagaaaagagagcacaggcccaaatgcctataaggggctagtgcagaaacataaatgcgtccatggagtgggtgtagacagtaggagatagtagacactggaaagtatcaaatcctgctggaatataggctcagagttactacatcaactacattttcatcaagccagaaatttgtatgctatcaactaatttaaaaattacttagaaatattgtatgggcaaaataaaatacatctgcatatcagatctagcccatgggggatgaaaaacttacaacttctagtacaggatttcttatcctcagtgctattaatattttgggccacctaattctttgttgagggttggggaagggaactgtcctgtacattgtagaatgtttagtagcatccctggccactacctgctagatgccagtagtacccctctccccagctgtgacaaccaaaaatgtctccagatattgcatatccccagggggcaaaaatgtgcctggctgagaaccactgctctaatataaatggctgcatgaagcaaaaactggcattctaagaatacaagtaattgccatgaacacagtctatgtactatgtgattatgcatgtcattaacaaattaagaatttaaaacaattctctcccgttatctgtttagaatgtgcctgtgtgtttatgtgagcatgaggttcattttaagtaaacttaaaatttcccagacaaccaaga

SEQ ID NO: 279785 - DNA, 451 bp, Homo sapiens
gccctatctctttgaacaagttgccaaggatctagccaagaaagaagcagaacagtggtatctagacaccctgaagcaggctgggctggaggaagactttgtgagaaacaagggtcaaggcacccgggctgttcaagagaaagagaccaaaatcaaggattttcccaggttccaagaaactacaaaactcagcatcagagatccagagcagggtttagaaggatctctagaacagcctgcaagccccagatgcgtcttttttggtggtgacagagtaactatcacctgggcttaagaaatgaagatgttcttgttgtttcctaagactcctcggttcagttttactggtatggaatcctaagggtaaatcaatacactattttaaagggaaagattaaattcttaatctctaagaaaacaaattttgtataaaacaagagccaaagaactg

SEQ ID NO: 279786 - DNA, 1617 bp, Homo sapiens
gccctatctctttgaacaagttgccaaggatctagccaagaaagaagcagaacagtggtatctagacaccctgaagcaggctgggctggaggaagactttgtgagaaacaagggtcaaggcacccgggctgttcaagagaaagagaccaaaatcaaggattttcccaggttccaagaaactacaaaactcagcatcagagatccagagcagggtttagaaggatctctagaacagcctgcaagccccaggaaagtactggaggagctgtctcatcagtcaccagaaaatctcgtatcacttgcttaatcactacacttaaaattactgcttttgaaaaatattaagcagctaacttgggtttgagtcaaggcagggaaaacttgggttttgagtcatggctactgttagaggatggacaaatgaagagtagcagattaacaggccaggcgcagtggctcacgcctgtaatcccaacactttgggaggctgaggcaggcagatcatctgaggtcaggagtttgagaccagtccagccaacacggcaaaactccacctctactaaaaatacaaaaattagctgggcgtgatgacacgtgcctgtaatcctagctacttgggaagctgaggcaggagaatcacttgaacccaagaggcagaggttgtaatgagctgagatcactccacagcactccagcctgggcagcagagcaaaactctgtctgagaaaaaaaaagagcagcagataacagagaatagttcaaggaaatcaaagtggggaggctcaggtggagggatggtagcctaaagttaagggttcctgctttgtgcctcacacttagagaattaggtacagaaaagagagcacaggcccaaatgcctataaggggctagtgcagaaacataaatgcgtccatggagtgggtgtagacagtaggagatagtagacactggaaagtatcaaatcctgctggaatataggctcagagttactacatcaactacattttcatcaagccagaaatttgtatgctatcaactaatttaaaaattacttagaaatattgtatgggcaaaataaaatacatctgcatatcagatctagcccatggggggaacttgaacaacaaacccttttaacacagcgtctccctaagcgtaaccagcggaatctctcgtctacatcccatccagggtgtgctattaatattttgggccacctaattctttgttgagggttggggaagggaactgtcctgtacattgtagaatgtttagtagcatccctggccactacctgctagatgccagtagtacccctctccccagctgtgacaaccaaaaatgtctccagatattgcatatccccagggggcaaaaatgtgcctggctgagaaccactgctctaatataaatggctgcatgaagcaaaaactggcattctaagaatacaagtaattgccatgaacacagtctatgtactatgtgattatgcatgtcattaacaaattaagaatttaaaacaattctctcccgttatctgtttagaatgtgcctgtgtgtttatgtgagcatgaggttcattttaagtaaacttaaaatttcccagacaaccaaga

SEQ ID NO: 279787 - DNA, 325 bp, Homo sapiens
ccaacttacagatgagtaaactgaaacatgaagtgaaatgacatctcaaggacagcagagagtgtgtacaggagccaggaggcctaggggctgaggttgggcgtggggtttgtggaaagtggcctctccaagtctctttcaactctgacattctggggatgaagatccggtaagcagctcatcacagagaaacctacagcccggtacccagaccgccccacctgccatcaagaatcaacaccacgcactccacccccaccactcccagccctgagaggggctctggccagccccgcaggtctcacctgctctaggccggatgggc

SEQ ID NO: 279788 - DNA, 230 bp, Homo sapiens
tccctgtcggctagctcgggtctggcccacggtgactgttacccctggggaatggggcagctctgatccatccaacgctgctgcactggagactgggtcagaaatcaggagtgaggacttgttgaaagaaataggaaggaatcagatcacataaatgctggccccaaatgtttgcatcataaacccattgcctaattttacagttgagaaaataaagctctctaaataac

SEQ ID NO: 279789 - DNA, 1734 bp, Homo sapiens
tattaataggatttattagttcaaattctttattaggatatgctaacaatgagactattatgatgaacccccacattttaaaccataggtttttatacaagtagcagtatcaaatttattgtaatattttactttgcacaaatcaaggaaatcctgattgaatctaggtagttacaaatggttttttaataattcactttgtactgtccagatattctttaattaaaatatccaaaattagaagaccagtagggcttttgtttcaaaagctaacaatacccaactactgcttgctttccttattatagacaaggcatgtgaggaacacctagacgtttttaaagccccaaaactaggatattgtgacacagaatgttttttattcagtgctgagatgggagtttatcccaagcgactgtcctggcccctcatacaattatagtggtgaccagtcaggggctgtgggtgaggagacctgccagaggtggctggaggcactttattgccagcctggcgggctggcgaaggcgccaatgaagtaaaatctggtgacacacttgagtttgcatgcggcattttattttattggttttttttaaaggaagagattataaaaagacatttcacattaaagatttgcagtcctgggacacagtttggaaaacactatttataaggttgcacatattacaaacagctcccaaatggtgaaactggtattctaagatgaaagcttaatgaacataatgaagtgaataaacgcgtgtgaactaatgtttaaaaagttagagcttgtctcaagtcagtacagctcttaagataataaatacagtaacactactttttatttctttgctcttttatccctttcaggttcgatttgctgctttgattactgtgttagcactggctgaaaaactaaaggagaattatattgtcttgctaccagaatccattcctttcttagcagagttgatggaaggtaattcccaaactattcccaaccattaaacaattaaggaataattcagtaaaattctgtgaaaatgtgcccaatgataatgcagatttggatataacgtgactagcagttgatccagtcctcatacaggcagctccagtctcaaatacaggcaggctcgagctcctgttttgagttgggtggagggagcaagttgcgaagtgaccacctcctgatcatttgagagtccgtttacagtgtaatcttcacgatcttttcttttgtggtggtttgtgatcatacaagcagattacagtagtgtttttaattaacctcatacatttatatgattgaagttttggtccccagattgtatggaaatgcctagtggcattaaggatgcggtaggatgtccacttttagtagcaaccgatgttcattcactactccatgttaggtgctttacttggattatctcacttaaaaaccacaacattttatctctgttttacaaaggaagaaactagaggcttaaaagatttcagttatttgacaaagatcacaagctagtgggtgtgacatggggagctgtgacagttctggaacataagtcttaggcccaggaaataacagtaaatgttattattaagggaggggtggtggagcaagtagatcagtcctttactgattcattgcttatctaagctacaaaagtacattctcctttgtttcttagctcttggaggggggaggtgtgagctactaaagcggtg

SEQ ID NO: 279790 - DNA, 3004 bp, Homo sapiens
tattggtgccaactctttttaacttgctatcaagatgtttagaacccttgccacaagagcagggaaatatggaatacaccaaacaattaattcttagttgtctgctcaacatctgccaaaaactatctccagatggtggcaaaatacccaaagatattttagatgaggagaagttcaacgtggagttgatagttcagtgcatccgcctttcggagatgccgcagacccatcaccatgcccttttacttttgggcactgttgctggaatatttccggataaagttttacacaatatcatgtctatttttacatttatgggagccaatgtcatgcgcctagatgatacttacagttttcaagttattaacaagacagtgaaaatggttattcccgcacttattcagtctgatagtggagattctatagaagtttcaagaaacgttgaagagattgtggtaaaaatcattagtgtatttgtggatgcgctgccacacgtcccggagcacaggcgcctgcccatccttgttcaacttgttgatacactgggtgcagagaaattcctctggattctcctcatcttgctttttgaacagtatgtcacaaaaacagtgctggcggctgcctatggcgaaaaggatgctattttagaagcagacactgaatttcggttttcagtctgttgtgagtttagtgtccagcatcagatacaaagcttgatgaatatcctccagtacttactaaagctgccagaggaaaaagaagaaaccattcccaaagcagtgtcatttaataagagtgaatcacaagaagaaatgctacaggtttttaatgtagagactcacactagcaagcaactgcggcattttaaatttttgtcagtgtccttcatgtctcagctcctgtcttccaataattttctgaaaaaggtagttgagagtggtggtcctgagattttaaaaggccttgaagagaggttgctggagaccgttctcggctatatcagtgcagttgcacagtccatggaaaggaacgcagacaaactcaccgtgaagttctggcgcgcgctccttagtaaagcttacgacctgttagataaggtcaatgccttgctgcccacagagacattcattcctgtgatcagagggctggtgggcaatcccctgccatctgttcgccgcaaagcgctggaccttttgaataacaagctgcagcaaaatatatcctggaagaagacaatagttacccgtttcctaaaactggttccagaccttttggccattgtgcagcgtaagaaaaaggaaggggaagaagaacaagcaatcaacagacagacagcgttgtataccttaaagcttttatgcaagaattttggtgcagaaaatccagatccttttgtcccagtgctgagcactgctgtgaaactgattgctccagagagaaaggaggagaagaatgtcttgggaagcgcgctgctgtgcatagcagaggtgacctccaccctggaggcgctggccatcccccagcttcccagcctgatgccatcgttgctgacaacaatgaagaacaccagcgagctggtctccagcgaggtctacctgctcagtgccttggctgctctgcagaaggttgtggagactctcccgcacttcatcagcccctatctggaaggcattctctcccaggtgattcatctggagaaaatcactagtgaaatgggttctgcgtcacaggctaatatccgtctcacatctcttaaaaagacactggctaccacacttgcaccccgagtcctgttgcccgccatcaaaaaaacttacaagcagattgagaagaactggaagaatcacatgggtccgtttatgagcatcttgcaagagcatattggggtgatgaagaaggaagagctcacctcccatcagtctcagctaaccgcctttttcctggaggccctggacttccgagcccagcactctgagaacgatctggaggaagttggaaaaacggaaaattgtatcattgactgtctagtagccatggttgtcaaactttccgaggtcacattcaggcccctgttcttcaagctgtttgattgggctaaaacagaagatgccccaaaggacaggttgttgacattttacaacttggcagattgcattgctgaaaagctgaaagggctttttactctgtttgccggccacttagtgaagccttttgctgacaccttggaccaggtgaacatctccaaaacagatgaagcattttttgactctgaaaatgaccctgaaaagtgctgcttgctgttgcagtttattttgaactgtttatacaaaatcttcctttttgatacccagcattttataagtaaagagagagcaggagccttgatgatgcctctggtggatcagctggaaaacaggcttgggggagaagagaaattccaggaacgggtgacaaagcacctgataccatgcatcgcacagttttcagtggccatggcggatgactctctttggaaaccactgaactaccagattctgctaaagacgagagactcctcgcctaaggttcgatttgctgctttgattactgtgttagcactggctgaaaaactaaaggagaattatattgtcttgctaccagaatccattcctttcttagcagagttgatggaagatgaatgtgaagaagtagaacatcagtgccaaaagactattcagcaactggaaactgtcctgggagagccactccagagctatttctaagactttctgtggtgtttcatactctactcagagttcacactcatatttcatatttttatttttgggtgttgggtgccatgttacttttggtgccttaatacacctacttggattacttacaaatgttttatcacttcgttacaaaatccccacctggcttgtgctgccacataagcctctcctgcctatcgtatagagctgcagaaagagtaaatgatacacggtatttttatacagactgc

SEQ ID NO: 279791 - DNA, 458 bp, Homo sapiens
catggagaaagaccctgtctctaaaaaaataaataaaattcttctggcaatttcttggggcccatctaaaagccttatcttgttcacctaaacttgttttgtggaagattacttgcacctactcattgtctctgcttgctgttttgcagtctgatagtggagattctatagaagtttcaagaaacgttgaagagattgtggtaaaaatcattagtgtatttgtggatgcgctgccacacgtcccggagcacaggcgcctgcccatccttgttcaacttgttgatacactgggtgcagagaaattcctctggattctcctcatcttgctttttgaacagtatgtcacaaaaacagtgctggcggctgcctatggcgaaaaggtcagaacctagggtgggaagataaggaaaatggtgatttctcacacagattttatgatattgtccagtttaaacatg

SEQ ID NO: 279792 - DNA, 3371 bp, Homo sapiens
tattggtgccaactctttttaacttgctatcaagatgtttagaacccttgccacaagagcagggaaatatggaatacaccaaacaattaattcttagttgtctgctcaacatctgccaaaaactatctccagatggtggcaaaatacccaaagatattttagatgaggagaagttcaacgtggagttgatagttcagtgcatccgcctttcggagatgccgcagacccatcaccatgcccttttacttttgggcactgttgctggaatatttccggataaagttttacacaatatcatgtctatttttacatttatgggagccaatgtcatgcgcctagatgatacttacagttttcaagttattaacaagacagtgaaaatggttattcccgcacttattcagtctgatagtggagattctatagaagtttcaagaaacgttgaagagattgtggtaaaaatcattagtgtatttgtggatgcgctgccacacgtcccggagcacaggcgcctgcccatccttgttcaacttgttgatacactgggtgcagagaaattcctctggattctcctcatcttgctttttgaacagtatgtcacaaaaacagtgctggcggctgcctatggcgaaaaggatgctattttagaagcagacactgaatttcggttttcagtctgttgtgagtttagtgtccagcatcagatacaaagcttgatgaatatcctccagtacttactaaagctgccagaggaaaaagaagaaaccattcccaaagcagtgtcatttaataagagtgaatcacaagaagaaatgctacaggtttttaatgtagagactcacactagcaagcaactgcggcattttaaatttttgtcagtgtccttcatgtctcagctcctgtcttccaataattttctgaaaaaggtagttgagagtggtggtcctgagattttaaaaggccttgaagagaggttgctggagaccgttctcggctatatcagtgcagttgcacagtccatggaaaggaacgcagacaaactcaccgtgaagttctggcgcgcgctccttagtaaagcttacgacctgttagataaggtcaatgccttgctgcccacagagacattcattcctgtgatcagagggctggtgggcaatcccctgccatctgttcgccgcaaagcgctggaccttttgaataacaagctgcagcaaaatatatcctggaagaagacaatagttacccgtttcctaaaactggttccagaccttttggccattgtgcagcgtaagaaaaaggaaggggaagaagaacaagcaatcaacagacagacagcgttgtataccttaaagcttttatgcaagaattttggtgcagaaaatccagatccttttgtcccagtgctgagcactgctgtgaaactgattgctccagagagaaaggaggagaagaatgtcttgggaagcgcgctgctgtgcatagcagaggtgacctccaccctggaggcgctggccatcccccagcttcccagcctgatgccatcgttgctgacaacaatgaagaacaccagcgagctggtctccagcgaggtctacctgctcagtgccttggctgctctgcagaaggttgtggagactctcccgcacttcatcagcccctatctggaaggcattctctcccaggtgattcatctggagaaaatcactagtgaaatgggttctgcgtcacaggctaatatccgtctcacatctcttaaaaagacactggctaccacacttgcaccccgagtcctgttgcccgccatcaaaaaaacttacaagcagattgagaagaactggaagaatcacatgggtccgtttatgagcatcttgcaagagcatattggggtgatgaagaaggaagagctcacctcccatcagtctcagctaaccgcctttttcctggaggccctggacttccgagcccagcactctgagaacgatctggaggaagttggaaaaacggaaaattgtatcattgactgtctagtagccatggttgtcaaactttccgaggtcacattcaggcccctgttcttcaagctgtttgattgggctaaaacagaagatgccccaaaggacaggttgttgacattttacaacttggcagattgcattgctgaaaagctgaaagggctttttactctgtttgccggccacttagtgaagccttttgctgacaccttggaccaggtgaacatctccaaaacagatgaagcattttttgactctgaaaatgaccctgaaaagtgctgcttgctgttgcagtttattttgaactgtttatacaaaatcttcctttttgatacccagcattttataagtaaagagagagcaggagccttgatgatgcctctggtggatcagctggaaaacaggcttgggggagaagagaaattccaggaacgggtgacaaagcacctgataccatgcatcgcacagttttcagtggccatggcggatgactctctttggaaaccactgaactaccagattctgctaaagacgagagactcctcgcctaaggttcgatttgctgctttgattactgtgttagcactggctgaaaaactaaaggagaattatattgtcttgctaccagaatccattcctttcttagcagagttgatggaaggtaattcccaaactattcccaaccattaaacaattaaggaataattcagtaaaattctgtgaaaatgtgcccaatgataatgcagatttggatataacgtgactagcagttgatccatgagttgggtggagggagcaagttgcgaagtgaccacctcctgatcatttgagagtccgtttacagtgtaatcttcacgatcttttcttttgtggtggtttgtgatcatacaagcagattacagtagtgtttttaattaacctcatacatttatatgattgaagttttggtccccagattgtatggaaatgcctagtggcattaaggatgcggtaggatgtccacttttagtagcaaccgatgttcattcactactccatgttaggtgctttacttggattatctcacttaaaaaccacaacattttatctctgttttacaaaggaagaaactagaggcttaaaagatttcagttatttgacaaagatcacaagctagtgggtgtgacatggggagctgtgacagttctggaacataagtcttaggcccaggaaataacagtaaatgttattattaagggaggggtggtggagcaagtagatcagtcctttactgattcattgcttatctaagctacaaaagtacattctcctttgtttcttagctcttggaggggggaggtgtgagctactaaagcggtg

SEQ ID NO: 279793 - DNA, 1519 bp, Homo sapiens
tattggtgccaactctttttaacttgctatcaagatgtttagaacccttgccacaagagcagggaaatatggaatacaccaaacaattaattcttagttgtctgctcaacatctgccaaaaactatctccagatggtggcaaaatacccaaagatattttagatgaggagaagttcaacgtggagttgatagttcagtgcatccgcctttcggagatgccgcagacccatcaccatgcccttttacttttgggcactgttgctggaatatttccggataaagttttacacaatatcatgtctatttttacatttatgggagccaatgtcatgcgcctagatgatacttacagttttcaagttattaacaagacagtgaaaatggttattcccgcacttattcagtctgatagtggagattctatagaagtttcaagaaacgttgaagagattgtggtaaaaatcattagtgtatttgtggatgcgctgccacacgtcccggagcacaggcgcctgcccatccttgttcaacttgttgatacactgggtgcagagaaattcctctggattctcctcatcttgctttttgaacagtatgtcacaaaaacagtgctggcggctgcctatggcgaaaaggatgctattttagaagcagacactgaatttcggttttcagtctgttgtgagtttagtgtccagcatcagatacaaagcttgatgaatatcctccagtacttactaaagctgccagaggaaaaagaagaaaccattcccaaagcagtgtcatttaataagagtgaatcacaagaagaaatgctacaggtttttaatgtagagactcacactagcaagcaactgcggcattttaaatttttgtcagtgtccttcatgtctcagctcctgtcttccaataattttctgaaaaaggtagttgagagtggtggtcctgagattttaaaaggccttgaagagaggttgctggagaccgttctcggctatatcagtgcagttgcacagtccatggaaaggaacgcagacaaactcaccgtgaagttctggcgcgcgctccttagtaaagcttacgacctgttagataaggtcaatgccttgctgcccacagagacattcattcctgtgatcagagggctggtgggcaatcccctgccatctgttcgccgcaaagcgctggaccttttgaataacaagctgcagcaaaatatatcctggaagaagacaatagttacccgtttcctaaaactggttccagactatttctaagactttctgtggtgtttcatactctactcagagttcacactcatatttcatatttttatttttgggtgttgggtgccatgttacttttggtgccttaatacacctacttggattacttacaaatgttttatcacttcgttacaaaatccccacctggcttgtgctgccacataagcctctcctgcctatcgtatagagctgcagaaagagtaaatgatacacggtatttttatacagactgc

SEQ ID NO: 279794 - DNA, 566 bp, Homo sapiens
tgcacacgatagagcacttgggtcatagaaagcactgagctcattcgggttgaaagtcatccactagttatcctcttgtgccctttaacttttctaaggccaaggggaaggacttccaagcacgggcagctggaactccagggctgtcagagccaccgcgggcaccttcacaaacagcgggttaacatcccaaccctatacaggcaagcccgccctggggacagcaaacgagtggggaagcacatccttttcactggactgaagcagccaatttcccttccgcgacaaacttggccacttacaaagaagagagaaaacggagcaagctgcagcaaaaataaacggtgaagcgcgacgatgccggccaagaagacccccagttacttaccggcctgcttaccagccattttgaccagaaagagaagcgttgccttctggactggcaacactccagaaatgatggagacaggatacatcaacctgtatcactgaagatgatgtggagcagagcctttgtggtcctaagaaacatgtataagataaaaacttttgtggtttttcaatca

SEQ ID NO: 279795 - DNA, 685 bp, Homo sapiens
tgcacacgatagagcacttgggtcatagaaagcactgagctcattcgggttgaaagtcatccactagttatcctcttgtgccctttaacttttctaaggccaaggggaaggacttccaagcacgggcagctggaactccagggctgtcagagccaccgcgggcaccttcacaaacagcgggttaacatcccaaccctatacaggcaagcccgccctggggacagcaaacgagtggggaagcacatccttttcactggactgaagcagccaatttcccttccgcgacaaacttggccacttacaaagaagagagaaaacggagcaagctgcagcaaaaataaacggtgaagcgcgacgatgccggccaagaagacccccagttacttaccggcctgcttaccagccattttgaccagaaagagaagcgttgccttctggtcagtcctgtatacagcactaaagctgatgaatgatctatcttacactagccaaagtgaagtctgaaagatgtgaagaaatgcagtacatttgtacattggcacattgccctgcagaggactggcaacactccagaaatgatggagacaggatacatcaacctgtatcactgaagatgatgtggagcagagcctttgtggtcctaagaaacatgtataagataaaaacttttgtggtttttcaatca

SEQ ID NO: 279796 - DNA, 591 bp, Homo sapiens
  misc_feature (7)..(7): n is a, c, g, or t
  misc_feature (22)..(22): n is a, c, g, or t
  misc_feature (62)..(62): n is a, c, g, or t
  misc_feature (84)..(84): n is a, c, g, or t
  misc_feature (96)..(96): n is a, c, g, or t
  misc_feature (111)..(111): n is a, c, g, or t
cagaaangccctgaggtcctgnccagtgtgttcaaacctccggcatcccagccttttcactntggggacgcaagccaggtcctngcctgggcgttnttactctcctcaccnccgaaagccaggaactgagccgatatttaaataaggcttttcatatcgggccaagaaagaaaaattctcacccacttttataacccaatgtaatatctcacacgggcctggcactcaccttctattctgtatgatgtatttggttaaacactgtcaaataatagagatgtgccagatttagattttcttaccctaatctgtttaatattgtaactttattccatttgaaagtgtcaagcccattcagataagctataatctggtctttaaggaacacaactttaaaactgcagctttcttttatataaatcaagcctctgttaacttgaattccttatagtacatattttcccatctgtaatgacgaaattttgattctaatattttttctattatttataagtgcaaattttttaaaaaagtgtacagctttctaaaagtaataaaggtttagcataaatacagacttccagtagtcaa

SEQ ID NO: 279797 - DNA, 1861 bp, Homo sapiens
tgttcttccaacacttcattgaatgtatttttcactttaataactatgagaagcatgagaagtacaacaagttcccccagtcagagagagagaagcggctgttttcattgaagggaaagtcaaacaaagagagacgaatgaaaatctacaaatttcttctagagcacttcacagatgaacagcgattcaacatcacttccaaaatctgccttagtattttggcgtgctttgctgatggcatcctacccctggacctggacgccagtgagttactctcagacacgtttgaggtcctcagctcaaaggagatcaagcttttggcaatgagatctaaaccagacaaagacctccttatggaagaagatgacatggccttggcaaatgtagtcatgcaggaagctcagaagaagctcatctcacaagttcagaagaggaatttcatagaaaatattattccaattatcatctccctgaagactgtgctggagaaaaataagatcccagctttgcgggaactcatgcactatctcagggaggtgatgcaggattaccgagatgagctcaaggacttctttgcagttgacaaacagctggcatcagagcttgagtatgacatgaagaagtaccaggaacagctggtccaggagcaggagctagcaaaacatgcagatgtggccgggacggctggaggtgctgaggtggcacctgtggcacaggttgccctgtgtttagaaacagtgccagttcctgctggccaagaaaaccctgccatgtcacctgccgtgagccagccctgcacacccagggcaagtgctggccatgtagcagtatcatctcctacacctgaaacagggccattgcagaggttgctgcccaaagccaggcccatgtccctgagcaccattgcaatcctgaattctgtcaagaaagccgtggagtcaaagagcaggcatcggagtcggagcttaggagtgctgcctttcactttaaattctggaagcccagaaaaaacgtgcagtcaggtgtcttcatacagtttggagcaagagtcgaatggcgagattgagcacgtgaccaagcgggccatcagcacccccgagaagagcatcagtgatgtcacgtttggagcaggggtcagttacatcgggacaccacggactccgtcgtcagccaaagagaaaattgaaggccggagtcaaggaaatgacatcttatgtttatcactgcctgataaaccgcccccacagcctcagcagtggaatgtgcggtctcccgccaggaataaagacactccagcctgcagcaggaggtccctccgaaagacccctctgaaaacagccaactaaacagcgcctcccaccagtgtccaggcaggcaggagcccttgaggaagcagtctcgtgtcctccgtgtgaaggcagctggatcacttcccgcagtccttgggcagcgctttgctgtggaacacgagagctcctcctcaggggcctggcactcaccttctattctgtatgatgtatttggttaaacactgtcaaataatagagatgtgccagatttagattttcttaccctaatctgtttaatattgtaactttattccatttgaaagtgtcaagcccattcagataagctataatctggtctttaaggaacacaactttaaaactgcagctttcttttatataaatcaagcctctgttaacttgaattccttatagtacatattttcccatctgtaatgacgaaattttgattctaatattttttctattatttataagtgcaaattttttaaaaaagtgtacagctttctaaaagtaataaaggtttagcataaatacagacttccagtagtcaa

SEQ ID NO: 279798 - DNA, 1928 bp, Homo sapiens
tgttcttccaacacttcattgaatgtatttttcactttaataactatgagaagcatgagaagtacaacaagttcccccagtcagagagagagaagcggctgttttcattgaagggaaagtcaaacaaagagagacgaatgaaaatctacaaatttcttctagagcacttcacagatgaacagcgattcaacatcacttccaaaatctgccttagtattttggcgtgctttgctgatggcatcctacccctggacctggacgccagtgagttactctcagacacgtttgaggtcctcagctcaaaggagatcaagcttttggcaatgagatctaaaccagacaaagacctccttatggaagaagatgacatggccttggcaaatgtagtcatgcaggaagctcagaagaagctcatctcacaagttcagaagaggaatttcatagaaaatattattccaattatcatctccctgaagactgtgctggagaaaaataagatcccagctttgcgggaactcatgcactatctcagggaggtgatgcaggattaccgagatgagctcaaggacttctttgcagttgacaaacagctggcatcagagcttgagtatgacatgaagaagtaccaggaacagctggtccaggagcaggagctagcaaaacatgcagatgtggccgggacggctggaggtgctgaggtggcacctgtggcacaggttgccctgtgtttagaaacagtgccagttcctgctggccaagaaaaccctgccatgtcacctgccgtgagccagccctgcacacccagggcaagtgctggccatgtagcagtatcatctcctacacctgaaacagggccattgcagaggttgctgcccaaagccaggcccatgtccctgagcaccattgcaatcctgaattctgtcaagaaagccgtggagtcaaagagcaggcatcggagtcggagcttaggagtgctgcctttcactttaaattctggaagcccagaaaaaacgtgcagtcaggtgtcttcatacagtttggagcaagagtcgaatggcgagattgagcacgtgaccaagcgggccatcagcacccccgagatgtcgttacattcagtcagtcaaacaccacagtggcccgcggagcagacaatgccgttgaggcacagagagcatcagtgatgtcacgtttggagcaggggtcagttacatcgggacaccacggactccgtcgtcagccaaagagaaaattgaaggccggagtcaaggaaatgacatcttatgtttatcactgcctgataaaccgcccccacagcctcagcagtggaatgtgcggtctcccgccaggaataaagacactccagcctgcagcaggaggtccctccgaaagacccctctgaaaacagccaactaaacagcgcctcccaccagtgtccaggcaggcaggagcccttgaggaagcagtctcgtgtcctccgtgtgaaggcagctggatcacttcccgcagtccttgggcagcgctttgctgtggaacacgagagctcctcctcaggggcctggcactcaccttctattctgtatgatgtatttggttaaacactgtcaaataatagagatgtgccagatttagattttcttaccctaatctgtttaatattgtaactttattccatttgaaagtgtcaagcccattcagataagctataatctggtctttaaggaacacaactttaaaactgcagctttcttttatataaatcaagcctctgttaacttgaattccttatagtacatattttcccatctgtaatgacgaaattttgattctaatattttttctattatttataagtgcaaattttttaaaaaagtgtacagctttctaaaagtaataaaggtttagcataaatacagacttccagtagtcaa

SEQ ID NO: 279799 - DNA, 1495 bp, Homo sapiens
tcgaattacagattgagcacataccagaggaagctcagaagaagctcatctcacaagttcagaagaggaatttcatagaaaatattattccaattatcatctccctgaagactgtgctggagaaaaataagatcccagctttgcgggaactcatgcactatctcagggaggtgatgcaggattaccgagatgagctcaaggacttctttgcagttgacaaacagctggcatcagagcttgagtatgacatgaagaagtaccaggaacagctggtccaggagcaggagctagcaaaacatgcagatgtggccgggacggctggaggtgctgaggtggcacctgtggcacaggttgccctgtgtttagaaacagtgccagttcctgctggccaagaaaaccctgccatgtcacctgccgtgagccagccctgcacacccagggcaagtgctggccatgtagcagtatcatctcctacacctgaaacagggccattgcagaggttgctgcccaaagccaggcccatgtccctgagcaccattgcaatcctgaattctgtcaagaaagccgtggagtcaaagagcaggcatcggagtcggagcttaggagtgctgcctttcactttaaattctggaagcccagaaaaaacgtgcagtcaggtgtcttcatacagtttggagcaagagtcgaatggcgagattgagcacgtgaccaagcgggccatcagcacccccgagaagagcatcagtgatgtcacgtttggagcaggggtcagttacatcgggacaccacggactccgtcgtcagccaaagagaaaattgaaggccggagtcaaggaaatgacatcttatgtttatcactgcctgataaaccgcccccacagcctcagcagtggaatgtgcggtctcccgccaggaataaagacactccagcctgcagcaggaggtccctccgaaagacccctctgaaaacagccaactaaacagcgcctcccaccagtgtccaggcaggcaggagcccttgaggaagcagtctcgtgtcctccgtgtgaaggcagctggatcacttcccgcagtccttgggcagcgctttgctgtggaacacgagagctcctcctcaggggcctggcactcaccttctattctgtatgatgtatttggttaaacactgtcaaataatagagatgtgccagatttagattttcttaccctaatctgtttaatattgtaactttattccatttgaaagtgtcaagcccattcagataagctataatctggtctttaaggaacacaactttaaaactgcagctttcttttatataaatcaagcctctgttaacttgaattccttatagtacatattttcccatctgtaatgacgaaattttgattctaatattttttctattatttataagtgcaaattttttaaaaaagtgtacagctttctaaaagtaataaaggtttagcataaatacagacttccagtagtcaa

SEQ ID NO: 279800 - DNA, 492 bp, Homo sapiens
tgatcgaggccggtaccgaattacgctcctagacggctccgtgtgaaggcagctggatcacttcccgcagtccttgggcagcgctttgctgtggaacacgagagctcctcctcaggggcctggcactcaccttctattctgtatgatgtatttggttaaacactgtcaaataatagagatgtgccagatttagattttcttaccctaatctgtttaatattgtaactttattccatttgaaagtgtcaagcccattcagataagctataatctggtctttaaggaacacaactttaaaactgcagctttcttttatataaatcaagcctctgttaacttgaattccttatagtacatattttcccatctgtaatgacgaaattttgattctaatattttttctattatttataagtgcaaattttttaaaaaagtgtacagctttctaaaagtaataaaggtttagcataaatacagacttccagtagtcaa

SEQ ID NO: 279801 - DNA, 1244 bp, Homo sapiens
tgttcttccaacacttcattgaatgtatttttcactttaataactatgagaagcatgagaagtacaacaagttcccccagtcagagagagagaagcggctgttttcattgaagggaaagtcaaacaaagagagacgaatgaaaatctacaaatttcttctagagcacttcacagatgaacagcgattcaacatcacttccaaaatctgccttagtattttggcgtgctttgctgatggcatcctacccctggacctggacgccagtgagttactctcagacacgtttgaggtcctcagctcaaaggagatcaagcttttggcaatgagatctaaaccagacaaagacctccttatggaagaagatgacatggccttggcaaatgtagtcatgcaggaagctcagaagaagctcatctcacaagttcagaagaggaatttcatagaaaatattattccaattatcatctccctgaagactgtgctggagaaaaataagatcccagctttgcgggaactcatgcactatctcagggaggtgatgcaggattaccgagatgagctcaaggacttctttgcagttgacaaacagctggcatcagagcttgagtatgacatgaagaagtaccaggaacagctggtccaggagcaggagctagcaaaacatgcagatgtggccgggacggctggaggtgctgaggtggcacctgtggcacaggttgccctgtgtttagaaacagtgccagttcctgctggccaagaaaaccctgccatgtcacctgccgtgagccagccctgcacacccagggcaagtgctggccatgtagcagtatcatctcctacacctgaaacagggccattgcagaggttgctgcccaaagccaggcccatgtccctgagcaccattgcaatcctgaattctgtcaagaaagccgtggagtcaaagagcaggcatcggagtcggagcttaggagtgctgcctttcactttaaattctggaagcccagaaaaaacgtgcagtcaggtgtcttcatacagtttggagcaagagtcgaatggcgagattgagcacgtgaccaagcgggccatcagcacccccgagagtgagtaactgatcggaacacgtgggcttctcctcagtctctcctgcattcgtgatgtgtttgctagagtcgcagtaaaactccttccggtgcaggatagttctgatggtcagaaccatgagtgcattgctgaggtggagtat

SEQ ID NO: 279802 - DNA, 1993 bp, Homo sapiens
acgagccggtcaatagtacggcgcagtgtgtggaattcggttacgggaacatcacttccaaaatctgccttagtattttgggtaagcccagtgtgtgtgggagaaaatgtgtgtgtttgcaaatgaaatgctgtgttgataatggcccagcaggcctctagtaagggagaccctggcactgcaggaagacccctgtcatcttgtccttctctggcatcagctgtgccccagacaaaacacccttgcagaccccctgacagcctcagatggccccccagttgtgggaattacacctcctctctgggccagagcatttctcagaagctcacgtttttctctctctctgtctctcagcgtgctttgctgatggcatcctacccctggacctggacgccagtgagttactctcagacacgtttgaggtcctcagctcaaaggagatcaagcttttggcaatgagatctaaaccagacaaagacctccttatggaagaagatgacatggccttggcaaatgtagtcatgcaggaagctcagaagaagctcatctcacaagttcagaagaggaatttcatagaaaatattattccaattatcatctccctgaagactgtgctggagaaaaataagatcccagctttgcgggaactcatgcactatctcagggaggtgatgcaggattaccgagatgagctcaaggacttctttgcagttgacaaacagctggcatcagagcttgagtatgacatgaagaagtaccaggaacagctggtccaggagcaggagctagcaaaacatgcagatgtggccgggacggctggaggtgctgaggtggcacctgtggcacaggttgccctgtgtttagaaacagtgccagttcctgctggccaagaaaaccctgccatgtcacctgccgtgagccagccctgcacacccagggcaagtgctggccatgtagcagtatcatctcctacacctgaaacagggccattgcagaggttgctgcccaaagccaggcccatgtccctgagcaccattgcaatcctgaattctgtcaagaaagccgtggagtcaaagagcaggcatcggagtcggagcttaggagtgctgcctttcactttaaattctggaagcccagaaaaaacgtgcagtcaggtgtcttcatacagtttggagcaagagtcgaatggcgagattgagcacgtgaccaagcgggccatcagcacccccgagaagagcatcagtgatgtcacgtttggagcaggggtcagttacatcgggacaccacggactccgtcgtcagccaaagagaaaattgaaggccggagtcaaggaaatgacatcttatgtttatcactgcctgataaaccgcccccacagcctcagcagtggaatgtgcggtctcccgccaggaataaagacactccagcctgcagcaggaggtccctccgaaagacccctctgaaaacagccaactaaacagcgcctcccaccagtgtccaggcaggcaggagcccttgaggaagcagtctcgtgtcctccgtgtgaaggcagctggatcacttcccgcagtccttgggcagcgctttgctgtggaacacgagagctcctcctcaggggcctggcactcaccttctattctgtatgatgtatttggttaaacactgtcaaataatagagatgtgccagatttagattttcttaccctaatctgtttaatattgtaactttattccatttgaaagtgtcaagcccattcagataagctataatctggtctttaaggaacacaactttaaaactgcagctttcttttatataaatcaagcctctgttaacttgaattccttatagtacatattttcccatctgtaatgacgaaattttgattctaatattttttctattatttataagtgcaaattttttaaaaaagtgtacagctttctaaaagtaataaaggtttagcataaatacagacttccagtagtcaa

SEQ ID NO: 279803 - DNA, 1646 bp, Homo sapiens
tgttcttccaacacttcattgaatgtatttttcactttaataactatgagaagcatgagaagtacaacaagttcccccagtcagagagagagaagcggctgttttcattgaagggaaagtcaaacaaagagagacgaatgaaaatctacaaatttcttctagagcacttcacagatgaacagcgattcaacatcacttccaaaatctgccttagtattttggcgtgctttgctgatggcatcctacccctggacctggacgccagtgagttactctcagacacgtttgaggtcctcagctcaaaggagatcaagcttttggcaatgagatctaaaccagacaaagacctccttatggaagaagatgacatggccttggcaaatgtagtcatgcaggaagctcagaagaagctcatctcacaagttcagaagaggaatttcatagaaaatattattccaattatcatctccctgaagactgtgctggagaaaaataagatcccagctttgcgggaactcatgcactatctcagggaggtgatgcaggattaccgagatgagctcaaggacttctttgcagttgacaaacagctggcatcagagcttgagtatgacatgaagaagtaccaggaacagctggtccaggagcaggagctagcaaaacatgcagatgtggccgggacggctggaggtgctgaggtggcacctgtggcacaggttgccctgtgtttagaaacagtgccagttcctgctggccaagaaaaccctgccatgtcacctgccgtgagccagccctgcacacccagggcaagtgctggccatgtagcagtatcatctcctacacctgaaacagggccattgcagaggttgctgcccaaagccaggcccatgtccctgagcaccattgcaatcctgaattctgtcaagaaagccgtggagtcaaagagcaggcatcggagtcggagcttaggagtgctgcctttcactttaaattctggaagcccagaaaaaacgtgcagtcaggtgtcttcatacagtttggagcaagagtcgaatggcgagattgagcacgtgaccaagcgggccatcagcacccccgagaagagcatcagtgatgtcacgtttggagcaggggtcagttacatcgggacaccacggactccgtcgtcagccaaaggagcccaaagctgggacgctacatggaagacaccagtgtccctgcagtgcccacctgagagctgtgctggatgaagcaagggccacgtgagtaaagctcactgggacacagccactgccagggcccaaggatggcagggcctcctggcagacagcgaggcaacagtgagctagagcgggggcgcctggcgcaaccccaggagctgactggcatctgtgtatgtacatctgagggcttctgggtggcctctgggtacagactgtcctagtcatctcaggaagaggcagttcaaagctaacctgagaggtttcttttgaagagatgcaaactgatttcaacattgcttaactggaatttttaaaggtttcctaagcaactatggtctgatgtgtagacagtatgagttcccttgtgaaaaaggctaaaacttgtgtgagaaaaggaacatcacagtaaacttccatgagagg

SEQ ID NO: 279804 - DNA, 1679 bp, Homo sapiens
gactgttactgctacaatcaaaattcccaagtggagtggaaatacatatggtcaactatgcagggagactgtgtgcttctctgtggagcctgtcaagaagatatttaactatatgatacatgtgaatcgaaacatcatggatttcaaactcttccttgtgtttgtggcaggagtttttcttttcttttatgcaaggaccctgagtcaaagccctactttctattactcctcgggaactgtgctaggtgttctaatgacattagtctttgtcttgctgttggtgaaaagattcattccgaagtatagcaccttttgggctctaatggttggttgttggtttgcctcagtttatattgtatgccagttgatggaagatctgaagtggctgtggtatgaaaacaggatatatgtattaggctatgtcttgatagttggatttttcagctttgttgtttgttacaagcatgggccccttgcagacgacaggagcagaagtcttctgatgtggatgctgcgactcctctccctggttctggtctatgctggtgtggccgtgcctcagtttgcctatgcagccataatcctcctcatgtcctcctggagtctgcactacccactgagagcatgcagttatatgaggtggaaaatggagcagtggtttacatcaaaagagctggtggtgaaatatcttacggaagacgagtacagggagcaagctgatgctgaaacgaacagtgctctggaggagctacgccgggcctgccgaaaacccgactttccctcatggctggtcgtctccagactccacactcctagcaaatttgcagactttgttcttggaggaagccacttgtcacctgaagaaatcagtctgcatgaagagcagtatggccttgggggtgccttcttggaagagcagctctttaacccgagtactgcctgacatgcgaccttcaagttgacttcattctggacaaggaagtgggcaaagggcagggattctattaaagttaggcagaactgttctagtgaacggtggcaaaaacatttgctgtggagaaaaacaagtcagtctggaaaggaaaaccaacccattttgaagataacttagcattcttggtgacttctgctacttattgtactgtaggtggataccaaaattctgtgacagccactaccacttaccttgaatgaaggctttcattaggaacaggggaatggcgttgttcttaaggggctagtaagcatgaacaggtgctttgtcgacaccagggcactaaatctggtcttaatcccctgaacctgtgtcagaagactctgcaatactcttcctatagttcgtcagtataagtccttaaagagacctgagacatgctggaccagtgttttccaaagtacagctcacaggctactaccaagtgttggtcaataaaggtattctgaggtcaactaagattgatataaagttaaactaatgtatttcagtatctctcagaggcattcataatgctcgtgtgcactgtgaatctcccaaaggggagaaattgtgtgctgcagtttcttgcttaatttgaccacagaactctttttcatgagattaatattccttggaacacgtttggaaaatgctaatggtggtggaactgagctcatgagaggttaaataacttgtgcaagac

SEQ ID NO: 279805 - DNA, 912 bp, Homo sapiens
ggcagttggacattttgtaattttagaattagaagcaaccgcgcgatccagtcgcccaattccctcgttttacagaagcaaccgaaactcagagaggttttgatttgcccagggtcacacagcttgtcactggcacagctgaccctagtctccagactttcagcacacggccttttgtacagtacatcaatgcgtgttgaaatccttgttatttcactatctcgcattcctttggtctcaagactagagaaggtaacagcttcagcttcagaatcggagcgaaaattcttctgcccctgactgttgtgaccttgagcgagtaaacataacggtcccacgtgagcggcaggtgaaaattaccagtccaggcctgttcagaattgtatatatcgcagaaagacataattgccaatatccagaaaacattctatcttttatcaaatgtgtgattcataacttttggataccaaaggaatctaacgaaataaccataatcatcaatccatacagggagactgtgtgcttctctgtggagcctgtcaagaagactctgcaatactcttcctatagttcgtcagtataagtccttaaagagacctgagacatgctggaccagtgttttccaaagtacagctcacaggctactaccaagtgttggtcaataaaggtattctgaggtcaactaagattgatataaagttaaactaatgtatttcagtatctctcagaggcattcataatgctcgtgtgcactgtgaatctcccaaaggggagaaattgtgtgctgcagtttcttgcttaatttgaccacagaactctttttcatgagattaatattccttggaacacgtttggaaaatgctaatggtggtggaactgagctcatgagaggttaaataacttgtgcaagac

SEQ ID NO: 279806 - DNA, 2126 bp, Homo sapiens
ggcagttggacattttgtaattttagaattagaagcaaccgcgcgatccagtcgcccaattccctcgttttacagaagcaaccgaaactcagagaggttttgatttgcccagggtcacacagcttgtcactggcacagctgaccctagtctccagactttcagcacacggccttttgtacagtacatcaatgcgtgttgaaatccttgttatttcactatctcgcattcctttggtctcaagactagagaaggtaacagcttcagcttcagaatcggagcgaaaattcttctgcccctgactgttgtgaccttgagcgagtaaacataacggtcccacgtgagcggcaggtgaaaattaccagtccaggcctgttcagaattgtatatatcgcagaaagacataattgccaatatccagaaaacattctatcttttatcaaatgtgtgattcataacttttggataccaaaggaatctaacgaaataaccataatcatcaatccatacagggagactgtgtgcttctctgtggagcctgtcaagaagatatttaactatatgatacatgtgaatcgaaacatcatggatttcaaactcttccttgtgtttgtggcaggagtttttcttttcttttatgcaaggaccctgagtcaaagccctactttctattactcctcgggaactgtgctaggtgttctaatgacattagtctttgtcttgctgttggtgaaaagattcattccgaagtatagcaccttttgggctctaatggttggttgttggtttgcctcagtttatattgtatgccagttgatggaagatctgaagtggctgtggtatgaaaacaggatatatgtattaggctatgtcttgatagttggatttttcagctttgttgtttgttacaagcatgggccccttgcagacgacaggagcagaagtcttctgatgtggatgctgcgactcctctccctggttctggtctatgctggtgtggccgtgcctcagtttgcctatgcagccataatcctcctcatgtcctcctggagtctgcactacccactgagagcatgcagttatatgaggtggaaaatggagcagtggtttacatcaaaagagctggtggtgaaatatcttacggaagacgagtacagggagcaagctgatgctgaaacgaacagtgctctggaggagctacgccgggcctgccgaaaacccgactttccctcatggctggtcgtctccagactccacactcctagcaaatttgcagactttgttcttggaggaagccacttgtcacctgaagaaatcagtctgcatgaagagcagtatggccttgggggtgccttcttggaagagcagctctttaacccgagtactgcctgacatgcgaccttcaagttgacttcattctggacaaggaagtgggcaaagggcagggattctattaaagttaggcagaactgttctagtgaacggtggcaaaaacatttgctgtggagaaaaacaagtcagtctggaaaggaaaaccaacccattttgaagataacttagcattcttggtgacttctgctacttattgtactgtaggtggataccaaaattctgtgacagccactaccacttaccttgaatgaaggctttcattaggaacaggggaatggcgttgttcttaaggggctagtaagcatgaacaggtgctttgtcgacaccagggcactaaatctggtcttaatcccctgaacctgtgtcagaagactctgcaatactcttcctatagttcgtcagtataagtccttaaagagacctgagacatgctggaccagtgttttccaaagtacagctcacaggctactaccaagtgttggtcaataaaggtattctgaggtcaactaagattgatataaagttaaactaatgtatttcagtatctctcagaggcattcataatgctcgtgtgcactgtgaatctcccaaaggggagaaattgtgtgctgcagtttcttgcttaatttgaccacagaactctttttcatgagattaatattccttggaacacgtttggaaaatgctaatggtggtggaactgagctcatgagaggttaaataacttgtgcaagac

SEQ ID NO: 279807 - DNA, 1567 bp, Homo sapiens
ggcagttggacattttgtaattttagaattagaagcaaccgcgcgatccagtcgcccaattccctcgttttacagaagcaaccgaaactcagagaggttttgatttgcccagggtcacacagcttgtcactggcacagctgaccctagtctccagactttcagcacacggccttttgtacagtacatcaatgcgtgttgaaatccttgttatttcactatctcgcattcctttggtctcaagactagagaaggtaacagcttcagcttcagaatcggagcgaaaattcttctgcccctgactgttgtgaccttgagcgagtaaacataacggtcccacgtgagcggcaggtgaaaattaccagtccaggcctgttcagaattgtatatatcgcagaaagacataattgccaatatccagaaaacattctatcttttatcaaatgtgtgattcataacttttggataccaaaggaatctaacgaaataaccataatcatcaatccatacagggagactgtgtgcttctctgtggagcctgtcaagaagatatttaactatatgatacatgtgaatcgaaacatcatggatttcaaactcttccttgtgtttgtggcaggagtttttcttttcttttatgcaaggaccctgagtcaaagccctactttctattactcctcgggaactgtgctaggtgttctaatgacattagtctttgtcttgctgttggtgaaaagattcattccgaagtatagcaccttttgggctctaatggttggttgttggtttgcctcagtttatattgtatgccagttgatggaagatctgaagtggctgtggtatgaaaacaggatatatgtattaggctatgtcttgatagttggatttttcagctttgttgtttgttacaagcatgggccccttgcagacgacaggagcagaagtcttctgatgtggatgctgcgactcctctccctggttctggtctatgctggtgtggccgtgcctcagtttgcctatgcagccataatcctcctcatgtcctcctggagtctgcactacccactgagagcatgcagttatatgaggtggaaaatggagcagtggtttacatcaaaagagctggtggtgaaatatcttacggaagacgagtacagggagcaagctgatgctgaaacgaacagtgctctggaggagctacgccgggcctgccgaaaacccgactttccctcatggctggtcgtctccagactccacactcctagcaactgatgaaaccaaggccctgaaaggttcaccaagttgccagggtcgtgcagatcaacaaactgcagaagcaagactcaaccaggtcttctgctgtcaaatcctgtgcccttcccatggccagcagagcctcccccagctggatcagaaacctttcagggaaatttagaaggtgctttctttcatacacacaaaaagtagtgatcacttaaccttaaaatcttgtttcacaaagatgttgtaatattatacctatacttaaaacgttagatttctaataaaatttaattaatagagctatga

SEQ ID NO: 279808 - DNA, 1279 bp, Homo sapiens
agactatcctggctagcacggtgaggccccgtctctactaaaaatacaaaaaaaaaaaaaatagctgggcgtggtggtgggcacctgtggtcccagctgcttgggaggttgaggcaggagaatggcgtgaccccaggaggcggcttgcagtgagcccagatcatgccactgcactccagcctgggtaactgagcgagactccgtctcaaaaaaaaaaaaaaaaaaaaaaatgtgtgtgtgtatatatatatatatatatatatatatatatgtatgtgtgtgtgtatacatatgtatgtatatgtgtatatatgtgtgtgtatatatgtatatgtgtatatatatataaatacgtgtgtgtgtgtgtgttttatatatatatatgtatatatgatacaagacaacatggaatgtcttgtagcttaaactccaccctagacttctggggctgttctccagagcaccacgcctaaatgtttgctcatgttgcctttttccagactgttttcttaaatcctcttttattcaggcatcaccttttctcagatattccccaaccttcccattgctctcatagtccagttatataacttaacataaccctattgtgctttgtcataacgttattaacaagttttttgagatagattgtgaactccaccaagactgtgaactccaccggggtaggaagcatattttactcatttttatatacacaagtcccagcacagagcttgactctaaaaaaaaaaaacccagcaaatgttaattgaagctgcaaagtggaaggaattaacagactagatctcttttcactctggtctcctcttaattgcctactacaacttcttgttcaaagggagggactgcagagggcctcccttgtggcaatctgatcccagttccattcctcttccagcgaatgtcatggtaaccaccagcctctcccattgagccacatcttgttctgcagctgtgcttctgactagagaaacctctccctccatctccccactgcccttctagacctattccagttgcaaatttaacttacagtgtgagtatggggcatagataccatgtattaataataatcatacacaaataaatacattagtgtctttattctagagtagttcccgcttgtcagtctcagactgcagtgctactgcagtctgcacatctagctcctgcaagttgcagcaagtcagaattgcttctggcacacctcttataactggaagtcttggtattgagctagattggaggcattccccag

SEQ ID NO: 279809 - DNA, 1102 bp, Homo sapiens
  misc_feature (1097)..(1097): n is a, c, g, or t
agactatcctggctagcacggtgaggccccgtctctactaaaaatacaaaaaaaaaaaaaatagctgggcgtggtggtgggcacctgtggtcccagctgcttgggaggttgaggcaggagaatggcgtgaccccaggaggcggcttgcagtgagcccagatcatgccactgcactccagcctgggtaactgagcgagactccgtctcaaaaaaaaaaaaaaaaaaaaaaatgtgtgtgtgtatatatatatatatatatatatatatatatgtatgtgtgtgtgtatacatatgtatgtatatgtgtatatatgtgtgtgtatatatgtatatgtgtatatatatataaatacgtgtgtgtgtgtgtgttttatatatatatatgtatatatgatacaagacaacatggaatgtcttgtagcttaaactccaccctagacttctggggctgttctccagagcaccacgcctaaatgtttgctcatgttgcctttttccagactgttttcttaaatcctcttttattcaggcatcaccttttctcagatattccccaaccttcccattgctctcatagtccagttatataacttaacataaccctattgtgctttgtcataacgttattaacaagttttttgagatagattgtgaactccaccaagactgtgaactccaccggggtaggaagcatattttactcatttttatatacacaagtcccagcacagagcttgactctaaaaaaaaaaaacccagcaaatgttaattgaagctgcaaagtggaaggaattaacagactagatctcttttcactctggtctcctcttaattgcctactacaacttcttgttcaaagggagggactgcagagggcctcccttgtggcaatctgatcccagttccattcctcttccagcgaatgtcatggtaaccaccagcctccctaagtgctggggttataggagtgagctaccacgcctggcctaatggcttttttttttaagacagagtctcgctctctcgccaggctggaggttgcagtgaacggagattgcgccactgtactccagcctgggtgagagagtgagacgccncctca

SEQ ID NO: 279810 - DNA, 571 bp, Homo sapiens
gtgctttattgctaacctaggcgatgggaagaaagagaacacagctatctttccaagctgtgtgcagcatggagcaccagctgcccttgagacagaagaaagctgttgttttcatcaggagacattcaactccttgaaaatgaacaatccggccaggcgcggtggctcacgcctgtaaatcccagcactttgggaggccgaggcgggcagatcacctgaggtcaggagttcaagaccagcctgaccaacatggagaaaccccctctctactaaaaatgcaaaattagccagcatggtggtgcatgcctgtaatcccagctactcgggaggctgaggcaggagaatcgcttgaacccaggaggtggaggttgcggtgagccgagatcacgccattgcactccagcctgggcaacaagagcgaaactccatctcaaaaaaaaaaaagaaagaaaatgaacaattctcttcaaatccccagctcttagcagagtatatgtacattgtaggcattcagttaggtttgtggaaagaatggcatctgaaacctcaaccgaaaattgaacattccccc

SEQ ID NO: 279811 - DNA, 619 bp, Homo sapiens
ttaaaaaattgcttaaaatacccaagagagacccatattattttgattgggttttgtgtgtgtgttgtgagtttattgtccagttctcttcctgtgcctgttctgtgtgtctattgtaatatataaaacgattttatggtccttattttcatatttctatctctaggagacattcaactccttgaaaatgaacaatccggccaggcgcggtggctcacgcctgtaaatcccagcactttgggaggccgaggcgggcagatcacctgaggtcaggagttcaagaccagcctgaccaacatggagaaaccccctctctactaaaaatgcaaaattagccagcatggtggtgcatgcctgtaatcccagctactcgggaggctgaggcaggagaatcgcttgaacccaggaggtggaggttgcggtgagccgagatcacgccattgcactccagcctgggcaacaagagcgaaactccatctcaaaaaaaaaaaagaaagaaaatgaacaattctcttcaaatccccagctcttagcagagtatatgtacattgtaggcattcagttaggtttgtggaaagaatggcatctgaaacctcaaccgaaaattgaacattccccc

SEQ ID NO: 279812 - DNA, 769 bp, Homo sapiens
gttccattcctcttccagcgaatgtcatggtaaccaccagcctctcccattgagccacatcttgttctgcagctgtgcttctgactagagaaacctctccctccatctccccactgcccttctagacctattccagttgcaaatttaacttacagtgtgagtatggggaaaattttaagagcataagtgctaaatacaacatccaaactacatcaggctcatcatagataccatgtattaataataatcatacacaaataaatacattagtgtctttattctagagtagttcccgcttgtcagtctcagactgcagtgctactgcagtctgcacatctagctcctgcaagttgcagcaagtcagaattgcttctggcacacctcttataactggaagtcttggtattgagctagattggaggcattccccagctatagcatagtgtgtgctttattgctaacctaggcgatgggaagaaagagaacacagctatctttccaagctgtgtgcagcatggagcaccagctgcccttgagacagaagaaagctgttgttttcatcaggtaggctgtgtgtttctctgttaagtaggctgaggggcatctggtctgcaggagctggcatttaatttgaagatgttgaggccttaaaagattgaacttgtgggtctgatagcctaattagaacaagctatgtgtgggggctgccgtactcaaatctgtttttaatggctcagttcagggctgagggggagcaatgtcaaaatta

SEQ ID NO: 279813 - DNA, 1947 bp, Homo sapiens
attaattacgccaagaaaatcactgacgacctctcggcaagcccctccccagcggtgtgatcctggacccaagggcttgggtgatgcccacacaacacttaaggacaggtctgacccgaccccactacaccacacctagagcccggtcttgcacgggcagggtggggagccgagtgacccctcccggcgcccgccccacctcccgagctggctgggctgccacgtcaggcgcagccggccacgatcctgcccatcctcctcccgcccgtcccattgattcgcgggtttcctgcaaccccgggacccccacgggagatcccggccggagaagcgcccccattcaagcccagagaggggccacgcctgtcggaccccccgtcccacgccaacttttcagacacagcagggccccgcgcagccgggtgcgctccgacagctcaagttcacgcggggaccgactgcagagcggggtccggcgctgcgacacccggcccggagcccaccccgagggcccgcaggccgctgccccccgggtccgggcacccgttaggccggccgagggggtgtgtcgggccggcgcaggccccgcgagccgtggggtggccgaggtcggcgggtcctcggcgagacccggcccccacgcccgagcctctccgggccttcccccgccgctcaccggcgcaggagcgcgtcttccagatcttcagcagcaggatgacgatggccgccaggtgggacaggtccccagtcagccggaaaatgttcatggcggcggcggcggtggcggtcggcgcagcgcggcggccccggggctgggcggctcaggaggcggcggcccctgagaggaagcggcgaagatggcgagatcgcccgcgacgtggccagggacgtggccgaactgccggcgcgcgcgcgcgcggggcaccctgggagagcggggccaggccccgccccttaaagggggcgcgccccagcgcaggctcagcaggtcagctcgcagggactcccttgcaagaagaccccggactctgccaaattttccctgccgggtttccggcttctcctcgggtgccagcagtttcctttacttttttgaaataacactccctggggatcttttctttcctcccacatatcaaaagagctctacaggcctattgtatgaaaaagtgtaagagaaggccgggtgcggtggctcatgcctgaaattctagcagtttgagaggccgaaacaggaggatcctttgagcctaggagttcgagaccagcctgggcaacctaatgagagttcctccaccccccgtctctacaaaaattttttaaaaaattagccaggcctgatggtgggtgcctgtagtaccagctattttaaaggctaaggcaggaggattgcttgagcccaggacatcgaggctgcggtgaaccatgattgtaccactgtattccagcctggacgactgagtgagaccctgtctcaaacaaaacaaaacaaaacaaaaaaaagtacaagaggaaaaaaattgatttctgattgcctcactcaagataaggtcaacattgaaggtggaggtggaagatgcagtttatgtaggggtctgaagattttaccattctggggactgtctttaagaaagagaatccaaaattaggtagaaaagtgaacgtctgaccgggcgcggtggctcatccctgtaatcccagcacttaaggagtacgagacgggaggatcacgaggtcaagagatcgacagcatgctggccaacgtggtgaaaccccgtctctactgaaaatacaaaaattagccgggcgtggtggcacgcacctgtaatcccagctactcgggaggctgaggcagggagaatcgcttgaacctgggaggagaaggttgcagtgagctgagatggtgccactgcactccagcctggcgacagagcaagactccatccc

SEQ ID NO: 279814 - DNA, 261 bp, Homo sapiens
cccaaggtggcagaggagtgatgctggagcccggggcaaaatgctggggcccgggacacggctgaaagttccgtcgtgctgcttatttttgggctcctaggtgttgcgcacaaccagcgactgctccagctcctgcctgcgctgctggatctttagaggaagtgagaacaggagcaggtgtcagtgttctgtactccctgagtctccctcttcaccttgaggtcccggctctgggagcggagcaggtcttggacatagcct

SEQ ID NO: 279815 - DNA, 533 bp, Homo sapiens
atttagtaaagacggggtttcaccatgttagccaggatggtggctgacgtgcaccgcaccctggtctatggaggaatcttcctgtacccagccaaccagaagagccctaagggcaagctccggctcctgtatgaatgcaatcccgtggcctacatcattgagcaggcaggaggcttggcgaccacggggacccagcctgtactggacgtgaagcccgaggcaattcaccagcgagtccccctcattctggggtcaccagaggatgtgcaggaatatctcacctgtgtgcagaaaaatcaggcaggcagctagcgagtttgaccccacatgccctcttctgtttgtcttgcaccttgtctaaggaccctaaatgaacgataaacagagatggtagctatgagtatacaaaaggtaaatccacttaatcacatacagaagagcaacaacaaactgcttacgacaggtttggaagccacaggcgattctatggtcaatgtgaaggactagaaataaaaacccacatgtggaaaaag

SEQ ID NO: 279816 - DNA, 686 bp, Homo sapiens
acttgctttatgaatctgggtgcccctgtgttaggtgcatattatttaggatagttaagtcttcttgttgaattgagccctttaccattatgtaatgtccttttcgtcttttttgaactttattggtttaaagtctattttgtctgaaattaggattgcagcccctgcttttttctgctttctatatgtttggcttccatccctttattttgagcctataggtggcactgcatgtgggatgggtgacttcctttttctttgtttgtttagcggctcttttaagattgctgcaggatattgtctcatactttaagcagtcctgcatttgttaagtccagtcacaaggtaaggtttgaggagctcataataaatgaaatgcacaattatataatcttttcaattcctacactagtgggtggaggatagggattcaagaaggcagaggtcacaccaactggacttgtgaccacgagcaggtgctggctaatcctgaaagccactggatcttgtctcttcgctttctgtcttctaggatggcagtgctccctatggggccaggtatgtgggctccatggtggctgacgtgcaccgcaccctggtctatggaggaatcttcctgtacccagccaaccagaagagccctaagggcaaggtaattctcccttgtccactggctgtgcatccgg

SEQ ID NO: 279817 - DNA, 1308 bp, Homo sapiens
gctgcagccctcagaagtaagcaaggtttcctgccgggagaaaaggatttgaagcattccagccaaaatgacggacagaagccccttcgaaaccgacatgctcaccctgacccgctacgttatggaaaaggggcgtcaggccaaagggactggggagctcacccagctgctgaactcaatgctgacggccatcaaagccatctcctcggctgtgcgcaaggccggtctggcccacctgtatggaatcgcaggaagcgttaacgtgacgggagatgaggtgaagaaactggatgtgctatccaattccctggtgatcaacatgctccaatcctcctatagtacctgcgtcctggtctcagaagagaataaggacgccatcatcaccgccaaggagaagcgggggaaatacgtggtctgctttgacccactggatggatcttccaatattgactgcctggcctccatcggaaccatctttgccatctatagaaagacctcagaggatgagccttctgaaaaggatgccctgcagtgtggccgcaatattgtggccgcaggttatgcgctgtacggtagtgcaaccctggtggctctctccacagggcaaggcgtggacctcttcatgcttgacccggctcttggtgaatttgtcctggtggaaaaagatgtcaagattaagaagaaaggaaagatttacagcctgaatgagggctatgccaagtattttgatgcggccaccactgaatatgtgcagaaaaagaaattccctgaggatggcagtgctccctatggggccaggtatgtgggctccatggtggctgacgtgcaccgcaccctggtctatggaggaatcttcctgtacccagccaaccagaagagccctaagggcaagctccggctcctgtatgaatgcaatcccgtggcctacatcattgagcaggcaggaggcttggcgaccacggggacccagcctgtactggacgtgaagcccgaggcaattcaccagcgagtccccctcattctggggtcaccagaggatgtgcaggaatatctcacctgtgtgcagaaaaatcaggcaggcagctagcgagtttgaccccacatgccctcttctgtttgtcttgcaccttgtctaaggaccctaaatgaacgataaacagagatggtagctatgagtatacaaaaggtaaatccacttaatcacatacagaagagcaacaacaaactgcttacgacaggtttggaagccacaggcgattctatggtcaatgtgaaggactagaaataaaaacccacatgtggaaaaag

SEQ ID NO: 279818 - DNA, 677 bp, Homo sapiens
caaagatgaatccgttggtgagtttttgaaggactcttcccttcttgcctcctgggacccatgagctttgtttttctaatgaaggccataattgttcatagttcctagttgtacttgtgagcaaggggctgtgcacctccactgttggtgtggctgaaaggcttgtcttcctgtccttgcaagaacctgcctgggtgcagcaccctaggctcctgtctgtgggctctgtggtgtctgcatggctgaggctgctggggagatggctgctggcactggcagtgggccgttttctctctggttgtttgtatgatctttccctaagtcttgctttttcagtaggatgtgctcatgtggcattgttttgatttgtcttgatgagctcagtgagcctctttaatccatgactcagtgttgggaaactgtcaccattctgtggatagttccctcttcaatcctgcaattgcttgctggatgtgtactggtgtttcccattctctcttccatgtcttttagcctagtcccgccatttaagtcttagttctctcttcaggtgtggcaggtctctgtgaacccacctgctggattactttcaaagagcactttccattttctaggtttctatttgtctgtacatcactacccagcctgtctcataactccgtggagtgtggggtgcc

SEQ ID NO: 279819 - DNA, 638 bp, Homo sapiens
tcctaagaatagaaggtggtggtgtaagtcagactacctccaattgcagcttgaatagttttacaaaaagtaaatttgacactctatgcgtgtttaattgttatgtttcttaatttttaggaatcagtgcactccactgttacttgctgccacttcaggagcactggacactattcaatacctgttttctatcggtgctaactggagaaaaacagatattaaaggaaataatataatccatttatcagtgttaacctttcatacagaggttctcaaatatataataaaattaaatattcctgaactcccagtgtggaaaactttggtaggtgagtataatctctttataaatacatgttctgattattattcagtttagttattgatactctgaaagagagaaaataaaataatacatgcattatattttaaatatttaaaaatcatgaaataaacattttattaagaccagaaataaaaatatgaataataaagagctgcatttttgtgtgtgcaaacgtagttttatttccatgttaaaatcaaagatctgtgacccagactatattttacacaattatatttatttttattttccaactttctccagaagttcaaacatcctctccttcatcaaa

SEQ ID NO: 279820 - DNA, 1390 bp, Homo sapiens
tcctaagaatagaaggtggtggtgtaagtcagactacctccaattgcagcttgaatagttttacaaaaagtaaatttgacactctatgcgtgtttaattgttatgtttcttaatttttaggaatcagtgcactccactgttacttgctgccacttcaggagcactggacactattcaatacctgttttctatcggtgctaactggagaaaaacagatattaaaggaaataatataatccatttatcagtgttaacctttcatacagaggttctcaaatatataataaaattaaatattcctgaactcccagtgtggaaaactttggtaggcatttcaaatagatgttaaggaacaaggagctgttgcactttgggccttggcaggacaaacactaaaacaacaaaaatatatggcagaacaaattggatacagctttataataaatatgcttttgtcaccatcagctaaaatgcagtatgttggatatttgcttaagagcaggctatgcattaacactttttgccttcaataatcgctttcaacaatacttaatattggaaagtggaataatgaccatatctatttttgaacgttttcttgaatcaacagttgaaactgagaaggcaatggcagcatttcagattgttgtactggctaaagtcattagagatatggaccatattactttgtctgcaagaggtgttactattttagttgatagtctgtattcagttcagacttctactattgtcttgacagggaatttaatagcaagcctggctcattctagagctggtatcccagaagcatttaccacattaggaacaatccaacggctctgctatcatttgtactcgggaatagaagaggttcgtgcagcttgttcctctgctcttggctacttaacatacaatgcaaatgctttccgcatcctattaaaagaatgcaggaataaacctaatcagttcattcgtataaaaaataatatcagcagagatgcaagtattaacccagcatttttaaaggaatttcaaatgcaacaaacactggtgggacttccttccttaagtctggagaagaatggaggaccatccataattcctatctttaaaagagggaaggagcaccgaagaaaattaaaacctaaaattcaaccaaaagattctttgactttattacctcctgtaactaacttcatgggactcttcaaagcaacaaaaaagaccaaggattcccataatattttttctttttcatctacaattacatcagatatcacaaatgtatcaagaccaagaatagtgtgtttgaaccaacttgggaaacatgtccagaaagccaacccagagcctgcagaaggctaataaaacattttagaatgaaaagatt

SEQ ID NO: 279821 - DNA, 1190 bp, Homo sapiens
tcctaagaatagaaggtggtggtgtaagtcagactacctccaattgcagcttgaatagttttacaaaaagtaaatttgacactctatgcgtgtttaattgttatgtttcttaatttttaggaatcagtgcactccactgttacttgctgccacttcaggagcactggacactattcaatacctgttttctatcggtgctaactggagaaaaacagatattaaaggaaataatataatccatttatcagtgttaacctttcatacagaggttctcaaatatataataaaattaaatattcctgaactcccagtgtggaaaactttggtaggcatttcaaatagatgttaaggaacaaggagctgttgcactttgggccttggcaggacaaacactaaaacaacaaaaatatatggcagaacaaattggatacagctttataataaatatgcttttgtcaccatcagctaaaatgcagtatgttggatatttgcttaagagcaggctatgcattaacactttttgccttcaataatcgctttcaacaatacttaatattggaaagtggaataatgaccatatctatttttgaacgttttcttgaatcaacagttgaaactgagaaggcaatggcagcatttcagattgttgtactggctaaagtcattagagatatggaccatattactttgtctgcaagaggtgttactattttagttgatagtctgtattcagttcagacttctactattgtcttgacagggaatttaatagcaagcctggctcattctagagctggtatcccagaagcatttaccacattaggaacaatccaacggctctgctatcatttgtactcgggaatagaagagtctggagaagaatggaggaccatccataattcctatctttaaaagagggaaggagcaccgaagaaaattaaaacctaaaattcaaccaaaagattctttgactttattacctcctgtaactaacttcatgggactcttcaaagcaacaaaaaagaccaaggattcccataatattttttctttttcatctacaattacatcagatatcacaaatgtatcaagaccaagaatagtgtgtttgaaccaacttgggaaacatgtccagaaagccaacccagagcctgcagaaggctaataaaacattttagaatgaaaagatt

SEQ ID NO: 279822 - DNA, 1300 bp, Homo sapiens
tcctaagaatagaaggtggtggtgtaagtcagactacctccaattgcagcttgaatagttttacaaaaagtaaatttgacactctatgcgtgtttaattgttatgtttcttaatttttaggaatcagtgcactccactgttacttgctgccacttcaggagcactggacactattcaatacctgttttctatcggtgctaactggagaaaaacagatattaaaggaaataatataatccatttatcagtgttaacctttcatacagaggttctcaaatatataataaaattaaatattcctgaactcccagtgtggaaaactttggtaggcatttcaaatagatgttaaggaacaaggagctgttgcactttgggccttggcaggacaaacactaaaacaacaaaaatatatggcagaacaaattggatacagctttataataaatatgcttttgtcaccatcagctaaaatgcagtatgttggatatttgcttaagagcaggctatgcattaacactttttgccttcaataatcgctttcaacaatacttaatattggaaagtggaataatgaccatatctatttttgaacgttttcttgaatcaacagttgaaactgagaaggcaatggcagcatttcagattgttgtactggctaaagtcattagagatatggaccatattactttgtctgcaagaggtgttactattttagttgatagtctgtattcagttcagacttctactattgtcttgacagggaatttaatagcaagcctggctcattctagagctggtatcccagaagcatttaccacattaggaacaatccaacggctctgctatcatttgtactcgggaatagaagagtctggagaagaatggaggaccatccataattcctatctttaaaagagcatgtcacctggtgctatgtccaaagactttccaagaagcagaaaatctgaaactccttgaactaatgccaacagacagtgacctccagaaatcaaaagaactaaaaaaggaaattctactttattggtcaacctaatagtaagtgcatgagcctccatatgatgaatgggaatgaatggcttttttaactgtcctaccagctgtaagctaaatgataagcccactcccaggcttaaagcaagtcctggttttatggtagttgcaattgctgagaggtcacttggagagactccactggcagaaagagcttcttgtactattcgttgaatattttctctgtgaagctgttgagctgctggaggaacaatcccacctgttctga

SEQ ID NO: 279823 - DNA, 1123 bp, Homo sapiens
tcctaagaatagaaggtggtggtgtaagtcagactacctccaattgcagcttgaatagttttacaaaaagtaaatttgacactctatgcgtgtttaattgttatgtttcttaatttttaggaatcagtgcactccactgttacttgctgccacttcaggagcactggacactattcaatacctgttttctatcggtgctaactggagaaaaacagatattaaaggaaataatataatccatttatcagtgttaacctttcatacagaggttctcaaatatataataaaattaaatattcctgaactcccagtgtggaaaactttggtaggcatttcaaatagatgttaaggaacaaggagctgttgcactttgggccttggcaggacaaacactaaaacaacaaaaatatatggcagaacaaattggatacagctttataataaatatgcttttgtcaccatcagctaaaatgcagtatgttggatatttgcttaagagcaggctatgcattaacactttttgccttcaataatcgctttcaacaatacttaatattggaaagtggaataatgaccatatctatttttgaacgttttcttgaatcaacagttgaaactgagaaggcaatggcagcatttcagattgttgtactggctaaagtcattagagatatggaccatattactttgtctgcaagaggtgttactattttagttgatagtctgtattcagttcagacttctactattgtcttgacagggaatttaatagcaagcctggctcattctagagctggtatcccagaagcatttaccacattaggaacaatccaacggctctgctatcatttgtactcgggaatagaagagtctggagaagaatggaggaccatccataattcctatctttaaaagagagctctgcggatatagaagttacttgcgacaccaccagatgcaacctgaaggaattgagaaaaccaaaataactatcatatatggatatgaaccaagctgctaattaaacctggagaaaaatatcagcattaaacaataataaactatcccattttgagatgggtaatgggcagatgacatatctatgtaataaaaatttggaaag

SEQ ID NO: 279824 - DNA, 1203 bp, Homo sapiens
tcctaagaatagaaggtggtggtgtaagtcagactacctccaattgcagcttgaatagttttacaaaaagtaaatttgacactctatgcgtgtttaattgttatgtttcttaatttttaggaatcagtgcactccactgttacttgctgccacttcaggagcactggacactattcaatacctgttttctatcggtgctaactggagaaaaacagatattaaaggaaataatataatccatttatcagtgttaacctttcatacagaggttctcaaatatataataaaattaaatattcctgaactcccagtgtggaaaactttggtaggcatttcaaatagatgttaaggaacaaggagctgttgcactttgggccttggcaggacaaacactaaaacaacaaaaatatatggcagaacaaattggatacagctttataataaatatgcttttgtcaccatcagctaaaatgcagtatgttggatatttgcttaagagcaggctatgcattaacactttttgccttcaataatcgctttcaacaatacttaatattggaaagtggaataatgaccatatctatttttgaacgttttcttgaatcaacagttgaaactgagaaggcaatggcagcatttcagattgttgtactggctaaagtcattagagatatggaccatattactttgtctgcaagaggtgttactattttagttgatagtctgtattcagttcagacttctactattgtcttgacagggaatttaatagcaagcctggctcattctagagctggtatcccagaagcatttaccacattaggaacaatccaacggctctgctatcatttgtactcgggaatagaagagtctggagaagaatggaggaccatccataattcctatctttaaaagagttttcctaggacttcagctgagaccatgaaacatagaagtggagaaaagaaggaatgcattactgaaggaaaatcaataaatacggaagctgggaatgagctcagtttcttttggcaacaggattagttaaggttgggaccttattgtgaagacccttaaaagccaggatgaagtgtttgaggttttctatagcagttattaaaagtgtttgcaaaaaggaataagacagtagctcctgaaaacttttatatatgacaaatacaaaagaatgattttactttttcc

SEQ ID NO: 279825 - DNA, 494 bp, Homo sapiens
agtagtattcgttctcttattggtgctaacttgacataacaagctagcaaaccatatagtggtccccacaaatttttggcccctgacatctaaatgtctggaagtactgatctgttctcttagtatgttttagttatgtaaagaaaatagaactacatagaagtagaagtaatgagactatacctagggctctcaggagagacatttaattgtggctaatttttagggaaggagcaccgaagaaaattaaaacctaaaattcaaccaaaagattctttgactttattacctcctgtaactaacttcatgggactcttcaaagcaacaaaaaagaccaaggattcccataatattttttctttttcatctacaattacatcagatatcacaaatgtatcaagaccaagaatagtgtgtttgaaccaacttgggaaacatgtccagaaagccaacccagagcctgcagaaggctaataaaacattttagaatgaaa

SEQ ID NO: 279826 - DNA, 427 bp, Homo sapiens
taaacactccaggtggttctaaaatgcagttaagactgagaacaaccactagaaatcaatggcagttgacagctctctgtaaaaatatggcagttaagcttccgtctatacactgccatttgtttgcatacatatttgcttacacttgctccctcccttacagagactttcctatgaaatagctaattagaacattaagatattttaagaacaaagcccactggttaagaaagaattgtttcttcatttaggttcgtgcagcttgttcctctgctcttggctacttaacatacaatgcaaatgctttccgcatcctattaaaagaatgcaggaataaacctaatcagttcattcgtataaaaaataatatcagcagagatgcaagtattaacccagcatttttaaaggaatttcaaatgcaacaaac

SEQ ID NO: 279827 - DNA, 1484 bp, Homo sapiens
  misc_feature (829)..(829): n is a, c, g, or t
tggcacgaggcgagcacctaaagggcaatattttttgatctcctcttctcgtaaaggggatggaggcggagaaaccgaagtctgtgctgggcttggaagcggacgagggcgctgcgaggaggagcggaaggcggagatgcgccgcggctgcacacggtcgcccgcgccccactccccggcgcctgccttccgcggagacgtcgctggtgtctgccacgtgcggcagcccggagcccaggaggggagggcgggccgcctggcgggggtgggcaatgcctcccggcctccagacgctatataaacagacccggacgcgaggcagcggcggagggcgagcgtgacgctggaggaggagtgggagctcccagcctgcgcgggtcctctctttccctgccagggcttttccgggtaatctgggaccgacagggatgccagcaccccgtcatctcacccaaagggcgccaggccagagattcctggggaaaagtcgccggctgcaggcggttgtcccaggaattcctccatggtgccggcgggagcgcggcgagccggggcgcggcggctgcgggaggtggaggcgacccgggacagggccggtcccagggagaggggatcccccgagccgcgcgttccgccgttcaggccaggtagggggtggggaaggaggaggaagaggatcccgaagcaagacagagctgaggctcagagttctcaggcagcagcttctggaggacaccgtggagacccaaggcggctttatttgggtctgcaaacacccggggccccggttaagattcggcagggccaccccgctcctcccccgccttgnacgaccgcactccgcgcgccttgtcactgcgagggctacctgtcctcgcacactcctccgcgatggccagaaaacgtgggactcgagataagactctggcagatggtactcctccctccgcctaacgtatcaatgcaccaacgcccctgactgcacactcaggaacctgtggcagcctcgccaagggacagcgtgcccagcaccgtgcactgggcactcttggatctggagctcacaactccggaaggaatggggacttagatgaggtgacagacatgcatgcatgcaatgcaggctgaatccgcctgtctggagccaaaaataaacgccatggtcacctctttgttacaacctggatatgatgcccacatgcgtggggtagacatgcttgggatagataagcctgtggacttcagacggtattttctctttcccttttttcttctttctcgtcctcatctctgtccctccctccttttcttctcgccctatctcttcctccctttctactctctctagtgtctcacttgagaaagacctagatttgagtgggaagagttatgccttaaactgttctcattataaattcaaaatgtacttgaagaatacagatcgactgtatgatggcatgaataaagcgctatgctgtaaaaaa

SEQ ID NO: 279828 - DNA, 4794 bp, Homo sapiens
tcctttggatatatgaccagcagtgggattgctggatcttacgatggaattcccaaagatgttgaccaggaagatcaagctgtgggacatcaacgcccacatcacctgccgcctgtgcagcgggtacctcatcgacgccaccacggtgaccgagtgtctgcacaccttctgcaggagctgcctggtgaagtacctggaggagaacaacacctgccccacctgcaggattgtgatccaccagagccaccccctgcagtacatcggtcatgacagaaccatgcaagatattgtttacaaattggtaccaggcctccaagaagcggaaatgagaaagcagagggagttctatcacaaattgggcatggaggtgccgggagacatcaagggggagacctgctctgcaaaacagcacttagattcccatcggaatggtgaaaccaaagcagacgacagttcaaacaaagaggccgcggaggagaagccggaggaggacaacgactaccaccgcagcgacgagcaggtgagcatctgcctggagtgtaacagcagcaaactgcgcgggctgaagcggaagtggatccgctgctcagcccaggcgaccgtcttgcatctgaagaagttcatcgccaaaaaactcaacctttcatcctttaacgagctggacattttatgcaacgaggagatcctgggcaaggaccacacactcaagttcgtggttgtcactaggtggagattcaagaaggcgccgctcctgctgcactacagacccaagatggacttgctgtgaatggtgccacacagcgcccacagactgggccctcgcacccttgggtgctcccggccgccgcgcttaagaacattgcctctgggtgtcatgtggaccagacttctgaatagagaatatttataacttttgtatgagagagaattcacactcaacaagacactaccagcaccacgtttacagaggatgaaaacacttcacagtctcccagagccgatcgtcctctcccccgccccaccccgtgcttcagccttgcagggagagtgatgctccaggcaacacggttctgagtcaccttctgacacgagctccctctgcttgctttccaggtcttgaaaatctgaattcacttcagtttagtttatgaattttaggtttcatgataagcctcaagtgtagttggacttttattgaatccttcctaagttattgaaaaaatgtcttttcatggtgaatgacaatatttatgttgcctttagcttcttgaagatttagaagttatataaaaaattaatttaaaagcaaaccaaaagaggtttccattaacattatgatttaaccattgtatttaatttcccaccttatgaaacacaacagcagctccctgactggttcgcctttcattgtgtgaggtcggcacttggactcactcagaactgtcgctcacctgtggctgacacacccagccctggaaacggggccccagacgccacgtcgggatttctgacatgctcagcaggtagaccagaggccgtgtgaccagctcagtgctggtttacggaacaactcttacttttaaaaattacttgttcccccaaattgttgagtgccgccgtttggtttcctatgttttctttccctgttttgattttgctgaagggagaggtggtggtggttaggatcagagctctcctggcatccgtggggaggatttgctggtggtggcttcgggctcatgcccagacacactcactgccccgtctgtccaaggcctccccttcccctttgctggtgggaggagctcgtgtgctccttggccgcttactggaagggcgtttttcagagctgcagggacagggtgagcagctgaagggctaggagggaagccggcccccgctctgcagaagctgcatttcagctgaatctgtgtttcagcctcagttggttgcaccgttagcccctctcctcccggatggtcatgtttttgtcacattagagaataaacagccacacacacatttttttttttcctttaaaacagtaacttggaaatatgaaaaggccagaaggaggagcaagggctgttttctggagtggttgaggtgttgtcctgcagttgtcattgtcttctccaccgggctgttcccatttatttcctgtggaactgaatccctcctccctccactccttgggagcccaggtggtccttggccaccattcaggctttccaagaagccaaccaccttggagattttttttcttgaatttcgctgttttcttctgcttcctttagataaaaagcagctcaagagaccttatcttagggatgagaaaaacatgcatattaattccatctgagtgattgtcagtgtaaggccttttaaaacaaaagcaagttctttgttaggaattggtcaaaattcatctctttctttaagcccatcaactcccaggacggtttgagttactcagttacctaagcttgctattcatccaaatcattttctagagtcactgtataagggtctatgagtagctgtgtatgaataaatattacctgtctacctcaaaatacacatactgctgaagcattctgtacaaccgtgtgttatcacagtgcagttttaagtgtaacgttagaacttaggcattttcctgtgtggcggaataagaaaggattaaacagttacaagcctccaaattcaaataaaattaaatcacagttcagatgaaactgaatatcattgtaataatctcataatatatatttgtaactttgtagctatctttgaaatcacttgactttgcaatggtgctaagctgatagatttaaatacacagacgggcgagtggcgcccgtgtcgatgtcttcagccagtggtgaccctgcttttgtaaccgcgttaacctgacaaaacctcagcagcagaagtccctatttttctaggagttcatcgtgcagacagtcttcactacaggactcggccctggggcctctgcctctcgtctgaccttgcagccttagtcgttggaggctggagcgcaatggccctgccgtctgtggagcctctgggcggccttctttcctttctgtcaacctctcatttcacagaaaaaggctgaatttcattttttccagcatgaaagccaggatcggttagtggttggattctattggttttttttttaaacagatggagttactgtgaagaagttttcacaactatttatgctggtaaaacaaatgctgttaaatcaccttatgcgtcgttttcaacagcagtggggctaattacccggaatacggtctcaccgatgcagttttcatggacatagaaaattcaaatagaatatataatattgaatttaagatttggggggttaaaaaagaaaacttaactttataaaattatttattctattttaagccttctatcatattttcccatccaattgtttggtttcagtggtccagctttatttacaggcatataaaatgaaattgtgagatgttttgcaagcttctttttactttgagtagcttttaatttgtatgtttttatgtggatgaagagcattttttatgcttttgtgcaataggttccaatatgcatttattagacatctgtttaaatggtaatgtagcatttattttgctaaattgaaagggaacatagatggaattccaaaatatgtacattcagctgtttggtttttcgtttttcattgttattattgtgagaatgctgttattggggttgtgtgtgagtgcccgtcagccagtgatgcctcgggccacgctgtggggccacctcagtcctgcctgggtcctggtgccttggaccccacgtgcttgtggccaggctgcccctgggcggggccatgtggcctcagaccacaagagcggagctgccctggcccaagcactgcagctgcctgcacccccgggcttcgcagccttgcttgttttctctgaacagcaacagaacagtgttcacagcgattcaaagggtggcattgggttggacgttctgggtacaagccaacctagtcccacgttgtacgtgaatgtttaatgtgctctcaaaacatggaaaataagtttagtgcacatagctaaatcacaaaacatccaatttctctgtttcctcaggaagtcattactgcgccaccacatcacatgaccttaacatgatcaatgtatttctctgccttgacatttaaatacataaattgagataagtagattagaaaatcattcaaatgataccataatttgtacgggacagggtgcgggcaatggccacgtggccaaggccccgcaggaacgcgccgaggtctccctcaccctccaggtgtccttcgcacccaacagtgcgtctgaggaacgagctgcagtttgagcgttcccctgagatgtgcgtagcctccgtgtaaatgtccactcccatggcttaattgcctatcagacgcattttcccagacgaaagcaatgttgggttggggaagacagtgcagccacccagcctttaccagcagcgtacggcagacgaaggcagtcgaggtgtggaggtgatcacgaagatacatgtgtttgactgtttaatttgaaagtttacattttttatgctttgtgttggtgtgtaatttttgtactcttggtggctagtttttgtcaaatcttttttggaatattgcttaaatgttttgattttatgatagtgaagcttgtattcagtgttttgccaattaatattatatgcttgtaataaaagcaaaagaaaagctta

SEQ ID NO: 279829 - DNA, 5378 bp, Homo sapiens
tcctttggatatatgaccagcagtgggattgctggatcttacgatggaattcccaaagatgttgaccaggaagatcaagctgtgggacatcaacgcccacatcacctgccgcctgtgcagcgggtacctcatcgacgccaccacggtgaccgagtgtctgcacaccttctgcaggagctgcctggtgaagtacctggaggagaacaacacctgccccacctgcaggattgtgatccaccagagccaccccctgcagtacatcggtcatgacagaaccatgcaagatattgtttacaaattggtaccaggcctccaagaagcggaaatgagaaagcagagggagttctatcacaaattgggcatggaggtgccgggagacatcaagggggagacctgctctgcaaaacagcacttagattcccatcggaatggtgaaaccaaagcagacgacagttcaaacaaagaggccgcggaggagaagccggaggaggacaacgactaccaccgcagcgacgagcaggtgagcatctgcctggagtgtaacagcagcaaactgcgcgggctgaagcggaagtggatccgctgctcagcccaggcgaccgtcttgcatctgaagaagttcatcgccaaaaaactcaacctttcatcctttaacgagctggacattttatgcaacgaggagatcctgggcaaggaccacacactcaagttcgtggttgtcactaggtggagattcaagaaggcgccgctcctgctgcactacagacccaagatggacttgctgtgaatggtgccacacagcgcccacagactgggccctcgcacccttgggtgctcccggccgccgcgcttaagaacattgcctctgggtgtcatgtggaccagacttctgaatagagaatatttataacttttgtatgagagagaattcacactcaacaagacactaccagcaccacgtttacagaggatgaaaacacttcacagtctcccagagccgatcgtcctctcccccgccccaccccgtgcttcagccttgcagggagagtgatgctccaggcaacacggttctgagtcaccttctgacacgagctccctctgcttgctttccaggtcttgaaaatctgaattcacttcagtttagtttatgaattttaggtttcatgataagcctcaagtgtagttggacttttattgaatccttcctaagttattgaaaaaatgtcttttcatggtgaatgacaatatttatgttgcctttagcttcttgaagatttagaagttatataaaaaattaatttaaaagcaaaccaaaagaggtttccattaacattatgatttaaccattgtatttaatttcccaccttatgaaacacaacagcagctccctgactggttcgcctttcattgtgtgaggtcggcacttggactcactcagaactgtcgctcacctgtggctgacacacccagccctggaaacggggccccagacgccacgtcgggatttctgacatgctcagcaggtagaccagaggccgtgtgaccagctcagtgctggtttacggaacaactcttacttttaaaaattacttgttcccccaaattgttgagtgccgccgtttggtttcctatgttttctttccctgttttgattttgctgaagggagaggtggtggtggttaggatcagagctctcctggcatccgtggggaggatttgctggtggtggcttcgggctcatgcccagacacactcactgccccgtctgtccaaggcctccccttcccctttgctggtgggaggagctcgtgtgctccttggccgcttactggaagggcgtttttcagagctgcagggacagggtgagcagctgaagggctaggagggaagccggcccccgctctgcagaagctgcatttcagctgaatctgtgtttcagcctcagttggttgcaccgttagcccctctcctcccggatggtcatgtttttgtcacattagagaataaacagccacacacacatttttttttttcctttaaaacagtaacttggaaatatgaaaaggccagaaggaggagcaagggctgttttctggagtggttgaggtgttgtcctgcagttgtcattgtcttctccaccgggctgttcccatttatttcctgtggaactgaatccctcctccctccactccttgggagcccaggtggtccttggccaccattcaggctttccaagaagccaaccaccttggagattttttttcttgaatttcgctgttttcttctgcttcctttagataaaaagcagctcaagagaccttatcttagggatgagaaaaacatgcatattaattccatctgagtgattgtcagtgtaaggccttttaaaacaaaagcaagttctttgttaggaattggtcaaaattcatctctttctttaagcccatcaactcccaggacggtttgagttactcagttacctaagcttgctattcatccaaatcattttctagagtcactgtataagggtctatgagtagctgtgtatgaataaatattacctgtctacctcaaaatacacatactgctgaagcattctgtacaaccgtgtgttatcacagtgcagttttaagtgtaacgttagaacttaggcattttcctgtgtggcggaataagaaaggattaaacagttacaagcctccaaattcaaataaaattaaatcacagttcagatgaaactgaatatcattgtaataatctcataatatatatttgtaactttgtagctatctttgaaatcacttgactttgcaatggtgctaagctgatagatttaaatacacagacgggcgagtggcgcccgtgtcgatgtcttcagccagtggtgaccctgcttttgtaaccgcgttaacctgacaaaacctcagcagcagaagtccctatttttctaggagttcatcgtgcagacagtcttcactacaggactcggccctggggcctctgcctctcgtctgaccttgcagccttagtcgttggaggctggagcgcaatggccctgccgtctgtggagcctctgggcggccttctttcctttctgtcaacctctcatttcacagaaaaaggctgaatttcattttttccagcatgaaagccaggatcggttagtggttggattctattggttttttttttaaacagatggagttactgtgaagaagttttcacaactatttatgctggtaaaacaaatgctgttaaatcaccttatgcgtcgttttcaacagcagtggggctaattacccggaatacggtctcaccgatgcagttttcatggacatagaaaattcaaatagaatatataatattgaatttaagatttggggggttaaaaaagaaaacttaactttataaaattatttattctattttaagccttctatcatattttcccatccaattgtttggtttcagtggtccagctttatttacaggcatataaaatgaaattgtgagatgttttgcaagcttctttttactttgagtagcttttaatttgtatgtttttatgtggatgaagagcattttttatgcttttgtgcaataggttccaatatgcatttattagacatctgtttaaatggtaatgtagcatttattttgctaaattgaaagggaacatagatggaattccaaaatatgtacattcagctgtttggtttttcgtttttcattgttattattgtgagaatgctgttattggggttgtgtgtgagtgcccgtcagccagtgatgcctcgggccacgctgtggggccacctcagtcctgcctgggtcctggtgccttggaccccacgtgcttgtggccaggctgcccctgggcggggccatgtggcctcagaccacaagagcggagctgccctggcccaagcactgcagctgcctgcacccccgggcttcgcagccttgcttgttttctctgaacagcaacagaacagtgttcacagcgattcaaagggtggcattgggttggacgttctgggtacaagccaacctagtcccacgttgtacgtgaatgtttaatgtgctctcaaaacatggaaaataagtttagtgcacatagctaaatcacaaaacatccaatttctctgtttcctcaggaagtcattactgcgccaccacatcacatgaccttaacatgatcaatgtatttctctgccttgacatttaaatacataaattgagataagtagattagaaaatcattcaaatgataccataatttgtacgggacagggtgcgggcaatggccacgtggccaaggccccgcaggaacgcgccgaggtctccctcaccctccaggtgtccttcgcacccaacagtgcgtctgaggaacgagctgcagtttgagcgttcccctgagatgtgcgtagcctccgtgtaaatgtccactcccatggcttaattgcctatcagacgcattttcccagacgaaagcaatgttgggttggggaagacagtgcagccacccagcctttaccagcagcgtacggcagacgaaggcagtcgaggtgtggaggtgatcacgaagatacatgtgtttgactgtttaatttgaaagtttacattttttatgctttgtgttggtgtgtaatttttgtactcttggtggctagtttttgtcaaatcttttttggaatattgcttaaatgttttgattttatgatagtgaagcttgtattcagtgttttgccaattaatattatatgcttgtaataaaagcaaaagaaaagcttaagtgaaagtgtttcttggctggaaatgtattacataaatcatttgtatgagcatgagagatgacttgctcatgggatgagcaatgctgtgggtattggatggaccactcaggcagcctggccgcacacacacacatgcatgctacatatgtgtacgctcagaccacatgcctgcacatatgtccacacaccagcccacggctcccttcctcaccccagccctccccactcccaggttaaccaatgtctcgatttgcttcaggcggcatttgtaaactgtcaccctgcttgcaaaccctcatttaaattggtccagcatttgctaccagagtttaggccacaaactttgtaaagctcagtttgtctccttgcagaaagaggttgctgcagtttggagctggttatgccaaggaaaatacggctaaaaaagaacttactgattcccataggtgtgtcaactgacaaatgaatgttccatctccctacgacaatttgctgcccctccccaaaaaaagcactatggccaaaatttcagtttttaaaggttaagtagggtgggataccgggggggatctctagatcacc

SEQ ID NO: 279830 - DNA, 4740 bp, Homo sapiens
tcctttggatatatgaccagcagtgggattgctggatcttacgatggaattcccaaagatgttgaccaggaagatcaagctgtgggacatcaacgcccacatcacctgccgcctgtgcagcgggtacctcatcgacgccaccacggtgaccgagtgtctgcacaccttctgcaggagctgcctggtgaagtacctggaggagaacaacacctgccccacctgcaggattgtgatccaccagagccaccccctgcagtacatcggtcatgacagaaccatgcaagatattgtttacaaattggtaccaggcctccaagaagcggaaatgagaaagcagagggagttctatcacaaattgggcatggaggtgccgggagacatcaagggggagacctgctctgcaaaacagcacttagattcccatcggaatggtgaaaccaaagcagacgacagttcaaacaaagaggccgcggaggagaagccggaggaggacaacgactaccaccgcagcgacgagcaggtgagcatctgcctggagtgtaacagcagcaaactgcgcgggctgaagcggaagtggatccgctgctcagcccaggcgaccgtcttgcatctgaagaagttcatcgccaaaaaactcaacctttcatcctttaacgagctggacattttatgcaacgaggagatcctgggcaaggaccacacactcaagttcgtggttgtcactaggtggagattcaagaaggcgccgctcctgctgcactacagacccaagatggacttgctgtgaatggtgccacacagcgcccacagactgggccctcgcacccttgggtgctcccggccgccgcgcttaagaacattgcctctgggtgtcatgtggaccagacttctgaatagagaatatttataacttttgtatgagagagaattcacactcaacaagacactaccagcaccacgtttacagaggatgaaaacacttcacagtctcccagagccgatcgtcctctcccccgccccaccccgtgcttcagccttgcagggagagtgatgctccaggcaacacggttctgagtcaccttctgacacgagctccctctgcttgctttccaggtcttgaaaatctgaattcacttcagtttagtttatgaattttaggtttcatgataagcctcaagtgtagttggacttttattgaatccttcctaagttattgaaaaaatgtcttttcatggtgaatgacaatatttatgttgcctttagcttcttgaagatttagaagttatataaaaaattaatttaaaagcaaaccaaaagaggtttccattaacattatgatttaaccattgtatttaatttcccaccttatgaaacacaacagcagctccctgactggttcgcctttcattgtgtgaggtcggcacttggactcactcagaactgtcgctcacctgtggctgacacacccagccctggaaacggggccccagacgccacgtcgggatttctgacatgctcagcaggtagaccagaggccgtgtgaccagctcagtgctggtttacggaacaactcttacttttatctttccctgttttgattttgctgaagggagaggtggtggtggttaggatcagagctctcctggcatccgtggggaggatttgctggtggtggcttcgggctcatgcccagacacactcactgccccgtctgtccaaggcctccccttcccctttgctggtgggaggagctcgtgtgctccttggccgcttactggaagggcgtttttcagagctgcagggacagggtgagcagctgaagggctaggagggaagccggcccccgctctgcagaagctgcatttcagctgaatctgtgtttcagcctcagttggttgcaccgttagcccctctcctcccggatggtcatgtttttgtcacattagagaataaacagccacacacacatttttttttttcctttaaaacagtaacttggaaatatgaaaaggccagaaggaggagcaagggctgttttctggagtggttgaggtgttgtcctgcagttgtcattgtcttctccaccgggctgttcccatttatttcctgtggaactgaatccctcctccctccactccttgggagcccaggtggtccttggccaccattcaggctttccaagaagccaaccaccttggagattttttttcttgaatttcgctgttttcttctgcttcctttagataaaaagcagctcaagagaccttatcttagggatgagaaaaacatgcatattaattccatctgagtgattgtcagtgtaaggccttttaaaacaaaagcaagttctttgttaggaattggtcaaaattcatctctttctttaagcccatcaactcccaggacggtttgagttactcagttacctaagcttgctattcatccaaatcattttctagagtcactgtataagggtctatgagtagctgtgtatgaataaatattacctgtctacctcaaaatacacatactgctgaagcattctgtacaaccgtgtgttatcacagtgcagttttaagtgtaacgttagaacttaggcattttcctgtgtggcggaataagaaaggattaaacagttacaagcctccaaattcaaataaaattaaatcacagttcagatgaaactgaatatcattgtaataatctcataatatatatttgtaactttgtagctatctttgaaatcacttgactttgcaatggtgctaagctgatagatttaaatacacagacgggcgagtggcgcccgtgtcgatgtcttcagccagtggtgaccctgcttttgtaaccgcgttaacctgacaaaacctcagcagcagaagtccctatttttctaggagttcatcgtgcagacagtcttcactacaggactcggccctggggcctctgcctctcgtctgaccttgcagccttagtcgttggaggctggagcgcaatggccctgccgtctgtggagcctctgggcggccttctttcctttctgtcaacctctcatttcacagaaaaaggctgaatttcattttttccagcatgaaagccaggatcggttagtggttggattctattggttttttttttaaacagatggagttactgtgaagaagttttcacaactatttatgctggtaaaacaaatgctgttaaatcaccttatgcgtcgttttcaacagcagtggggctaattacccggaatacggtctcaccgatgcagttttcatggacatagaaaattcaaatagaatatataatattgaatttaagatttggggggttaaaaaagaaaacttaactttataaaattatttattctattttaagccttctatcatattttcccatccaattgtttggtttcagtggtccagctttatttacaggcatataaaatgaaattgtgagatgttttgcaagcttctttttactttgagtagcttttaatttgtatgtttttatgtggatgaagagcattttttatgcttttgtgcaataggttccaatatgcatttattagacatctgtttaaatggtaatgtagcatttattttgctaaattgaaagggaacatagatggaattccaaaatatgtacattcagctgtttggtttttcgtttttcattgttattattgtgagaatgctgttattggggttgtgtgtgagtgcccgtcagccagtgatgcctcgggccacgctgtggggccacctcagtcctgcctgggtcctggtgccttggaccccacgtgcttgtggccaggctgcccctgggcggggccatgtggcctcagaccacaagagcggagctgccctggcccaagcactgcagctgcctgcacccccgggcttcgcagccttgcttgttttctctgaacagcaacagaacagtgttcacagcgattcaaagggtggcattgggttggacgttctgggtacaagccaacctagtcccacgttgtacgtgaatgtttaatgtgctctcaaaacatggaaaataagtttagtgcacatagctaaatcacaaaacatccaatttctctgtttcctcaggaagtcattactgcgccaccacatcacatgaccttaacatgatcaatgtatttctctgccttgacatttaaatacataaattgagataagtagattagaaaatcattcaaatgataccataatttgtacgggacagggtgcgggcaatggccacgtggccaaggccccgcaggaacgcgccgaggtctccctcaccctccaggtgtccttcgcacccaacagtgcgtctgaggaacgagctgcagtttgagcgttcccctgagatgtgcgtagcctccgtgtaaatgtccactcccatggcttaattgcctatcagacgcattttcccagacgaaagcaatgttgggttggggaagacagtgcagccacccagcctttaccagcagcgtacggcagacgaaggcagtcgaggtgtggaggtgatcacgaagatacatgtgtttgactgtttaatttgaaagtttacattttttatgctttgtgttggtgtgtaatttttgtactcttggtggctagtttttgtcaaatcttttttggaatattgcttaaatgttttgattttatgatagtgaagcttgtattcagtgttttgccaattaatattatatgcttgtaataaaagcaaaagaaaagctta

SEQ ID NO: 279831 - DNA, 4582 bp, Homo sapiens
ggtggttatcagtcacgaggctcagctagagccaccccctgcagtacatcggtcatgacagaaccatgcaagatattgtttacaaattggtaccaggcctccaagaagcggaaatgagaaagcagagggagttctatcacaaattgggcatggaggtgccgggagacatcaagggggagacctgctctgcaaaacagcacttagattcccatcggaatggtgaaaccaaagcagacgacagttcaaacaaagaggccgcggaggagaagccggaggaggacaacgactaccaccgcagcgacgagcaggtgagcatctgcctggagtgtaacagcagcaaactgcgcgggctgaagcggaagtggatccgctgctcagcccaggcgaccgtcttgcatctgaagaagttcatcgccaaaaaactcaacctttcatcctttaacgagctggacattttatgcaacgaggagatcctgggcaaggaccacacactcaagttcgtggttgtcactaggtggagattcaagaaggcgccgctcctgctgcactacagacccaagatggacttgctgtgaatggtgccacacagcgcccacagactgggccctcgcacccttgggtgctcccggccgccgcgcttaagaacattgcctctgggtgtcatgtggaccagacttctgaatagagaatatttataacttttgtatgagagagaattcacactcaacaagacactaccagcaccacgtttacagaggatgaaaacacttcacagtctcccagagccgatcgtcctctcccccgccccaccccgtgcttcagccttgcagggagagtgatgctccaggcaacacggttctgagtcaccttctgacacgagctccctctgcttgctttccaggtcttgaaaatctgaattcacttcagtttagtttatgaattttaggtttcatgataagcctcaagtgtagttggacttttattgaatccttcctaagttattgaaaaaatgtcttttcatggtgaatgacaatatttatgttgcctttagcttcttgaagatttagaagttatataaaaaattaatttaaaagcaaaccaaaagaggtttccattaacattatgatttaaccattgtatttaatttcccaccttatgaaacacaacagcagctccctgactggttcgcctttcattgtgtgaggtcggcacttggactcactcagaactgtcgctcacctgtggctgacacacccagccctggaaacggggccccagacgccacgtcgggatttctgacatgctcagcaggtagaccagaggccgtgtgaccagctcagtgctggtttacggaacaactcttacttttaaaaattacttgttcccccaaattgttgagtgccgccgtttggtttcctatgttttctttccctgttttgattttgctgaagggagaggtggtggtggttaggatcagagctctcctggcatccgtggggaggatttgctggtggtggcttcgggctcatgcccagacacactcactgccccgtctgtccaaggcctccccttcccctttgctggtgggaggagctcgtgtgctccttggccgcttactggaagggcgtttttcagagctgcagggacagggtgagcagctgaagggctaggagggaagccggcccccgctctgcagaagctgcatttcagctgaatctgtgtttcagcctcagttggttgcaccgttagcccctctcctcccggatggtcatgtttttgtcacattagagaataaacagccacacacacatttttttttttcctttaaaacagtaacttggaaatatgaaaaggccagaaggaggagcaagggctgttttctggagtggttgaggtgttgtcctgcagttgtcattgtcttctccaccgggctgttcccatttatttcctgtggaactgaatccctcctccctccactccttgggagcccaggtggtccttggccaccattcaggctttccaagaagccaaccaccttggagattttttttcttgaatttcgctgttttcttctgcttcctttagataaaaagcagctcaagagaccttatcttagggatgagaaaaacatgcatattaattccatctgagtgattgtcagtgtaaggccttttaaaacaaaagcaagttctttgttaggaattggtcaaaattcatctctttctttaagcccatcaactcccaggacggtttgagttactcagttacctaagcttgctattcatccaaatcattttctagagtcactgtataagggtctatgagtagctgtgtatgaataaatattacctgtctacctcaaaatacacatactgctgaagcattctgtacaaccgtgtgttatcacagtgcagttttaagtgtaacgttagaacttaggcattttcctgtgtggcggaataagaaaggattaaacagttacaagcctccaaattcaaataaaattaaatcacagttcagatgaaactgaatatcattgtaataatctcataatatatatttgtaactttgtagctatctttgaaatcacttgactttgcaatggtgctaagctgatagatttaaatacacagacgggcgagtggcgcccgtgtcgatgtcttcagccagtggtgaccctgcttttgtaaccgcgttaacctgacaaaacctcagcagcagaagtccctatttttctaggagttcatcgtgcagacagtcttcactacaggactcggccctggggcctctgcctctcgtctgaccttgcagccttagtcgttggaggctggagcgcaatggccctgccgtctgtggagcctctgggcggccttctttcctttctgtcaacctctcatttcacagaaaaaggctgaatttcattttttccagcatgaaagccaggatcggttagtggttggattctattggttttttttttaaacagatggagttactgtgaagaagttttcacaactatttatgctggtaaaacaaatgctgttaaatcaccttatgcgtcgttttcaacagcagtggggctaattacccggaatacggtctcaccgatgcagttttcatggacatagaaaattcaaatagaatatataatattgaatttaagatttggggggttaaaaaagaaaacttaactttataaaattatttattctattttaagccttctatcatattttcccatccaattgtttggtttcagtggtccagctttatttacaggcatataaaatgaaattgtgagatgttttgcaagcttctttttactttgagtagcttttaatttgtatgtttttatgtggatgaagagcattttttatgcttttgtgcaataggttccaatatgcatttattagacatctgtttaaatggtaatgtagcatttattttgctaaattgaaagggaacatagatggaattccaaaatatgtacattcagctgtttggtttttcgtttttcattgttattattgtgagaatgctgttattggggttgtgtgtgagtgcccgtcagccagtgatgcctcgggccacgctgtggggccacctcagtcctgcctgggtcctggtgccttggaccccacgtgcttgtggccaggctgcccctgggcggggccatgtggcctcagaccacaagagcggagctgccctggcccaagcactgcagctgcctgcacccccgggcttcgcagccttgcttgttttctctgaacagcaacagaacagtgttcacagcgattcaaagggtggcattgggttggacgttctgggtacaagccaacctagtcccacgttgtacgtgaatgtttaatgtgctctcaaaacatggaaaataagtttagtgcacatagctaaatcacaaaacatccaatttctctgtttcctcaggaagtcattactgcgccaccacatcacatgaccttaacatgatcaatgtatttctctgccttgacatttaaatacataaattgagataagtagattagaaaatcattcaaatgataccataatttgtacgggacagggtgcgggcaatggccacgtggccaaggccccgcaggaacgcgccgaggtctccctcaccctccaggtgtccttcgcacccaacagtgcgtctgaggaacgagctgcagtttgagcgttcccctgagatgtgcgtagcctccgtgtaaatgtccactcccatggcttaattgcctatcagacgcattttcccagacgaaagcaatgttgggttggggaagacagtgcagccacccagcctttaccagcagcgtacggcagacgaaggcagtcgaggtgtggaggtgatcacgaagatacatgtgtttgactgtttaatttgaaagtttacattttttatgctttgtgttggtgtgtaatttttgtactcttggtggctagtttttgtcaaatcttttttggaatattgcttaaatgttttgattttatgatagtgaagcttgtattcagtgttttgccaattaatattatatgcttgtaataaaagcaaaagaaaagctta

SEQ ID NO: 279832 - DNA, 4551 bp, Homo sapiens
ggcttattcgacggtgttctgtcatgacagaaccatgcaagatattgtttacaaattggtaccaggcctccaagaagcggaaatgagaaagcagagggagttctatcacaaattgggcatggaggtgccgggagacatcaagggggagacctgctctgcaaaacagcacttagattcccatcggaatggtgaaaccaaagcagacgacagttcaaacaaagaggccgcggaggagaagccggaggaggacaacgactaccaccgcagcgacgagcaggtgagcatctgcctggagtgtaacagcagcaaactgcgcgggctgaagcggaagtggatccgctgctcagcccaggcgaccgtcttgcatctgaagaagttcatcgccaaaaaactcaacctttcatcctttaacgagctggacattttatgcaacgaggagatcctgggcaaggaccacacactcaagttcgtggttgtcactaggtggagattcaagaaggcgccgctcctgctgcactacagacccaagatggacttgctgtgaatggtgccacacagcgcccacagactgggccctcgcacccttgggtgctcccggccgccgcgcttaagaacattgcctctgggtgtcatgtggaccagacttctgaatagagaatatttataacttttgtatgagagagaattcacactcaacaagacactaccagcaccacgtttacagaggatgaaaacacttcacagtctcccagagccgatcgtcctctcccccgccccaccccgtgcttcagccttgcagggagagtgatgctccaggcaacacggttctgagtcaccttctgacacgagctccctctgcttgctttccaggtcttgaaaatctgaattcacttcagtttagtttatgaattttaggtttcatgataagcctcaagtgtagttggacttttattgaatccttcctaagttattgaaaaaatgtcttttcatggtgaatgacaatatttatgttgcctttagcttcttgaagatttagaagttatataaaaaattaatttaaaagcaaaccaaaagaggtttccattaacattatgatttaaccattgtatttaatttcccaccttatgaaacacaacagcagctccctgactggttcgcctttcattgtgtgaggtcggcacttggactcactcagaactgtcgctcacctgtggctgacacacccagccctggaaacggggccccagacgccacgtcgggatttctgacatgctcagcaggtagaccagaggccgtgtgaccagctcagtgctggtttacggaacaactcttacttttaaaaattacttgttcccccaaattgttgagtgccgccgtttggtttcctatgttttctttccctgttttgattttgctgaagggagaggtggtggtggttaggatcagagctctcctggcatccgtggggaggatttgctggtggtggcttcgggctcatgcccagacacactcactgccccgtctgtccaaggcctccccttcccctttgctggtgggaggagctcgtgtgctccttggccgcttactggaagggcgtttttcagagctgcagggacagggtgagcagctgaagggctaggagggaagccggcccccgctctgcagaagctgcatttcagctgaatctgtgtttcagcctcagttggttgcaccgttagcccctctcctcccggatggtcatgtttttgtcacattagagaataaacagccacacacacatttttttttttcctttaaaacagtaacttggaaatatgaaaaggccagaaggaggagcaagggctgttttctggagtggttgaggtgttgtcctgcagttgtcattgtcttctccaccgggctgttcccatttatttcctgtggaactgaatccctcctccctccactccttgggagcccaggtggtccttggccaccattcaggctttccaagaagccaaccaccttggagattttttttcttgaatttcgctgttttcttctgcttcctttagataaaaagcagctcaagagaccttatcttagggatgagaaaaacatgcatattaattccatctgagtgattgtcagtgtaaggccttttaaaacaaaagcaagttctttgttaggaattggtcaaaattcatctctttctttaagcccatcaactcccaggacggtttgagttactcagttacctaagcttgctattcatccaaatcattttctagagtcactgtataagggtctatgagtagctgtgtatgaataaatattacctgtctacctcaaaatacacatactgctgaagcattctgtacaaccgtgtgttatcacagtgcagttttaagtgtaacgttagaacttaggcattttcctgtgtggcggaataagaaaggattaaacagttacaagcctccaaattcaaataaaattaaatcacagttcagatgaaactgaatatcattgtaataatctcataatatatatttgtaactttgtagctatctttgaaatcacttgactttgcaatggtgctaagctgatagatttaaatacacagacgggcgagtggcgcccgtgtcgatgtcttcagccagtggtgaccctgcttttgtaaccgcgttaacctgacaaaacctcagcagcagaagtccctatttttctaggagttcatcgtgcagacagtcttcactacaggactcggccctggggcctctgcctctcgtctgaccttgcagccttagtcgttggaggctggagcgcaatggccctgccgtctgtggagcctctgggcggccttctttcctttctgtcaacctctcatttcacagaaaaaggctgaatttcattttttccagcatgaaagccaggatcggttagtggttggattctattggttttttttttaaacagatggagttactgtgaagaagttttcacaactatttatgctggtaaaacaaatgctgttaaatcaccttatgcgtcgttttcaacagcagtggggctaattacccggaatacggtctcaccgatgcagttttcatggacatagaaaattcaaatagaatatataatattgaatttaagatttggggggttaaaaaagaaaacttaactttataaaattatttattctattttaagccttctatcatattttcccatccaattgtttggtttcagtggtccagctttatttacaggcatataaaatgaaattgtgagatgttttgcaagcttctttttactttgagtagcttttaatttgtatgtttttatgtggatgaagagcattttttatgcttttgtgcaataggttccaatatgcatttattagacatctgtttaaatggtaatgtagcatttattttgctaaattgaaagggaacatagatggaattccaaaatatgtacattcagctgtttggtttttcgtttttcattgttattattgtgagaatgctgttattggggttgtgtgtgagtgcccgtcagccagtgatgcctcgggccacgctgtggggccacctcagtcctgcctgggtcctggtgccttggaccccacgtgcttgtggccaggctgcccctgggcggggccatgtggcctcagaccacaagagcggagctgccctggcccaagcactgcagctgcctgcacccccgggcttcgcagccttgcttgttttctctgaacagcaacagaacagtgttcacagcgattcaaagggtggcattgggttggacgttctgggtacaagccaacctagtcccacgttgtacgtgaatgtttaatgtgctctcaaaacatggaaaataagtttagtgcacatagctaaatcacaaaacatccaatttctctgtttcctcaggaagtcattactgcgccaccacatcacatgaccttaacatgatcaatgtatttctctgccttgacatttaaatacataaattgagataagtagattagaaaatcattcaaatgataccataatttgtacgggacagggtgcgggcaatggccacgtggccaaggccccgcaggaacgcgccgaggtctccctcaccctccaggtgtccttcgcacccaacagtgcgtctgaggaacgagctgcagtttgagcgttcccctgagatgtgcgtagcctccgtgtaaatgtccactcccatggcttaattgcctatcagacgcattttcccagacgaaagcaatgttgggttggggaagacagtgcagccacccagcctttaccagcagcgtacggcagacgaaggcagtcgaggtgtggaggtgatcacgaagatacatgtgtttgactgtttaatttgaaagtttacattttttatgctttgtgttggtgtgtaatttttgtactcttggtggctagtttttgtcaaatcttttttggaatattgcttaaatgttttgattttatgatagtgaagcttgtattcagtgttttgccaattaatattatatgcttgtaataaaagcaaaagaaaagctta

SEQ ID NO: 279833 - DNA, 4533 bp, Homo sapiens
aactctcaactattatgttaataacacagaattaacagggtgaggttatagttcacaaaatggcaagcagacgataaacaggttttcagataaggtatgtaagattctttttctgcagtgttgaagtcaaagcagatgtctgatctcaaaaaggtcagcagtcctagattgaggaattagtgaaatatgtctaaggaagcctccagaaccgtccgggggaaccctcctgctgcgctctcaccagcgtcctttcccgcaggtgagcatctgcctggagtgtaacagcagcaaactgcgcgggctgaagcggaagtggatccgctgctcagcccaggcgaccgtcttgcatctgaagaagttcatcgccaaaaaactcaacctttcatcctttaacgagctggacattttatgcaacgaggagatcctgggcaaggaccacacactcaagttcgtggttgtcactaggtggagattcaagaaggcgccgctcctgctgcactacagacccaagatggacttgctgtgaatggtgccacacagcgcccacagactgggccctcgcacccttgggtgctcccggccgccgcgcttaagaacattgcctctgggtgtcatgtggaccagacttctgaatagagaatatttataacttttgtatgagagagaattcacactcaacaagacactaccagcaccacgtttacagaggatgaaaacacttcacagtctcccagagccgatcgtcctctcccccgccccaccccgtgcttcagccttgcagggagagtgatgctccaggcaacacggttctgagtcaccttctgacacgagctccctctgcttgctttccaggtcttgaaaatctgaattcacttcagtttagtttatgaattttaggtttcatgataagcctcaagtgtagttggacttttattgaatccttcctaagttattgaaaaaatgtcttttcatggtgaatgacaatatttatgttgcctttagcttcttgaagatttagaagttatataaaaaattaatttaaaagcaaaccaaaagaggtttccattaacattatgatttaaccattgtatttaatttcccaccttatgaaacacaacagcagctccctgactggttcgcctttcattgtgtgaggtcggcacttggactcactcagaactgtcgctcacctgtggctgacacacccagccctggaaacggggccccagacgccacgtcgggatttctgacatgctcagcaggtagaccagaggccgtgtgaccagctcagtgctggtttacggaacaactcttacttttaaaaattacttgttcccccaaattgttgagtgccgccgtttggtttcctatgttttctttccctgttttgattttgctgaagggagaggtggtggtggttaggatcagagctctcctggcatccgtggggaggatttgctggtggtggcttcgggctcatgcccagacacactcactgccccgtctgtccaaggcctccccttcccctttgctggtgggaggagctcgtgtgctccttggccgcttactggaagggcgtttttcagagctgcagggacagggtgagcagctgaagggctaggagggaagccggcccccgctctgcagaagctgcatttcagctgaatctgtgtttcagcctcagttggttgcaccgttagcccctctcctcccggatggtcatgtttttgtcacattagagaataaacagccacacacacatttttttttttcctttaaaacagtaacttggaaatatgaaaaggccagaaggaggagcaagggctgttttctggagtggttgaggtgttgtcctgcagttgtcattgtcttctccaccgggctgttcccatttatttcctgtggaactgaatccctcctccctccactccttgggagcccaggtggtccttggccaccattcaggctttccaagaagccaaccaccttggagattttttttcttgaatttcgctgttttcttctgcttcctttagataaaaagcagctcaagagaccttatcttagggatgagaaaaacatgcatattaattccatctgagtgattgtcagtgtaaggccttttaaaacaaaagcaagttctttgttaggaattggtcaaaattcatctctttctttaagcccatcaactcccaggacggtttgagttactcagttacctaagcttgctattcatccaaatcattttctagagtcactgtataagggtctatgagtagctgtgtatgaataaatattacctgtctacctcaaaatacacatactgctgaagcattctgtacaaccgtgtgttatcacagtgcagttttaagtgtaacgttagaacttaggcattttcctgtgtggcggaataagaaaggattaaacagttacaagcctccaaattcaaataaaattaaatcacagttcagatgaaactgaatatcattgtaataatctcataatatatatttgtaactttgtagctatctttgaaatcacttgactttgcaatggtgctaagctgatagatttaaatacacagacgggcgagtggcgcccgtgtcgatgtcttcagccagtggtgaccctgcttttgtaaccgcgttaacctgacaaaacctcagcagcagaagtccctatttttctaggagttcatcgtgcagacagtcttcactacaggactcggccctggggcctctgcctctcgtctgaccttgcagccttagtcgttggaggctggagcgcaatggccctgccgtctgtggagcctctgggcggccttctttcctttctgtcaacctctcatttcacagaaaaaggctgaatttcattttttccagcatgaaagccaggatcggttagtggttggattctattggttttttttttaaacagatggagttactgtgaagaagttttcacaactatttatgctggtaaaacaaatgctgttaaatcaccttatgcgtcgttttcaacagcagtggggctaattacccggaatacggtctcaccgatgcagttttcatggacatagaaaattcaaatagaatatataatattgaatttaagatttggggggttaaaaaagaaaacttaactttataaaattatttattctattttaagccttctatcatattttcccatccaattgtttggtttcagtggtccagctttatttacaggcatataaaatgaaattgtgagatgttttgcaagcttctttttactttgagtagcttttaatttgtatgtttttatgtggatgaagagcattttttatgcttttgtgcaataggttccaatatgcatttattagacatctgtttaaatggtaatgtagcatttattttgctaaattgaaagggaacatagatggaattccaaaatatgtacattcagctgtttggtttttcgtttttcattgttattattgtgagaatgctgttattggggttgtgtgtgagtgcccgtcagccagtgatgcctcgggccacgctgtggggccacctcagtcctgcctgggtcctggtgccttggaccccacgtgcttgtggccaggctgcccctgggcggggccatgtggcctcagaccacaagagcggagctgccctggcccaagcactgcagctgcctgcacccccgggcttcgcagccttgcttgttttctctgaacagcaacagaacagtgttcacagcgattcaaagggtggcattgggttggacgttctgggtacaagccaacctagtcccacgttgtacgtgaatgtttaatgtgctctcaaaacatggaaaataagtttagtgcacatagctaaatcacaaaacatccaatttctctgtttcctcaggaagtcattactgcgccaccacatcacatgaccttaacatgatcaatgtatttctctgccttgacatttaaatacataaattgagataagtagattagaaaatcattcaaatgataccataatttgtacgggacagggtgcgggcaatggccacgtggccaaggccccgcaggaacgcgccgaggtctccctcaccctccaggtgtccttcgcacccaacagtgcgtctgaggaacgagctgcagtttgagcgttcccctgagatgtgcgtagcctccgtgtaaatgtccactcccatggcttaattgcctatcagacgcattttcccagacgaaagcaatgttgggttggggaagacagtgcagccacccagcctttaccagcagcgtacggcagacgaaggcagtcgaggtgtggaggtgatcacgaagatacatgtgtttgactgtttaatttgaaagtttacattttttatgctttgtgttggtgtgtaatttttgtactcttggtggctagtttttgtcaaatcttttttggaatattgcttaaatgttttgattttatgatagtgaagcttgtattcagtgttttgccaattaatattatatgcttgtaataaaagcaaaagaaaagctta

SEQ ID NO: 279834 - DNA, 4121 bp, Homo sapiens
ataagctgatacaattcagctcggtacccacatcaggctcggggttgtcactaggttgagatcaagaaggcgccgctcctgctgcactacagacccaagatggacttgctgtgaatggtgccacacagcgcccacagactgggccctcgcacccttgggtgctcccggccgccgcgcttaagaacattgcctctgggtgtcatgtggaccagacttctgaatagagaatatttataacttttgtatgagagagaattcacactcaacaagacactaccagcaccacgtttacagaggatgaaaacacttcacagtctcccagagccgatcgtcctctcccccgccccaccccgtgcttcagccttgcagggagagtgatgctccaggcaacacggttctgagtcaccttctgacacgagctccctctgcttgctttccaggtcttgaaaatctgaattcacttcagtttagtttatgaattttaggtttcatgataagcctcaagtgtagttggacttttattgaatccttcctaagttattgaaaaaatgtcttttcatggtgaatgacaatatttatgttgcctttagcttcttgaagatttagaagttatataaaaaattaatttaaaagcaaaccaaaagaggtttccattaacattatgatttaaccattgtatttaatttcccaccttatgaaacacaacagcagctccctgactggttcgcctttcattgtgtgaggtcggcacttggactcactcagaactgtcgctcacctgtggctgacacacccagccctggaaacggggccccagacgccacgtcgggatttctgacatgctcagcaggtagaccagaggccgtgtgaccagctcagtgctggtttacggaacaactcttacttttaaaaattacttgttcccccaaattgttgagtgccgccgtttggtttcctatgttttctttccctgttttgattttgctgaagggagaggtggtggtggttaggatcagagctctcctggcatccgtggggaggatttgctggtggtggcttcgggctcatgcccagacacactcactgccccgtctgtccaaggcctccccttcccctttgctggtgggaggagctcgtgtgctccttggccgcttactggaagggcgtttttcagagctgcagggacagggtgagcagctgaagggctaggagggaagccggcccccgctctgcagaagctgcatttcagctgaatctgtgtttcagcctcagttggttgcaccgttagcccctctcctcccggatggtcatgtttttgtcacattagagaataaacagccacacacacatttttttttttcctttaaaacagtaacttggaaatatgaaaaggccagaaggaggagcaagggctgttttctggagtggttgaggtgttgtcctgcagttgtcattgtcttctccaccgggctgttcccatttatttcctgtggaactgaatccctcctccctccactccttgggagcccaggtggtccttggccaccattcaggctttccaagaagccaaccaccttggagattttttttcttgaatttcgctgttttcttctgcttcctttagataaaaagcagctcaagagaccttatcttagggatgagaaaaacatgcatattaattccatctgagtgattgtcagtgtaaggccttttaaaacaaaagcaagttctttgttaggaattggtcaaaattcatctctttctttaagcccatcaactcccaggacggtttgagttactcagttacctaagcttgctattcatccaaatcattttctagagtcactgtataagggtctatgagtagctgtgtatgaataaatattacctgtctacctcaaaatacacatactgctgaagcattctgtacaaccgtgtgttatcacagtgcagttttaagtgtaacgttagaacttaggcattttcctgtgtggcggaataagaaaggattaaacagttacaagcctccaaattcaaataaaattaaatcacagttcagatgaaactgaatatcattgtaataatctcataatatatatttgtaactttgtagctatctttgaaatcacttgactttgcaatggtgctaagctgatagatttaaatacacagacgggcgagtggcgcccgtgtcgatgtcttcagccagtggtgaccctgcttttgtaaccgcgttaacctgacaaaacctcagcagcagaagtccctatttttctaggagttcatcgtgcagacagtcttcactacaggactcggccctggggcctctgcctctcgtctgaccttgcagccttagtcgttggaggctggagcgcaatggccctgccgtctgtggagcctctgggcggccttctttcctttctgtcaacctctcatttcacagaaaaaggctgaatttcattttttccagcatgaaagccaggatcggttagtggttggattctattggttttttttttaaacagatggagttactgtgaagaagttttcacaactatttatgctggtaaaacaaatgctgttaaatcaccttatgcgtcgttttcaacagcagtggggctaattacccggaatacggtctcaccgatgcagttttcatggacatagaaaattcaaatagaatatataatattgaatttaagatttggggggttaaaaaagaaaacttaactttataaaattatttattctattttaagccttctatcatattttcccatccaattgtttggtttcagtggtccagctttatttacaggcatataaaatgaaattgtgagatgttttgcaagcttctttttactttgagtagcttttaatttgtatgtttttatgtggatgaagagcattttttatgcttttgtgcaataggttccaatatgcatttattagacatctgtttaaatggtaatgtagcatttattttgctaaattgaaagggaacatagatggaattccaaaatatgtacattcagctgtttggtttttcgtttttcattgttattattgtgagaatgctgttattggggttgtgtgtgagtgcccgtcagccagtgatgcctcgggccacgctgtggggccacctcagtcctgcctgggtcctggtgccttggaccccacgtgcttgtggccaggctgcccctgggcggggccatgtggcctcagaccacaagagcggagctgccctggcccaagcactgcagctgcctgcacccccgggcttcgcagccttgcttgttttctctgaacagcaacagaacagtgttcacagcgattcaaagggtggcattgggttggacgttctgggtacaagccaacctagtcccacgttgtacgtgaatgtttaatgtgctctcaaaacatggaaaataagtttagtgcacatagctaaatcacaaaacatccaatttctctgtttcctcaggaagtcattactgcgccaccacatcacatgaccttaacatgatcaatgtatttctctgccttgacatttaaatacataaattgagataagtagattagaaaatcattcaaatgataccataatttgtacgggacagggtgcgggcaatggccacgtggccaaggccccgcaggaacgcgccgaggtctccctcaccctccaggtgtccttcgcacccaacagtgcgtctgaggaacgagctgcagtttgagcgttcccctgagatgtgcgtagcctccgtgtaaatgtccactcccatggcttaattgcctatcagacgcattttcccagacgaaagcaatgttgggttggggaagacagtgcagccacccagcctttaccagcagcgtacggcagacgaaggcagtcgaggtgtggaggtgatcacgaagatacatgtgtttgactgtttaatttgaaagtttacattttttatgctttgtgttggtgtgtaatttttgtactcttggtggctagtttttgtcaaatcttttttggaatattgcttaaatgttttgattttatgatagtgaagcttgtattcagtgttttgccaattaatattatatgcttgtaataaaagcaaaagaaaagctta

SEQ ID NO: 279835 - DNA, 4476 bp, Homo sapiens
tcctttggatatatgaccagcagtgggattgctggatcttacgatggaattcccaaagatgttgaccaggaagatcaagctgtgggacatcaacgcccacatcacctgccgcctgtgcagcgggtacctcatcgacgccaccacggtgaccgagtgtctgcacaccttctgcaggagctgcctggtgaagtacctggaggagaacaacacctgccccacctgcaggattgtgatccaccagagccaccccctgcagtacatcggtcatgacagaaccatgcaagatattgtttacaaattggtaccaggcctccaagaagcggaaatgagaaagcagagggagttctatcacaaattgggcatggaggtgccgggagacatcaagggggagacctgctctgcaaaacagcacttagattcccatcggaatggtgaaaccaaagcagacgacagttcaaacaaagaggccgcggaggagaagccggaggaggacaacgactaccaccgcagcgacgagcaggtgagcatctgcctggagtgtaacagcagcaaactgcgcgggctgaagcggaagtggatccgctgctcagcccaggcgaccgtcttgcatctgaagaagttcatcgccaaaaaactcaacctttcatcctttaacgagctggacattttatgcaacgaggagatcctgggcaaggaccacacactcaagttcgtggttgtcactaggtggagattcaagaaggcgccgctcctgctgcactacagacccaagatggacttgctgtgaatggtgccacacagcgcccacagactgggccctcgcacccttgggtgctcccggccgccgcgcttaagaacattgcctctgggtgtcatgtggaccagacttctgaatagagaatatttataacttttgtatgagagagaattcacactcaacaagacactaccagcaccacgtttacagaggatgaaaacacttcacagtctcccagagccgatcgtcctctcccccgccccaccccgtgcttcagccttgcagggagagtgatgctccaggcaacacggttctgagtcaccttctgacacgagctccctctgcttgctttccaggtcttgaaaatctgaattcacttcagtttagtttatgaattttaggtttcatgataagcctcaagtgtagttggacttttattgaatccttcctaagttattgaaaaaatgtcttttcatggtgaatgacaatatttatgttgcctttagcttcttgaagatttagaagttatataaaaaattaatttaaaagcaaaccaaaagaggtttccattaacattatgatttaaccattgtatttaatttcccaccttatgaaacacaacagcagctccctgactggttcgcctttcattgtgtgaggtcggcacttggactcactcagaactgtcgctcacctgtggctgacacacccagccctggaaacggggccccagacgccacgtcgggatttctgacatgctcagcaggtagaccagaggccgtgtgaccagctcagtgctggtttacggaacaactcttacttttaaaaattacttgttcccccaaattgttgagtgccgccgtttggtttcctatgttttctttccctgttttgattttgctgaagggagaggtggtggtggttaggatcagagctctcctggcatccgtggggaggatttgctggtggtggcttcgggctcatgcccagacacactcactgccccgtctgtccaaggcctccccttcccctttgctggtgggaggagctcgtgtgctccttggccgcttactggaagggcgtttttcagagctgcagggacagggtgagcagctgaagggctaggagggaagccggcccccgctctgcagaagctgcatttcagctgaatctgtgtttcagcctcagttggttgcaccgttagcccctctcctcccggatggtcatgtttttgtcacattagagaataaacagccacacacacatttttttttttcctttaaaacagtaacttggaaatatgaaaaggccagaaggaggagcaagggctgttttctggagtggttgaggtgttgtcctgcagttgtcattgtcttctccaccgggctgttcccatttatttcctgtggaactgaatccctcctccctccactccttgggagcccaggtggtccttggccaccattcaggctttccaagaagccaaccaccttggagattttttttcttgaatttcgctgttttcttctgcttcctttagataaaaagcagctcaagagaccttatcttagggatgagaaaaacatgcatattaattccatctgagtgattgtcagtgtaaggccttttaaaacaaaagcaagttctttgttaggaattggtcaaaattcatctctttctttaagcccatcaactcccaggacggtttgagttactcagttacctaagcttgctattcatccaaatcattttctagagtcactgtataagggtctatgagtagctgtgtatgaataaatattacctgtctacctcaaaatacacatactgctgaagcattctgtacaaccgtgtgttatcacagtgcagttttaagtgtaacgttagaacttaggcattttcctgtgtggcggaataagaaaggattaaacagttacaagcctccaaattcaaataaaattaaatcacagttcagatgaaactgaatatcattgtaataatctcataatatatatttgtaactttgtagctatctttgaaatcacttgactttgcaatggtgctaagctgatagatttaaatacacagacgggcgagtggcgcccgtgtcgatgtcttcagccagtggtgaccctgcttttgtaaccgcgttaacctgacaaaacctcagcagcagaagtccctatttttctaggagttcatcgtgcagacagtcttcactacaggactcggccctggggcctctgcctctcgtctgaccttgcagccttagtcgttggaggctggagcgcaatggccctgccgtctgtggagcctctgggcggccttctttcctttctgtcaacctctcatttcacagaaaaaggctgaatttcattttttccagcatgaaagccaggatcggttagtggttggattctattggttttttttttaaacagatggagttactgtgaagaagttttcacaactatttatgctggtaaaacaaatgctgttaaatcaccttatgcgtcgttttcaacagcagtggggctaattacccggaatacggtctcaccgatgcagttttcatggacatagaaaattcaaatagaatatataatattgaatttaagatttggggggttaaaaaagaaaacttaactttataaaattatttattctattttaagccttctatcatattttcccatccaattgtttggtttcagtggtccagctttatttacaggcatataaaatgaaattgtgagatgttttgcaagcttctttttactttgagtagcttttaatttgtatgtttttatgtggatgaagagcattttttatgcttttgtgcaataggttccaatatgcatttattagacatctgtttaaatggtaatgtagcatttattttgctaaattgaaagggaacatagatggaattccaaaatatgtacattcagctgtttggtttttcgtttttcattgttattattgtgagaatgctgttattggggttgtgtgtgagtgcccgtcagccagtgatgcctcgggccacgctgtggggccacctcagtcctgcctgggtcctggtgccttggaccccacgtgcttgtggccaggctgcccctgggcggggccatgtggcctcagaccacaagagcggagctgccctggcccaagcactgcagctgcctgcacccccgggcttcgcagccttgcttgttttctctgaacagcaacagaacagtgttcacagcgattcaaagggtggcattgggttggacgttctgggtacaagccaacctagtcccacgttgtacgtgaatgtttaatgtgctctcaaaacatggaaaataagtttagtgcacatagctaaatcacaaaacatccaatttctctgtttcctcaggaagtcattactgcgccaccacatcacatgaccttaacatgatcaatgtatttctctgccttgacatttaaatacataaattgagataagtagattagaaaatcattcaaatgataccataatttgtacgggacagggtgcgggcaatggccacgtggccaaggccccgcaggaacgcgccgaggtctccctcaccctccaggtgtccttcgcacccaacagtgctttcgtctgggaaaatgcgtctgataggcaattaagccatgggagtggacatttacacggaggctacgcacatctcaggggaacgctcaaactg

SEQ ID NO: 279836 - DNA, 3856 bp, Homo sapiens
accggtgtgggtgagctgtggggtcctcacattttctcgctttggcgggttacctccccgtcccggcccttctcttccccgcccacggggcttcagccttgcagggagagtgatgctccaggcaacacggttctgagtcaccttctgacacgagctccctctgcttgctttccaggtcttgaaaatctgaattcacttcagtttagtttatgaattttaggtttcatgataagcctcaagtgtagttggacttttattgaatccttcctaagttattgaaaaaatgtcttttcatggtgaatgacaatatttatgttgcctttagcttcttgaagatttagaagttatataaaaaattaatttaaaagcaaaccaaaagaggtttccattaacattatgatttaaccattgtatttaatttcccaccttatgaaacacaacagcagctccctgactggttcgcctttcattgtgtgaggtcggcacttggactcactcagaactgtcgctcacctgtggctgacacacccagccctggaaacggggccccagacgccacgtcgggatttctgacatgctcagcaggtagaccagaggccgtgtgaccagctcagtgctggtttacggaacaactcttacttttaaaaattacttgttcccccaaattgttgagtgccgccgtttggtttcctatgttttctttccctgttttgattttgctgaagggagaggtggtggtggttaggatcagagctctcctggcatccgtggggaggatttgctggtggtggcttcgggctcatgcccagacacactcactgccccgtctgtccaaggcctccccttcccctttgctggtgggaggagctcgtgtgctccttggccgcttactggaagggcgtttttcagagctgcagggacagggtgagcagctgaagggctaggagggaagccggcccccgctctgcagaagctgcatttcagctgaatctgtgtttcagcctcagttggttgcaccgttagcccctctcctcccggatggtcatgtttttgtcacattagagaataaacagccacacacacatttttttttttcctttaaaacagtaacttggaaatatgaaaaggccagaaggaggagcaagggctgttttctggagtggttgaggtgttgtcctgcagttgtcattgtcttctccaccgggctgttcccatttatttcctgtggaactgaatccctcctccctccactccttgggagcccaggtggtccttggccaccattcaggctttccaagaagccaaccaccttggagattttttttcttgaatttcgctgttttcttctgcttcctttagataaaaagcagctcaagagaccttatcttagggatgagaaaaacatgcatattaattccatctgagtgattgtcagtgtaaggccttttaaaacaaaagcaagttctttgttaggaattggtcaaaattcatctctttctttaagcccatcaactcccaggacggtttgagttactcagttacctaagcttgctattcatccaaatcattttctagagtcactgtataagggtctatgagtagctgtgtatgaataaatattacctgtctacctcaaaatacacatactgctgaagcattctgtacaaccgtgtgttatcacagtgcagttttaagtgtaacgttagaacttaggcattttcctgtgtggcggaataagaaaggattaaacagttacaagcctccaaattcaaataaaattaaatcacagttcagatgaaactgaatatcattgtaataatctcataatatatatttgtaactttgtagctatctttgaaatcacttgactttgcaatggtgctaagctgatagatttaaatacacagacgggcgagtggcgcccgtgtcgatgtcttcagccagtggtgaccctgcttttgtaaccgcgttaacctgacaaaacctcagcagcagaagtccctatttttctaggagttcatcgtgcagacagtcttcactacaggactcggccctggggcctctgcctctcgtctgaccttgcagccttagtcgttggaggctggagcgcaatggccctgccgtctgtggagcctctgggcggccttctttcctttctgtcaacctctcatttcacagaaaaaggctgaatttcattttttccagcatgaaagccaggatcggttagtggttggattctattggttttttttttaaacagatggagttactgtgaagaagttttcacaactatttatgctggtaaaacaaatgctgttaaatcaccttatgcgtcgttttcaacagcagtggggctaattacccggaatacggtctcaccgatgcagttttcatggacatagaaaattcaaatagaatatataatattgaatttaagatttggggggttaaaaaagaaaacttaactttataaaattatttattctattttaagccttctatcatattttcccatccaattgtttggtttcagtggtccagctttatttacaggcatataaaatgaaattgtgagatgttttgcaagcttctttttactttgagtagcttttaatttgtatgtttttatgtggatgaagagcattttttatgcttttgtgcaataggttccaatatgcatttattagacatctgtttaaatggtaatgtagcatttattttgctaaattgaaagggaacatagatggaattccaaaatatgtacattcagctgtttggtttttcgtttttcattgttattattgtgagaatgctgttattggggttgtgtgtgagtgcccgtcagccagtgatgcctcgggccacgctgtggggccacctcagtcctgcctgggtcctggtgccttggaccccacgtgcttgtggccaggctgcccctgggcggggccatgtggcctcagaccacaagagcggagctgccctggcccaagcactgcagctgcctgcacccccgggcttcgcagccttgcttgttttctctgaacagcaacagaacagtgttcacagcgattcaaagggtggcattgggttggacgttctgggtacaagccaacctagtcccacgttgtacgtgaatgtttaatgtgctctcaaaacatggaaaataagtttagtgcacatagctaaatcacaaaacatccaatttctctgtttcctcaggaagtcattactgcgccaccacatcacatgaccttaacatgatcaatgtatttctctgccttgacatttaaatacataaattgagataagtagattagaaaatcattcaaatgataccataatttgtacgggacagggtgcgggcaatggccacgtggccaaggccccgcaggaacgcgccgaggtctccctcaccctccaggtgtccttcgcacccaacagtgcgtctgaggaacgagctgcagtttgagcgttcccctgagatgtgcgtagcctccgtgtaaatgtccactcccatggcttaattgcctatcagacgcattttcccagacgaaagcaatgttgggttggggaagacagtgcagccacccagcctttaccagcagcgtacggcagacgaaggcagtcgaggtgtggaggtgatcacgaagatacatgtgtttgactgtttaatttgaaagtttacattttttatgctttgtgttggtgtgtaatttttgtactcttggtggctagtttttgtcaaatcttttttggaatattgcttaaatgttttgattttatgatagtgaagcttgtattcagtgttttgccaattaatattatatgcttgtaataaaagcaaaagaaaagctta

SEQ ID NO: 279837 - DNA, 1543 bp, Homo sapiens
  misc_feature (1484)..(1484): n is a, c, g, or t
tcctttggatatatgaccagcagtgggattgctggatcttacgatggaattcccaaagatgttgaccaggaagatcaagctgtgggacatcaacgcccacatcacctgccgcctgtgcagcgggtacctcatcgacgccaccacggtgaccgagtgtctgcacaccttctgcaggagctgcctggtgaagtacctggaggagaacaacacctgccccacctgcaggattgtgatccaccagagccaccccctgcagtacatcggtcatgacagaaccatgcaagatattgtttacaaattggtaccaggcctccaagaagcggaaatgagaaagcagagggagttctatcacaaattgggcatggaggtgccgggagacatcaagggggagacctgctctgcaaaacagcacttagattcccatcggaatggtgaaaccaaagcagacgacagttcaaacaaagaggccgcggaggagaagccggaggaggacaacgactaccaccgcagcgacgagcaggtgagcatctgcctggagtgtaacagcagcaaactgcgcgggctgaagcggaagtggatccgctgctcagcccaggcgaccgtcttgcatctgaagaagttcatcgccaaaaaactcaacctttcatcctttaacgagctggacattttatgcaacgaggagatcctgggcaaggaccacacactcaagttcgtggttgtcactaggtggagattcaagaaggcgccgctcctgctgcactacagacccaagatggacttgctgtgaatggtgccacacagcgcccacagactgggccctcgcacccttgggtgctcccggccgccgcgcttaagaacattgcctctgggtgtcatgtggaccagacttctgaatagagaatatttataacttttgtatgagagagaattcacactcaacaagacactaccagcaccacgtttacagaggatgaaaacacttcacagtctcccagagccgatcgtcctctcccccgccccaccccgtgcttcagccttgcagggagagtgatgctccaggcaacacggttctgagtcaccttctgacacgagctccctctgcttgctttccaggtcttgaaaatctgaattcacttcagtttagtttatgaattttaggtttcatgataagcctcaagtgtagttggacttttattgaatccttcctaagttattgaaaaaatgtcttttcatggtgaatgacaatatttatgttgcctttagcttcttgaagatttagaagttatataaaaaattaatttaaaagcaaaccaaaagaggtttccattaacattatgatttaaccattgtatttaatttcccaccttatgaaacacaacagcagctccctgacctcaggtgatctggctgcctgagtctcccaaagtgctggcattacaggtgtgagccactgcactcggcagaaggttacttttgtagatggngtctcactatgttgccaggctggtctcagactccagggcccgagaagggtccgagagta

SEQ ID NO: 279838 - DNA, 1308 bp, Homo sapiens
tcctttggatatatgaccagcagtgggattgctggatcttacgatggaattcccaaagatgttgaccaggaagatcaagctgtgggacatcaacgcccacatcacctgccgcctgtgcagcgggtacctcatcgacgccaccacggtgaccgagtgtctgcacaccttctgcaggagctgcctggtgaagtacctggaggagaacaacacctgccccacctgcaggattgtgatccaccagagccaccccctgcagtacatcggtcatgacagaaccatgcaagatattgtttacaaattggtaccaggcctccaagaagcggaaatgagaaagcagagggagttctatcacaaattgggcatggaggtgccgggagacatcaagggggagacctgctctgcaaaacagcacttagattcccatcggaatggtgaaaccaaagcagacgacagttcaaacaaagaggccgcggaggagaagccggaggaggacaacgactaccaccgcagcgacgagcaggtgagcatctgcctggagtgtaacagcagcaaactgcgcgggctgaagcggaagtggatccgctgctcagcccaggcgaccgtcttgcatctgaagaagttcatcgccaaaaaactcaacctttcatcctttaacgagctggacattttatgcaacgaggagatcctgggcaaggaccacacactcaagttcgtggttgtcactaggtggagattcaagaaggcgccgctcctgctgcactacagacccaagatggacttgctgtgaatggtgccacacagcgcccacagactgggccctcgcacccttgggtgctcccggccgccgcgcttaagaacattgcctctgggtgtcatgtggaccagacttctgaatagagaatatttataacttttgtatgagagagaattcacactcaacaagacactaccagcaccacgtttacagaggatgaaaacacttcacagtctcccagagccgatcgtcctctcccccgccccaccccgtgcttcagccttgcagggagagtgatgctccaggcaacacggttctgagtcaccttctgacacgagctccctctgcttgctttccaggtcttgaaaatctgaattcacttcagtttagtttatgaattttaggtttcatgataagcctcaagtgtagttggacttttattgaatccttcctaagttattgaaaaaatgtcttttcatggtgaatgacaatatttatgttgcctttagcttcttgaagatttagaagttatataaaaaattaatttaaaagca

SEQ ID NO: 279839 - DNA, 1311 bp, Homo sapiens
ctctacgacggatccccgcgagaatccagacgaaagcaatgttgggttggggaagacagtgcagccacccagcctttaccagcagcgtacggcagacgaaggcagtcgaggtgtggaggtgatcacgaagatacatgtgtttgactgtttaatttgaaagtttacattttttatgctttgtgttggtgtgtaatttttgtactcttggtggctagtttttgtcaaatcttttttggaatattgcttaaatgttttgattttatgatagtgaagcttgtattcagtgttttgccaattaatattatatgcttgtaataaaagcaaaagaaaagcttaagtgaaagtgtttcttggctggaaatgtattacataaatcatttgtatgagcatgagagatgacttgctcatgggatgagcaatgctgtgggtattggatggaccactcaggcagcctggccgcacacacacacatgcatgctacatatgtgtacgctcagaccacatgcctgcacatatgtccacacaccagcccacggctcccttcctcaccccagccctccccactcccaggttaaccaatgtctcgatttgcttcaggcggcatttgtaaactgtcaccctgcttgcaaaccctcatttaaattggtccagcatttgctaccagagtttaggccacaaactttgtaaagctcagtttgtctccttgcagaaagaggttgctgcagtttggagctggttatgccaaggaaaatacggctaaaaaagaacttactgattcccataggtgtgtcaactgacaaatgaatgttccatctccctacgacaatttgctgcccctccccaaaaaaagcactatggccaaaatttcagtttttaaaggttaagtaaaatacaacaattcttgaaactcttaagagaaccagaattggaaggaaaggagaatggccaaaattatattctcacaacctaaagcagtaaactttaaaaataggttcagtcttagacttgacttaattgacttaggctgggcatagtggctcacacctgtaattccagcaccgtaggaggccaaggcaggctgatcatctgaagtcgggagttcgagaccagcctggctaacatggtgaaatcccgtctctactaaaaaatataaaaattagccgggtgtggtggcaggggcctgtagtcccagctactcaggaggctgaagcaggcgaatcgctggaacacaagaggcagaggttgcagtgagccgagatcacgccactgtactccagcctgtgctacagagcaagactccatctcaattta

SEQ ID NO: 279840 - DNA, 533 bp, Homo sapiens
tcctttggatatatgaccagcagtgggattgctggatcttacgatggaattcccaaagatgttgaccaggaagatcaagctgtgggacatcaacgcccacatcacctgccgcctgtgcagcgggtacctcatcgacgccaccacggtgaccgagtgtctgcacaccttctgcaggagctgcctggtgaagtacctggaggagaacaacacctgccccacctgcaggattgtgatccaccagagccaccccctgcagtacatcggtcatgacagaaccatgcaagatattgtttacaaattggtaccaggcctccaagaagcctctgcttgctttccaggtcttgaaaatctgaattcacttcagtttagtttatgaattttaggtttcatgataagcctcaagtgtagttggacttttattgaatccttcctaagttattgaaaaaatgtcttttcatggtgaatgacaatatttatgttgcctttagcttcttgaagatttagaagttatataaaaaattaatttaaaagca

SEQ ID NO: 279841 - DNA, 445 bp, Homo sapiens
caggttttcagataaggtatgtaagattctttttctgcagtgttgaagtcaaagcagatgtctgatctcaaaaaggtcagcagtcctagattgaggaattagtgaaatatgtctaaggaagcctccagaaccgtccgggggaaccctcctgctgcgctctcaccagcgtcctttcccgcaggtgagcatctgcctggagtgtaacagcagcaaactgcgcgggctgaagcggaagtggatccgctgctcagcccaggcgaccgtcttgcatctgaagaagttcatcgccaaaaaactcaacctttcatcctttaacgaggtaacagttgatccctaagtagaaaccataacaagtcctctcttatttctaaaggtaactccaagattctttgcttagttttgttttgtttttaacaattttggagattttaaccagaaaaaaatc

SEQ ID NO: 279842 - DNA, 5769 bp, Homo sapiens
tcctttggatatatgaccagcagtgggattgctggatcttacgatggaattcccaaagatgttgaccaggaagatcaagctgtgggacatcaacgcccacatcacctgccgcctgtgcagcgggtacctcatcgacgccaccacggtgaccgagtgtctgcacaccttctgcaggagctgcctggtgaagtacctggaggagaacaacacctgccccacctgcaggattgtgatccaccagagccaccccctgcagtacatcggtcatgacagaaccatgcaagatattgtttacaaattggtaccaggcctccaagaagcggaaatgagaaagcagagggagttctatcacaaattgggcatggaggtgccgggagacatcaagggggagacctgctctgcaaaacagcacttagattcccatcggaatggtgaaaccaaagcagacgacagttcaaacaaagaggccgcggaggagaagccggaggaggacaacgactaccaccgcagcgacgagcaggtgagcatctgcctggagtgtaacagcagcaaactgcgcgggctgaagcggaagtggatccgctgctcagcccaggcgaccgtcttgcatctgaagaagttcatcgccaaaaaactcaacctttcatcctttaacgagctggacattttatgcaacgaggagatcctgggcaaggaccacacactcaagttcgtggttgtcactaggtggagattcaagaaggcgccgctcctgctgcactacagacccaagatggacttgctgtgaatggtgccacacagcgcccacagactgggccctcgcacccttgggtgctcccggccgccgcgcttaagaacattgcctctgggtgtcatgtggaccagacttctgaatagagaatatttataacttttgtatgagagagaattcacactcaacaagacactaccagcaccacgtttacagaggatgaaaacacttcacagtctcccagagccgatcgtcctctcccccgccccaccccgtgcttcagccttgcagggagagtgatgctccaggcaacacggttctgagtcaccttctgacacgagctccctctgcttgctttccaggtcttgaaaatctgaattcacttcagtttagtttatgaattttaggtttcatgataagcctcaagtgtagttggacttttattgaatccttcctaagttattgaaaaaatgtcttttcatggtgaatgacaatatttatgttgcctttagcttcttgaagatttagaagttatataaaaaattaatttaaaagcaaaccaaaagaggtttccattaacattatgatttaaccattgtatttaatttcccaccttatgaaacacaacagcagctccctgactggttcgcctttcattgtgtgaggtcggcacttggactcactcagaactgtcgctcacctgtggctgacacacccagccctggaaacggggccccagacgccacgtcgggatttctgacatgctcagcaggtagaccagaggccgtgtgaccagctcagtgctggtttacggaacaactcttacttttaaaaattacttgttcccccaaattgttgagtgccgccgtttggtttcctatgttttctttccctgttttgattttgctgaagggagaggtggtggtggttaggatcagagctctcctggcatccgtggggaggatttgctggtggtggcttcgggctcatgcccagacacactcactgccccgtctgtccaaggcctccccttcccctttgctggtgggaggagctcgtgtgctccttggccgcttactggaagggcgtttttcagagctgcagggacagggtgagcagctgaagggctaggagggaagccggcccccgctctgcagaagctgcatttcagctgaatctgtgtttcagcctcagttggttgcaccgttagcccctctcctcccggatggtcatgtttttgtcacattagagaataaacagccacacacacatttttttttttcctttaaaacagtaacttggaaatatgaaaaggccagaaggaggagcaagggctgttttctggagtggttgaggtgttgtcctgcagttgtcattgtcttctccaccgggctgttcccatttatttcctgtggaactgaatccctcctccctccactccttgggagcccaggtggtccttggccaccattcaggctttccaagaagccaaccaccttggagattttttttcttgaatttcgctgttttcttctgcttcctttagataaaaagcagctcaagagaccttatcttagggatgagaaaaacatgcatattaattccatctgagtgattgtcagtgtaaggccttttaaaacaaaagcaagttctttgttaggaattggtcaaaattcatctctttctttaagcccatcaactcccaggacggtttgagttactcagttacctaagcttgctattcatccaaatcattttctagagtcactgtataagggtctatgagtagctgtgtatgaataaatattacctgtctacctcaaaatacacatactgctgaagcattctgtacaaccgtgtgttatcacagtgcagttttaagtgtaacgttagaacttaggcattttcctgtgtggcggaataagaaaggattaaacagttacaagcctccaaattcaaataaaattaaatcacagttcagatgaaactgaatatcattgtaataatctcataatatatatttgtaactttgtagctatctttgaaatcacttgactttgcaatggtgctaagctgatagatttaaatacacagacgggcgagtggcgcccgtgtcgatgtcttcagccagtggtgaccctgcttttgtaaccgcgttaacctgacaaaacctcagcagcagaagtccctatttttctaggagttcatcgtgcagacagtcttcactacaggactcggccctggggcctctgcctctcgtctgaccttgcagccttagtcgttggaggctggagcgcaatggccctgccgtctgtggagcctctgggcggccttctttcctttctgtcaacctctcatttcacagaaaaaggctgaatttcattttttccagcatgaaagccaggatcggttagtggttggattctattggttttttttttaaacagatggagttactgtgaagaagttttcacaactatttatgctggtaaaacaaatgctgttaaatcaccttatgcgtcgttttcaacagcagtggggctaattacccggaatacggtctcaccgatgcagttttcatggacatagaaaattcaaatagaatatataatattgaatttaagatttggggggttaaaaaagaaaacttaactttataaaattatttattctattttaagccttctatcatattttcccatccaattgtttggtttcagtggtccagctttatttacaggcatataaaatgaaattgtgagatgttttgcaagcttctttttactttgagtagcttttaatttgtatgtttttatgtggatgaagagcattttttatgcttttgtgcaataggttccaatatgcatttattagacatctgtttaaatggtaatgtagcatttattttgctaaattgaaagggaacatagatggaattccaaaatatgtacattcagctgtttggtttttcgtttttcattgttattattgtgagaatgctgttattggggttgtgtgtgagtgcccgtcagccagtgatgcctcgggccacgctgtggggccacctcagtcctgcctgggtcctggtgccttggaccccacgtgcttgtggccaggctgcccctgggcggggccatgtggcctcagaccacaagagcggagctgccctggcccaagcactgcagctgcctgcacccccgggcttcgcagccttgcttgttttctctgaacagcaacagaacagtgttcacagcgattcaaagggtggcattgggttggacgttctgggtacaagccaacctagtcccacgttgtacgtgaatgtttaatgtgctctcaaaacatggaaaataagtttagtgcacatagctaaatcacaaaacatccaatttctctgtttcctcaggaagtcattactgcgccaccacatcacatgaccttaacatgatcaatgtatttctctgccttgacatttaaatacataaattgagataagtagattagaaaatcattcaaatgataccataatttgtacgggacagggtgcgggcaatggccacgtggccaaggccccgcaggaacgcgccgaggtctccctcaccctccaggtgtccttcgcacccaacagtgcgtctgaggaacgagctgcagtttgagcgttcccctgagatgtgcgtagcctccgtgtaaatgtccactcccatggcttaattgcctatcagacgcattttcccagacgaaagcaatgttgggttggggaagacagtgcagccacccagcctttaccagcagcgtacggcagacgaaggcagtcgaggtgtggaggtgatcacgaagatacatgtgtttgactgtttaatttgaaagtttacattttttatgctttgtgttggtgtgtaatttttgtactcttggtggctagtttttgtcaaatcttttttggaatattgcttaaatgttttgattttatgatagtgaagcttgtattcagtgttttgccaattaatattatatgcttgtaataaaagcaaaagaaaagcttaagtgaaagtgtttcttggctggaaatgtattacataaatcatttgtatgagcatgagagatgacttgctcatgggatgagcaatgctgtgggtattggatggaccactcaggcagcctggccgcacacacacacatgcatgctacatatgtgtacgctcagaccacatgcctgcacatatgtccacacaccagcccacggctcccttcctcaccccagccctccccactcccaggttaaccaatgtctcgatttgcttcaggcggcatttgtaaactgtcaccctgcttgcaaaccctcatttaaattggtccagcatttgctaccagagtttaggccacaaactttgtaaagctcagtttgtctccttgcagaaagaggttgctgcagtttggagctggttatgccaaggaaaatacggctaaaaaagaacttactgattcccataggtgtgtcaactgacaaatgaatgttccatctccctacgacaatttgctgcccctccccaaaaaaagcactatggccaaaatttcagtttttaaaggttaagtaaaatacaacaattcttgaaactcttaagagaaccagaattggaaggaaaggagaatggccaaaattatattctcacaacctaaagcagtaaactttaaaaataggttcagtcttagacttgacttaattgacttaggctgggcatagtggctcacacctgtaattccagcaccgtaggaggccaaggcaggctgatcatctgaagtcgggagttcgagaccagcctggctaacatggtgaaatcccgtctctactaaaaaatataaaaattagccgggtgtggtggcaggggcctgtagtcccagctactcaggaggctgaagcaggcgaatcgctggaacacaagaggcagaggttgcagtgagccgagatcacgccactgtactccagcctgtgctacagagcaagactccatctcaattta

SEQ ID NO: 279843 - DNA, 5112 bp, Homo sapiens
atgctccgagcgcggcgcccccgacgcggcgctcggctcggctcgggcatttccgcctctttgttttaaactccggacgggcttttttctcctcctcttgggggggacccagagggagcggcgccccctcccccctccggcgcggaccccgcgtgcgccttgctcgcccgcagccccgagaccgcaggcgtcacaatgtagcagggaccccaggcgtcgtgctcagaaaatggaaaaagagccagggccggaaggagggtgcagaagcgagtccgcgtgcggagccaggaggcagcgtcgcgtgggagtgctggcctgaagcctccatgccccggcagagggacggacacgcggacgtctagcggagaagccaaagatgttgaccaggaagatcaagctgtgggacatcaacgcccacatcacctgccgcctgtgcagcgggtacctcatcgacgccaccacggtgaccgagtgtctgcacaccttctgcaggagctgcctggtgaagtacctggaggagaacaacacctgccccacctgcaggattgtgatccaccagagccaccccctgcagtacatcggtcatgacagaaccatgcaagatattgtttacaaattggtaccaggcctccaagaagcggaaatgagaaagcagagggagttctatcacaaattgggcatggaggtgccgggagacatcaagggggagacctgctctgcaaaacagcacttagattcccatcggaatggtgaaaccaaagcagacgacagttcaaacaaagaggccgcggaggagaagccggaggaggacaacgactaccaccgcagcgacgagcaggtgagcatctgcctggagtgtaacagcagcaaactgcgcgggctgaagcggaagtggatccgctgctcagcccaggcgaccgtcttgcatctgaagaagttcatcgccaaaaaactcaacctttcatcctttaacgagctggacattttatgcaacgaggagatcctgggcaaggaccacacactcaagttcgtggttgtcactaggtggagattcaagaaggcgccgctcctgctgcactacagacccaagatggacttgctgtgaatggtgccacacagcgcccacagactgggccctcgcacccttgggtgctcccggccgccgcgcttaagaacattgcctctgggtgtcatgtggaccagacttctgaatagagaatatttataacttttgtatgagagagaattcacactcaacaagacactaccagcaccacgtttacagaggatgaaaacacttcacagtctcccagagccgatcgtcctctcccccgccccaccccgtgcttcagccttgcagggagagtgatgctccaggcaacacggttctgagtcaccttctgacacgagctccctctgcttgctttccaggtcttgaaaatctgaattcacttcagtttagtttatgaattttaggtttcatgataagcctcaagtgtagttggacttttattgaatccttcctaagttattgaaaaaatgtcttttcatggtgaatgacaatatttatgttgcctttagcttcttgaagatttagaagttatataaaaaattaatttaaaagcaaaccaaaagaggtttccattaacattatgatttaaccattgtatttaatttcccaccttatgaaacacaacagcagctccctgactggttcgcctttcattgtgtgaggtcggcacttggactcactcagaactgtcgctcacctgtggctgacacacccagccctggaaacggggccccagacgccacgtcgggatttctgacatgctcagcaggtagaccagaggccgtgtgaccagctcagtgctggtttacggaacaactcttacttttaaaaattacttgttcccccaaattgttgagtgccgccgtttggtttcctatgttttctttccctgttttgattttgctgaagggagaggtggtggtggttaggatcagagctctcctggcatccgtggggaggatttgctggtggtggcttcgggctcatgcccagacacactcactgccccgtctgtccaaggcctccccttcccctttgctggtgggaggagctcgtgtgctccttggccgcttactggaagggcgtttttcagagctgcagggacagggtgagcagctgaagggctaggagggaagccggcccccgctctgcagaagctgcatttcagctgaatctgtgtttcagcctcagttggttgcaccgttagcccctctcctcccggatggtcatgtttttgtcacattagagaataaacagccacacacacatttttttttttcctttaaaacagtaacttggaaatatgaaaaggccagaaggaggagcaagggctgttttctggagtggttgaggtgttgtcctgcagttgtcattgtcttctccaccgggctgttcccatttatttcctgtggaactgaatccctcctccctccactccttgggagcccaggtggtccttggccaccattcaggctttccaagaagccaaccaccttggagattttttttcttgaatttcgctgttttcttctgcttcctttagataaaaagcagctcaagagaccttatcttagggatgagaaaaacatgcatattaattccatctgagtgattgtcagtgtaaggccttttaaaacaaaagcaagttctttgttaggaattggtcaaaattcatctctttctttaagcccatcaactcccaggacggtttgagttactcagttacctaagcttgctattcatccaaatcattttctagagtcactgtataagggtctatgagtagctgtgtatgaataaatattacctgtctacctcaaaatacacatactgctgaagcattctgtacaaccgtgtgttatcacagtgcagttttaagtgtaacgttagaacttaggcattttcctgtgtggcggaataagaaaggattaaacagttacaagcctccaaattcaaataaaattaaatcacagttcagatgaaactgaatatcattgtaataatctcataatatatatttgtaactttgtagctatctttgaaatcacttgactttgcaatggtgctaagctgatagatttaaatacacagacgggcgagtggcgcccgtgtcgatgtcttcagccagtggtgaccctgcttttgtaaccgcgttaacctgacaaaacctcagcagcagaagtccctatttttctaggagttcatcgtgcagacagtcttcactacaggactcggccctggggcctctgcctctcgtctgaccttgcagccttagtcgttggaggctggagcgcaatggccctgccgtctgtggagcctctgggcggccttctttcctttctgtcaacctctcatttcacagaaaaaggctgaatttcattttttccagcatgaaagccaggatcggttagtggttggattctattggttttttttttaaacagatggagttactgtgaagaagttttcacaactatttatgctggtaaaacaaatgctgttaaatcaccttatgcgtcgttttcaacagcagtggggctaattacccggaatacggtctcaccgatgcagttttcatggacatagaaaattcaaatagaatatataatattgaatttaagatttggggggttaaaaaagaaaacttaactttataaaattatttattctattttaagccttctatcatattttcccatccaattgtttggtttcagtggtccagctttatttacaggcatataaaatgaaattgtgagatgttttgcaagcttctttttactttgagtagcttttaatttgtatgtttttatgtggatgaagagcattttttatgcttttgtgcaataggttccaatatgcatttattagacatctgtttaaatggtaatgtagcatttattttgctaaattgaaagggaacatagatggaattccaaaatatgtacattcagctgtttggtttttcgtttttcattgttattattgtgagaatgctgttattggggttgtgtgtgagtgcccgtcagccagtgatgcctcgggccacgctgtggggccacctcagtcctgcctgggtcctggtgccttggaccccacgtgcttgtggccaggctgcccctgggcggggccatgtggcctcagaccacaagagcggagctgccctggcccaagcactgcagctgcctgcacccccgggcttcgcagccttgcttgttttctctgaacagcaacagaacagtgttcacagcgattcaaagggtggcattgggttggacgttctgggtacaagccaacctagtcccacgttgtacgtgaatgtttaatgtgctctcaaaacatggaaaataagtttagtgcacatagctaaatcacaaaacatccaatttctctgtttcctcaggaagtcattactgcgccaccacatcacatgaccttaacatgatcaatgtatttctctgccttgacatttaaatacataaattgagataagtagattagaaaatcattcaaatgataccataatttgtacgggacagggtgcgggcaatggccacgtggccaaggccccgcaggaacgcgccgaggtctccctcaccctccaggtgtccttcgcacccaacagtgcgtctgaggaacgagctgcagtttgagcgttcccctgagatgtgcgtagcctccgtgtaaatgtccactcccatggcttaattgcctatcagacgcattttcccagacgaaagcaatgttgggttggggaagacagtgcagccacccagcctttaccagcagcgtacggcagacgaaggcagtcgaggtgtggaggtgatcacgaagatacatgtgtttgactgtttaatttgaaagtttacattttttatgctttgtgttggtgtgtaatttttgtactcttggtggctagtttttgtcaaatcttttttggaatattgcttaaatgttttgattttatgatagtgaagcttgtattcagtgttttgccaattaatattatatgcttgtaataaaagcaaaagaaaagctta

SEQ ID NO: 279844 - DNA, 4978 bp, Homo sapiens
gttcatgtcttgaggacattttattttcctaatggaccacaccaactcttaggaaatgtttaggctcctccgggcgtctgtgacagttggagggtgggaggggcctggctctgtcacccccacggctttgcgggtcccaggaagcacagccatgaggcgtggttaggaagcgagtctgggaaccaagcagtcctgtcagaacccttttacctgaggggaagttttcattttaaaagcggtgttgaaacagtggatttttaggagaaggctttcagatcgaggggctgatgtggtcagcactgagcagctccgggcgggcctggccatgtggccagtgcggagcgtgtctgtgtcccacgccggctccggctgccccgtctctgtctcctgtgctccccacgcctgcaccccacaggcccacacgcccgttctgcatcctggggagacccctgcagacactttgcggacggctttcctttgacgcttactccgctccgggggtccagagtctcttaatggagtgaatttttgacggcatttggagtacagtgtagttttttaaatggcttgacagtttggatttcatggtgcgctatgttctgtttgtgctaaaaggtgaaaccaaagcagacgacagttcaaacaaagaggccgcggaggagaagccggaggaggacaacgactaccaccgcagcgacgagcaggtgagcatctgcctggagtgtaacagcagcaaactgcgcgggctgaagcggaagtggatccgctgctcagcccaggcgaccgtcttgcatctgaagaagttcatcgccaaaaaactcaacctttcatcctttaacgagctggacattttatgcaacgaggagatcctgggcaaggaccacacactcaagttcgtggttgtcactaggtggagattcaagaaggcgccgctcctgctgcactacagacccaagatggacttgctgtgaatggtgccacacagcgcccacagactgggccctcgcacccttgggtgctcccggccgccgcgcttaagaacattgcctctgggtgtcatgtggaccagacttctgaatagagaatatttataacttttgtatgagagagaattcacactcaacaagacactaccagcaccacgtttacagaggatgaaaacacttcacagtctcccagagccgatcgtcctctcccccgccccaccccgtgcttcagccttgcagggagagtgatgctccaggcaacacggttctgagtcaccttctgacacgagctccctctgcttgctttccaggtcttgaaaatctgaattcacttcagtttagtttatgaattttaggtttcatgataagcctcaagtgtagttggacttttattgaatccttcctaagttattgaaaaaatgtcttttcatggtgaatgacaatatttatgttgcctttagcttcttgaagatttagaagttatataaaaaattaatttaaaagcaaaccaaaagaggtttccattaacattatgatttaaccattgtatttaatttcccaccttatgaaacacaacagcagctccctgactggttcgcctttcattgtgtgaggtcggcacttggactcactcagaactgtcgctcacctgtggctgacacacccagccctggaaacggggccccagacgccacgtcgggatttctgacatgctcagcaggtagaccagaggccgtgtgaccagctcagtgctggtttacggaacaactcttacttttaaaaattacttgttcccccaaattgttgagtgccgccgtttggtttcctatgttttctttccctgttttgattttgctgaagggagaggtggtggtggttaggatcagagctctcctggcatccgtggggaggatttgctggtggtggcttcgggctcatgcccagacacactcactgccccgtctgtccaaggcctccccttcccctttgctggtgggaggagctcgtgtgctccttggccgcttactggaagggcgtttttcagagctgcagggacagggtgagcagctgaagggctaggagggaagccggcccccgctctgcagaagctgcatttcagctgaatctgtgtttcagcctcagttggttgcaccgttagcccctctcctcccggatggtcatgtttttgtcacattagagaataaacagccacacacacatttttttttttcctttaaaacagtaacttggaaatatgaaaaggccagaaggaggagcaagggctgttttctggagtggttgaggtgttgtcctgcagttgtcattgtcttctccaccgggctgttcccatttatttcctgtggaactgaatccctcctccctccactccttgggagcccaggtggtccttggccaccattcaggctttccaagaagccaaccaccttggagattttttttcttgaatttcgctgttttcttctgcttcctttagataaaaagcagctcaagagaccttatcttagggatgagaaaaacatgcatattaattccatctgagtgattgtcagtgtaaggccttttaaaacaaaagcaagttctttgttaggaattggtcaaaattcatctctttctttaagcccatcaactcccaggacggtttgagttactcagttacctaagcttgctattcatccaaatcattttctagagtcactgtataagggtctatgagtagctgtgtatgaataaatattacctgtctacctcaaaatacacatactgctgaagcattctgtacaaccgtgtgttatcacagtgcagttttaagtgtaacgttagaacttaggcattttcctgtgtggcggaataagaaaggattaaacagttacaagcctccaaattcaaataaaattaaatcacagttcagatgaaactgaatatcattgtaataatctcataatatatatttgtaactttgtagctatctttgaaatcacttgactttgcaatggtgctaagctgatagatttaaatacacagacgggcgagtggcgcccgtgtcgatgtcttcagccagtggtgaccctgcttttgtaaccgcgttaacctgacaaaacctcagcagcagaagtccctatttttctaggagttcatcgtgcagacagtcttcactacaggactcggccctggggcctctgcctctcgtctgaccttgcagccttagtcgttggaggctggagcgcaatggccctgccgtctgtggagcctctgggcggccttctttcctttctgtcaacctctcatttcacagaaaaaggctgaatttcattttttccagcatgaaagccaggatcggttagtggttggattctattggttttttttttaaacagatggagttactgtgaagaagttttcacaactatttatgctggtaaaacaaatgctgttaaatcaccttatgcgtcgttttcaacagcagtggggctaattacccggaatacggtctcaccgatgcagttttcatggacatagaaaattcaaatagaatatataatattgaatttaagatttggggggttaaaaaagaaaacttaactttataaaattatttattctattttaagccttctatcatattttcccatccaattgtttggtttcagtggtccagctttatttacaggcatataaaatgaaattgtgagatgttttgcaagcttctttttactttgagtagcttttaatttgtatgtttttatgtggatgaagagcattttttatgcttttgtgcaataggttccaatatgcatttattagacatctgtttaaatggtaatgtagcatttattttgctaaattgaaagggaacatagatggaattccaaaatatgtacattcagctgtttggtttttcgtttttcattgttattattgtgagaatgctgttattggggttgtgtgtgagtgcccgtcagccagtgatgcctcgggccacgctgtggggccacctcagtcctgcctgggtcctggtgccttggaccccacgtgcttgtggccaggctgcccctgggcggggccatgtggcctcagaccacaagagcggagctgccctggcccaagcactgcagctgcctgcacccccgggcttcgcagccttgcttgttttctctgaacagcaacagaacagtgttcacagcgattcaaagggtggcattgggttggacgttctgggtacaagccaacctagtcccacgttgtacgtgaatgtttaatgtgctctcaaaacatggaaaataagtttagtgcacatagctaaatcacaaaacatccaatttctctgtttcctcaggaagtcattactgcgccaccacatcacatgaccttaacatgatcaatgtatttctctgccttgacatttaaatacataaattgagataagtagattagaaaatcattcaaatgataccataatttgtacgggacagggtgcgggcaatggccacgtggccaaggccccgcaggaacgcgccgaggtctccctcaccctccaggtgtccttcgcacccaacagtgcgtctgaggaacgagctgcagtttgagcgttcccctgagatgtgcgtagcctccgtgtaaatgtccactcccatggcttaattgcctatcagacgcattttcccagacgaaagcaatgttgggttggggaagacagtgcagccacccagcctttaccagcagcgtacggcagacgaaggcagtcgaggtgtggaggtgatcacgaagatacatgtgtttgactgtttaatttgaaagtttacattttttatgctttgtgttggtgtgtaatttttgtactcttggtggctagtttttgtcaaatcttttttggaatattgcttaaatgttttgattttatgatagtgaagcttgtattcagtgttttgccaattaatattatatgcttgtaataaaagcaaaagaaaagctta

SEQ ID NO: 279845 - DNA, 4590 bp, Homo sapiens
tagtgaggacggtgctgatcggacgagggatcacccgagcacctccctgcagtacatcggtcatgacagaaccatgcaagatattgtttacaaattggtaccaggcctccaagaagcggaaatgagaaagcagagggagttctatcacaaattgggcatggaggtgccgggagacatcaagggggagacctgctctgcaaaacagcacttagattcccatcggaatggtgaaaccaaagcagacgacagttcaaacaaagaggccgcggaggagaagccggaggaggacaacgactaccaccgcagcgacgagcaggtgagcatctgcctggagtgtaacagcagcaaactgcgcgggctgaagcggaagtggatccgctgctcagcccaggcgaccgtcttgcatctgaagaagttcatcgccaaaaaactcaacctttcatcctttaacgagctggacattttatgcaacgaggagatcctgggcaaggaccacacactcaagttcgtggttgtcactaggtggagattcaagaaggcgccgctcctgctgcactacagacccaagatggacttgctgtgaatggtgccacacagcgcccacagactgggccctcgcacccttgggtgctcccggccgccgcgcttaagaacattgcctctgggtgtcatgtggaccagacttctgaatagagaatatttataacttttgtatgagagagaattcacactcaacaagacactaccagcaccacgtttacagaggatgaaaacacttcacagtctcccagagccgatcgtcctctcccccgccccaccccgtgcttcagccttgcagggagagtgatgctccaggcaacacggttctgagtcaccttctgacacgagctccctctgcttgctttccaggtcttgaaaatctgaattcacttcagtttagtttatgaattttaggtttcatgataagcctcaagtgtagttggacttttattgaatccttcctaagttattgaaaaaatgtcttttcatggtgaatgacaatatttatgttgcctttagcttcttgaagatttagaagttatataaaaaattaatttaaaagcaaaccaaaagaggtttccattaacattatgatttaaccattgtatttaatttcccaccttatgaaacacaacagcagctccctgactggttcgcctttcattgtgtgaggtcggcacttggactcactcagaactgtcgctcacctgtggctgacacacccagccctggaaacggggccccagacgccacgtcgggatttctgacatgctcagcaggtagaccagaggccgtgtgaccagctcagtgctggtttacggaacaactcttacttttaaaaattacttgttcccccaaattgttgagtgccgccgtttggtttcctatgttttctttccctgttttgattttgctgaagggagaggtggtggtggttaggatcagagctctcctggcatccgtggggaggatttgctggtggtggcttcgggctcatgcccagacacactcactgccccgtctgtccaaggcctccccttcccctttgctggtgggaggagctcgtgtgctccttggccgcttactggaagggcgtttttcagagctgcagggacagggtgagcagctgaagggctaggagggaagccggcccccgctctgcagaagctgcatttcagctgaatctgtgtttcagcctcagttggttgcaccgttagcccctctcctcccggatggtcatgtttttgtcacattagagaataaacagccacacacacatttttttttttcctttaaaacagtaacttggaaatatgaaaaggccagaaggaggagcaagggctgttttctggagtggttgaggtgttgtcctgcagttgtcattgtcttctccaccgggctgttcccatttatttcctgtggaactgaatccctcctccctccactccttgggagcccaggtggtccttggccaccattcaggctttccaagaagccaaccaccttggagattttttttcttgaatttcgctgttttcttctgcttcctttagataaaaagcagctcaagagaccttatcttagggatgagaaaaacatgcatattaattccatctgagtgattgtcagtgtaaggccttttaaaacaaaagcaagttctttgttaggaattggtcaaaattcatctctttctttaagcccatcaactcccaggacggtttgagttactcagttacctaagcttgctattcatccaaatcattttctagagtcactgtataagggtctatgagtagctgtgtatgaataaatattacctgtctacctcaaaatacacatactgctgaagcattctgtacaaccgtgtgttatcacagtgcagttttaagtgtaacgttagaacttaggcattttcctgtgtggcggaataagaaaggattaaacagttacaagcctccaaattcaaataaaattaaatcacagttcagatgaaactgaatatcattgtaataatctcataatatatatttgtaactttgtagctatctttgaaatcacttgactttgcaatggtgctaagctgatagatttaaatacacagacgggcgagtggcgcccgtgtcgatgtcttcagccagtggtgaccctgcttttgtaaccgcgttaacctgacaaaacctcagcagcagaagtccctatttttctaggagttcatcgtgcagacagtcttcactacaggactcggccctggggcctctgcctctcgtctgaccttgcagccttagtcgttggaggctggagcgcaatggccctgccgtctgtggagcctctgggcggccttctttcctttctgtcaacctctcatttcacagaaaaaggctgaatttcattttttccagcatgaaagccaggatcggttagtggttggattctattggttttttttttaaacagatggagttactgtgaagaagttttcacaactatttatgctggtaaaacaaatgctgttaaatcaccttatgcgtcgttttcaacagcagtggggctaattacccggaatacggtctcaccgatgcagttttcatggacatagaaaattcaaatagaatatataatattgaatttaagatttggggggttaaaaaagaaaacttaactttataaaattatttattctattttaagccttctatcatattttcccatccaattgtttggtttcagtggtccagctttatttacaggcatataaaatgaaattgtgagatgttttgcaagcttctttttactttgagtagcttttaatttgtatgtttttatgtggatgaagagcattttttatgcttttgtgcaataggttccaatatgcatttattagacatctgtttaaatggtaatgtagcatttattttgctaaattgaaagggaacatagatggaattccaaaatatgtacattcagctgtttggtttttcgtttttcattgttattattgtgagaatgctgttattggggttgtgtgtgagtgcccgtcagccagtgatgcctcgggccacgctgtggggccacctcagtcctgcctgggtcctggtgccttggaccccacgtgcttgtggccaggctgcccctgggcggggccatgtggcctcagaccacaagagcggagctgccctggcccaagcactgcagctgcctgcacccccgggcttcgcagccttgcttgttttctctgaacagcaacagaacagtgttcacagcgattcaaagggtggcattgggttggacgttctgggtacaagccaacctagtcccacgttgtacgtgaatgtttaatgtgctctcaaaacatggaaaataagtttagtgcacatagctaaatcacaaaacatccaatttctctgtttcctcaggaagtcattactgcgccaccacatcacatgaccttaacatgatcaatgtatttctctgccttgacatttaaatacataaattgagataagtagattagaaaatcattcaaatgataccataatttgtacgggacagggtgcgggcaatggccacgtggccaaggccccgcaggaacgcgccgaggtctccctcaccctccaggtgtccttcgcacccaacagtgcgtctgaggaacgagctgcagtttgagcgttcccctgagatgtgcgtagcctccgtgtaaatgtccactcccatggcttaattgcctatcagacgcattttcccagacgaaagcaatgttgggttggggaagacagtgcagccacccagcctttaccagcagcgtacggcagacgaaggcagtcgaggtgtggaggtgatcacgaagatacatgtgtttgactgtttaatttgaaagtttacattttttatgctttgtgttggtgtgtaatttttgtactcttggtggctagtttttgtcaaatcttttttggaatattgcttaaatgttttgattttatgatagtgaagcttgtattcagtgttttgccaattaatattatatgcttgtaataaaagcaaaagaaaagctta

SEQ ID NO: 279846 - DNA, 4740 bp, Homo sapiens
tcctttggatatatgaccagcagtgggattgctggatcttacgatggaattcccaaagatgttgaccaggaagatcaagctgtgggacatcaacgcccacatcacctgccgcctgtgcagcgggtacctcatcgacgccaccacggtgaccgagtgtctgcacaccttctgcaggagctgcctggtgaagtacctggaggagaacaacacctgccccacctgcaggattgtgatccaccagagccaccccctgcagtacatcggtcatgacagaaccatgcaagatattgtttacaaattggtaccaggcctccaagaagcggaaatgagaaagcagagggagttctatcacaaattgggcatggaggtgccgggagacatcaagggggagacctgctctgcaaaacagcacttagattcccatcggaatggtgaaaccaaagcagacgacagttcaaacaaagaggccgcggaggagaagccggaggaggacaacgactaccaccgcagcgacgagcaggtgagcatctgcctggagtgtaacagcagcaaactgcgcgggctgaagcggaagtggatccgctgctcagcccaggcgaccgtcttgcatctgaagaagttcatcgccaaaaaactcaacctttcatcctttaacgagctggacattttatgcaacgaggagatcctgggcaaggaccacacactcaagttcgtggttgtcactaggtggagattcaagaaggcgccgctcctgctgcactacagacccaagatggacttgctgtgaatggtgccacacagcgcccacagactgggccctcgcacccttgggtgctcccggccgccgcgcttaagaacattgcctctgggtgtcatgtggaccagacttctgaatagagaatatttataacttttgtatgagagagaattcacactcaacaagacactaccagcaccacgtttacagaggatggcttcagccttgcagggagagtgatgctccaggcaacacggttctgagtcaccttctgacacgagctccctctgcttgctttccaggtcttgaaaatctgaattcacttcagtttagtttatgaattttaggtttcatgataagcctcaagtgtagttggacttttattgaatccttcctaagttattgaaaaaatgtcttttcatggtgaatgacaatatttatgttgcctttagcttcttgaagatttagaagttatataaaaaattaatttaaaagcaaaccaaaagaggtttccattaacattatgatttaaccattgtatttaatttcccaccttatgaaacacaacagcagctccctgactggttcgcctttcattgtgtgaggtcggcacttggactcactcagaactgtcgctcacctgtggctgacacacccagccctggaaacggggccccagacgccacgtcgggatttctgacatgctcagcaggtagaccagaggccgtgtgaccagctcagtgctggtttacggaacaactcttacttttaaaaattacttgttcccccaaattgttgagtgccgccgtttggtttcctatgttttctttccctgttttgattttgctgaagggagaggtggtggtggttaggatcagagctctcctggcatccgtggggaggatttgctggtggtggcttcgggctcatgcccagacacactcactgccccgtctgtccaaggcctccccttcccctttgctggtgggaggagctcgtgtgctccttggccgcttactggaagggcgtttttcagagctgcagggacagggtgagcagctgaagggctaggagggaagccggcccccgctctgcagaagctgcatttcagctgaatctgtgtttcagcctcagttggttgcaccgttagcccctctcctcccggatggtcatgtttttgtcacattagagaataaacagccacacacacatttttttttttcctttaaaacagtaacttggaaatatgaaaaggccagaaggaggagcaagggctgttttctggagtggttgaggtgttgtcctgcagttgtcattgtcttctccaccgggctgttcccatttatttcctgtggaactgaatccctcctccctccactccttgggagcccaggtggtccttggccaccattcaggctttccaagaagccaaccaccttggagattttttttcttgaatttcgctgttttcttctgcttcctttagataaaaagcagctcaagagaccttatcttagggatgagaaaaacatgcatattaattccatctgagtgattgtcagtgtaaggccttttaaaacaaaagcaagttctttgttaggaattggtcaaaattcatctctttctttaagcccatcaactcccaggacggtttgagttactcagttacctaagcttgctattcatccaaatcattttctagagtcactgtataagggtctatgagtagctgtgtatgaataaatattacctgtctacctcaaaatacacatactgctgaagcattctgtacaaccgtgtgttatcacagtgcagttttaagtgtaacgttagaacttaggcattttcctgtgtggcggaataagaaaggattaaacagttacaagcctccaaattcaaataaaattaaatcacagttcagatgaaactgaatatcattgtaataatctcataatatatatttgtaactttgtagctatctttgaaatcacttgactttgcaatggtgctaagctgatagatttaaatacacagacgggcgagtggcgcccgtgtcgatgtcttcagccagtggtgaccctgcttttgtaaccgcgttaacctgacaaaacctcagcagcagaagtccctatttttctaggagttcatcgtgcagacagtcttcactacaggactcggccctggggcctctgcctctcgtctgaccttgcagccttagtcgttggaggctggagcgcaatggccctgccgtctgtggagcctctgggcggccttctttcctttctgtcaacctctcatttcacagaaaaaggctgaatttcattttttccagcatgaaagccaggatcggttagtggttggattctattggttttttttttaaacagatggagttactgtgaagaagttttcacaactatttatgctggtaaaacaaatgctgttaaatcaccttatgcgtcgttttcaacagcagtggggctaattacccggaatacggtctcaccgatgcagttttcatggacatagaaaattcaaatagaatatataatattgaatttaagatttggggggttaaaaaagaaaacttaactttataaaattatttattctattttaagccttctatcatattttcccatccaattgtttggtttcagtggtccagctttatttacaggcatataaaatgaaattgtgagatgttttgcaagcttctttttactttgagtagcttttaatttgtatgtttttatgtggatgaagagcattttttatgcttttgtgcaataggttccaatatgcatttattagacatctgtttaaatggtaatgtagcatttattttgctaaattgaaagggaacatagatggaattccaaaatatgtacattcagctgtttggtttttcgtttttcattgttattattgtgagaatgctgttattggggttgtgtgtgagtgcccgtcagccagtgatgcctcgggccacgctgtggggccacctcagtcctgcctgggtcctggtgccttggaccccacgtgcttgtggccaggctgcccctgggcggggccatgtggcctcagaccacaagagcggagctgccctggcccaagcactgcagctgcctgcacccccgggcttcgcagccttgcttgttttctctgaacagcaacagaacagtgttcacagcgattcaaagggtggcattgggttggacgttctgggtacaagccaacctagtcccacgttgtacgtgaatgtttaatgtgctctcaaaacatggaaaataagtttagtgcacatagctaaatcacaaaacatccaatttctctgtttcctcaggaagtcattactgcgccaccacatcacatgaccttaacatgatcaatgtatttctctgccttgacatttaaatacataaattgagataagtagattagaaaatcattcaaatgataccataatttgtacgggacagggtgcgggcaatggccacgtggccaaggccccgcaggaacgcgccgaggtctccctcaccctccaggtgtccttcgcacccaacagtgcgtctgaggaacgagctgcagtttgagcgttcccctgagatgtgcgtagcctccgtgtaaatgtccactcccatggcttaattgcctatcagacgcattttcccagacgaaagcaatgttgggttggggaagacagtgcagccacccagcctttaccagcagcgtacggcagacgaaggcagtcgaggtgtggaggtgatcacgaagatacatgtgtttgactgtttaatttgaaagtttacattttttatgctttgtgttggtgtgtaatttttgtactcttggtggctagtttttgtcaaatcttttttggaatattgcttaaatgttttgattttatgatagtgaagcttgtattcagtgttttgccaattaatattatatgcttgtaataaaagcaaaagaaaagctta

SEQ ID NO: 279847 - DNA, 3842 bp, Homo sapiens
tcctttggatatatgaccagcagtgggattgctggatcttacgatggaattcccaaagatgttgaccaggaagatcaagctgtgggacatcaacgcccacatcacctgccgcctgtgcagcgggtacctcatcgacgccaccacggtgaccgagtgtctgcacaccttctgcaggagctgcctggtgaagtacctggaggagaacaacacctgccccacctgcaggattgtgatccaccagagccaccccctgcagtacatcggtcatgacagaaccatgcaagatattgtttacaaattggtaccaggcctccaagaagcggaaatgagaaagcagagggagttctatcacaaattgggcatggaggtgccgggagacatcaagggggagacctgctctgcaaaacagcacttagattcccatcggaatggtgaaaccaaagcagacgacagttcaaacaaagaggccgcggaggagaagccggaggaggacaacgactaccaccgcagcgacgagcaggtgagcatctgcctggagtgtaacagcagcaaactgcgcgggctgaagcggaagtggatccgctgctcagcccaggcgaccgtcttgcatctgaagaagttcatcgccaaaaaactcaacctttcatcctttaacgagctggacattttatgcaacgaggagatcctgggcaaggaccacacactcaagttcgtggttgtcactaggtggagattcaagaaggcgccgctcctgctgcactacagacccaagatggacttgctgtgaatggtgccacacagcgcccacagactgggccctcgcacccttgggtgctcccggccgccgcgcttaagaacattgcctctgggtgtcatgtggaccagacttctgaatagagaatatttataacttttgtatgagagagaattcacactcaacaagacactaccagcaccacgtttacagaggatgaaaacacttcacagtctcccagagccgatcgtcctctcccccgccccaccccgtgcttcagccttgcagggagagtgatgctccaggcaacacggttctgagtcaccttctgacacgagctccctctgcttgctttccaggtcttgaaaatctgaattcacttcagtttagtttatgaattttaggtttcatgataagcctcaagtgtagttggacttttattgaatccttcctaagttattgaaaaaatgtcttttcatggtgaatgacaatatttatgttgcctttagcttcttgaagatttagaagttatataaaaaattaatttaaaagcaaaccaaaagaggtttccattaacattatgatttaaccattgtatttaatttcccaccttatgaaacacaacagcagctccctgactggttcgcctttcattgtgtgaggtcggcacttggactcactcagaactgtcgctcacctgtggctgacacacccagccctggaaacggggccccagacgccacgtcgggatttctgacatgctcagcaggtagaccagaggccgtgtgaccagctcagtgctggtttacggaacaactcttacttttaaaaattacttgttcccccaaattgttgagtgccgccgtttggtttcctatgttttctttccctgttttgattttgctgaagggagaggtggtggtggttaggatcagagctctcctggcatccgtggggaggatttgctggtggtggcttcgggctcatgcccagacacactcactgccccgtctgtccaaggcctccccttcccctttgctggtgggaggagctcgtgtgctccttggccgcttactggaagggcgtttttcagagctgcagggacagggtgagcagctgaagggctaggagggaagccggcccccgctctgcagaagctgcatttcagctgaatctgtgtttcagcctcagttggttgcaccgttagcccctctcctcccggatggtcatgtttttgtcacattagagaataaacagccacacacacatttttttttttcctttaaaacagtaacttggaaatatgaaaaggccagaaggaggagcaagggctgttttctggagtggttgaggtgttgtcctgcagttgtcattgtcttctccaccgggctgttcccatttatttcctgtggaactgaatccctcctccctccactccttgggagcccaggtggtccttggccaccattcaggctttccaagaagccaaccaccttggagattttttttcttgaatttcgctgttttcttctgcttcctttagataaaaagcagctcaagagaccttatcttagggatgagaaaaacatgcatattaattccatctgagtgattgtcagtgtaaggccttttaaaacaaaagcaagttctttgttaggaattggtcaaaattcatctctttctttaagcccatcaactcccaggacggtttgagttactcagttacctaagcttgctattcatccaaatcattttctagagtcactgtataagggtctatgagtagctgtgtatgaataaatattacctgtctacctcaaaatacacatactgctgaagcattctgtacaaccgtgtgttatcacagtgcagttttaagtgtaacgttagaacttaggcattttcctgtgtggcggaataagaaaggattaaacagttacaagcctccaaattcaaataaaattaaatcacagttcagatgaaactgaatatcattgtaataatctcataatatatatttgtaactttgtagctatctttgaaatcacttgactttgcaatggtgctaagctgatagatttaaatacacagacgggcgagtggcgcccgtgtcgatgtcttcagccagtggtgaccctgcttttgtaaccgcgttaacctgacaaaacctcagcagcagaagtccctatttttctaggagttcatcgtgcagacagtcttcactacaggactcggccctggggcctctgcctctcgtctgaccttgcagccttagtcgttggaggctggagcgcaatggccctgccgtctgtggagcctctgggcggccttctttcctttctgtcaacctctcatttcacagaaaaaggctgaatttcattttttccagcatgaaagccaggatcggttagtggttggattctattggttttttttttaaacagatggagttactgtgaagaagttttcacaactatttatgctggtaaaacaaatgctgttaaatcaccttatgcgtcgttttcaacagcagtggggctaattacccggaatacggtctcaccgatgcagttttcatggacatagaaaattcaaatagaatatataatattgaatttaagatttggggggttaaaaaagaaaacttaactttataaaattatttattctattttaagccttctatcatattttcccatccaattgtttggtttcagtggtccagctttatttacaggcatataaaatgaaattgtgagatgttttgcaagcttctttttactttgagtagcttttaatttgtatgtttttatgtggatgaagagcattttttatgcttttgtgcaataggttccaatatgcatttattagacatctgtttaaatggtaatgtagcatttattttgctaaattgaaagggaacatagatggaattccaaaatatgtacattcagctgtttggtttttcgtttttcattgttattattgtgagaatgctgttattggggttgtgtgtgagtgcccgtcagccagtgatgccttattccactctgtgtttttaccttaatcttgcttttttccttcttgt

SEQ ID NO: 279848 - DNA, 1800 bp, Homo sapiens
  misc_feature (1786)..(1786): n is a, c, g, or t
tcctttggatatatgaccagcagtgggattgctggatcttacgatggaattcccaaagatgttgaccaggaagatcaagctgtgggacatcaacgcccacatcacctgccgcctgtgcagcgggtacctcatcgacgccaccacggtgaccgagtgtctgcacaccttctgcaggagctgcctggtgaagtacctggaggagaacaacacctgccccacctgcaggattgtgatccaccagagccaccccctgcagtacatcggtcatgacagaaccatgcaagatattgtttacaaattggtaccaggcctccaagaagcggaaatgagaaagcagagggagttctatcacaaattgggcatggaggtgccgggagacatcaagggggagacctgctctgcaaaacagcacttagattcccatcggaatggtgaaaccaaagcagacgacagttcaaacaaagaggccgcggaggagaagccggaggaggacaacgactaccaccgcagcgacgagcaggtgagcatctgcctggagtgtaacagcagcaaactgcgcgggctgaagcggaagtggatccgctgctcagcccaggcgaccgtcttgcatctgaagaagttcatcgccaaaaaactcaacctttcatcctttaacgagctggacattttatgcaacgaggagatcctgggcaaggaccacacactcaagttcgtggttgtcactaggtggagattcaagaaggcgccgctcctgctgcactacagacccaagatggacttgctgtgaatggtgccacacagcgcccacagactgggccctcgcacccttgggtgctcccggccgccgcgcttaagaacattgcctctgggtgtcatgtggaccagacttctgaatagagaatatttataacttttgtatgagagagaattcacactcaacaagacactaccagcaccacgtttacagaggatgaaaacacttcacagtctcccagagccgatcgtcctctcccccgccccaccccgtgcttcagccttgcagggagagtgatgctccaggcaacacggttctgagtcaccttctgacacgagctccctctgcttgctttccaggtcttgaaaatctgaattcacttcagtttagtttatgaattttaggtttcatgataagcctcaagtgtagttggacttttattgaatccttcctaagttattgaaaaaatgtcttttcatggtgaatgacaatatttatgttgcctttagcttcttgaagatttagaagttatataaaaaattaatttaaaagcaaaccaaaagaggtttccattaacattatgatttaaccattgtatttaatttcccaccttatgaaacacaacagcagctccctgactggttcgcctttcattgtgtgaggtcggcacttggactcactcagaactgtcgctcacctgtggctgacacacccagccctggaaacggggccccagacgccacgtcgggatttctgacatgctcagcaggtagaccagaggccgtgtgaccagctcagtgctggtttacggaacaactcttacttttaaaaattacttgttcccccaaattgttgagtgccgccgtttggtttcctatgttttctttccctgttttgattttgctgaagggagaggtggtggtggttaggatcagagctctcctggcatccgtggggaggatttgctggtggtggcttcgggctcatgcccagacacactcactgccccgtctgtccacgtggcgtcatccnggccgagtcgatca

SEQ ID NO: 279849 - DNA, 1003 bp, Homo sapiens
tcctttggatatatgaccagcagtgggattgctggatcttacgatggaattcccaaagatgttgaccaggaagatcaagctgtgggacatcaacgcccacatcacctgccgcctgtgcagcgggtacctcatcgacgccaccacggtgaccgagtgtctgcacaccttctgcaggagctgcctggtgaagtacctggaggagaacaacacctgccccacctgcaggattgtgatccaccagagccaccccctgcagtacatcggtcatgacagaaccatgcaagatattgtttacaaattggtaccaggcctccaagaagcggaaatgagaaagcagagggagttctatcacaaattgggcatggaggtgccgggagacatcaagggggagacctgctctgcaaaacagcacttagattcccatcggaatggtgaaaccaaagcagacgacagttcaaacaaagaggccgcggaggagaagccggaggaggacaacgactaccaccgcagcgacgagcaggtgagcatctgcctggagtgtaacagcagcaaactgcgcgggctgaagcggaagtggatccgctgctcagcccaggcgaccgtcttgcatctgaagaagttcatcgccaaaaaactcaacctttcatcctttaacgagctggacattttatgcaacgaggagatcctgggcaaggaccacacactcaagttcgtggttgtcactaggtggagattcaagaaggcgccgctcctgctgcactacagacccaagatggacttgctgtgaatggtgccacacagcgcccacagactgggccctcgcacccttgggtgctcccggccgccgcgcttaagaacattgcctctgggtgtcatgtggaccagacttctgaatagagaatatttataacttttgtatgagagagaattcacactcaacaagacactaccagcaccacgtttacagaggatgaattctctctcataaaaaagttggcggccg

SEQ ID NO: 279850 - DNA, 886 bp, Homo sapiens
tgcaatttgatctcagactgctgtgctagcaatcagtgagactccgtgggcgtaggaccctctgagccaggtgcgggatataatcttgtggtgcgccgttttttaagccggtccgaaaagcgcaatattcgggtgggagtgacccgatttcccagctcagaacctgaggacgcagccatggagcggtcggccttcatggagctggatgctgggagcaggctggtgatgcatctccgcgagtggccagccctgctggtcagcagcacgggctggacagagtttgaacaacttactcttgatggacacaaccttccttctcttgtctgtgtgataacagggtcggtggacctgggtgtctgtctgcacatgtcctccagtggcctggacctgcccatgaaggtggtggacatgttcgggtgctgtttgcctgtgtgtgccgtgaacttcaagtgtttacatgagctggtgaaacatgaagaaaatggcctggtctttgaggactcagaggaactggcagctctgcagatgcttttctcaaactttcctgatcctgcaggcaagctaaaccagttttggaagaacctgcgggagtcgcagcagctccgatgggatgagagctgggtgcagactgtgctccctttggttatggacatacaactcctgggccagaggctaaaaccccgggacccctgctgtccttcccgcagcttcttctcggagtctcagggcaaacccttttgagcagcgcctcccagtggccagaagctgaaatgacggcagtggtgccgcctggtgaatgaattggttctgtgacccgggaagctgtgcttggctctgatttcttttccggaggctcggaaacacttcctctcttcttctgttcttc

SEQ ID NO: 279851 - DNA, 997 bp, Homo sapiens
tgcaatttgatctcagactgctgtgctagcaatcagtgagactccgtgggcgtaggaccctctgagccaggtgcgggatataatcttgtggtgcgccgttttttaagccggtccgaaaagcgcaatattcgggtgggagtgacccgatttcccagggctgtgaccatctatgacaagccggcatctttctttaaagagacacctctggacctgctgcaccggctcttcatgaagctgggtggcactcactctccgttcagggcctgctcagaacctgaggacgcagccatggagcggtcggccttcatggagctggatgctgggagcaggctggtgatgcatctccgcgagtggccagccctgctggtcagcagcacgggctggacagagtttgaacaacttactcttgatggacacaaccttccttctcttgtctgtgtgataacagggtcggtggacctgggtgtctgtctgcacatgtcctccagtggcctggacctgcccatgaaggtggtggacatgttcgggtgctgtttgcctgtgtgtgccgtgaacttcaagtgtttacatgagctggtgaaacatgaagaaaatggcctggtctttgaggactcagaggaactggcagctctgcagatgcttttctcaaactttcctgatcctgcaggcaagctaaaccagttttggaagaacctgcgggagtcgcagcagctccgatgggatgagagctgggtgcagactgtgctccctttggttatggacatacaactcctgggccagaggctaaaaccccgggacccctgctgtccttcccgcagcttcttctcggagtctcagggcaaacccttttgagcagcgcctcccagtggccagaagctgaaatgacggcagtggtgccgcctggtgaatgaattggttctgtgacccgggaagctgtgcttggctctgatttcttttccggaggctcggaaacacttcctctcttcttctgttcttc

SEQ ID NO: 279852 - DNA, 645 bp, Homo sapiens
ttctttttcctcttctcttctcttttctcttattttctttttttgaggaggagtttcactcttgtcgcccagactagagcgcaatggtacgatcttggctcactgcaacttccacctcccgagttcaagcaattctcctgacagaagtccactcaagccagccattgtagctagcatcggggctccagccgtcagctgggattacaggcgtgcaccacccagccatctaattttgtgtttttagtagagacagagtttcaccatgttgaccaagttggttttgacctcctgacctcaggtgatccgcccacctcggcttcccaaagtgctgggattacaggcgtgagtcacacaccaggccctttgttaacttttaaccatattgccattttaagcaggtgcacagcactgaacatttgccagtgatgttattaaccactggtaactttaccagcagaatagatagctgaggttgtggatttcttgtattccgtactttctggaatgtcactgtgacttctttcttaggtaccaggaggactttaacccgctggtgatgaggatgtctcctcgttacagctgtaagaatcacactcgggcatacatccaccatctgtgtgacccaagtgagcagaggaccgtctt

SEQ ID NO: 279853 - DNA, 1311 bp, Homo sapiens
gcaggtccacacccaccctgcactctcatgggtctgaaaaggccaagttaggggttgggtgcagaggcttagaaaagtctaggtctcagcattggatatccgggacccccttatactcggccaggctcagggatgaagctccttagagctggccccaaaccaggagctcctggggctgagacagatgcagacctgctctcctgcccctcctaccatcccctggcccccatcatccaacagaagtccaggccagcctgcctcccgctccagtggggcctccattgcgacctgatagacctgtatgggtggctggccccataatcagcatctaccacatcccacgcgcatggggtctctcacagcggcccctgcccatggacagatggactgacccacaggcatccacatgtggtgctgaagaagccgtgaggaaagggggaggtgggaagggcctcgtccagggtgtctggctgcacaggagacatagcagctcccactggcaccctgcatacaagggaaaggcctcgaaatgcgctcaccaaagcctcagagttttattatcaggagctcacattcaggagcaggtctgcttgtcaagagtccaagcacgcctgtgttctgtggccacaggagaggaggggccgcttttaaatacaagcctactcctgtcgttggaccagaacaaagacctactggccagaagcacatgagaggaggagtttcactcttgtcgcccagactagagcgcaatggtacgatcttggctcactgcaacttccacctcccgagttcaagcaattctcctgacagaagtccactcaagccagccattgtagctagcatcggggctccagccgtcagctgggattacaggcgtgcaccacccagccatctaattttgtgtttttagtagagacagagtttcaccatgttgaccaagttggttttgacctcctgacctcaggtgatccgcccacctcggcttcccaaagtgctgggattacaggcgtgagtcacacaccaggccctttgttaacttttaaccatattgccattttaagcaggtgcacagcactgaacatttgccagtgatgttattaaccactggtaactttaccagcagaatagatagctgaggttgtggatttcttgtattccgtactttctggaatgtcactgtgacttctttcttaggtaccaggaggactttaacccgctggtgatgaggatgtctcctcgttacagctgtaagaatcacactcgggcatacatccaccatctgtgtgacccaagtgagcagaggaccgtctt

SEQ ID NO: 279854 - DNA, 595 bp, Homo sapiens
tgacagaagtccactcaagccagccattgtagctagcatcggggctccagccgtcagctgggattacaggcgtgcaccacccagccatctaattttgtgtttttagtagagacagagtttcaccatgttgaccaagttggttttgacctcctgacctcaggtgatccgcccacctcggcttcccaaagtgctgggattacaggcgtgagtcacacaccaggcgtgtttcctccacgtttctgctcaaggcggaaaatctccatctacccttaacttatgactcaatcgtggagctttggccccagatggcacatacaagctccctgcctgccccaagaggtgccctgtgggcatttgcctctgtgacagaagtccactcaagccagccattgtagctagcatcggggctccagccatcagtgagggcagccagggccggtcctcggcctgccccagatggcacattgatgggggctgtgtggacttacagctgggaggggctgctgggcatgcccaggtggggctcttccagtgaggcagcgatgctgaggctgaaggacgaggccgcctatcagaggcccagaggagaaggagg

SEQ ID NO: 279855 - DNA, 527 bp, Homo sapiens
cgtccaccccatccccccccccccccctctcttcttttcccctgtcactctgcctacccatctaaagtcccccagtggcattaagaggacattttgctttgcaagggtctctcttcaaaaggttcaaatgtaagtccctccgatgcctcctttctgctccccgcgcagtgcatagtgaggccactgctgcttacccttcccggaaccacaagattgtcaatgccaatcaaatctttcttgagttcgtgcagcttctggaaattctccatcttgatcatcgtaccgtggagctgtgccaccatctccgtgatctctgccaaagcggctgtgaaggaaagacatacacagtctgcagcgggaaaggcaggcaggggtcttcccctagcagctgtcagctcaacgctgcagggaaatcactccagtccctgcacagtattcaaaggtgtcttttgagcaaaaacagtgctatttctctataataaaaattgatggtgtaaaaaaaaaaaatccggactacctggcctcac

SEQ ID NO: 279856 - DNA, 356 bp, Homo sapiens
ccagttgtctcccaggtggatggaaagaggacattttgctttgcaagggtctctcttcaaaaggttcaaatttcgtgcagcttctggaaattctccatcttgatcatcgtaccgtggagctgtgccaccatctccgtgatctctgccaaagcggctgtgaaggaaagacatacacagtctgcagcgggaaaggcaggcaggggtcttcccctagcagctgtcagctcaacgctgcagggaaatcactccagtccctgcacagtattcaaaggtgtcttttgagcaaaaacagtgctatttctctataataaaaattgatggtgtaaaaaaaaaaaatccggactacctggcctcac

SEQ ID NO: 279857 - DNA, 348 bp, Homo sapiens
ctttttcctcgtggcagtctaaagaagagggaggagcagtctgacaatccggaggagcaagactggcccaaaacactttccttgattggtggagacattctggaggaggagccaagctctgggctaaagtttacaggactcccagcggttcctcttacaggtggcagagtgtgggcaactgaaacccagccagcagaagagagagagatttgggggaaggccaatgccagtgtcatgacactgctcttcacaaacaactgaggacttctagaaatctctgctgtgcagtgtccaccaaagaaattctgaaaattaaatgctgtattgaatacacaggtaaaagcaaac

SEQ ID NO: 279858 - DNA, 2799 bp, Homo sapiens
agcccggagagtgcgcgtggcggcggtggcggctgcggcaacagcggggccgatgtgtagttggtgactgcctctccagatgctgaggtgcctgtatcattggcacaggccagtgctgaaccgtaggtggagtaggctgtgccttctgaagcagtatctattcacaatgaagttgcagtctcccgaattccagtcacttttcacagaaggactgaagagtctgacagaattatttgtcaaagagaatcacgaattaagaatagcaggaggagcagtgagggatttattaaatggagtaaagcctcaggatatagattttgccaccactgctacccctactcaaatgaaggagatgtttcagtcggctgggattcggatgataaacaacagaggagaaaagcacggaacaattactgccaggcttcatgaagaaaattttgagattactacactacggattgatgtcaccactgatggaagacatgctgaggtagaatttacaactgactggcagaaagatgcggaacgcagagatctcactataaattctatgtttttaggttttgatggcactttatttgactactttaatggttatgaagatttaaaaaataagaaagttagatttgttggacatgctaaacagagaatacaagaggattatcttagaattttaagatacttcaggttttatgggagaattgtagacaaacctggtgaccatgatcctgagactttggaagcaattgcagaaaatgcaaaaggcttggctggaatatcaggagaaaggatttgggtggaactgaaaaaaattcttgttggtaaccatgtaaatcatttgattcaccttatctatgatcttgatgtggctccttatataggtttacctgctaatgcaagtttagaagaatttgacaaagtcagtaaaaatgttgatggtttttcaccaaagccagtgactcttttggcctcattattcaaagtacaagatgatgtcacaaaattggatttgaggttgaagatcgcgaaagaggagaaaaaccttggcttatttatagttaaaaataggaaagatttaattaaagcaacagatagttcagacccattgaaaccctatcaagacttcattatagattctagggaacctgatgcaactactcgtgtatgtgaactactgaagtaccaaggagagcactgtctcctaaaggaaatgcagcagtggtccattcctccatttcctgtaagtggccatgacatcagaaaagtgggcatttcttcaggaaaagaaattggggctctattacaacagttgcgagaacagtggaaaaaaagtggttaccaaatggaaaaagatgaacttctgagttacataaagaagacctaaaactgatggctactaaaaagcagagcatttctggtaagactaaattttctcccctccctcttaatgaggttttagagactacaccagaataaaagacagtttaggggacctctgtagaacaacaagggtcttattttgtgaattatatatttcaagaactaaacagagatccacctttctggatctgatttatatcactgaaatgtacagttcttttggaatagtttcacctgagaaaacatagttggctattatctatcttaacctgttcaggcttttaaaaaaaactgtttttgcatagggtagtactaagatcttaaaaagtggtaactgtcttgaagaaaaaacgtttattgtttgtttgcaattgaaataacagggttaccttaacaatgactgtctatgatgtgtcagttcttatctgaattccaaaataaacctgtgcttaaaaaagaaataattgaccaagtaagtttgcataaaatgtgaatactaaatgtgtccccagttgctggcattcatatgtacaggatttgttctagcaagctatgcttcagtatgtggttgatatttttctgtcacaatgatttctttatgcatgcagagcctgggaaagtcatgggattaacttgagggtcactattgagcctattaattaattaattattgttttaataaaacaaacattggtattggaagataaatatgtttatgtggtatctgacaatgtgtattaggtgtcatatacaatggtaatatgcctgtctttaaagtgttattttattaattaaaaggatatggctattattatatattctctaaagatttattctctaaagatttgagtcctaaatgctttcatcaggtaaataaaatgtataatacaaactgtttatttcagctgctataatttcagctgctatactgacatttcataatttatttcctttctgtgtagccagtcataacatctttgtactctatgagcaaatagtaattttggaccttgataaaacaattttgtagagtgtaatatttctaagaggaaatgtcacaggggctatgatgcaagaaagcctcagaaatgactgcatacaggaaataatctcatcatttccaaagatgtcttcatgtcccatcaatgacatgctaccagacatatcagattccacaggataatggcaccaagctacccaagtagatgtttctggtattctagactgccgttcatgcttgtttcctaaagtatacttaaaagtttcaaatacagtttcacttagaaactgcaaccctccaagtaatgttatgtttacttaggtattaatgttatgtttacttaggtatgtatcagaggcaataatttccaaagcagatcttagaatataaccaatttgttagataactaactttatctc

SEQ ID NO: 279859 - DNA, 2333 bp, Homo sapiens
  misc_feature (2292)..(2292): n is a, c, g, or t
  misc_feature (2296)..(2296): n is a, c, g, or t
agcccggagagtgcgcgtggcggcggtggcggctgcggcaacagcggggccgatgtgtagttggtgactgcctctccagatgctgaggtgcctgtatcattggcacaggccagtgctgaaccgtaggtggagtaggctgtgccttctgaagcagtatctattcacaatgaagttgcagtctcccgaattccagtcacttttcacagaaggactgaagagtctgacagaattatttgtcaaagagaatcacgaattaagaatagcaggaggagcagtgagggatttattaaatggagtaaagcctcaggatatagattttgccaccactgctacccctactcaaatgaaggagatgtttcagtcggctgggattcggatgataaacaacagaggagaaaagcacggaacaattactgccaggcttcatgaagaaaattttgagattactacactacggattgatgtcaccactgatggaagacatgctgaggtagaatttacaactgactggcagaaagatgcggaacgcagagatctcactataaattctatgtttttaggttttgatggcactttatttgactactttaatggttatgaagatttaaaaaataagaaagttagatttgttggacatgctaaacagagaatacaagaggattatcttagaattttaagatacttcaggttttatgggagaattgtagacaaacctggtgaccatgatcctgagactttggaagcaattgcagaaaatgcaaaaggcttggctggaatatcaggagaaaggatttgggtggaactgaaaaaaattcttgttggtaaccatgtaaatcatttgattcaccttatctatgatcttgatgtggctccttatataggtttacctgctaatgcaagtttagaagaatttgacaaagtcagtaaaaatgttgatggtttttcaccaaagccagtgactcttttggcctcattattcaaagtacaagatgatgtcacaaaattggatttgaggttgaagatcgcgaaagaggagaaaaaccttggcttatttatagttaaaaataggaaagatttaattaaagcaacagatagttcagacccattgaaaccctatcaagacttcattatagattctagggaacctgatgcaactactcgtgtatgtgaactactgaagtaccaaggagagcactgtctcctaaaggaaatgcagcagtggtccattcctccatttcctgtaagtggccatgacatcagaaaagtgggcatttcttcaggaaaagaaattggggctctattacaacagttgcgagaacagtggaaaaaaagtggttaccaaatggaaaaagatgaacttctgagttacataaagaagacctaaaactgatggctactaaaaagcagagcatttctggtaagactaaattttctcccctccctcttaatgaggttttagagactacaccagaataaaagacagtttaggggacctctgtagaacaacaagggtcttattttgtgaattatatatttcaagaactaaacagagatccacctttctggatctgatttatatcactgaaatgtacagttcttttggaatagtttcacctgagaaaacatagttggctattatctatcttaacctgttcaggcttttaaaaaaaactgtttttgcatagggtagtactaagatcttaaaaagtggtaactgtcttgaagaaaaaacgtttattgtttgtttgcaattgaaataacagggttaccttaacaatgactgtctatgatgtgtcagttcttatctgaattccaaaataaacctgtgcttaaaaaagaaataattgaccaagtaagtttgcataaaatgtgaatactaaatgtgtccccagttgctggcattcatatgtacaggatttgttctagcaagctatgcttcagtatgtggttgatatttttctgtcacaatgatttctttatgcatgcagagcctgggaaagtcatgggattaacttgagggtcactattgagcctattaattaattaattattgttttaataaaacaaacattggtattggaagataaatatgtttatgtggtatctgacaatgtgtattaggtgtcatatacaatggtaatatgcctgtctttaaagtgttattttattaattaaaaggatatggctattattatatattctctaaagattttatttacctgatgaaagcatttctcactgtcaacccaacacaggcatgctcataaggaaaggttggttgattgtagatantggnctgttaattgtcagttcagtgttttcccacgcgtccg

SEQ ID NO: 279860 - DNA, 3001 bp, Homo sapiens
agcccggagagtgcgcgtggcggcggtggcggctgcggcaacagcggggccgatgtgtagttggtgactgcctctccagatgctgaggtgcctgtatcattggcacaggccagtgctgaaccgtaggtggagtaggctgtgccttctgaagcagtatctattcacaatgaagttgcagtctcccgaattccagtcacttttcacagaaggactgaagagtctgacagaattatttgtcaaagagaatcacgaattaagaatagcaggaggagcagtgagggatttattaaatggagtaaagcctcaggatatagattttgccaccactgctacccctactcaaatgaaggagatgtttcagtcggctgggattcggatgataaacaacagaggagaaaagcacggaacaattactgccaggcttcatgaagaaaattttgagattactacactacggattgatgtcaccactgatggaagacatgctgaggtagaatttacaactgactggcagaaagatgcggaacgcagagatctcactataaattctatgtttttaggttttgatggcactttatttgactactttaatggttatgaagatttaaaaaataagaaagttagatttgttggacatgctaaacagagaatacaagaggattatcttagaattttaagatacttcaggttttatgggagaattgtagacaaacctggtgaccatgatcctgagactttggaagcaattgcagaaaatgcaaaaggcttggctggaatatcaggagaaaggatttgggtggaactgaaaaaaattcttgttggtaaccatgtaaatcatttgattcaccttatctatgatcttgatgtggctccttatataggtttacctgctaatgcaagtttagaagaatttgacaaagtcagtaaaaatgttgatggtttttcaccaaagccagtgactcttttggcctcattattcaaagtacaagatgatgtcacaaaattggatttgaggttgaagatcgcgaaagaggagaaaaaccttggcttatttatagttaaaaataggaaagatttaattaaagcaacagatagttcagacccattgaaaccctatcaagacttcattatagatgtaagtatatgctaggcttggtcagaaatatgaagtatcgtcacgaatttagaattaatttattaaaactaagatctacaaatctgtgaattttacttattttaaatgaaaaaatttatgttgagtatttaaattttaggataagattgtaagtgtatgttttcatgtgtgacgaaactaaatgtttgattttgacacgtagtctagggaacctgatgcaactactcgtgtatgtgaactactgaagtaccaaggagagcactgtctcctaaaggaaatgcagcagtggtccattcctccatttcctgtaagtggccatgacatcagaaaagtgggcatttcttcaggaaaagaaattggggctctattacaacagttgcgagaacagtggaaaaaaagtggttaccaaatggaaaaagatgaacttctgagttacataaagaagacctaaaactgatggctactaaaaagcagagcatttctggtaagactaaattttctcccctccctcttaatgaggttttagagactacaccagaataaaagacagtttaggggacctctgtagaacaacaagggtcttattttgtgaattatatatttcaagaactaaacagagatccacctttctggatctgatttatatcactgaaatgtacagttcttttggaatagtttcacctgagaaaacatagttggctattatctatcttaacctgttcaggcttttaaaaaaaactgtttttgcatagggtagtactaagatcttaaaaagtggtaactgtcttgaagaaaaaacgtttattgtttgtttgcaattgaaataacagggttaccttaacaatgactgtctatgatgtgtcagttcttatctgaattccaaaataaacctgtgcttaaaaaagaaataattgaccaagtaagtttgcataaaatgtgaatactaaatgtgtccccagttgctggcattcatatgtacaggatttgttctagcaagctatgcttcagtatgtggttgatatttttctgtcacaatgatttctttatgcatgcagagcctgggaaagtcatgggattaacttgagggtcactattgagcctattaattaattaattattgttttaataaaacaaacattggtattggaagataaatatgtttatgtggtatctgacaatgtgtattaggtgtcatatacaatggtaatatgcctgtctttaaagtgttattttattaattaaaaggatatggctattattatatattctctaaagatttattctctaaagatttgagtcctaaatgctttcatcaggtaaataaaatgtataatacaaactgtttatttcagctgctataatttcagctgctatactgacatttcataatttatttcctttctgtgtagccagtcataacatctttgtactctatgagcaaatagtaattttggaccttgataaaacaattttgtagagtgtaatatttctaagaggaaatgtcacaggggctatgatgcaagaaagcctcagaaatgactgcatacaggaaataatctcatcatttccaaagatgtcttcatgtcccatcaatgacatgctaccagacatatcagattccacaggataatggcaccaagctacccaagtagatgtttctggtattctagactgccgttcatgcttgtttcctaaagtatacttaaaagtttcaaatacagtttcacttagaaactgcaaccctccaagtaatgttatgtttacttaggtattaatgttatgtttacttaggtatgtatcagaggcaataatttccaaagcagatcttagaatataaccaatttgttagataactaactttatctc

SEQ ID NO: 279861 - DNA, 2787 bp, Homo sapiens
cgactcagaattacagagctttccagagcttatataccttatgtgtagttggtgactgcctctccagatgctgaggtgcctgtatcattggcacaggccagtgctgaaccgtaggtggagtaggctgtgccttctgaagcagtatctattcacaatgaagttgcagtctcccgaattccagtcacttttcacagaaggactgaagagtctgacagaattatttgtcaaagagaatcacgaattaagaatagcaggaggagcagtgagggatttattaaatggagtaaagcctcaggatatagattttgccaccactgctacccctactcaaatgaaggagatgtttcagtcggctgggattcggatgataaacaacagaggagaaaagcacggaacaattactgccaggcttcatgaagaaaattttgagattactacactacggattgatgtcaccactgatggaagacatgctgaggtagaatttacaactgactggcagaaagatgcggaacgcagagatctcactataaattctatgtttttaggttttgatggcactttatttgactactttaatggttatgaagatttaaaaaataagaaagttagatttgttggacatgctaaacagagaatacaagaggattatcttagaattttaagatacttcaggttttatgggagaattgtagacaaacctggtgaccatgatcctgagactttggaagcaattgcagaaaatgcaaaaggcttggctggaatatcaggagaaaggatttgggtggaactgaaaaaaattcttgttggtaaccatgtaaatcatttgattcaccttatctatgatcttgatgtggctccttatataggtttacctgctaatgcaagtttagaagaatttgacaaagtcagtaaaaatgttgatggtttttcaccaaagccagtgactcttttggcctcattattcaaagtacaagatgatgtcacaaaattggatttgaggttgaagatcgcgaaagaggagaaaaaccttggcttatttatagttaaaaataggaaagatttaattaaagcaacagatagttcagacccattgaaaccctatcaagacttcattatagattctagggaacctgatgcaactactcgtgtatgtgaactactgaagtaccaaggagagcactgtctcctaaaggaaatgcagcagtggtccattcctccatttcctgtaagtggccatgacatcagaaaagtgggcatttcttcaggaaaagaaattggggctctattacaacagttgcgagaacagtggaaaaaaagtggttaccaaatggaaaaagatgaacttctgagttacataaagaagacctaaaactgatggctactaaaaagcagagcatttctggtaagactaaattttctcccctccctcttaatgaggttttagagactacaccagaataaaagacagtttaggggacctctgtagaacaacaagggtcttattttgtgaattatatatttcaagaactaaacagagatccacctttctggatctgatttatatcactgaaatgtacagttcttttggaatagtttcacctgagaaaacatagttggctattatctatcttaacctgttcaggcttttaaaaaaaactgtttttgcatagggtagtactaagatcttaaaaagtggtaactgtcttgaagaaaaaacgtttattgtttgtttgcaattgaaataacagggttaccttaacaatgactgtctatgatgtgtcagttcttatctgaattccaaaataaacctgtgcttaaaaaagaaataattgaccaagtaagtttgcataaaatgtgaatactaaatgtgtccccagttgctggcattcatatgtacaggatttgttctagcaagctatgcttcagtatgtggttgatatttttctgtcacaatgatttctttatgcatgcagagcctgggaaagtcatgggattaacttgagggtcactattgagcctattaattaattaattattgttttaataaaacaaacattggtattggaagataaatatgtttatgtggtatctgacaatgtgtattaggtgtcatatacaatggtaatatgcctgtctttaaagtgttattttattaattaaaaggatatggctattattatatattctctaaagatttattctctaaagatttgagtcctaaatgctttcatcaggtaaataaaatgtataatacaaactgtttatttcagctgctataatttcagctgctatactgacatttcataatttatttcctttctgtgtagccagtcataacatctttgtactctatgagcaaatagtaattttggaccttgataaaacaattttgtagagtgtaatatttctaagaggaaatgtcacaggggctatgatgcaagaaagcctcagaaatgactgcatacaggaaataatctcatcatttccaaagatgtcttcatgtcccatcaatgacatgctaccagacatatcagattccacaggataatggcaccaagctacccaagtagatgtttctggtattctagactgccgttcatgcttgtttcctaaagtatacttaaaagtttcaaatacagtttcacttagaaactgcaaccctccaagtaatgttatgtttacttaggtattaatgttatgtttacttaggtatgtatcagaggcaataatttccaaagcagatcttagaatataaccaatttgttagataactaactttatctc

SEQ ID NO: 279862 - DNA, 1874 bp, Homo sapiens
agcccggagagtgcgcgtggcggcggtggcggctgcggcaacagcggggccgatgtgtagttggtgactgcctctccagatgctgaggtgcctgtatcattggcacaggccagtgctgaaccgtaggtggagtaggctgtgccttctgaagcagtatctattcacaatgaagttgcagtctcccgaattccagtcacttttcacagaaggactgaagagtctgacagaattatttgtcaaagagaatcacgaattaagaatagcaggaggagcagtgagggatttattaaatggagtaaagcctcaggatatagattttgccaccactgctacccctactcaaatgaaggagatgtttcagtcggctgggattcggatgataaacaacagaggagaaaagcacggaacaattactgccaggcttcatgaagaaaattttgagattactacactacggattgatgtcaccactgatggaagacatgctgaggtagaatttacaactgactggcagaaagatgcggaacgcagagatctcactataaattctatgtttttaggttttgatggcactttatttgactactttaatggttatgaagatttaaaaaataagaaagttagatttgttggacatgctaaacagagaatacaagaggattatcttagaattttaagatacttcaggttttatgggagaattgtagacaaacctggtgaccatgatcctgagactttggaagcaattgcagaaaatgcaaaaggcttggctggaatatcaggagaaaggatttgggtggaactgaaaaaaattcttgttggtaaccatgtaaatcatttgattcaccttatctatgatcttgatgtggctccttatataggtttacctgctaatgcaagtttagaagaatttgacaaagtcagtaaaaatgttgatggtttttcaccaaagccagtgactcttttggcctcattattcaaagtacaagatgatgtcacaaaattggatttgaggttgaagatcgcgaaagaggagaaaaaccttggcttatttatagttaaaaataggaaagatttaattaaagcaacagatagttcagacccattgaaaccctatcaagacttcattatagattctagggaacctgatgcaactactcgtgtatgtgaactactgaagtaccaaggagagcactgtctcctaaaggaaatgcagcagtggtccattcctccatttcctgtaagtggccatgacatcagaaaagtgggcatttcttcaggaaaagaaattggggctctattacaacagttgcgagaacagtggaaaaaaagtggttaccaaatggaaaaagatgaacttctgagttacataaagaagacctaaaactgatggctactaaaaagcagagcatttctgccagtcataacatctttgtactctatgagcaaatagtaattttggaccttgataaaacaattttgtagagtgtaatatttctaagaggaaatgtcacaggggctatgatgcaagaaagcctcagaaatgactgcatacaggaaataatctcatcatttccaaagatgtcttcatgtcccatcaatgacatgctaccagacatatcagattccacaggataatggcaccaagctacccaagtagatgtttctggtattctagactgccgttcatgcttgtttcctaaagtatacttaaaagtttcaaatacagtttcacttagaaactgcaaccctccaagtaatgttatgtttacttaggtattaatgttatgtttacttaggtatgtatcagaggcaataatttccaaagcagatcttagaatataaccaatttgttagataactaactttatctc

SEQ ID NO: 279863 - DNA, 2909 bp, Homo sapiens
cgactcagaattacagagctttccagagcttatataccttatgtgtagttggtgactgcctctccagatgctgaggtgcctgtatcattggcacaggccagtgctgaaccgtaggtggagtaggctgtgccttctgaagcagtatctattcacaatgaagttgcagtctcccgaattccagtcacttttcacagaaggactgaagagtctgacagataaggtcttgctctgtcacccaggctggagtgcagtggcacgatcatagctcaccgcagccttgaactcctgggctcaagccatcctcccacctcagcctcccaagtagctgggactacagaattatttgtcaaagagaatcacgaattaagaatagcaggaggagcagtgagggatttattaaatggagtaaagcctcaggatatagattttgccaccactgctacccctactcaaatgaaggagatgtttcagtcggctgggattcggatgataaacaacagaggagaaaagcacggaacaattactgccaggcttcatgaagaaaattttgagattactacactacggattgatgtcaccactgatggaagacatgctgaggtagaatttacaactgactggcagaaagatgcggaacgcagagatctcactataaattctatgtttttaggttttgatggcactttatttgactactttaatggttatgaagatttaaaaaataagaaagttagatttgttggacatgctaaacagagaatacaagaggattatcttagaattttaagatacttcaggttttatgggagaattgtagacaaacctggtgaccatgatcctgagactttggaagcaattgcagaaaatgcaaaaggcttggctggaatatcaggagaaaggatttgggtggaactgaaaaaaattcttgttggtaaccatgtaaatcatttgattcaccttatctatgatcttgatgtggctccttatataggtttacctgctaatgcaagtttagaagaatttgacaaagtcagtaaaaatgttgatggtttttcaccaaagccagtgactcttttggcctcattattcaaagtacaagatgatgtcacaaaattggatttgaggttgaagatcgcgaaagaggagaaaaaccttggcttatttatagttaaaaataggaaagatttaattaaagcaacagatagttcagacccattgaaaccctatcaagacttcattatagattctagggaacctgatgcaactactcgtgtatgtgaactactgaagtaccaaggagagcactgtctcctaaaggaaatgcagcagtggtccattcctccatttcctgtaagtggccatgacatcagaaaagtgggcatttcttcaggaaaagaaattggggctctattacaacagttgcgagaacagtggaaaaaaagtggttaccaaatggaaaaagatgaacttctgagttacataaagaagacctaaaactgatggctactaaaaagcagagcatttctggtaagactaaattttctcccctccctcttaatgaggttttagagactacaccagaataaaagacagtttaggggacctctgtagaacaacaagggtcttattttgtgaattatatatttcaagaactaaacagagatccacctttctggatctgatttatatcactgaaatgtacagttcttttggaatagtttcacctgagaaaacatagttggctattatctatcttaacctgttcaggcttttaaaaaaaactgtttttgcatagggtagtactaagatcttaaaaagtggtaactgtcttgaagaaaaaacgtttattgtttgtttgcaattgaaataacagggttaccttaacaatgactgtctatgatgtgtcagttcttatctgaattccaaaataaacctgtgcttaaaaaagaaataattgaccaagtaagtttgcataaaatgtgaatactaaatgtgtccccagttgctggcattcatatgtacaggatttgttctagcaagctatgcttcagtatgtggttgatatttttctgtcacaatgatttctttatgcatgcagagcctgggaaagtcatgggattaacttgagggtcactattgagcctattaattaattaattattgttttaataaaacaaacattggtattggaagataaatatgtttatgtggtatctgacaatgtgtattaggtgtcatatacaatggtaatatgcctgtctttaaagtgttattttattaattaaaaggatatggctattattatatattctctaaagatttattctctaaagatttgagtcctaaatgctttcatcaggtaaataaaatgtataatacaaactgtttatttcagctgctataatttcagctgctatactgacatttcataatttatttcctttctgtgtagccagtcataacatctttgtactctatgagcaaatagtaattttggaccttgataaaacaattttgtagagtgtaatatttctaagaggaaatgtcacaggggctatgatgcaagaaagcctcagaaatgactgcatacaggaaataatctcatcatttccaaagatgtcttcatgtcccatcaatgacatgctaccagacatatcagattccacaggataatggcaccaagctacccaagtagatgtttctggtattctagactgccgttcatgcttgtttcctaaagtatacttaaaagtttcaaatacagtttcacttagaaactgcaaccctccaagtaatgttatgtttacttaggtattaatgttatgtttacttaggtatgtatcagaggcaataatttccaaagcagatcttagaatataaccaatttgttagataactaactttatctc

SEQ ID NO: 279864 - DNA, 646 bp, Homo sapiens
agcccggagagtgcgcgtggcggcggtggcggctgcggcaacagcggggccgatgtgtagttggtgactgcctctccagatgctgaggtgcctgtatcattggcacaggccagtgctgaaccgtaggtggagtaggctgtgccttctgaagcagtatctattcacaatgaagttgcagtctcccgaattccagtcacttttcacagaaggactgaagagtctgacagaattatttgtcaaagagaatcacgaattaagaatagcaggaggagcagtgagggatttattaaatggagtaaagcctcaggatatagattttgccaccactgctacccctactcaaatgaaggagatgtttcagtcggctgggattcggatgataaacaacagaggagaaaagcacggaacaattactgccaggcttcatgaagaaaattttgagattactacactacggattgatgtcaccactgatggaagacatgctgaggtagaatttacaactgactggcagaaagatgcggaacgcagagatctcactataaattctatgtttttaggtaatatttgcagataaaaccatattgtgagtctatcagaatgccttcttttcaagtaaaacctacattctggaaatgttcttcaa

SEQ ID NO: 279865 - DNA, 829 bp, Homo sapiens
agcggacgggggcgcggctgcgtgagaggcgcgcggcggcgcagtgaacagtctccttccacaaaaccatggcgtcgctcaaatgtagcaccgtcgtctgcgtgatctgcttggagaagcccaaataccgctgtccagcctgccgcgtgccctaaacagtgcaaccctgaaactcgtcctgttgagaaaaaaataagatcagctcttcctaccaaaaccgtaaagcctgtggaaaacaaaggaggaagaagacagagtttctttgcagaatttaaagaatttagatggactctcgtcctgtcacccaggctggagtgcagcggcgcaatctcggctcactgcaacctctccctcccagattcaagcaattctcatgcctcagcctcccgagcagctgggactacaggcgcctgccactacgcccaaccaatttttgtatttttagtagagatggggtttcgccatgttggccaggctggtcttgaactcctgacctcaggtgatacacccgcctcgacttcccaaagtactgggattataggcgtgagccaccgctccaggccctaagctaaactttcatcacctcctgttcctgactcatctaaagccttggttctcacagtgtggttcatggagcatcagaatcagctgggagcttgctagaaacgcagcattgcattggaaatgggactagaagatttagagatgctgaaataattagaacgcagtttttaaaaagataaagggctctggaagattcccagttataacaaaataaataatccaaacctgcagctgatggggacatgcagccctctggtttacccag

SEQ ID NO: 279866 - DNA, 932 bp, Homo sapiens
cggacgcgtgggtcgacccacgcgtccgcgtcgctcaaatgtagcaccgtcgtctgcgtgatctgcttggagaagcccaaataccgctgtccagcctgccgcgtgccctactgctcggtagtctgcttccggaagcacaaagaacagtgcaaccctgaaactcgtcctgttgagaaaaaaataagatcagctcttcctaccaaaaccgtaaagcctgtggaaaacaaagatgatgatgactctatagctgattttctcaatagtgatgaggaagaagacagagtttctttgcagaatttaaagaatttaggggaatctgcaacattaagaagcttattgctcaatccacacctcaggcagttgatggtcaacctcgatcagggagaagacaaagcaaagctcatgagagcttacatgcaagagcctttgtttgtggagtttgcagactgctgtttaggaattgtggagccatcccagaatgaggagtcttaagatggattattgtgctgcttgctcaagcgtgtgcttgactcctggaacctgcctgctccctctcccagaccagctagtttggggctggggagctcaggcaaaagaggtttccaggatgcagattaggtcatgcaggcctttaccggcattgatgtggctcatgtttcaggcagacttggggtccttaaggtggcaagtcctttatggagagaaaacttgacattcagatgattgtttttaaatgttttacttttggtacagttgatagacatcataaacgatatcaagcttacacttcatatggagttaaacttggtcagtgttaataaaatcaaaacgtgattctactgtacattgcattattcataatttaattgtttgaaattacattaaataaatcaactaattaaaaaacaaaaaaggggggccggttaaatatc

SEQ ID NO: 279867 - DNA, 944 bp, Homo sapiens
agcggacgggggcgcggctgcgtgagaggcgcgcggcggcgcagtgaacagtctccttccacaaaaccatggcgtcgctcaaatgtagcaccgtcgtctgcgtgatctgcttggagaagcccaaataccgctgtccagcctgccgcgtgccctaaacagtgcaaccctgaaactcgtcctgttgagaaaaaaataagatcagctcttcctaccaaaaccgtaaagcctgtggaaaacaaagatgatgatgactctatagctgattttctcaatagtgatgaggaagaagacagagtttctttgcagaatttaaagaatttaggggaatctgcaacattaagaagcttattgctcaatccacacctcaggcagttgatggtcaacctcgatcagggagaagacaaagcaaagctcatgagagcttacatgcaagagcctttgtttgtggagtttgcagactgctgtttaggaattgtggagccatcccagaatgaggagtcttaagatggattattgtgctgcttgctcaagcgtgtgcttgactcctggaacctgcctgctccctctcccagaccagctagtttggggctggggagctcaggcaaaagaggtttccaggatgcagattaggtcatgcaggcctttaccggcattgatgtggctcatgtttcaggcagacttggggtccttaaggtggcaagtcctttatggagagaaaacttgacattcagatgattgtttttaaatgttttacttttggtacagttgatagacatcataaacgatatcaagcttacacttcatatggagttaaacttggtcagtgttaataaaatcaaaacgtgattctactgtacattgcattattcataatttaattgtttgaaattacattaaataaatcaactaattaaaaaacaaaaaaggggggccggttaaatatc

SEQ ID NO: 279868 - DNA, 922 bp, Homo sapiens
agcggacgggggcgcggctgcgtgagaggcgcgcggcggcgcagtgaacagtctccttccacaaaaccatggcgtcgctcaaatgtagcaccgtcgtctgcgtgatctgcttggagaagcccaaataccgctgtccagcctgccgcgtgccctactgctcggtagtctgcttccggaagcacaaagaacagtgcaaccctgaaactcgtcctgttgagaaaaaaataagatcagctcttcctaccaaaaccgtaaagcctgtggaaaacaaagatgatgatgactctatagctgattttctcaatagtgatgaggaagaagacagagtttctttgcagaatttaaagaatttaggggaatctgcaacattaagaagcttattgctcaatccacacctcaggcagttgatggtcaacctcgatcagggagaagacaaagcaaagctcatgagagcttacatgcaagagcctttgtttgtggagtttgcagactgctgtttaggaattgtggagccatcccagaatgaggagtcttaagatggattattgtgctgcttgctcaagcgtgtgcttgactcctggaacctgcctgctccctctcccagaccagctagtttggggctggggagctcaggcgtggctcatgtttcaggcagacttggggtccttaaggtggcaagtcctttatggagagaaaacttgacattcagatgattgtttttaaatgttttacttttggtacagttgatagacatcataaacgatatcaagcttacacttcatatggagttaaacttggtcagtgttaataaaatcaaaacgtgattctactgtacattgcattattcataatttaattgtttgaaattacattaaataaatcaactaattaaaaaacaaaaaaggggggccggttaaatatc

SEQ ID NO: 279869 - DNA, 870 bp, Homo sapiens
agcggacgggggcgcggctgcgtgagaggcgcgcggcggcgcagtgaacagtctccttccacaaaaccatggcgtcgctcaaatgtagcaccgtcgtctgcgtgatctgcttggagaagcccaaataccgctgtccagcctgccgcgtgccctaaacagtgcaaccctgaaactcgtcctgttgagaaaaaaataagatcagctcttcctaccaaaaccgtaaagcctgtggaaaacaaagatgatgatgactctatagctgattttctcaatagtgatgaggaagaagacagagtttctttgcagaatttaaagaatttaggggaatctgcaacattaagaagcttattgctcaatccacacctcaggcagttgatggtcaacctcgatcagggagaagacaaagcaaagctcatgagagcttacatgcaagagcctttgtttgtggagtttgcagactgctgtttaggaattgtggagccatcccagaatgaggagtcttaagatggattattgtgctgcttgctcaagcgtgtgcttgactcctggaacctgcctgctccctctcccagaccagctagtttggggctggggagctcaggcaaaagaggtttccaggatgcagattaggtcatgcaggcctttaccggcattgatgtggctcatgtttcaggcagacttggggtccttaaggtggcaagtcctttatggagagaaaacttgacattcagatgattgtttttaaatgttttacttttggtacagttgatagacatcataaacgatatcaagcttacacttcatatggagttaaacttggtcagtgttaataaaatcaaaaaaaaaaaaagggggggcgccaaaatatcc

SEQ ID NO: 279870 - DNA, 938 bp, Homo sapiens
agcggacgggggcgcggctgcgtgagaggcgcgcggcggcgcagtgaacagtctccttccacaaaaccatggcgtcgctcaaatgtagcaccgtcgtctgcgtgatctgcttggagaagcccaaataccgctgtccagcctgccgcgtgccctactgctcggtagtctgcttccggaagcacaaagaacagtgcaaccctgaaactcgtcctgttgagaaaaaaataagatcagctcttcctaccaaaaccgtaaagcctgtggaaaacaaaggaggaagaagacagagtttctttgcagaatttaaagaatttaggggaatctgcaacattaagaagcttattgctcaatccacacctcaggcagttgatggtcaacctcgatcagggagaagacaaagcaaagctcatgagagcttacatgcaagagcctttgtttgtggagtttgcagactgctgtttaggaattgtggagccatcccagaatgaggagtcttaagatggattattgtgctgcttgctcaagcgtgtgcttgactcctggaacctgcctgctccctctcccagaccagctagtttggggctggggagctcaggcaaaagaggtttccaggatgcagattaggtcatgcaggcctttaccggcattgatgtggctcatgtttcaggcagacttggggtccttaaggtggcaagtcctttatggagagaaaacttgacattcagatgattgtttttaaatgttttacttttggtacagttgatagacatcataaacgatatcaagcttacacttcatatggagttaaacttggtcagtgttaataaaatcaaaacgtgattctactgtacattgcattattcataatttaattgtttgaaattacattaaataaatcaactaattaaaaaacaaaaaaggggggccggttaaatatc

SEQ ID NO: 279871 - DNA, 862 bp, Homo sapiens
cggacgcgtgggtcgacccacgcgtccgcgtcgctcaaatgtagcaccgtcgtctgcgtgatctgcttggagaagcccaaataccgctgtccagcctgccgcgtgccctaaacagtgcaaccctgaaactcgtcctgttgagaaaaaaataagatcagctcttcctaccaaaaccgtaaagcctgtggaaaacaaaggaggaagaagacagagtttctttgcagaatttaaagaatttaggggaatctgcaacattaagaagcttattgctcaatccacacctcaggcagttgatggtcaacctcgatcagggagaagacaaagcaaagctcatgagagcttacatgcaagagcctttgtttgtggagtttgcagactgctgtttaggaattgtggagccatcccagaatgaggagtcttaagatggattattgtgctgcttgctcaagcgtgtgcttgactcctggaacctgcctgctccctctcccagaccagctagtttggggctggggagctcaggcaaaagaggtttccaggatgcagattaggtcatgcaggcctttaccggcattgatgtggctcatgtttcaggcagacttggggtccttaaggtggcaagtcctttatggagagaaaacttgacattcagatgattgtttttaaatgttttacttttggtacagttgatagacatcataaacgatatcaagcttacacttcatatggagttaaacttggtcagtgttaataaaatcaaaacgtgattctactgtacattgcattattcataatttaattgtttgaaattacattaaataaatcaactaattaaaaaacaaaaaaggggggccggttaaatatc

SEQ ID NO: 279872 - DNA, 988 bp, Homo sapiens
tgcagccttgacacactgggcttaagggatcctcctgcctcagcctcccaagtagctgagaccacatgtgtgtaccaccatgcctggatgattttttttattttctgtagagacatagtcttgctaggttgcccaggctggtctcaaactcctgggctcaagtgatcctcccaccttggcctccgaatgttaggattacaggcgtgagccagcacagctggccttctgttgactctaacagtgcaaccctgaaactcgtcctgttgagaaaaaaataagatcagctcttcctaccaaaaccgtaaagcctgtggaaaacaaaggaggaagaagacagagtttctttgcagaatttaaagaatttaggggaatctgcaacattaagaagcttattgctcaatccacacctcaggcagttgatggtcaacctcgatcagggagaagacaaagcaaagctcatgagagcttacatgcaagagcctttgtttgtggagtttgcagactgctgtttaggaattgtggagccatcccagaatgaggagtcttaagatggattattgtgctgcttgctcaagcgtgtgcttgactcctggaacctgcctgctccctctcccagaccagctagtttggggctggggagctcaggcaaaagaggtttccaggatgcagattaggtcatgcaggcctttaccggcattgatgtggctcatgtttcaggcagacttggggtccttaaggtggcaagtcctttatggagagaaaacttgacattcagatgattgtttttaaatgttttacttttggtacagttgatagacatcataaacgatatcaagcttacacttcatatggagttaaacttggtcagtgttaataaaatcaaaacgtgattctactgtacattgcattattcataatttaattgtttgaaattacattaaataaatcaactaattaaaaaacaaaaaaggggggccggttaaatatc

SEQ ID NO: 279873 - DNA, 899 bp, Homo sapiens
agcggacgggggcgcggctgcgtgagaggcgcgcggcggcgcagtgaacagtctccttccacaaaaccatggcgtcgctcaaatgtagcaccgtcgtctgcgtgatctgcttggagaagcccaaataccgctgtccagcctgccgcgtgccctactgctcggtagtctgcttccggaagcacaaagaacagtgcaaccctgaaactcgtcctgttgagaaaaaaataagatcagctcttcctaccaaaaccgtaaagcctgtggaaaacaaagatgatgatgactctatagctgattttctcaatagtgatgaggaagaagacagagtttctttgcagaatttaaagaatttagatggactctcgtcctgtcacccaggctggagtgcagcggcgcaatctcggctcactgcaacctctccctcccagattcaagcaattctcatgcctcagcctcccgagcagctgggactacaggcgcctgccactacgcccaaccaatttttgtatttttagtagagatggggtttcgccatgttggccaggctggtcttgaactcctgacctcaggtgatacacccgcctcgacttcccaaagtactgggattataggcgtgagccaccgctccaggccctaagctaaactttcatcacctcctgttcctgactcatctaaagccttggttctcacagtgtggttcatggagcatcagaatcagctgggagcttgctagaaacgcagcattgcattggaaatgggactagaagatttagagatgctgaaataattagaacgcagtttttaaaaagataaagggctctggaagattcccagttataacaaaataaataatccaaacctgcagctgatggggacatgcagccctctggtttacccag

SEQ ID NO: 279874 - DNA, 976 bp, Homo sapiens
agcggacgggggcgcggctgcgtgagaggcgcgcggcggcgcagtgaacagtctccttccacaaaaccatggcgtcgctcaaatgtagcaccgtcgtctgcgtgatctgcttggagaagcccaaataccgctgtccagcctgccgcgtgccctactgctcggtagtctgcttccggaagcacaaagaacagtgcaaccctgaaactcgtcctgttgagaaaaaaataagatcagctcttcctaccaaaaccgtaaagcctgtggaaaacaaagatgatgatgactctatagctgattttctcaatagtgatgaggaagaagacagagtttctttgcagaatttaaagaatttaggggaatctgcaacattaagaagcttattgctcaatccacacctcaggcagttgatggtcaacctcgatcagggagaagacaaagcaaagctcatgagagcttacatgcaagagcctttgtttgtggagtttgcagactgctgtttaggaattgtggagccatcccagaatgaggagtcttaagatggattattgtgctgcttgctcaagcgtgtgcttgactcctggaacctgcctgctccctctcccagaccagctagtttggggctggggagctcaggcaaaagaggtttccaggatgcagattaggtcatgcaggcctttaccggcattgatgtggctcatgtttcaggcagacttggggtccttaaggtggcaagtcctttatggagagaaaacttgacattcagatgattgtttttaaatgttttacttttggtacagttgatagacatcataaacgatatcaagcttacacttcatatggagttaaacttggtcagtgttaataaaatcaaaacgtgattctactgtacattgcattattcataatttaattgtttgaaattacattaaataaatcaactaattaaaaaacaaaaaaggggggccggttaaatatc

SEQ ID NO: 279875 - DNA, 764 bp, Homo sapiens
cggacgcgtgggtcgacccacgcgtccgcgtcgctcaaatgtagcaccgtcgtctgcgtgatctgcttggagaagcccaaataccgctgtccagcctgccgcgtgccctactgctcggtagtctgcttccggaagcacaaaggggaatctgcaacattaagaagcttattgctcaatccacacctcaggcagttgatggtcaacctcgatcagggagaagacaaagcaaagctcatgagagcttacatgcaagagcctttgtttgtggagtttgcagactgctgtttaggaattgtggagccatcccagaatgaggagtcttaagatggattattgtgctgcttgctcaagcgtgtgcttgactcctggaacctgcctgctccctctcccagaccagctagtttggggctggggagctcaggcaaaagaggtttccaggatgcagattaggtcatgcaggcctttaccggcattgatgtggctcatgtttcaggcagacttggggtccttaaggtggcaagtcctttatggagagaaaacttgacattcagatgattgtttttaaatgttttacttttggtacagttgatagacatcataaacgatatcaagcttacacttcatatggagttaaacttggtcagtgttaataaaatcaaaacgtgattctactgtacattgcattattcataatttaattgtttgaaattacattaaataaatcaactaattaaaaaacaaaaaaggggggccggttaaatatc

SEQ ID NO: 279876 - DNA, 2932 bp, Homo sapiens
gtatctgactcaggacctgatttaaggtttggggttttttggccctttgtttcttcctcttgttttttgacctttagttactccacacctcattagttccttgacctgcaggtggactgagaagagagccatgcaggtagcaggcaagagtgtggttatcgttggaccaggattcaggatctgactgagtagctgactcttaatccagtttgtgttgatcaccaggaggatctggacctcagtattaccacatctagagctataatcacatccctgttaagccttcctgagatcacaccaaatgtccttgatgggaattgtaaacaacccttacttctggtttctaatgatattccaggaaaggagcctaactagagtcagtgatatgccaactccacctttgccttccaccatgtttggaagctccctgaggcctcaccaggagcagatgctcgtcccatgcttcctataagcctgcagaactgtgagccataataaactgtgaattataaattgcctttatagcaatgcaaatggaccagtacagatgggatgctgggaagacagttgtttccaccttcagtaaagtccgtggaacacagttgtgactatattctaggccagccaagatgcttgtactcagaaaggagtggtctcaggaccataagaaagtgaaaaaataaaaataagaaaataaagaagggattgtcaatgaatcagaattcatcaaggtcaaagtcttaggaaattccttcatgaggaagtctaggggggctatggaaatgaaatttttaaacaaataggtatgtggtgctggcaggaataaattatggacttatgaatataacataagattctttattacctggtctcacccgtctttccacctctgccccccttcttgcccgactctgtgtatcacccataataaactacttacagcttcctagtgttaaatttaccctaaagctgcctccttcaatattttaagtttaacctaaaggttcttcatacatagtgaactataacccaatgattaaacagattgtaacctactcttgtaccagtcaccaagtttcagccaatcagaggtggccaactgttcaaaccatgctcaaataagggaaatgtcatggtgtaactaatccagctgtttctataccttacttctgttttcttaggtcactttccttttttgtccataaattctctccaaccactcagcagcactggagtcactccaaagctatcctggttcaggggtctgtctgattcacaagtcattctttgttcaattgagctctgctaaatttaatttgtctgaagtttttcttttaacagatggtgtcagaaatggaccccaaagtagagctcccagtgatcccccaggagcactgagtgaccacaaggggtacctgctgggcccgtcctctcgcagtgtccactgctctcttacagcaactggagattgtggctgcattctctctcagattctgaagctccatacattgccgttttcagctgttcaagcttgcttgagcaaatttttgatcttagctgagtttggaagtcgatagacattggactgggtccaggatttgattggatctgataattaactggcttggatccagttagatgcctcgggtatctgactgggtcagatagaaaccgccagtaaatattttaataacaatactgcaggggtatgaactctggctttaagaaactcacaaggaattttatgttctataccctttgtttctttttcttgtgtgcttcggtcaggaaaaatcattagtcaagttaatcaaggggatctgagagccaaatacaagattcaacgtaaaaatggaatccttgggctaggcgtggtggctcaggcctgtaatcccaggactttgggaggctgaggcaggcggatcacctgaccttaggagttcgagaccagtctggccaacatggtgaaaccccgtctccactaaaaatacaaaaattagccaggcgtggtggtgggcacctgtaatcccagctactttggaggctgaggcaggataatcacttgaacccaggaggcagaggttgcagtgatctgagattgcaccactgcactccagcctgggcaaaagagcgagactccatctcataaataaatacataaataaataaagaaatccttaatttctgcggaactgagtgctctaccttctggctacacctacgtatacctgtatgaggtataggccctggaagcagcaaacacttacagaaatggtgaaatcttactaaaggtaatctaaagttatggtggaacatcccaaatgaacaacactgcactttaggaagtacatataaaaatgaagtctcccaatttagtattattcagggatggctgttgaagttcagaagcttctaaaaagattccaataattttacagattcttttaaaagattctttgtaaaaggcaaataaaaagcttaagtgactaatcagaaaaattaggtcttctaaccttttgtcattgttactgtcttgccctgaaagggaaaaggaaagctggataaagtatttatagaagatagaggacctgtggtggctcatgcctgtaatccaaggtggaaggattgcttgaggccagaagttcaagaccagtccaagcaacatagcaaggccccatctctacaaaaaatgaaaataaaattagccgagcgtgatggctcatgcctgtagttctagcttctagagaggctgaggcaggaggattgcttgagtccaggagttcaagattacagtgagctatggtcacaccactgcactccagcctgggtgatggagtgagactgtctcaataaaaagacaaaaaggtaagcccttaggtaaagtaagcttgcttctttgttagagctatccatgctgagtccaggcaaagaa

SEQ ID NO: 279877 - DNA, 2933 bp, Homo sapiens
gcggccgcccagcgcccgtccccgcgccgcactccccggcactccccggcgctccccgcgccgcgcgccccgcaccggctggaggccccggccccccggcgttccctctccgcgcacctcccggcccgcgctagcaggtagcaggcaagagtgtggttatcgttggaccaggattcaggatctgactgagtagctgactcttaatccagtttgtgttgatcaccaggaggatctggacctcagtattaccacatctagagctataatcacatccctgttaagccttcctgagatcacaccaaatgtccttgatgggaattgtaaacaacccttacttctggtttctaatgatattccaggaaaggagcctaactagagtcagtgatatgccaactccacctttgccttccaccatgtttggaagctccctgaggcctcaccaggagcagatgctcgtcccatgcttcctataagcctgcagaactgtgagccataataaactgtgaattataaattgcctttatagcaatgcaaatggaccagtacagatgggatgctgggaagacagttgtttccaccttcagtaaagtccgtggaacacagttgtgactatattctaggccagccaagatgcttgtactcagaaaggagtggtctcaggaccataagaaagtgaaaaaataaaaataagaaaataaagaagggattgtcaatgaatcagaattcatcaaggtcaaagtcttaggaaattccttcatgaggaagtctaggggggctatggaaatgaaatttttaaacaaataggtatgtggtgctggcaggaataaattatggacttatgaatataacataagattctttattacctggtctcacccgtctttccacctctgccccccttcttgcccgactctgtgtatcacccataataaactacttacagcttcctagtgttaaatttaccctaaagctgcctccttcaatattttaagtttaacctaaaggttcttcatacatagtgaactataacccaatgattaaacagattgtaacctactcttgtaccagtcaccaagtttcagccaatcagaggtggccaactgttcaaaccatgctcaaataagggaaatgtcatggtgtaactaatccagctgtttctataccttacttctgttttcttaggtcactttccttttttgtccataaattctctccaaccactcagcagcactggagtcactccaaagctatcctggttcaggggtctgtctgattcacaagtcattctttgttcaattgagctctgctaaatttaatttgtctgaagtttttcttttaacagatggtgtcagaaatggaccccaaagtagagctcccagtgatcccccaggagcactgagtgaccacaaggggtacctgctgggcccgtcctctcgcagtgtccactgctctcttacagcaactggagattgtggctgcattctctctcagattctgaagctccatacattgccgttttcagctgttcaagcttgcttgagcaaatttttgatcttagctgagtttggaagtcgatagacattggactgggtccaggatttgattggatctgataattaactggcttggatccagttagatgcctcgggtatctgactgggtcagatagaaaccgccagtaaatattttaataacaatactgcaggggtatgaactctggctttaagaaactcacaaggaattttatgttctataccctttgtttctttttcttgtgtgcttcggtcaggaaaaatcattagtcaagttaatcaaggggatctgagagccaaatacaagattcaacgtaaaaatggaatccttgggctaggcgtggtggctcaggcctgtaatcccaggactttgggaggctgaggcaggcggatcacctgaccttaggagttcgagaccagtctggccaacatggtgaaaccccgtctccactaaaaatacaaaaattagccaggcgtggtggtgggcacctgtaatcccagctactttggaggctgaggcaggataatcacttgaacccaggaggcagaggttgcagtgatctgagattgcaccactgcactccagcctgggcaaaagagcgagactccatctcataaataaatacataaataaataaagaaatccttaatttctgcggaactgagtgctctaccttctggctacacctacgtatacctgtatgaggtataggccctggaagcagcaaacacttacagaaatggtgaaatcttactaaaggtaatctaaagttatggtggaacatcccaaatgaacaacactgcactttaggaagtacatataaaaatgaagtctcccaatttagtattattcagggatggctgttgaagttcagaagcttctaaaaagattccaataattttacagattcttttaaaagattctttgtaaaaggcaaataaaaagcttaagtgactaatcagaaaaattaggtcttctaaccttttgtcattgttactgtcttgccctgaaagggaaaaggaaagctggataaagtatttatagaagatagaggacctgtggtggctcatgcctgtaatccaaggtggaaggattgcttgaggccagaagttcaagaccagtccaagcaacatagcaaggccccatctctacaaaaaatgaaaataaaattagccgagcgtgatggctcatgcctgtagttctagcttctagagaggctgaggcaggaggattgcttgagtccaggagttcaagattacagtgagctatggtcacaccactgcactccagcctgggtgatggagtgagactgtctcaataaaaagacaaaaaggtaagcccttaggtaaagtaagcttgcttctttgttagagctatccatgctgagtccaggcaaagaa

SEQ ID NO: 279878 - DNA, 3502 bp, Homo sapiens
cgcgggggcgcccccctcggccgggcgctcgggtttcagccgccgctcctccgcgccccgcccgcgcctggcccgctcgccggcgccgggagagacctcgtaacggaactgggacgccagcgctgcattgtgggagcttttaaagcggcggggagctcggcgcgaccctcgggcccaccgggccacgctcgcccggcccgcgacgcccccccgctgtcgcctggcccgcgacgcaccgaggcctgaggacccgaaagccgggcgcggggagatgaccggtggctcgtgacggtcccacgggcaaaatcttccatcgcccggggctgagacttgtcaaactgccctctacggtcacccggaaagtaggaggctttttctgcagaggggaaaaaaatcaaaaagagccgttccatcccccctccaaggactgggtttgaattgcttttcatctgcagtggctgtgattcagcgtccctcttagcagcaggcaatgacagaggcaggagaggggaaaaaaaaaaagaaagaaagaaaaaacacagcaaatgaatcaaacggacgtgagtaacaaaagtttagaaagagctgggctcgtattcagaaaaaacgcctcatccccccgccccgctgcactcccaacccctttaaaaatagcagataatcaagaaaggaaacgggtgctttcatatggaaatacagatgtcaggtagcaggcaagagtgtggttatcgttggaccaggattcaggatctgactgagtagctgactcttaatccagtttgtgttgatcaccaggaggatctggacctcagtattaccacatctagagctataatcacatccctgttaagccttcctgagatcacaccaaatgtccttgatgggaattgtaaacaacccttacttctggtttctaatgatattccaggaaaggagcctaactagagtcagtgatatgccaactccacctttgccttccaccatgtttggaagctccctgaggcctcaccaggagcagatgctcgtcccatgcttcctataagcctgcagaactgtgagccataataaactgtgaattataaattgcctttatagcaatgcaaatggaccagtacagatgggatgctgggaagacagttgtttccaccttcagtaaagtccgtggaacacagttgtgactatattctaggccagccaagatgcttgtactcagaaaggagtggtctcaggaccataagaaagtgaaaaaataaaaataagaaaataaagaagggattgtcaatgaatcagaattcatcaaggtcaaagtcttaggaaattccttcatgaggaagtctaggggggctatggaaatgaaatttttaaacaaataggtatgtggtgctggcaggaataaattatggacttatgaatataacataagattctttattacctggtctcacccgtctttccacctctgccccccttcttgcccgactctgtgtatcacccataataaactacttacagcttcctagtgttaaatttaccctaaagctgcctccttcaatattttaagtttaacctaaaggttcttcatacatagtgaactataacccaatgattaaacagattgtaacctactcttgtaccagtcaccaagtttcagccaatcagaggtggccaactgttcaaaccatgctcaaataagggaaatgtcatggtgtaactaatccagctgtttctataccttacttctgttttcttaggtcactttccttttttgtccataaattctctccaaccactcagcagcactggagtcactccaaagctatcctggttcaggggtctgtctgattcacaagtcattctttgttcaattgagctctgctaaatttaatttgtctgaagtttttcttttaacagatggtgtcagaaatggaccccaaagtagagctcccagtgatcccccaggagcactgagtgaccacaaggggtacctgctgggcccgtcctctcgcagtgtccactgctctcttacagcaactggagattgtggctgcattctctctcagattctgaagctccatacattgccgttttcagctgttcaagcttgcttgagcaaatttttgatcttagctgagtttggaagtcgatagacattggactgggtccaggatttgattggatctgataattaactggcttggatccagttagatgcctcgggtatctgactgggtcagatagaaaccgccagtaaatattttaataacaatactgcaggggtatgaactctggctttaagaaactcacaaggaattttatgttctataccctttgtttctttttcttgtgtgcttcggtcaggaaaaatcattagtcaagttaatcaaggggatctgagagccaaatacaagattcaacgtaaaaatggaatccttgggctaggcgtggtggctcaggcctgtaatcccaggactttgggaggctgaggcaggcggatcacctgaccttaggagttcgagaccagtctggccaacatggtgaaaccccgtctccactaaaaatacaaaaattagccaggcgtggtggtgggcacctgtaatcccagctactttggaggctgaggcaggataatcacttgaacccaggaggcagaggttgcagtgatctgagattgcaccactgcactccagcctgggcaaaagagcgagactccatctcataaataaatacataaataaataaagaaatccttaatttctgcggaactgagtgctctaccttctggctacacctacgtatacctgtatgaggtataggccctggaagcagcaaacacttacagaaatggtgaaatcttactaaaggtaatctaaagttatggtggaacatcccaaatgaacaacactgcactttaggaagtacatataaaaatgaagtctcccaatttagtattattcagggatggctgttgaagttcagaagcttctaaaaagattccaataattttacagattcttttaaaagattctttgtaaaaggcaaataaaaagcttaagtgactaatcagaaaaattaggtcttctaaccttttgtcattgttactgtcttgccctgaaagggaaaaggaaagctggataaagtatttatagaagatagaggacctgtggtggctcatgcctgtaatccaaggtggaaggattgcttgaggccagaagttcaagaccagtccaagcaacatagcaaggccccatctctacaaaaaatgaaaataaaattagccgagcgtgatggctcatgcctgtagttctagcttctagagaggctgaggcaggaggattgcttgagtccaggagttcaagattacagtgagctatggtcacaccactgcactccagcctgggtgatggagtgagactgtctcaataaaaagacaaaaaggtaagcccttaggtaaagtaagcttgcttctttgttagagctatccatgctgagtccaggcaaagaa

SEQ ID NO: 279879 - DNA, 1279 bp, Homo sapiens
cgcgggggcgcccccctcggccgggcgctcgggtttcagccgccgctcctccgcgccccgcccgcgcctggcccgctcgccggcgccgggagagacctcgtaacggaactgggacgccagcgctgcattgtgggagcttttaaagcggcggggagctcggcgcgaccctcgggcccaccgggccacgctcgcccggcccgcgacgcccccccgctgtcgcctggcccgcgacgcaccgaggcctgaggacccgaaagccgggcgcggggagatgaccggtggctcgtgacggtcccacgggcaaaatcttccatcgcccggggctgagacttgtcaaactgccctctacggtcacccggaaagtaggaggctttttctgcagaggggaaaaaaatcaaaaagagccgttccatcccccctccaaggactgggtttgaattgcttttcatctgcagtggctgtgattcagcgtccctcttagcagcaggcaatgacagaggcaggagaggggaaaaaaaaaaagaaagaaagaaaaaacacagcaaatgaatcaaacggacgtgagtaacaaaagtttagaaagagctgggctcgtattcagaaaaaacgcctcatccccccgccccgctgcactcccaacccctttaaaaatagcagataatcaagaaaggaaacgggtgctttcatatggaaatacagatgtcaggtagcaggcaagagtgtggttatcgttggaccaggattcaggatctgactgagtagctgactcttaatccagtttgtgttgatcaccaggaggatctggacctcagtattaccacatctagagctataatcacatccctgttaagccttcctgagatcacaccaaatgtccttgatgggaattgtaaacaacccttacttctggtttctaatgatattccaggaaaggagcctaactagagtcagtgatatgccaactccacctttgccttccaccatgtttggaagctccctgaggcctcaccaggagcagatgctcgtcccatgcttcctataagcctgcagaactggaaaagaaagctggataaagtatttatagaagatgagccaccacagctggccgtaaatattttttgaatttgaatctgttttggaagccaaatatgttttggaagccaaacaattaagagaagtaaaattttaaccctagtaggtttcgcagattcatccccagatatgtttttgtttggcttgtgttattaacaaataaatgagtgtctttcaaatggaaaaa

SEQ ID NO: 279880 - DNA, 3381 bp, Homo sapiens
cgcgggggcgcccccctcggccgggcgctcgggtttcagccgccgctcctccgcgccccgcccgcgcctggcccgctcgccggcgccgggagagacctcgtaacggaactgggacgccagcgctgcattgtgggagcttttaaagcggcggggagctcggcgcgaccctcgggcccaccgggccacgctcgcccggcccgcgacgcccccccgctgtcgcctggcccgcgacgcaccgaggcctgaggacccgaaagccgggcgcggggagatgaccggtggctcgtgacggtcccacgggcaaaatcttccatcgcccggggctgagacttgtcaaactgccctctacggtcacccggaaagtaggaggctttttctgcagaggggaaaaaaatcaaaaagagccgttccatcccccctccaaggactgggtttgaattgcttttcatctgcagtggctgtgattcagcgtccctcttagcagcaggcaatgacagaggcaggagaggggaaaaaaaaaaagaaagaaagaaaaaacacagcaaatgaatcaaacggacgtgagtaacaaaagtttagaaagagctgggctcgtattcagaaaaaacgcctcatccccccgccccgctgcactcccaacccctttaaaaatagcagataatcaagaaaggaaacgggtgctttcatatggaaatacagatgtcaggtagcaggcaagagtgtggttatcgttggaccaggattcaggatctgactgagtagctgactcttaatccagtttgtgttgatcaccaggaggatctggacctcagtattaccacatctagaggtgatatgccaactccacctttgccttccaccatgtttggaagctccctgaggcctcaccaggagcagatgctcgtcccatgcttcctataagcctgcagaactgtgagccataataaactgtgaattataaattgcctttatagcaatgcaaatggaccagtacagatgggatgctgggaagacagttgtttccaccttcagtaaagtccgtggaacacagttgtgactatattctaggccagccaagatgcttgtactcagaaaggagtggtctcaggaccataagaaagtgaaaaaataaaaataagaaaataaagaagggattgtcaatgaatcagaattcatcaaggtcaaagtcttaggaaattccttcatgaggaagtctaggggggctatggaaatgaaatttttaaacaaataggtatgtggtgctggcaggaataaattatggacttatgaatataacataagattctttattacctggtctcacccgtctttccacctctgccccccttcttgcccgactctgtgtatcacccataataaactacttacagcttcctagtgttaaatttaccctaaagctgcctccttcaatattttaagtttaacctaaaggttcttcatacatagtgaactataacccaatgattaaacagattgtaacctactcttgtaccagtcaccaagtttcagccaatcagaggtggccaactgttcaaaccatgctcaaataagggaaatgtcatggtgtaactaatccagctgtttctataccttacttctgttttcttaggtcactttccttttttgtccataaattctctccaaccactcagcagcactggagtcactccaaagctatcctggttcaggggtctgtctgattcacaagtcattctttgttcaattgagctctgctaaatttaatttgtctgaagtttttcttttaacagatggtgtcagaaatggaccccaaagtagagctcccagtgatcccccaggagcactgagtgaccacaaggggtacctgctgggcccgtcctctcgcagtgtccactgctctcttacagcaactggagattgtggctgcattctctctcagattctgaagctccatacattgccgttttcagctgttcaagcttgcttgagcaaatttttgatcttagctgagtttggaagtcgatagacattggactgggtccaggatttgattggatctgataattaactggcttggatccagttagatgcctcgggtatctgactgggtcagatagaaaccgccagtaaatattttaataacaatactgcaggggtatgaactctggctttaagaaactcacaaggaattttatgttctataccctttgtttctttttcttgtgtgcttcggtcaggaaaaatcattagtcaagttaatcaaggggatctgagagccaaatacaagattcaacgtaaaaatggaatccttgggctaggcgtggtggctcaggcctgtaatcccaggactttgggaggctgaggcaggcggatcacctgaccttaggagttcgagaccagtctggccaacatggtgaaaccccgtctccactaaaaatacaaaaattagccaggcgtggtggtgggcacctgtaatcccagctactttggaggctgaggcaggataatcacttgaacccaggaggcagaggttgcagtgatctgagattgcaccactgcactccagcctgggcaaaagagcgagactccatctcataaataaatacataaataaataaagaaatccttaatttctgcggaactgagtgctctaccttctggctacacctacgtatacctgtatgaggtataggccctggaagcagcaaacacttacagaaatggtgaaatcttactaaaggtaatctaaagttatggtggaacatcccaaatgaacaacactgcactttaggaagtacatataaaaatgaagtctcccaatttagtattattcagggatggctgttgaagttcagaagcttctaaaaagattccaataattttacagattcttttaaaagattctttgtaaaaggcaaataaaaagcttaagtgactaatcagaaaaattaggtcttctaaccttttgtcattgttactgtcttgccctgaaagggaaaaggaaagctggataaagtatttatagaagatagaggacctgtggtggctcatgcctgtaatccaaggtggaaggattgcttgaggccagaagttcaagaccagtccaagcaacatagcaaggccccatctctacaaaaaatgaaaataaaattagccgagcgtgatggctcatgcctgtagttctagcttctagagaggctgaggcaggaggattgcttgagtccaggagttcaagattacagtgagctatggtcacaccactgcactccagcctgggtgatggagtgagactgtctcaataaaaagacaaaaaggtaagcccttaggtaaagtaagcttgcttctttgttagagctatccatgctgagtccaggcaaagaa

SEQ ID NO: 279881 - DNA, 2896 bp, Homo sapiens
gattcccgatggagctggccccttcgtggcgaccacaagtcctatcacgccacaagaatctcggcttgttcacctacaaatgaaggccgacgatacttgcagaccgagtctgacatctatgggaccccactcctaccctgcgcctcaggggccgggacaaccgtgacccgtaccgactcctcgcgcctccgggatcaacctcagacccctgtgggctcccggggaagacgcatgcgcactgctccctcctcgtctccttcccttcgttaattagtccatcgcatttcaagtgctggatcctttttgtcccctactgcgtgcggtggcagcttccttgcggaagtggtgaccgtgagagaagaagatggcggcccctgtagtggcgccgcctggtgtggtggttagtcgggctaacaagcgcagcggcgcggggccgggaggcagcggtggcgggggagccagaggggcggaggaggaaccgccgccgcccctacaagcagttctggtggccgatagcttcgatcgccgcttcttccccatctccaaggaccagcctcgggtcctcttgcccctggccaatgtggcattaattgactacactctggaattcctgactgccacaggtgtacaggaaacatttgtcttttgttgctggaaagctgctcaaatcaaagaacatttactgaagtcaaagtggtgccgccctacatctctcaatgtggttcgaataattacatcagagctctatcgatcactgggagatgtcctccgtgatgttgatgccaaggctttggtgcgctctgactttcttctggtgtatggggatgtcatctcaaacatcaatatcaccagagcccttgaggaacacaggttgagacggaagctagaaaaaaatgtttctgtgatgacgatgatcttcaaggagtcatcccccagccacccaactcgttgccacgaagacaatgtggtagtggctgtggatagtaccacaaacagggttctccattttcagaagacccagggtctccggcgttttgcatttcctctgagcctgtttcagggcagtagtgatggagtggaggttcgatatgatttactggattgtcatatcagcatctgttctcctcaggtggcacaactctttacagacaactttgactaccaaactcgagatgactttgtgcgaggtctcttagtgaatgaggagatcctagggaaccagatccacatgcacgtaacagctaaggaatatggtgcccgtgtctccaacctacacatgtactcagctgtctgtgctgacgtcatccgccgatgggtctaccctctcaccccagaggcgaacttcactgacagcaccacccagagctgcactcattcccggcacaacatctaccgagggcctgaggtcagcctgggccatggcagcatcctagaggaaaatgtgctcctgggctctggcactgtcattggcagcaattgctttatcaccaacagtgtcattggccccggctgccacattggtgataacgtggtgctggaccagacctacctgtggcagggtgttcgagtggcggctggagcacagatccatcagtctctgctttgtgacaatgctgaggtcaaggaacgagtgacactgaaaccacgctctgtcctcacttcccaggtggtcgtgggcccaaatatcacgctgcctgagggctcggtgatctctttgcaccctccagatgcagaggaagatgaagatgatggcgagttcagtgatgattctggggctgaccaagaaaaggacaaagtgaagatgaaaggttacaatccagcagaagtaggagctgctggcaagggctacctctggaaagctgcaggcatgaacatggaggaagaggaggaactgcagcagaatctgtggggactcaagatcaacatggaagaagagagtgaaagtgaaagtgagcaaagtatggattctgaggagccggacagccggggaggctcccctcagatggatgacatcaaagtgttccagaatgaagttttaggaacactacagcggggcaaagaggagaacatttcttgtgacaatctcgtcctggaaatcaactctctcaagtatgcctataacataagtctaaaggaggtgatgcaggtactgagccacgtggtcctggagttccccctgcaacagatggattccccgcttgactcaagccgctactgtgccctgctgcttcctctgctaaaggcctggagccctgtttttaggaactacataaagcgcgcagccgaccatttggaagcgttagcagccattgaggacttcttcctagagcatgaagctcttggtatttccatggccaaggtactgatggctttctaccagctggagatcctggctgaggaaacaattctgagctggttcagccaaagagatacaactgacaagggccagcagttgcgcaagaatcaacagctgcagaggttcatccagtggctaaaagaggcagaagaggagtcatctgaagatgactgaagtcacactgcctgctcctttgggtgtgattgagtgccctcctggctcctgggctgggacaagtgaggaactagctgcagagggatgagtgaccaccatccaggctgagactgaaaggagcagaggctggaactacagtattctttcccctgctagcaaccatgtgcctcccatcctgactgtggagttgggatgtggaagtggggctggaacaaagcttctgcctagggaggagctaagcaggcccggcagttggaggaaggccagaggaacagctttgtgctccggctttccctcagggaacagcagagagcagttggctctttctgctgcttgtatatgttaatattaaaagagagtggtgta

SEQ ID NO: 279882 - DNA, 1035 bp, Homo sapiens
  misc_feature (879)..(879): n is a, c, g, or t
  misc_feature (881)..(881): n is a, c, g, or t
ccaactacggctaggtacgaggcgggtgataacgtggtgctggaccagacctacctgtggcagggtgttcgagtggcggctggagcacagatccatcagtctctgctttgtgacaatgctgaggtcaaggaacgagtgacactgaaaccacgctctgtcctcacttcccaggtggtcgtgggcccaaatatcacgctgcctgagggctcggtgatctctttgcaccctccagatgcagaggaagatgaagatgatggcgagttcagtgatgattctggggctgaccaagaaaaggacaaagtgaagatgaaaggttacaatccagcagaagtaggagctgctggcaagggctacctctggaaagctgcaggcatgaacatggaggaagaggaggaactgcagcagaatctgtggggactcaagatcaacatggaagaagagagtgaaagtgaaagtgagcaaagtatggattctgaggagccggacagccggggaggctcccctcagatggatgacatcaaagtgttccagaatgaagttttaggaacactacagcggggcaaagaggagaacatttcttgtgacaatctcgtcctggaaatcaactctctcaagtatgcctataacataagtctaaaggaggtgatgcaggtactgagccacgtggtcctggagttccccctgcaacagatggattccccgcttgactcaagccgctactgtgccctgctgcttcctctgctaaaggcctggagccctgtttttaggaactacataaagcgcgcagccgaccatttggaagcgttagcagccattgaggacttcttcctagagcatgaagctcttggtatttccatggccaagtatgatggttctacngntgggatctggtgggggaacaatttgggggtaggaaaatcactggaaggcgagtggcaaaaaagggggggtcacagcggaaaggggaggggtggagagagcggtgctggtgagggccgggggggagaaatggaggcccggtgggggggatcctag

SEQ ID NO: 279883 - DNA, 407 bp, Homo sapiens
gcggcgcctactactactaaattcgcggccgctcgacctgaagtcacactgcctgctcctttgggtgtgattgagtgccctcctggctcctgggctgggacaagtgaggaactagctgcagagggatgagtgaccaccatccaggctgagactgaaaggagcagaggctggaactacagtattctttcccctgctagcaaccatgtgcctcccatcctgactgtggagttgggatgtggaagtggggctggaacaaagcttctgcctagggaggagctaagcaggcccggcagttggaggaaggccagaggaacagctttgtgctccggctttccctcagggaacagcagagagcagttggctctttctgctgcttgtatatgttaatattaaaagagagtggtgta

SEQ ID NO: 279884 - DNA, 2607 bp, Homo sapiens
tcccccccccccccccctccccccccccctccccccccccccccctcccccctccccccctcggttaggtacgaggctgggtgttttgtagtggcgccgcctggtgtggtggttagtcgggctaacaagcgcagcggcgcggggccgggaggcagcggtggcgggggagccagaggggcggaggaggaaccgccgccgcccctacaagcagttctggtggccgatagcttcgatcgccgcttcttccccatctccaaggaccagcctcgggtcctcttgcccctggccaatgtggcattaattgactacactctggaattcctgactgccacaggtgtacaggaaacatttgtcttttgttgctggaaagctgctcaaatcaaagaacatttactgaagtcaaagtggtgccgccctacatctctcaatgtggttcgaataattacatcagagctctatcgatcactgggagatgtcctccgtgatgttgatgccaaggctttggtgcgctctgactttcttctggtgtatggggatgtcatctcaaacatcaatatcaccagagcccttgaggaacacaggttgagacggaagctagaaaaaaatgtttctgtgatgacgatgatcttcaaggagtcatcccccagccacccaactcgttgccacgaagacaatgtggtagtggctgtggatagtaccacaaacagggttctccattttcagaagacccagggtctccggcgttttgcatttcctctgagcctgtttcagggcagtagtgatggagtggaggttcgatatgatttactggattgtcatatcagcatctgttctcctcaggtggcacaactctttacagacaactttgactaccaaactcgagatgactttgtgcgaggtctcttagtgaatgaggagatcctagggaaccagatccacatgcacgtaacagctaaggaatatggtgcccgtgtctccaacctacacatgtactcagctgtctgtgctgacgtcatccgccgatgggtctaccctctcaccccagaggcgaacttcactgacagcaccacccagagctgcactcattcccggcacaacatctaccgagggcctgaggtcagcctgggccatggcagcatcctagaggaaaatgtgctcctgggctctggcactgtcattggcagcaattgctttatcaccaacagtgtcattggccccggctgccacattggtgataacgtggtgctggaccagacctacctgtggcagggtgttcgagtggcggctggagcacagatccatcagtctctgctttgtgacaatgctgaggtcaaggaacgagtgacactgaaaccacgctctgtcctcacttcccaggtggtcgtgggcccaaatatcacgctgcctgagggctcggtgatctctttgcaccctccagatgcagaggaagatgaagatgatggcgagttcagtgatgattctggggctgaccaagaaaaggacaaagtgaagatgaaaggttacaatccagcagaagtaggagctgctggcaagggctacctctggaaagctgcaggcatgaacatggaggaagaggaggaactgcagcagaatctgtggggactcaagatcaacatggaagaagagagtgaaagtgaaagtgagcaaagtatggattctgaggagccggacagccggggaggctcccctcagatggatgacatcaaagtgttccagaatgaagttttaggaacactacagcggggcaaagaggagaacatttcttgtgacaatctcgtcctggaaatcaactctctcaagtatgcctataacataagtctaaaggaggtgatgcaggtactgagccacgtggtcctggagttccccctgcaacagatggattccccgcttgactcaagccgctactgtgccctgctgcttcctctgctaaaggcctggagccctgtttttaggaactacataaagcgcgcagccgaccatttggaagcgttagcagccattgaggacttcttcctagagcatgaagctcttggtatttccatggccaaggtactgatggctttctaccagctggagatcctggctgaggaaacaattctgagctggttcagccaaagagatacaactgacaagggccagcagttgcgcaagaatcaacagctgcagaggttcatccagtggctaaaagaggcagaagaggagtcatctgaagatgactgaagtcacactgcctgctcctttgggtgtgattgagtgccctcctggctcctgggctgggacaagtgaggaactagctgcagagggatgagtgaccaccatccaggctgagactgaaaggagcagaggctggaactacagtattctttcccctgctagcaaccatgtgcctcccatcctgactgtggagttgggatgtggaagtggggctggaacaaagcttctgcctagggaggagctaagcaggcccggcagttggaggaaggccagaggaacagctttgtgctccggctttccctcagggaacagcagagagcagttggctctttctgctgcttgtatatgttaatattaaaagagagtggtgta

SEQ ID NO: 279885 - DNA, 3927 bp, Homo sapiens
gattcccgatggagctggccccttcgtggcgaccacaagtcctatcacgccacaagaatctcggcttgttcacctacaaatgaaggccgacgatacttgcagaccgagtctgacatctatgggaccccactcctaccctgcgcctcaggggccgggacaaccgtgacccgtaccgactcctcgcgcctccgggatcaacctcagacccctgtgggctcccggggaagacgcatgcgcactgctccctcctcgtctccttcccttcgttaattagtccatcgcatttcaagtgctggatcctttttgtcccctactgcgtgcggtggcagcttccttgcggaagtggtgaccgtgagagaagaagatggcggcccctgtagtggcgccgcctggtgtggtggttagtcgggctaacaagcgcagcggcgcggggccgggaggcagcggtggcgggggagccagaggggcggaggaggaaccgccgccgcccctacaagcagttctggtggccgatagcttcgatcgccgcttcttccccatctccaaggaccagcctcgggtgagcgccgcgcacgcgagcagccagagggcaggaagggtggcagggctggagcaagttctcatttcggctaactacaacagcatgcccttgaaggacctgcgtctatgctgttatcctaaaaccggatgcagagggactgtctaaaccctgatgactgctgaccaagttagtggccggcagatttgggcattcgtaatgctgtccacctcgggtttgaaaggaatgaagagagctaaatgtagaaacagcgcttgagagaagccttcacgcggggattcagtgcccctagaagaggctgcgccgcttttaaccttgccgatgacggttgcttaggtgaaaagaaacgaccttttgcctctgaaagggcggtaatatgccttaaaaagagcgggctagatctcaggcagtgtattttttttttccttccaggttctaatgatagccggtgctatctgtcgaaaggacaaaatgggtttagtggttgattgccatcagcccccgagttgtctagacaatggggtattggactcagctgggtcgttcagcagtcagttcagaaagagggaactgcattggatttaaggaaaatcctctctaattccctcgaaaaagcctaatggctgttcatttttgacaagtgacgggagatggctaacctctgacacttagaaagggatcaaggaaggaaatcttatggggaagaaggccttagcaatgcttaaatttatggaaatatgattgatttccagtattatcctttgccagcagtgaactgccattctgtcacagctctgtgtctgatacaaggcacatagattctgtacttaccatccccaaattgcaatgtctcagactcaggcttagagcatggcatgaacatcaaaggcaggaacctgtttatctttgaattggcaagatacagcaaaattacactgtttggaaatacgaatagaggagtgaaaattgttgcagtggggtacccaaagggattcgagacctcaagttttttttcatcttgtatccttcaggtcctcttgcccctggccaatgtggcattaattgactacactctggaattcctgactgccacaggtgtacaggaaacatttgtcttttgttgctggaaagctgctcaaatcaaagaacatttactgaagtcaaagtggtgccgccctacatctctcaatgtggttcgaataattacatcagagctctatcgatcactgggagatgtcctccgtgatgttgatgccaaggctttggtgcgctctgactttcttctggtgtatggggatgtcatctcaaacatcaatatcaccagagcccttgaggaacacaggttgagacggaagctagaaaaaaatgtttctgtgatgacgatgatcttcaaggagtcatcccccagccacccaactcgttgccacgaagacaatgtggtagtggctgtggatagtaccacaaacagggttctccattttcagaagacccagggtctccggcgttttgcatttcctctgagcctgtttcagggcagtagtgatggagtggaggttcgatatgatttactggattgtcatatcagcatctgttctcctcaggtggcacaactctttacagacaactttgactaccaaactcgagatgactttgtgcgaggtctcttagtgaatgaggagatcctagggaaccagatccacatgcacgtaacagctaaggaatatggtgcccgtgtctccaacctacacatgtactcagctgtctgtgctgacgtcatccgccgatgggtctaccctctcaccccagaggcgaacttcactgacagcaccacccagagctgcactcattcccggcacaacatctaccgagggcctgaggtcagcctgggccatggcagcatcctagaggaaaatgtgctcctgggctctggcactgtcattggcagcaattgctttatcaccaacagtgtcattggccccggctgccacattggtgataacgtggtgctggaccagacctacctgtggcagggtgttcgagtggcggctggagcacagatccatcagtctctgctttgtgacaatgctgaggtcaaggaacgagtgacactgaaaccacgctctgtcctcacttcccaggtggtcgtgggcccaaatatcacgctgcctgagggctcggtgatctctttgcaccctccagatgcagaggaagatgaagatgatggcgagttcagtgatgattctggggctgaccaagaaaaggacaaagtgaagatgaaaggttacaatccagcagaagtaggagctgctggcaagggctacctctggaaagctgcaggcatgaacatggaggaagaggaggaactgcagcagaatctgtggggactcaagatcaacatggaagaagagagtgaaagtgaaagtgagcaaagtatggattctgaggagccggacagccggggaggctcccctcagatggatgacatcaaagtgttccagaatgaagttttaggaacactacagcggggcaaagaggagaacatttcttgtgacaatctcgtcctggaaatcaactctctcaagtatgcctataacataagtctaaaggaggtgatgcaggtactgagccacgtggtcctggagttccccctgcaacagatggattccccgcttgactcaagccgctactgtgccctgctgcttcctctgctaaaggcctggagccctgtttttaggaactacataaagcgcgcagccgaccatttggaagcgttagcagccattgaggacttcttcctagagcatgaagctcttggtatttccatggccaaggtactgatggctttctaccagctggagatcctggctgaggaaacaattctgagctggttcagccaaagagatacaactgacaagggccagcagttgcgcaagaatcaacagctgcagaggttcatccagtggctaaaagaggcagaagaggagtcatctgaagatgactgaagtcacactgcctgctcctttgggtgtgattgagtgccctcctggctcctgggctgggacaagtgaggaactagctgcagagggatgagtgaccaccatccaggctgagactgaaaggagcagaggctggaactacagtattctttcccctgctagcaaccatgtgcctcccatcctgactgtggagttgggatgtggaagtggggctggaacaaagcttctgcctagggaggagctaagcaggcccggcagttggaggaaggccagaggaacagctttgtgctccggctttccctcagggaacagcagagagcagttggctctttctgctgcttgtatatgttaatattaaaagagagtggtgta

SEQ ID NO: 279886 - DNA, 3429 bp, Homo sapiens
gattcccgatggagctggccccttcgtggcgaccacaagtcctatcacgccacaagaatctcggcttgttcacctacaaatgaaggccgacgatacttgcagaccgagtctgacatctatgggaccccactcctaccctgcgcctcaggggccgggacaaccgtgacccgtaccgactcctcgcgcctccgggatcaacctcagacccctgtgggctcccggggaagacgcatgcgcactgctccctcctcgtctccttcccttcgttaattagtccatcgcatttcaagtgctggatcctttttgtcccctactgcgtgcggtggcagcttccttgcggaagtggtgaccgtgagagaagaagatggcggcccctgtagtggcgccgcctggtgtggtggttagtcgggctaacaagcgcagcggcgcggggccgggaggcagcggtggcgggggagccagaggggcggaggaggaaccgccgccgcccctacaagcagttctggtggccgatagcttcgatcgccgcttcttccccatctccaaggaccagcctcgggtcctcttgcccctggccaatgtggcattaattgactacactctggaattcctgactgccacaggtgtacaggaaacatttgtcttttgttgctggaaagctgctcaaatcaaagaacatttactgaagtcaaagtggtgccgccctacatctctcaatgtggttcgaataattacatcagagctctatcgatcactgggagatgtcctccgtgatgttgatgccaaggctttggtgcgctctgactttcttctggtgtatggggatgtcatctcaaacatcaatatcaccagagcccttgaggaacacaggttgagacggaagctagaaaaaaatgtttctgtgatgacgatgatcttcaaggagtcatcccccagccacccaactcgttgccacgaagacaatgtggtagtggctgtggatagtaccacaaacagggttctccattttcagaagacccagggtctccggcgttttgcatttcctctgagcctgtttcagggcagtagtgatggagtggaggttcgatatgatttactggattgtcatatcagcatctgttctcctcaggtggcacaactctttacagacaactttgactaccaaactcgagatgactttgtgcgaggtctcttagtgaatgaggagatcctagggaaccagatccacatgcacgtaacagctaaggaatatggtgcccgtgtctccaacctacacatgtactcagctgtctgtgctgacgtcatccgccgatgggtctaccctctcaccccagaggcgaacttcactgacagcaccacccagagctgcactcattcccggcacaacatctaccgagggcctgaggtcagcctgggccatggcagcatcctagaggaaaatgtgctcctgggctctggcactgtcattggcagcaattgctttatcaccaacagtgtcattggccccggctgccacattggtgataacgtggtgctggaccagacctacctgtggcagggtgttcgagtggcggctggagcacagatccatcagtctctgctttgtgacaatgctgaggtcaaggaacgagtgacactgaaaccacgctctgtcctcacttcccaggtggtcgtgggcccaaatatcacgctgcctgagggctcggtgatctctttgcaccctccagatgcagaggaagatgaagatgatggcgagttcagtgatgattctggggctgaccaagaaaaggacaaagtgaagatgaaaggttacaatccagcagaagtaggagctgctggcaagggctacctctggaaagctgcaggcatgaacatggaggaagaggaggaactgcagcagaatctgtggggactcaagatcaacatggaagaagagagtgaaagtgaaagtgagcaaagtatggattctgaggagccggacagccggggaggctcccctcagatggatgacatcaaagtgttccagaatgaagttttaggaacactacagcggggcaaagaggagaacatttcttgtgacaatctcgtcctggaaatcaactctctcaagtatgcctataacataagtctaaaggaggtgatgcaggtactgagccacgtggtcctggagttccccctgcaacagatggattccccgcttgactcaagccgctactgtgccctgctgcttcctgtgagcaaagattggagctgagtacaagggattgggtacaggcaaaggaaatcaggagtagactgtcttgttatattgggtgtatgtcacttctggttcctttttccttgcctctggaagctggttgggctctagagcagccttggctggttcagaggggtcagattgagttcaatactgactggcctttgagactccaggatttcataccatcctaggcccacaaaggtatattcagaatggacctggacattcagactctatggcagcaatttgacccaacacaagatcagcctctggggtgggaataggtattttgaggcagcctatagcatctgatcccctttcaccttccctaaggaatctctttttcccaaaccctgtcaacaactcccacgtccctctgacataattccacagaacctgtatcatctcccttttgtccacccatgtcatcagtatggatttgcttggatgtccaggtataggtgaatgcttaggaatatactgcagctcccttctttcttccatagctgctaaaggcctggagccctgtttttaggaactacataaagcgcgcagccgaccatttggaagcgttagcagccattgaggacttcttcctagagcatgaagctcttggtatttccatggccaaggtactgatggctttctaccagctggagatcctggctgaggaaacaattctgagctggttcagccaaagagatacaactgacaagggccagcagttgcgcaagaatcaacagctgcagaggttcatccagtggctaaaagaggcagaagaggagtcatctgaagatgactgaagtcacactgcctgctcctttgggtgtgattgagtgccctcctggctcctgggctgggacaagtgaggaactagctgcagagggatgagtgaccaccatccaggctgagactgaaaggagcagaggctggaactacagtattctttcccctgctagcaaccatgtgcctcccatcctgactgtggagttgggatgtggaagtggggctggaacaaagcttctgcctagggaggagctaagcaggcccggcagttggaggaaggccagaggaacagctttgtgctccggctttccctcagggaacagcagagagcagttggctctttctgctgcttgtatatgttaatattaaaagagagtggtgta

SEQ ID NO: 279887 - DNA, 3063 bp, Homo sapiens
gattcccgatggagctggccccttcgtggcgaccacaagtcctatcacgccacaagaatctcggcttgttcacctacaaatgaaggccgacgatacttgcagaccgagtctgacatctatgggaccccactcctaccctgcgcctcaggggccgggacaaccgtgacccgtaccgactcctcgcgcctccgggatcaacctcagacccctgtgggctcccggggaagacgcatgcgcactgctccctcctcgtctccttcccttcgttaattagtccatcgcatttcaagtgctggatcctttttgtcccctactgcgtgcggtggcagcttccttgcggaagtggtgaccgtgagagaagaagatggcggcccctgtagtggcgccgcctggtgtggtggttagtcgggctaacaagcgcagcggcgcggggccgggaggcagcggtggcgggggagccagaggggcggaggaggaaccgccgccgcccctacaagcagttctggtggccgatagcttcgatcgccgcttcttccccatctccaaggaccagcctcgggtcctcttgcccctggccaatgtggcattaattgactacactctggaattcctgactgccacaggtgtacaggaaacatttgtcttttgttgctggaaagctgctcaaatcaaagaacatttactgaagtcaaagtggtgccgccctacatctctcaatgtggttcgaataattacatcagagctctatcgatcactgggagatgtcctccgtgatgttgatgccaaggctttggtgcgctctgactttcttctggtgtatggggatgtcatctcaaacatcaatatcaccagagcccttgaggaacacaggttgagacggaagctagaaaaaaatgtttctgtgatgacgatgatcttcaaggagtcatcccccagccacccaactcgttgccacgaagacaatgtggtagtggctgtggatagtaccacaaacagggttctccattttcagaagacccagggtctccggcgttttgcatttcctctgagcctgtttcagggcagtagtgatggagtggaggttcgatatgatttactggattgtcatatcagcatctgttctcctcaggtggcacaactctttacagacaactttgactaccaaactcgagatgactttgtgcgaggtctcttagtgaatgaggagatcctagggaaccagatccacatgcacgtaacagctaaggaatatggtgcccgtgtctccaacctacacatgtactcagctgtctgtgctgacgtcatccgccgatgggtctaccctctcaccccagaggcgaacttcactgacagcaccacccagagctgcactcattcccggcacaacatctaccgagggcctgaggtcagcctgggccatggcagcatcctagaggaaaatgtgctcctgggctctggcactgtcattggcagcaattgctttatcaccaacagtgtcattggccccggctgccacattggtgataacgtggtgctggaccagacctacctgtggcagggtgttcgagtggcggctggagcacagatccatcagtctctgctttgtgacaatgctgaggtcaaggaacgagtgacactgaaaccacgctctgtcctcacttcccaggtgagacctgatctatactgtgcacaggccctgaattgcatggcagtcacactgagccagaaggggcattatttccacccataatcctgtctaaaaaagttgctctcattatcaggatgcacttttcctccacaccctaatggttctgtgtttttttttccccttaggtggtcgtgggcccaaatatcacgctgcctgagggctcggtgatctctttgcaccctccagatgcagaggaagatgaagatgatggcgagttcagtgatgattctggggctgaccaagaaaaggacaaagtgaagatgaaaggttacaatccagcagaagtaggagctgctggcaagggctacctctggaaagctgcaggcatgaacatggaggaagaggaggaactgcagcagaatctgtggggactcaagatcaacatggaagaagagagtgaaagtgaaagtgagcaaagtatggattctgaggagccggacagccggggaggctcccctcagatggatgacatcaaagtgttccagaatgaagttttaggaacactacagcggggcaaagaggagaacatttcttgtgacaatctcgtcctggaaatcaactctctcaagtatgcctataacataagtctaaaggaggtgatgcaggtactgagccacgtggtcctggagttccccctgcaacagatggattccccgcttgactcaagccgctactgtgccctgctgcttcctctgctaaaggcctggagccctgtttttaggaactacataaagcgcgcagccgaccatttggaagcgttagcagccattgaggacttcttcctagagcatgaagctcttggtatttccatggccaaggtactgatggctttctaccagctggagatcctggctgaggaaacaattctgagctggttcagccaaagagatacaactgacaagggccagcagttgcgcaagaatcaacagctgcagaggttcatccagtggctaaaagaggcagaagaggagtcatctgaagatgactgaagtcacactgcctgctcctttgggtgtgattgagtgccctcctggctcctgggctgggacaagtgaggaactagctgcagagggatgagtgaccaccatccaggctgagactgaaaggagcagaggctggaactacagtattctttcccctgctagcaaccatgtgcctcccatcctgactgtggagttgggatgtggaagtggggctggaacaaagcttctgcctagggaggagctaagcaggcccggcagttggaggaaggccagaggaacagctttgtgctccggctttccctcagggaacagcagagagcagttggctctttctgctgcttgtatatgttaatattaaaagagagtggtgta

SEQ ID NO: 279888 - DNA, 2772 bp, Homo sapiens
gattcccgatggagctggccccttcgtggcgaccacaagtcctatcacgccacaagaatctcggcttgttcacctacaaatgaaggccgacgatacttgcagaccgagtctgacatctatgggaccccactcctaccctgcgcctcaggggccgggacaaccgtgacccgtaccgactcctcgcgcctccgggatcaacctcagacccctgtgggctcccggggaagacgcatgcgcactgctccctcctcgtctccttcccttcgttaattagtccatcgcatttcaagtgctggatcctttttgtcccctactgcgtgcggtggcagcttccttgcggaagtggtgaccgtgagagaagaagatggcggcccctgtagtggcgccgcctggtgtggtggttagtcgggctaacaagcgcagcggcgcggggccgggaggcagcggtggcgggggagccagaggggcggaggaggaaccgccgccgcccctacaagcagttctggtggccgatagcttcgatcgccgcttcttccccatctccaaggaccagcctcgggtcctcttgcccctggccaatgtggcattaattgactacactctggaattcctgactgccacaggtgtacaggaaacatttgtcttttgttgctggaaagctgctcaaatcaaagaacatttactgaagtcaaagtggtgccgccctacatctctcaatgtggttcgaataattacatcagagctctatcgatcactgggagatgtcctccgtgatgttgatgccaaggctttggtgcgctctgactttcttctggtgtatggggatgtcatctcaaacatcaatatcaccagagcccttgaggaacacaggttgagacggaagctagaaaaaaatgtttctgtgatgacgatgatcttcaaggagtcatcccccagccacccaactcgttgccacgaagacaatgtggtagtggctgtggatagtaccacaaacagggttctccattttcagaagacccagggtctccggcgttttgcatttcctctgagcctgtttcagggcagtagtgatggagtggaggttcgatatgatttactggattgtcatatcagcatctgttctcctcaggtggcacaactctttacagacaactttgactaccaaactcgagatgactttgtgcgaggtctcttagtgaatgaggagatcctagggaaccagatccacatgcacgtaacagctaaggaatatggtgcccgtgtctccaacctacacatgtactcagctgtctgtgctgacgtcatccgccgatgggtctaccctctcaccccagaggcgaacttcactgacagcaccacccagagctgcactcattcccggcacaacatctaccgagggcctgaggtcagcctgggccatggcagcatcctagaggaaaatgtgctcctgggctctggcactgtcattggcagcaattgctttatcaccaacagtgtcattggccccggctgccacattggtgataacgtggtgctggaccagacctacctgtggcagggtgttcgagtggcggctggagcacagatccatcagtctctgctttgtgacaatgctgaggtcaaggaacgagtgacactgaaaccacgctctgtcctcacttcccaggtggtcgtgggcccaaatatcacgctgcctgagggctcggtgatctctttgcaccctccagatgcagaggaagatgaagatgatggcgagttcagtgatgattctggggctgaccaagaaaaggacaaagtgaagatgaaaggttacaatccagcagaagtaggagctgctggcaagggctacctctggaaagctgcaggcatgaacatggaggaagaggaggaactgcagcagaatctgtggggactcaagatcaacatggaagaagagagtgaaagtgaaagtgagcaaagtatggattctgaggagccggacagccggggaggctcccctcagatggatgacatcaaagtgttccagaatgaagttttaggaacactacagcggggcaaagaggagaacatttcttgtgacaatctcgtcctggaaatcaactctctcaactgctaaaggcctggagccctgtttttaggaactacataaagcgcgcagccgaccatttggaagcgttagcagccattgaggacttcttcctagagcatgaagctcttggtatttccatggccaaggtactgatggctttctaccagctggagatcctggctgaggaaacaattctgagctggttcagccaaagagatacaactgacaagggccagcagttgcgcaagaatcaacagctgcagaggttcatccagtggctaaaagaggcagaagaggagtcatctgaagatgactgaagtcacactgcctgctcctttgggtgtgattgagtgccctcctggctcctgggctgggacaagtgaggaactagctgcagagggatgagtgaccaccatccaggctgagactgaaaggagcagaggctggaactacagtattctttcccctgctagcaaccatgtgcctcccatcctgactgtggagttgggatgtggaagtggggctggaacaaagcttctgcctagggaggagctaagcaggcccggcagttggaggaaggccagaggaacagctttgtgctccggctttccctcagggaacagcagagagcagttggctctttctgctgcttgtatatgttaatattaaaagagagtggtgta

SEQ ID NO: 279889 - DNA, 2781 bp, Homo sapiens
gattcccgatggagctggccccttcgtggcgaccacaagtcctatcacgccacaagaatctcggcttgttcacctacaaatgaaggccgacgatacttgcagaccgagtctgacatctatgggaccccactcctaccctgcgcctcaggggccgggacaaccgtgacccgtaccgactcctcgcgcctccgggatcaacctcagacccctgtgggctcccggggaagacgcatgcgcactgctccctcctcgtctccttcccttcgttaattagtccatcgcatttcaagtgctggatcctttttgtcccctactgcgtgcggtggcagcttccttgcggaagtggtgaccgtgagagaagaagatggcggcccctgtagtggcgccgcctggtgtggtggttagtcgggctaacaagcgcagcggcgcggggccgggaggcagcggtggcgggggagccagaggggcggaggaggaaccgccgccgcccctacaagcagttctggtggccgatagcttcgatcgccgcttcttccccatctccaaggaccagcctcgggtcctcttgcccctggccaatgtggcattaattgactacactctggaattcctgactgccacaggtgtacaggaaacatttgtcttttgttgctggaaagctgctcaaatcaaagaacatttactgaagtcaaagtggtgccgccctacatctctcaatgtggttcgaataattacatcagagctctatcgatcactgggagatgtcctccgtgatgttgatgccaaggctttggtgcgctctgactttcttctggtgtatggggatgtcatctcaaacatcaatatcaccagagcccttgaggaacacaggttgagacggaagctagaaaaaaatgtttctgtgatgacgatgatcttcaaggagtcatcccccagccacccaactcgttgccacgaagacaatgtggtagtggctgtggatagtaccacaaacagggttctccattttcagaagacccagggtctccggcgttttgcatttcctctgagcctgtttcagggcagtagtgatggagtggaggttcgatatgatttactggattgtcatatcagcatctgttctcctcaggtggcacaactctttacagacaactttgactaccaaactcgagatgactttgtgcgaggtctcttagtgaatgaggagatcctagggaaccagatccacatgcacgtaacagctaaggaatatggtgcccgtgtctccaacctacacatgtactcagctgtctgtgctgacgtcatccgccgatgggtctaccctctcaccccagaggcgaacttcactgacagcaccacccagagctgcactcattcccggcacaacatctaccgagggcctgaggtgataacgtggtgctggaccagacctacctgtggcagggtgttcgagtggcggctggagcacagatccatcagtctctgctttgtgacaatgctgaggtcaaggaacgagtgacactgaaaccacgctctgtcctcacttcccaggtggtcgtgggcccaaatatcacgctgcctgagggctcggtgatctctttgcaccctccagatgcagaggaagatgaagatgatggcgagttcagtgatgattctggggctgaccaagaaaaggacaaagtgaagatgaaaggttacaatccagcagaagtaggagctgctggcaagggctacctctggaaagctgcaggcatgaacatggaggaagaggaggaactgcagcagaatctgtggggactcaagatcaacatggaagaagagagtgaaagtgaaagtgagcaaagtatggattctgaggagccggacagccggggaggctcccctcagatggatgacatcaaagtgttccagaatgaagttttaggaacactacagcggggcaaagaggagaacatttcttgtgacaatctcgtcctggaaatcaactctctcaagtatgcctataacataagtctaaaggaggtgatgcaggtactgagccacgtggtcctggagttccccctgcaacagatggattccccgcttgactcaagccgctactgtgccctgctgcttcctctgctaaaggcctggagccctgtttttaggaactacataaagcgcgcagccgaccatttggaagcgttagcagccattgaggacttcttcctagagcatgaagctcttggtatttccatggccaaggtactgatggctttctaccagctggagatcctggctgaggaaacaattctgagctggttcagccaaagagatacaactgacaagggccagcagttgcgcaagaatcaacagctgcagaggttcatccagtggctaaaagaggcagaagaggagtcatctgaagatgactgaagtcacactgcctgctcctttgggtgtgattgagtgccctcctggctcctgggctgggacaagtgaggaactagctgcagagggatgagtgaccaccatccaggctgagactgaaaggagcagaggctggaactacagtattctttcccctgctagcaaccatgtgcctcccatcctgactgtggagttgggatgtggaagtggggctggaacaaagcttctgcctagggaggagctaagcaggcccggcagttggaggaaggccagaggaacagctttgtgctccggctttccctcagggaacagcagagagcagttggctctttctgctgcttgtatatgttaatattaaaagagagtggtgta

SEQ ID NO: 279890 - DNA, 3072 bp, Homo sapiens
gattcccgatggagctggccccttcgtggcgaccacaagtcctatcacgccacaagaatctcggcttgttcacctacaaatgaaggccgacgatacttgcagaccgagtctgacatctatgggaccccactcctaccctgcgcctcaggggccgggacaaccgtgacccgtaccgactcctcgcgcctccgggatcaacctcagacccctgtgggctcccggggaagacgcatgcgcactgctccctcctcgtctccttcccttcgttaattagtccatcgcatttcaagtgctggatcctttttgtcccctactgcgtgcggtggcagcttccttgcggaagtggtgaccgtgagagaagaagatggcggcccctgtagtggcgccgcctggtgtggtggttagtcgggctaacaagcgcagcggcgcggggccgggaggcagcggtggcgggggagccagaggggcggaggaggaaccgccgccgcccctacaagcagttctggtggccgatagcttcgatcgccgcttcttccccatctccaaggaccagcctcgggtcctcttgcccctggccaatgtggcattaattgactacactctggaattcctgactgccacaggtgtacaggaaacatttgtcttttgttgctggaaagctgctcaaatcaaagaacatttactgaagtcaaagtggtgccgccctacatctctcaatgtggttcgaataattacatcagagctctatcgatcactgggagatgtcctccgtgatgttgatgccaaggctttggtgcgctctgactttcttctggtgtatggggatgtcatctcaaacatcaatatcaccagagcccttgaggaacacaggttgagacggaagctagaaaaaaatgtttctgtgatgacgatgatcttcaaggagtcatcccccagccacccaactcgttgccacgaagacaatgtggtagtggctgtggatagtaccacaaacagggttctccattttcagaagacccagggtctccggcgttttgcatttcctctgagcctgtttcagggcagtagtgatggagtggaggttcgatatgatttactggattgtcatatcagcatctgttctcctcaggtggcacaactctttacagacaactttgactaccaaactcgagatgactttgtgcgaggtctcttagtgaatgaggagatcctagggaaccagatccacatgcacgtaacagctaaggaatatggtgcccgtgtctccaacctacacatgtactcagctgtctgtgctgacgtcatccgccgatgggtctaccctctcaccccagaggcgaacttcactgacagcaccacccagagctgcactcattcccggcacaacatctaccgagggcctgaggtcagcctgggccatggcagcatcctagaggaaaatgtgctcctgggctctggcactgtcattggcagcaattgctttatcaccaacagtgtcattggccccggctgccacattggtgataacgtggtgctggaccagacctacctgtggcagggtgttcgagtggcggctggagcacagatccatcagtctctgctttgtgacaatgctgaggtcaaggaacgagtgacactgaaaccacgctctgtcctcacttcccaggtggtcgtgggcccaaatatcacgctgcctgagggctcggtgatctctttgcaccctccagatgcagaggaagatgaagatgatggcgagttcagtgatgattctggggctgaccaagaaaaggacaaagtgaagatgaaaggttacaatccagcagaagtaggagctgctggcaagggctacctctggaaagctgcaggcatgaacatggaggaagaggaggaactgcagcagaatctgtggggactcaagatcaacatggaagaagagagtgaaagtgaaagtgagcaaagtatggattctgaggagccggacagccggggaggctcccctcagatggatgacatcaaagtgttccagaatgaagttttaggaacactacagcggggcaaagaggagaacatttcttgtgacaatctcgtcctggaaatcaactctctcaagtatgcctataacataagtctaaaggaggtgatgcaggtactgagccacgtggtcctggagttccccctgcaacagatggattccccgcttgactcaagccgctactgtgccctgctgcttcctctgctaaaggcctggagccctgtttttaggaactacataaagcgcgcagccgaccatttggaagcgttagcagccattgaggacttcttcctagagcatgaagctcttggtatttccatggccaaggtactgatggctttctaccagctggagatcctggctgaggaaacaattctgagctggttcagccaaagagatacaactgacaagggccagcagttgcgcaagaatcaacaggtgcgtcaggctgtcctcctctcgccaagatggttatctcattcccaggtcctggcccctagactctagggtggttggtttctggggctctggttgttagagctgtttatctgccgaggggagcaggagagttatgtgcacctcccccagccgatctctcctctgcttctttacagctgcagaggttcatccagtggctaaaagaggcagaagaggagtcatctgaagatgactgaagtcacactgcctgctcctttgggtgtgattgagtgccctcctggctcctgggctgggacaagtgaggaactagctgcagagggatgagtgaccaccatccaggctgagactgaaaggagcagaggctggaactacagtattctttcccctgctagcaaccatgtgcctcccatcctgactgtggagttgggatgtggaagtggggctggaacaaagcttctgcctagggaggagctaagcaggcccggcagttggaggaaggccagaggaacagctttgtgctccggctttccctcagggaacagcagagagcagttggctctttctgctgcttgtatatgttaatattaaaagagagtggtgta

SEQ ID NO: 279891 - DNA, 3605 bp, Homo sapiens
gattcccgatggagctggccccttcgtggcgaccacaagtcctatcacgccacaagaatctcggcttgttcacctacaaatgaaggccgacgatacttgcagaccgagtctgacatctatgggaccccactcctaccctgcgcctcaggggccgggacaaccgtgacccgtaccgactcctcgcgcctccgggatcaacctcagacccctgtgggctcccggggaagacgcatgcgcactgctccctcctcgtctccttcccttcgttaattagtccatcgcatttcaagtgctggatcctttttgtcccctactgcgtgcggtggcagcttccttgcggaagtggtgaccgtgagagaagaagatggcggcccctgtagtggcgccgcctggtgtggtggttagtcgggctaacaagcgcagcggcgcggggccgggaggcagcggtggcgggggagccagaggggcggaggaggaaccgccgccgcccctacaagcagttctggtggccgatagcttcgatcgccgcttcttccccatctccaaggaccagcctcgggtcctcttgcccctggccaatgtggcattaattgactacactctggaattcctgactgccacaggtgtacaggaaacatttgtcttttgttgctggaaagctgctcaaatcaaagaacatttactgaagtcaaagtggtgccgccctacatctctcaatgtggttcgaataattacatcagagctctatcgatcactgggagatgtcctccgtgatgttgatgccaaggctttggtgcgctctgactttcttctggtgtatggggatgtcatctcaaacatcaatatcaccagagcccttgaggaacacaggttgagacggaagctagaaaaaaatgtttctgtgatgacgatgatcttcaaggagtcatcccccagccacccaactcgttgccacgaagacaatgtggtagtggctgtggatagtaccacaaacagggttctccattttcagaagacccagggtctccggcgttttgcatttcctctgagcctgtttcagggcagtagtgatggagtggaggttcgatatgatttactggattgtcatatcagcatctgttctcctcaggtggcacaactctttacagacaactttgactaccaaactcgagatgactttgtgcgaggtctcttagtgaatgaggagatcctagggaaccagatccacatgcacgtaacagctaaggaatatggtgcccgtgtctccaacctacacatgtactcagctgtctgtgctgacgtcatccgccgatgggtctaccctctcaccccagaggcgaacttcactgacagcaccacccagagctgcactcattcccggcacaacatctaccgagggcctgaggtcagcctgggccatggcagcatcctagaggaaaatgtgctcctgggctctggcactgtcattggcagcaattgctttatcaccaacagtgtcattggccccggctgccacattggtgataacgtggtgctggaccagacctacctgtggcagggtgttcgagtggcggctggagcacagatccatcagtctctgctttgtgacaatgctgaggtcaaggaacgagtgacactgaaaccacgctctgtcctcacttcccaggtggtcgtgggcccaaatatcacgctgcctgagggctcggtgatctctttgcaccctccagatgcagaggaagatgaagatgatggcgagttcagtgatgattctggggctgaccaagaaaaggacaaagtgaagatgaaaggttacaatccagcagaagtaggagctgctggcaagggctacctctggaaagctgcaggcatgaacatggaggaagaggaggaactgcagcagaatctgtggggactcaagatcaacatggaagaagagagtgaaagtgaaagtgagcaaagtatggattctgaggagccggacagccggggaggctcccctcagatggatgacatcaaagtgttccagaatgaagttttaggaacactacagcggggcaaagaggagaacatttcttgtgacaatctcgtcctggaaatcaactctctcaagtatgcctataacataagtctaaaggaggtgatgcaggtactgagccacgtggtcctggagttccccctgcaacagatggattccccgcttgactcaagccgctactgtgccctgctgcttcctgtgagcaaagattggagctgagtacaagggattgggtacaggcaaaggaaatcaggagtagactgtcttgttatattgggtgtatgtcacttctggttcctttttccttgcctctggaagctggttgggctctagagcagccttggctggttcagaggggtcagattgagttcaatactgactggcctttgagactccaggatttcataccatcctaggcccacaaaggtatattcagaatggacctggacattcagactctatggcagcaatttgacccaacacaagatcagcctctggggtgggaataggtattttgaggcagcctatagcatctgatcccctttcaccttccctaaggaatctctttttcccaaaccctgtcaacaactcccacgtccctctgacataattccacagaacctgtatcatctcccttttgtccacccatgtcatcagtatggatttgcttggatgtccaggtataggtgaatgcttaggaatatactgcagctcccttctttcttccatagctgctaaaggcctggagccctgtttttaggaactacataaagcgcgcagccgaccatttggaagcgttagcagccattgaggacttcttcctagagcatgaagctcttggtatttccatggccaaggtactgatggctttctaccagctggagatcctggctgaggaaacaattctgagctggttcagccaaagagatacaactgacaagggccagcagttgcgcaagaatcaacaggtgcgtcaggctgtcctcctctcgccaagatggttatctcattcccaggtcctggcccctagactctagggtggttggtttctggggctctggttgttagagctgtttatctgccgaggggagcaggagagttatgtgcacctcccccagccgatctctcctctgcttctttacagctgcagaggttcatccagtggctaaaagaggcagaagaggagtcatctgaagatgactgaagtcacactgcctgctcctttgggtgtgattgagtgccctcctggctcctgggctgggacaagtgaggaactagctgcagagggatgagtgaccaccatccaggctgagactgaaaggagcagaggctggaactacagtattctttcccctgctagcaaccatgtgcctcccatcctgactgtggagttgggatgtggaagtggggctggaacaaagcttctgcctagggaggagctaagcaggcccggcagttggaggaaggccagaggaacagctttgtgctccggctttccctcagggaacagcagagagcagttggctctttctgctgcttgtatatgttaatattaaaagagagtggtgta

SEQ ID NO: 279892 - DNA, 2088 bp, Homo sapiens
ctcaaaaaaaaaaaaaaaagaatagtacttaattctagcccactccacttcccttccacaggtggcacaactctttacagacaactttgactaccaaactcgagatgactttgtgcgaggtctcttagtgaatgaggaggtgagaaaagtcttccaatgcctctttaggagagaggagaaggctatgattgtatctcatgctggtaacttttgatcttttttgtattttattgaggcttaggagggaggaaaagcaggggacaggaggaacagtacacaaagaagaatctttgtggcagtgagaggcagaggggaacttaaaaggattagaaaagttgtacttgggggcattcttcctgtctttcttgcttaggtgacctccctttccttctcattcagatcctagggaaccagatccacatgcacgtaacagctaaggaatatggtgcccgtgtctccaacctacacatgtactcagctgtctgtgctgacgtcatccgccgatgggtctaccctctcaccccagaggcgaacttcactgacagcaccacccagagctgcactcattcccggcacaacatctaccgagggcctgaggtcagcctgggccatggcagcatcctagaggaaaatgtgctcctgggctctggcactgtcattggcagcaattgctttatcaccaacagtgtcattggccccggctgccacattggtgataacgtggtgctggaccagacctacctgtggcagggtgttcgagtggcggctggagcacagatccatcagtctctgctttgtgacaatgctgaggtcaaggaacgagtgacactgaaaccacgctctgtcctcacttcccaggtggtcgtgggcccaaatatcacgctgcctgagggctcggtgatctctttgcaccctccagatgcagaggaagatgaagatgatggcgagttcagtgatgattctggggctgaccaagaaaaggacaaagtgaagatgaaaggttacaatccagcagaagtaggagctgctggcaagggctacctctggaaagctgcaggcatgaacatggaggaagaggaggaactgcagcagaatctgtggggactcaagatcaacatggaagaagagagtgaaagtgaaagtgagcaaagtatggattctgaggagccggacagccggggaggctcccctcagatggatgacatcaaagtgttccagaatgaagttttaggaacactacagcggggcaaagaggagaacatttcttgtgacaatctcgtcctggaaatcaactctctcaagtatgcctataacataagtctaaaggaggtgatgcaggtactgagccacgtggtcctggagttccccctgcaacagatggattccccgcttgactcaagccgctactgtgccctgctgcttcctctgctaaaggcctggagccctgtttttaggaactacataaagcgcgcagccgaccatttggaagcgttagcagccattgaggacttcttcctagagcatgaagctcttggtatttccatggccaaggtactgatggctttctaccagctggagatcctggctgaggaaacaattctgagctggttcagccaaagagatacaactgacaagggccagcagttgcgcaagaatcaacagctgcagaggttcatccagtggctaaaagaggcagaagaggagtcatctgaagatgactgaagtcacactgcctgctcctttgggtgtgattgagtgccctcctggctcctgggctgggacaagtgaggaactagctgcagagggatgagtgaccaccatccaggctgagactgaaaggagcagaggctggaactacagtattctttcccctgctagcaaccatgtgcctcccatcctgactgtggagttgggatgtggaagtggggctggaacaaagcttctgcctagggaggagctaagcaggcccggcagttggaggaaggccagaggaacagctttgtgctccggctttccctcagggaacagcagagagcagttggctctttctgctgcttgtatatgttaatattaaaagagagtggtgta

SEQ ID NO: 279893 - DNA, 2672 bp, Homo sapiens
gattcccgatggagctggccccttcgtggcgaccacaagtcctatcacgccacaagaatctcggcttgttcacctacaaatgaaggccgacgatacttgcagaccgagtctgacatctatgggaccccactcctaccctgcgcctcaggggccgggacaaccgtgacccgtaccgactcctcgcgcctccgggatcaacctcagacccctgtgggctcccggggaagacgcatgcgcactgctccctcctcgtctccttcccttcgttaattagtccatcgcatttcaagtgctggatcctttttgtcccctactgcgtgcggtggcagcttccttgcggaagtggtgaccgtgagagaagaagatggcggcccctgtagtggcgccgcctggtgtggtggttagtcgggctaacaagcgcagcggcgcggggccgggaggcagcggtggcgggggagccagaggggcggaggaggaaccgccgccgcccctacaagcagttctggtggccgatagcttcgatcgccgcttcttccccatctccaaggaccagcctcgggtcctcttgcccctggccaatgtggcattaattgactacactctggaattcctgactgccacaggtgtacaggaaacatttgtcttttgttgctggaaagctgctcaaatcaaagaacatttactgaagtcaaagtggtgccgccctacatctctcaatgtggttcgaataattacatcagagctctatcgatcactgggagatgtcctccgtgatgttgatgccaaggctttggtgcgctctgactttcttctggtgtatggggatgtcatctcaaacatcaatatcaccagagcccttgaggaacacaggttgagacggaagctagaaaaaaatgtttctgtgatgacgatgatcttcaaggagtcatcccccagccacccaactcgttgccacgaagacaatgtggtagtggctgtggatagtaccacaaacagggttctccattttcagaagacccagggtctccggcgttttgcatttcctctgagcctgtttcagggcagtagtgatggagtggaggttcgatatgatttactggattgtcatatcagcatctgttctcctcaggtgataacgtggtgctggaccagacctacctgtggcagggtgttcgagtggcggctggagcacagatccatcagtctctgctttgtgacaatgctgaggtcaaggaacgagtgacactgaaaccacgctctgtcctcacttcccaggtgagacctgatctatactgtgcacaggccctgaattgcatggcagtcacactgagccagaaggggcattatttccacccataatcctgtctaaaaaagttgctctcattatcaggatgcacttttcctccacaccctaatggttctgtgtttttttttccccttaggtggtcgtgggcccaaatatcacgctgcctgagggctcggtgatctctttgcaccctccagatgcagaggaagatgaagatgatggcgagttcagtgatgattctggggctgaccaagaaaaggacaaagtgaagatgaaaggttacaatccagcagaagtaggagctgctggcaagggctacctctggaaagctgcaggcatgaacatggaggaagaggaggaactgcagcagaatctgtggggactcaagatcaacatggaagaagagagtgaaagtgaaagtgagcaaagtatggattctgaggagccggacagccggggaggctcccctcagatggatgacatcaaagtgttccagaatgaagttttaggaacactacagcggggcaaagaggagaacatttcttgtgacaatctcgtcctggaaatcaactctctcaagtatgcctataacataagtctaaaggaggtgatgcaggtactgagccacgtggtcctggagttccccctgcaacagatggattccccgcttgactcaagccgctactgtgccctgctgcttcctctgctaaaggcctggagccctgtttttaggaactacataaagcgcgcagccgaccatttggaagcgttagcagccattgaggacttcttcctagagcatgaagctcttggtatttccatggccaaggtactgatggctttctaccagctggagatcctggctgaggaaacaattctgagctggttcagccaaagagatacaactgacaagggccagcagttgcgcaagaatcaacagctgcagaggttcatccagtggctaaaagaggcagaagaggagtcatctgaagatgactgaagtcacactgcctgctcctttgggtgtgattgagtgccctcctggctcctgggctgggacaagtgaggaactagctgcagagggatgagtgaccaccatccaggctgagactgaaaggagcagaggctggaactacagtattctttcccctgctagcaaccatgtgcctcccatcctgactgtggagttgggatgtggaagtggggctggaacaaagcttctgcctagggaggagctaagcaggcccggcagttggaggaaggccagaggaacagctttgtgctccggctttccctcagggaacagcagagagcagttggctctttctgctgcttgtatatgttaatattaaaagagagtggtgta

SEQ ID NO: 279894 - DNA, 1551 bp, Homo sapiens
gctaggaggaggcctggtgttaatcggccgaggcggcacaacatctaccgagggcctgaggtcagcctgggccatggcagcatcctagaggaaaatgtgctcctgggctctggcactgtcattggcagcaattgctttatcaccaacagtgtcattggccccggctgccacattggtgataacgtggtgctggaccagacctacctgtggcagggtgttcgagtggcggctggagcacagatccatcagtctctgctttgtgacaatgctgaggtcaaggaacgagtgacactgaaaccacgctctgtcctcacttcccaggtggtcgtgggcccaaatatcacgctgcctgagggctcggtgatctctttgcaccctccagatgcagaggaagatgaagatgatggcgagttcagtgatgattctggggctgaccaagaaaaggacaaagtgaagatgaaaggttacaatccagcagaagtaggagctgctggcaagggctacctctggaaagctgcaggcatgaacatggaggaagaggaggaactgcagcagaatctgtggggactcaagatcaacatggaagaagagagtgaaagtgaaagtgagcaaagtatggattctgaggagccggacagccggggaggctcccctcagatggatgacatcaaagtgttccagaatgaagttttaggaacactacagcggggcaaagaggagaacatttcttgtgacaatctcgtcctggaaatcaactctctcaagtatgcctataacataagtctaaaggaggtgatgcaggtactgagccacgtggtcctggagttccccctgcaacagatggattccccgcttgactcaagccgctactgtgccctgctgcttcctctgctaaaggcctggagccctgtttttaggaactacataaagcgcgcagccgaccatttggaagcgttagcagccattgaggacttcttcctagagcatgaagctcttggtatttccatggccaaggtactgatggctttctaccagctggagatcctggctgaggaaacaattctgagctggttcagccaaagagatacaactgacaagggccagcagttgcgcaagaatcaacagctgcagaggttcatccagtggctaaaagaggcagaagaggagtcatctgaagatgactgaagtcacactgcctgctcctttgggtgtgattgagtgccctcctggctcctgggctgggacaagtgaggaactagctgcagagggatgagtgaccaccatccaggctgagactgaaaggagcagaggctggaactacagtattctttcccctgctagcaaccatgtgcctcccatcctgactgtggagttgggatgtggaagtggggctggaacaaagcttctgcctagggaggagctaagcaggcccggcagttggaggaaggccagaggaacagctttgtgctccggctttccctcagggaacagcagagagcagttggctctttctgctgcttgtatatgttaatattaaaagagagtggtgta

SEQ ID NO: 279895 - DNA, 1853 bp, Homo sapiens
gattcccgatggagctggccccttcgtggcgaccacaagtcctatcacgccacaagaatctcggcttgttcacctacaaatgaaggccgacgatacttgcagaccgagtctgacatctatgggaccccactcctaccctgcgcctcaggggccgggacaaccgtgacccgtaccgactcctcgcgcctccgggatcaacctcagacccctgtgggctcccggggaagacgcatgcgcactgctccctcctcgtctccttcccttcgttaattagtccatcgcatttcaagtgctggatcctttttgtcccctactgcgtgcggtggcagcttccttgcggaagtggtgaccgtgagagaagaagatggcggcccctgtagtggcgccgcctggtgtggtggttagtcgggctaacaagcgcagcggcgcggggccgggaggcagcggtggcgggggagccagaggggcggaggaggaaccgccgccgcccctacaagcagttctggtggccgatagcttcgatcgccgcttcttccccatctccaaggaccagcctcgggtcctcttgcccctggccaatgtggcattaattgactacactctggaattcctgactgccacaggtggtcgtgggcccaaatatcacgctgcctgagggctcggtgatctctttgcaccctccagatgcagaggaagatgaagatgatggcgagttcagtgatgattctggggctgaccaagaaaaggacaaagtgaagatgaaaggttacaatccagcagaagtaggagctgctggcaagggctacctctggaaagctgcaggcatgaacatggaggaagaggaggaactgcagcagaatctgtggggactcaagatcaacatggaagaagagagtgaaagtgaaagtgagcaaagtatggattctgaggagccggacagccggggaggctcccctcagatggatgacatcaaagtgttccagaatgaagttttaggaacactacagcggggcaaagaggagaacatttcttgtgacaatctcgtcctggaaatcaactctctcaagtatgcctataacataagtctaaaggaggtgatgcaggtactgagccacgtggtcctggagttccccctgcaacagatggattccccgcttgactcaagccgctactgtgccctgctgcttcctctgctaaaggcctggagccctgtttttaggaactacataaagcgcgcagccgaccatttggaagcgttagcagccattgaggacttcttcctagagcatgaagctcttggtatttccatggccaaggtactgatggctttctaccagctggagatcctggctgaggaaacaattctgagctggttcagccaaagagatacaactgacaagggccagcagttgcgcaagaatcaacagctgcagaggttcatccagtggctaaaagaggcagaagaggagtcatctgaagatgactgaagtcacactgcctgctcctttgggtgtgattgagtgccctcctggctcctgggctgggacaagtgaggaactagctgcagagggatgagtgaccaccatccaggctgagactgaaaggagcagaggctggaactacagtattctttcccctgctagcaaccatgtgcctcccatcctgactgtggagttgggatgtggaagtggggctggaacaaagcttctgcctagggaggagctaagcaggcccggcagttggaggaaggccagaggaacagctttgtgctccggctttccctcagggaacagcagagagcagttggctctttctgctgcttgtatatgttaatattaaaagagagtggtgta

SEQ ID NO: 279896 - DNA, 1958 bp, Homo sapiens
gattcccgatggagctggccccttcgtggcgaccacaagtcctatcacgccacaagaatctcggcttgttcacctacaaatgaaggccgacgatacttgcagaccgagtctgacatctatgggaccccactcctaccctgcgcctcaggggccgggacaaccgtgacccgtaccgactcctcgcgcctccgggatcaacctcagacccctgtgggctcccggggaagacgcatgcgcactgctccctcctcgtctccttcccttcgttaattagtccatcgcatttcaagtgctggatcctttttgtcccctactgcgtgcggtggcagcttccttgcggaagtggtgaccgtgagagaagaagatggcggcccctgtagtggcgccgcctggtgtggtggttagtcgggctaacaagcgcagcggcgcggggccgggaggcagcggtggcgggggagccagaggggcggaggaggaaccgccgccgcccctacaagcagttctggtggccgatagcttcgatcgccgcttcttccccatctccaaggaccagcctcgggtgagcgccgcgcacgcgagcagccagagggcaggaagggtggcagggctggagcaagttctcatttcggctaactacaacagcatgcccttgaaggacctgcgtctatgctgttatcctaaaaccggatgcagagggactgtctaaaccctgatgactgctgaccaagttagtggccggcagatttgggcattcgtaatgctgtccacctcgggtttgaaaggaatgaagagagctaaatgtagaaacagcgcttgagagaagccttcacgcggggattcagtgcccctagaagaggctgcgccgcttttaaccttgccgatgacggttgcttaggtgaaaagaaacgaccttttgcctctgaaagggcggtaatatgccttaaaaagagcgggctagatctcaggcagtgtattttttttttccttccaggttctaatgatagccggtgctatctgtcgaaaggacaaaatgggtttagtggttgattgccatcagcccccgagttgtctagacaatggggtattggactcagctgggtcgttcagcagtcagttcagaaagagggaactgcattggatttaaggaaaatcctctctaattccctcgaaaaagcctaatggctgttcatttttgacaagtgacgggagatggctaacctctgacacttagaaagggatcaaggaaggaaatcttatggggaagaaggccttagcaatgcttaaatttatggaaatatgattgatttccagtattatcctttgccagcagtgaactgccattctgtcacagctctgtgtctgatacaaggcacatagattctgtacttaccatccccaaattgcaatgtctcagactcaggcttagagcatggcatgaacatcaaaggcaggaacctgtttatctttgaattggcaagatacagcaaaattacactgtttggaaatacgaatagaggagtgaaaattgttgcagtggggtacccaaagggattcgagacctcaagttttttttcatcttgtatccttcaggtcctcttgcccctggccaatgtggcattaattgactacactctggaattcctgactgccacaggtgtacaggaaacatttgtcttttgttgctggaaagctgctcaaatcaaagaacatttactgtaaggccctgcaacttttctttccatgtttcgccatctttttccagttttttcaggatgaatgtaactaaggggaaatgtgagaggggaaaaatgtgtctacttagatgtcattgtaagttctaagggtattttctacacttatcaggaggtgagcagctgaaactttgtatctgtctgtcttgggttttctgtgacaaagattaaagaataaacttgggttttttctgaatctcattataa

SEQ ID NO: 279897 - DNA, 128 bp, Homo sapiens
gtcaggatgggaaaatgacaggaacaagggttaaagaccagcagagccctgagactgcttttttgcagttctgtccctcctgtcctttataggttgagacggaagctagaaaaaaatgtttctgtgat

SEQ ID NO: 279898 - DNA, 499 bp, Homo sapiens
ctcagctgtctgtgctgacgtcatccgccgatgggtctaccctctcaccccagaggcgaacttcactgacagcaccacccagagctgcactcattcccggcacaacatctaccgagggcctgaggtcagcctgggccatggcagcatcctagaggaaaatgtgctcctgggctctggcactgtcattggcagcaattgctttatcaccaacagtgtcattggccccggctgccacattggtgagcacaggtggggaatcaagccaactatcctaggaacaggaacctgggggggccacgtctccagaaacacaagggatggctacacaagggacagtccctgggaataaggaactatagagcggctacctcaggaaaggaggaaacagggatttgaaaacagcgataccttaatttgtagcctgtgggcctctcattggatgactcttcacattccagggtaccctgtagtcacattcaggagcaagtagataattaac

SEQ ID NO: 279899 - DNA, 927 bp, Homo sapiens
gattcccgatggagctggccccttcgtggcgaccacaagtcctatcacgccacaagaatctcggcttgttcacctacaaatgaaggccgacgatacttgcagaccgagtctgacatctatgggaccccactcctaccctgcgcctcaggggccgggacaaccgtgacccgtaccgactcctcgcgcctccgggatcaacctcagacccctgtgggctcccggggaagacgcatgcgcactgctccctcctcgtctccttcccttcgttaattagtccatcgcatttcaagtgctggatcctttttgtcccctactgcgtgcggtggcagcttccttgcggaagtggtgaccgtgagagaagaagatggcggcccctgtagtggcgccgcctggtgtggtggttagtcgggctaacaagcgcagcggcgcggggccgggaggcagcggtggcgggggagccagaggggcggaggaggaaccgccgccgcccctacaagcagttctggtggccgatagcttcgatcgccgcttcttccccatctccaaggaccagcctcgggtcctcttgcccctggccaatgtggcattaattgactacactctggaattcctgactgccacaggtgtacaggaaacatttgtcttttgttgctggaaagctgctcaaatcaaagaacatttactgtaaggccctgcaacttttctttccatgtttcgccatctttttccagttttttcaggatgaatgtaactaaggggaaatgtgagaggggaaaaatgtgtctacttagatgtcattgtaagttctaagggtattttctacacttatcaggaggtgagcagctgaaactttgtatctgtctgtcttgggttttctgtgacaaagattaaagaataaacttgggttttttctgaatctcattataa

SEQ ID NO: 279900 - DNA, 3195 bp, Homo sapiens
gattcccgatggagctggccccttcgtggcgaccacaagtcctatcacgccacaagaatctcggcttgttcacctacaaatgaaggccgacgatacttgcagaccgagtctgacatctatgggaccccactcctaccctgcgcctcaggggccgggacaaccgtgacccgtaccgactcctcgcgcctccgggatcaacctcagacccctgtgggctcccggggaagacgcatgcgcactgctccctcctcgtctccttcccttcgttaattagtccatcgcatttcaagtgctggatcctttttgtcccctactgcgtgcggtggcagcttccttgcggaagtggtgaccgtgagagaagaagatggcggcccctgtagtggcgccgcctggtgtggtggttagtcgggctaacaagcgcagcggcgcggggccgggaggcagcggtggcgggggagccagaggggcggaggaggaaccgccgccgcccctacaagcagttctggtggccgatagcttcgatcgccgcttcttccccatctccaaggaccagcctcgggtcctcttgcccctggccaatgtggcattaattgactacactctggaattcctgactgccacaggtgtacaggaaacatttgtcttttgttgctggaaagctgctcaaatcaaagaacatttactgaagtcaaagtggtgccgccctacatctctcaatgtggttcgaataattacatcagagctctatcgatcactgggagatgtcctccgtgatgttgatgccaaggctttggtgcgctctgactttcttctggtgtatggggatgtcatctcaaacatcaatatcaccagagcccttgaggaacacaggttgagacggaagctagaaaaaaatgtttctgtgatgacgatgatcttcaaggagtcatcccccagccacccaactcgttgccacgaagacaatgtggtagtggctgtggatagtaccacaaacagggttctccattttcagaagacccagggtctccggcgttttgcatttcctctgagcctgtttcagggcagtagtgatggagtggaggttcgatatgatttactggattgtcatatcagcatctgttctcctcaggtggcacaactctttacagacaactttgactaccaaactcgagatgactttgtgcgaggtctcttagtgaatgaggagatcctagggaaccagatccacatgcacgtaacagctaaggaatatggtgcccgtgtctccaacctacacatgtactcagctgtctgtgctgacgtcatccgccgatgggtctaccctctcaccccagaggcgaacttcactgacagcaccacccagagctgcactcattcccggcacaacatctaccgagggcctgaggtcagcctgggccatggcagcatcctagaggaaaatgtgctcctgggctctggcactgtcattggcagcaattgctttatcaccaacagtgtcattggccccggctgccacattggtgataacgtggtgctggaccagacctacctgtggcagggtgttcgagtggcggctggagcacagatccatcagtctctgctttgtgacaatgctgaggtcaaggaacgagtgacactgaaaccacgctctgtcctcacttcccaggtggtcgtgggcccaaatatcacgctgcctgagggctcggtgatctctttgcaccctccagatgcagaggaagatgaagatgatggcgagttcagtgatgattctggggctgaccaagaaaaggacaaagtgaagatgaaaggttacaatccagcagaagtaggagctgctggcaagggctacctctggaaagctgcaggcatgaacatggaggaagaggaggaactgcagcagaatctgtggggactcaagatcaacatggaagaagagagtgaaagtgaaagtgagcaaagtatggattctgaggagccggacagccggggaggctcccctcagatggatgacatcaaagtgttccagaatgaagttttaggaacactacagcggggcaaagaggagaacatttcttgtgacaatctcgtcctggaaatcaactctctcaagtaagagcagcccctccctgttctcctcggggtgatcccgggaaggtagaggctttctcgtaagtgttttgtctccaaataggaacctattccttcgacatcccaaatggaaagaccagtagtatttggagcagggagagcattattaagttctagcctcagcatagactttctccttcctaaaccctccccttccatattgttccatccagattcctctccaatgtctatcaaagtcatagttctaagcctgctgaaaggccagtgaaggccctggtgtcaccccagtctccccacaggtatgcctataacataagtctaaaggaggtgatgcaggtactgagccacgtggtcctggagttccccctgcaacagatggattccccgcttgactcaagccgctactgtgccctgctgcttcctctgctaaaggcctggagccctgtttttaggaactacataaagcgcgcagccgaccatttggaagcgttagcagccattgaggacttcttcctagagcatgaagctcttggtatttccatggccaaggtactgatggctttctaccagctggagatcctggctgaggaaacaattctgagctggttcagccaaagagatacaactgacaagggccagcagttgcgcaagaatcaacagctgcagaggttcatccagtggctaaaagaggcagaagaggagtcatctgaagatgactgaagtcacactgcctgctcctttgggtgtgattgagtgccctcctggctcctgggctgggacaagtgaggaactagctgcagagggatgagtgaccaccatccaggctgagactgaaaggagcagaggctggaactacagtattctttcccctgctagcaaccatgtgcctcccatcctgactgtggagttgggatgtggaagtggggctggaacaaagcttctgcctagggaggagctaagcaggcccggcagttggaggaaggccagaggaacagctttgtgctccggctttccctcagggaacagcagagagcagttggctctttctgctgcttgtatatgttaatattaaaagagagtggtgta

SEQ ID NO: 279901 - DNA, 3728 bp, Homo sapiens
gattcccgatggagctggccccttcgtggcgaccacaagtcctatcacgccacaagaatctcggcttgttcacctacaaatgaaggccgacgatacttgcagaccgagtctgacatctatgggaccccactcctaccctgcgcctcaggggccgggacaaccgtgacccgtaccgactcctcgcgcctccgggatcaacctcagacccctgtgggctcccggggaagacgcatgcgcactgctccctcctcgtctccttcccttcgttaattagtccatcgcatttcaagtgctggatcctttttgtcccctactgcgtgcggtggcagcttccttgcggaagtggtgaccgtgagagaagaagatggcggcccctgtagtggcgccgcctggtgtggtggttagtcgggctaacaagcgcagcggcgcggggccgggaggcagcggtggcgggggagccagaggggcggaggaggaaccgccgccgcccctacaagcagttctggtggccgatagcttcgatcgccgcttcttccccatctccaaggaccagcctcgggtcctcttgcccctggccaatgtggcattaattgactacactctggaattcctgactgccacaggtgtacaggaaacatttgtcttttgttgctggaaagctgctcaaatcaaagaacatttactgaagtcaaagtggtgccgccctacatctctcaatgtggttcgaataattacatcagagctctatcgatcactgggagatgtcctccgtgatgttgatgccaaggctttggtgcgctctgactttcttctggtgtatggggatgtcatctcaaacatcaatatcaccagagcccttgaggaacacaggttgagacggaagctagaaaaaaatgtttctgtgatgacgatgatcttcaaggagtcatcccccagccacccaactcgttgccacgaagacaatgtggtagtggctgtggatagtaccacaaacagggttctccattttcagaagacccagggtctccggcgttttgcatttcctctgagcctgtttcagggcagtagtgatggagtggaggttcgatatgatttactggattgtcatatcagcatctgttctcctcaggtggcacaactctttacagacaactttgactaccaaactcgagatgactttgtgcgaggtctcttagtgaatgaggagatcctagggaaccagatccacatgcacgtaacagctaaggaatatggtgcccgtgtctccaacctacacatgtactcagctgtctgtgctgacgtcatccgccgatgggtctaccctctcaccccagaggcgaacttcactgacagcaccacccagagctgcactcattcccggcacaacatctaccgagggcctgaggtcagcctgggccatggcagcatcctagaggaaaatgtgctcctgggctctggcactgtcattggcagcaattgctttatcaccaacagtgtcattggccccggctgccacattggtgataacgtggtgctggaccagacctacctgtggcagggtgttcgagtggcggctggagcacagatccatcagtctctgctttgtgacaatgctgaggtcaaggaacgagtgacactgaaaccacgctctgtcctcacttcccaggtggtcgtgggcccaaatatcacgctgcctgagggctcggtgatctctttgcaccctccagatgcagaggaagatgaagatgatggcgagttcagtgatgattctggggctgaccaagaaaaggacaaagtgaagatgaaaggttacaatccagcagaagtaggagctgctggcaagggctacctctggaaagctgcaggcatgaacatggaggaagaggaggaactgcagcagaatctgtggggactcaagatcaacatggaagaagagagtgaaagtgaaagtgagcaaagtatggattctgaggagccggacagccggggaggctcccctcagatggatgacatcaaagtgttccagaatgaagttttaggaacactacagcggggcaaagaggagaacatttcttgtgacaatctcgtcctggaaatcaactctctcaagtaagagcagcccctccctgttctcctcggggtgatcccgggaaggtagaggctttctcgtaagtgttttgtctccaaataggaacctattccttcgacatcccaaatggaaagaccagtagtatttggagcagggagagcattattaagttctagcctcagcatagactttctccttcctaaaccctccccttccatattgttccatccagattcctctccaatgtctatcaaagtcatagttctaagcctgctgaaaggccagtgaaggccctggtgtcaccccagtctccccacaggtatgcctataacataagtctaaaggaggtgatgcaggtactgagccacgtggtcctggagttccccctgcaacagatggattccccgcttgactcaagccgctactgtgccctgctgcttcctgtgagcaaagattggagctgagtacaagggattgggtacaggcaaaggaaatcaggagtagactgtcttgttatattgggtgtatgtcacttctggttcctttttccttgcctctggaagctggttgggctctagagcagccttggctggttcagaggggtcagattgagttcaatactgactggcctttgagactccaggatttcataccatcctaggcccacaaaggtatattcagaatggacctggacattcagactctatggcagcaatttgacccaacacaagatcagcctctggggtgggaataggtattttgaggcagcctatagcatctgatcccctttcaccttccctaaggaatctctttttcccaaaccctgtcaacaactcccacgtccctctgacataattccacagaacctgtatcatctcccttttgtccacccatgtcatcagtatggatttgcttggatgtccaggtataggtgaatgcttaggaatatactgcagctcccttctttcttccatagctgctaaaggcctggagccctgtttttaggaactacataaagcgcgcagccgaccatttggaagcgttagcagccattgaggacttcttcctagagcatgaagctcttggtatttccatggccaaggtactgatggctttctaccagctggagatcctggctgaggaaacaattctgagctggttcagccaaagagatacaactgacaagggccagcagttgcgcaagaatcaacagctgcagaggttcatccagtggctaaaagaggcagaagaggagtcatctgaagatgactgaagtcacactgcctgctcctttgggtgtgattgagtgccctcctggctcctgggctgggacaagtgaggaactagctgcagagggatgagtgaccaccatccaggctgagactgaaaggagcagaggctggaactacagtattctttcccctgctagcaaccatgtgcctcccatcctgactgtggagttgggatgtggaagtggggctggaacaaagcttctgcctagggaggagctaagcaggcccggcagttggaggaaggccagaggaacagctttgtgctccggctttccctcagggaacagcagagagcagttggctctttctgctgcttgtatatgttaatattaaaagagagtggtgta

SEQ ID NO: 279902 - DNA, 2867 bp, Homo sapiens
gattcccgatggagctggccccttcgtggcgaccacaagtcctatcacgccacaagaatctcggcttgttcacctacaaatgaaggccgacgatacttgcagaccgagtctgacatctatgggaccccactcctaccctgcgcctcaggggccgggacaaccgtgacccgtaccgactcctcgcgcctccgggatcaacctcagacccctgtgggctcccggggaagacgcatgcgcactgctccctcctcgtctccttcccttcgttaattagtccatcgcatttcaagtgctggatcctttttgtcccctactgcgtgcggtggcagcttccttgcggaagtggtgaccgtgagagaagaagatggcggcccctgtagtggcgccgcctggtgtggtggttagtcgggctaacaagcgcagcggcgcggggccgggaggcagcggtggcgggggagccagaggggcggaggaggaaccgccgccgcccctacaagcagttctggtggccgatagcttcgatcgccgcttcttccccatctccaaggaccagcctcgggtcctcttgcccctggccaatgtggcattaattgactacactctggaattcctgactgccacaggtgtacaggaaacatttgtcttttgttgctggaaagctgctcaaatcaaagaacatttactgaagtcaaagtggtgccgccctacatctctcaatgtggttcgaataattacatcagagctctatcgatcactgggagatgtcctccgtgatgttgatgccaaggctttggtgcgctctgactttcttctggtgtatggggatgtcatctcaaacatcaatatcaccagagcccttgaggaacacaggttgagacggaagctagaaaaaaatgtttctgtgatgacgatgatcttcaaggagtcatcccccagccacccaactcgttgccacgaagacaatgtggtagtggctgtggatagtaccacaaacagggttctccattttcagaagacccagggtctccggcgttttgcatttcctctgagcctgtttcagggcagtagtgatggagtggaggttcgatatgatttactggattgtcatatcagcatctgttctcctcaggtggcacaactctttacagacaactttgactaccaaactcgagatgactttgtgcgaggtctcttagtgaatgaggagatcctagggaaccagatccacatgcacgtaacagctaaggaatatggtgcccgtgtctccaacctacacatgtactcagctgtctgtgctgacgtcatccgccgatgggtctaccctctcaccccagaggcgaacttcactgacagcaccacccagagctgcactcattcccggcacaacatctaccgagggcctgaggtcagcctgggccatggcagcatcctagaggaaaatgtgctcctgggctctggcactgtcattggcagcaattgctttatcaccaacagtgtcattggccccggctgccacattggtgataacgtggtgctggaccagacctacctgtggcagggtgttcgagtggcggctggagcacagatccatcagtctctgctttgtgacaatgctgaggtcaaggaacgagtgacactgaaaccacgctctgtcctcacttcccaggtggtcgtgggcccaaatatcacgctgcctgagggctcggtgatctctttgcaccctccagatgcagaggaagatgaagatgatggcgagttcagtgatgattctggggctgaccaagaaaaggacaaagtgaagatgaaaggttacaatccagcagaagtaggagctgctggcaagggctacctctggaaagctgcaggcatgaacatggaggaagaggaggaactgcagcagaatctgtggggactcaagatcaacatggaagaagagagtgaaagtgaaagtgagcaaagtatggattctgaggagccggacagccggggaggctcccctcagatggatgacatcaaagtgttccagaatgaagttttaggaacactacagcggggcaaagaggagaacatttcttgtgacaatctcgtcctggaaatcaactctctcaagtatgcctataacataagtctaaaggaggtgatgcaggtactgagccacgtggtcctggagttccccctgcaacagatggattccccgcttgactcaagccgctactgtgccctgctgcttcctgaactacataaagcgcgcagccgaccatttggaagcgttagcagccattgaggacttcttcctagagcatgaagctcttggtatttccatggccaaggtactgatggctttctaccagctggagatcctggctgaggaaacaattctgagctggttcagccaaagagatacaactgacaagggccagcagttgcgcaagaatcaacagctgcagaggttcatccagtggctaaaagaggcagaagaggagtcatctgaagatgactgaagtcacactgcctgctcctttgggtgtgattgagtgccctcctggctcctgggctgggacaagtgaggaactagctgcagagggatgagtgaccaccatccaggctgagactgaaaggagcagaggctggaactacagtattctttcccctgctagcaaccatgtgcctcccatcctgactgtggagttgggatgtggaagtggggctggaacaaagcttctgcctagggaggagctaagcaggcccggcagttggaggaaggccagaggaacagctttgtgctccggctttccctcagggaacagcagagagcagttggctctttctgctgcttgtatatgttaatattaaaagagagtggtgta

SEQ ID NO: 279903 - DNA, 2972 bp, Homo sapiens
gattcccgatggagctggccccttcgtggcgaccacaagtcctatcacgccacaagaatctcggcttgttcacctacaaatgaaggccgacgatacttgcagaccgagtctgacatctatgggaccccactcctaccctgcgcctcaggggccgggacaaccgtgacccgtaccgactcctcgcgcctccgggatcaacctcagacccctgtgggctcccggggaagacgcatgcgcactgctccctcctcgtctccttcccttcgttaattagtccatcgcatttcaagtgctggatcctttttgtcccctactgcgtgcggtggcagcttccttgcggaagtggtgaccgtgagagaagaagatggcggcccctgtagtggcgccgcctggtgtggtggttagtcgggctaacaagcgcagcggcgcggggccgggaggcagcggtggcgggggagccagaggggcggaggaggaaccgccgccgcccctacaagcagttctggtggccgatagcttcgatcgccgcttcttccccatctccaaggaccagcctcgggtcctcttgcccctggccaatgtggcattaattgactacactctggaattcctgactgccacaggtgtacaggaaacatttgtcttttgttgctggaaagctgctcaaatcaaagaacatttactgaagtcaaagtggtgccgccctacatctctcaatgtggttcgaataattacatcagagctctatcgatcactgggagatgtcctccgtgatgttgatgccaaggctttggtgcgctctgactttcttctggtgtatggggatgtcatctcaaacatcaatatcaccagagcccttgaggaacacaggttgagacggaagctagaaaaaaatgtttctgtgatgacgatgatcttcaaggagtcatcccccagccacccaactcgttgccacgaagacaatgtggtagtggctgtggatagtaccacaaacagggttctccattttcagaagacccagggtctccggcgttttgcatttcctctgagcctgtttcagggcagtagtgatggagtggaggttcgatatgatttactggattgtcatatcagcatctgttctcctcaggtggcacaactctttacagacaactttgactaccaaactcgagatgactttgtgcgaggtctcttagtgaatgaggagatcctagggaaccagatccacatgcacgtaacagctaaggaatatggtgcccgtgtctccaacctacacatgtactcagctgtctgtgctgacgtcatccgccgatgggtctaccctctcaccccagaggcgaacttcactgacagcaccacccagagctgcactcattcccggcacaacatctaccgagggcctgaggtcagcctgggccatggcagcatcctagaggaaaatgtgctcctgggctctggcactgtcattggcagcaattgctttatcaccaacagtgtcattggccccggctgccacattggtgataacgtggtgctggaccagacctacctgtggcagggtgttcgagtggcggctggagcacagatccatcagtctctgctttgtgacaatgctgaggtcaaggaacgagtgacactgaaaccacgctctgtcctcacttcccaggtggtcgtgggcccaaatatcacgctgcctgagggctcggtgatctctttgcaccctccagatgcagaggaagatgaagatgatggcgagttcagtgatgattctggggctgaccaagaaaaggacaaagtgaagatgaaaggttacaatccagcagaagtaggagctgctggcaagggctacctctggaaagctgcaggcatgaacatggaggaagaggaggaactgcagcagaatctgtggggactcaagatcaacatggaagaagagagtgaaagtgaaagtgagcaaagtatggattctgaggagccggacagccggggaggctcccctcagatggatgacatcaaagtgttccagaatgaagttttaggaacactacagcggggcaaagaggagaacatttcttgtgacaatctcgtcctggaaatcaactctctcaagtatgcctataacataagtctaaaggaggtgatgcaggtactgagccacgtggtcctggagttccccctgcaacagatggattccccgcttgactcaagccgctactgtgccctgctgcttcctctgctaaaggcctggagccctgtttttaggaactacataaagcgcgcagccgaccatttggaagcgttagcagccattgaggacttcttcctagagcatgaagctcttggtatttccatggccaaggtactgatggctttctaccagctggagatcctggctgaggaaacaattctgagctggttcagccaaagagatacaactgacaagggccagcagttgcgcaagaatcaacagctgcagaggttcatccagtggctaaaagaggcagaagaggagtcatctgaagatgactgaagtcacactgcctgctcctttgggtgtgattgagtgccctcctggctcctgggctgggacaagtgaggaactagctgcagagggatgagtgaccaccatccaggctgagactgaaaggagcagaggctggaactacagtattctttcccctgctagcaaccatgtgcctcccatcctgactgtggagttgggatgtggaagtggggctggaacaaagcttctgcctagggaggagctaagcaggcccggcagttggaggaaggccagaggaacagctttgtgctccggctttccctcagggaacagcagagagcagttggctctttctgctgcttgtatatgttaatattaaaagagagtggtgtaaaaaaaaaaaaccaaatcaaacccgcaaccactacaaagcagacaacagcaaaaagcacgacctcaaacagagagg

SEQ ID NO: 279904 - DNA, 3043 bp, Homo sapiens
gattcccgatggagctggccccttcgtggcgaccacaagtcctatcacgccacaagaatctcggcttgttcacctacaaatgaaggccgacgatacttgcagaccgagtctgacatctatgggaccccactcctaccctgcgcctcaggggccgggacaaccgtgacccgtaccgactcctcgcgcctccgggatcaacctcagacccctgtgggctcccggggaagacgcatgcgcactgctccctcctcgtctccttcccttcgttaattagtccatcgcatttcaagtgctggatcctttttgtcccctactgcgtgcggtggcagcttccttgcggaagtggtgaccgtgagagaagaagatggcggcccctgtagtggcgccgcctggtgtggtggttagtcgggctaacaagcgcagcggcgcggggccgggaggcagcggtggcgggggagccagaggggcggaggaggaaccgccgccgcccctacaagcagttctggtggccgatagcttcgatcgccgcttcttccccatctccaaggaccagcctcgggtcctcttgcccctggccaatgtggcattaattgactacactctggaattcctgactgccacaggtgtacaggaaacatttgtcttttgttgctggaaagctgctcaaatcaaagaacatttactgaagtcaaagtggtgccgccctacatctctcaatgtggttcgaataattacatcagagctctatcgatcactgggagatgtcctccgtgatgttgatgccaaggctttggtgcgctctgactttcttctggtgtatggggatgtcatctcaaacatcaatatcaccagagcccttgaggaacacaggttgagacggaagctagaaaaaaatgtttctgtgatgacgatgatcttcaaggagtcatcccccagccacccaactcgttgccacgaagacaatgtggtagtggctgtggatagtaccacaaacagggttctccattttcagaagacccagggtctccggcgttttgcatttcctctgagcctgtttcagggcagtagtgatggagtggaggttcgatatgatttactggattgtcatatcagcatctgttctcctcaggtggcacaactctttacagacaactttgactaccaaactcgagatgactttgtgcgaggtctcttagtgaatgaggagatcctagggaaccagatccacatgcacgtaacagctaaggaatatggtgcccgtgtctccaacctacacatgtactcagctgtctgtgctgacgtcatccgccgatgggtctaccctctcaccccagaggcgaacttcactgacagcaccacccagagctgcactcattcccggcacaacatctaccgagggcctgaggtcagcctgggccatggcagcatcctagaggaaaatgtgctcctgggctctggcactgtcattggcagcaattgctttatcaccaacagtgtcattggccccggctgccacattggtgataacgtggtgctggaccagacctacctgtggcagggtgttcgagtggcggctggagcacagatccatcagtctctgctttgtgacaatgctgaggtcaaggaacgagtgacactgaaaccacgctctgtcctcacttcccaggtggtcgtgggcccaaatatcacgctgcctgagggctcggtgatctctttgcaccctccagatgcagaggaagatgaagatgatggcgagttcagtgatgattctggggctgaccaagaaaaggacaaagtgaagatgaaaggttacaatccagcagaagtaggagctgctggcaagggctacctctggaaagctgcaggcatgaacatggaggaagaggaggaactgcagcagaatctgtggggactcaagatcaacatggaagaagagagtgaaagtgaaagtgagcaaagtatggattctgaggagccggacagccggggaggctcccctcagatggatgacatcaaagtgttccagaatgaagttttaggaacactacagcggggcaaagaggagaacatttcttgtgacaatctcgtcctggaaatcaactctctcaagtatgcctataacataagtctaaaggaggtgatgcaggtactgagccacgtggtcctggagttccccctgcaacagatggattccccgcttgactcaagccgctactgtgccctgctgcttcctctgctaaaggcctggagccctgtttttaggaactacataaagcgcgcagccgaccatttggaagcgttagcagccattgaggacttcttcctagagcatgaagctcttggtatttccatggccaaggtactgatggctttctaccagctggagatcctggctgaggaaacaattctgagctggttcagccaaagagatacaactgacaagggccagcagttgcgcaagaatcaacagctgcagaggttcatccagtggctaaaagaggcagaagaggagtcatctgaagatgactgaagtcacactgcctgctcctttgggtgtgattgagtgccctcctggctcctgggctgggacaagtgaggaactagctgcagagggatgagtgaccaccatccaggctgagactgaaaggagcagaggctggaactacagtattctttcccctgctagcaaccatgtgcctcccatcctgactgtggagttgggatgtggaagtggggctggaacaaagcttctgcctagggaggagctaagcaggcccggcagttggaggaaggccagaggaacagcatggcgctgccgttctccactacggtacacgcatgaccatctggtccggacgtgcttgatatctgaacattacctgagtagtgaggtatttccactaacctctgagttgagacggaacgccatcaacaagagcctgtccttatcataaccgcacaacgttacacctgagacgggaactcatctaccgccgtggcgccctggaatggccttcgatctgccctggtggtttaggccttc

SEQ ID NO: 279905 - DNA, 3156 bp, Homo sapiens
gattcccgatggagctggccccttcgtggcgaccacaagtcctatcacgccacaagaatctcggcttgttcacctacaaatgaaggccgacgatacttgcagaccgagtctgacatctatgggaccccactcctaccctgcgcctcaggggccgggacaaccgtgacccgtaccgactcctcgcgcctccgggatcaacctcagacccctgtgggctcccggggaagacgcatgcgcactgctccctcctcgtctccttcccttcgttaattagtccatcgcatttcaagtgctggatcctttttgtcccctactgcgtgcggtggcagcttccttgcggaagtggtgaccgtgagagaagaagatggcggcccctgtagtggcgccgcctggtgtggtggttagtcgggctaacaagcgcagcggcgcggggccgggaggcagcggtggcgggggagccagaggggcggaggaggaaccgccgccgcccctacaagcagttctggtggccgatagcttcgatcgccgcttcttccccatctccaaggaccagcctcgggtcctcttgcccctggccaatgtggcattaattgactacactctggaattcctgactgccacaggtgtacaggaaacatttgtcttttgttgctggaaagctgctcaaatcaaagaacatttactgaagtcaaagtggtgccgccctacatctctcaatgtggttcgaataattacatcagagctctatcgatcactgggagatgtcctccgtgatgttgatgccaaggctttggtgcgctctgactttcttctggtgtatggggatgtcatctcaaacatcaatatcaccagagcccttgaggaacacaggttgagacggaagctagaaaaaaatgtttctgtgatgacgatgatcttcaaggagtcatcccccagccacccaactcgttgccacgaagacaatgtggtagtggctgtggatagtaccacaaacagggttctccattttcagaagacccagggtctccggcgttttgcatttcctctgagcctgtttcagggcagtagtgatggagtggaggttcgatatgatttactggattgtcatatcagcatctgttctcctcaggtggcacaactctttacagacaactttgactaccaaactcgagatgactttgtgcgaggtctcttagtgaatgaggaggtgagaaaagtcttccaatgcctctttaggagagaggagaaggctatgattgtatctcatgctggtaacttttgatcttttttgtattttattgaggcttaggagggaggaaaagcaggggacaggaggaacagtacacaaagaagaatctttgtggcagtgagaggcagaggggaacttaaaaggattagaaaagttgtacttgggggcattcttcctgtctttcttgcttaggtgacctccctttccttctcattcagatcctagggaaccagatccacatgcacgtaacagctaaggaatatggtgcccgtgtctccaacctacacatgtactcagctgtctgtgctgacgtcatccgccgatgggtctaccctctcaccccagaggcgaacttcactgacagcaccacccagagctgcactcattcccggcacaacatctaccgagggcctgaggtcagcctgggccatggcagcatcctagaggaaaatgtgctcctgggctctggcactgtcattggcagcaattgctttatcaccaacagtgtcattggccccggctgccacattggtgataacgtggtgctggaccagacctacctgtggcagggtgttcgagtggcggctggagcacagatccatcagtctctgctttgtgacaatgctgaggtcaaggaacgagtgacactgaaaccacgctctgtcctcacttcccaggtggtcgtgggcccaaatatcacgctgcctgagggctcggtgatctctttgcaccctccagatgcagaggaagatgaagatgatggcgagttcagtgatgattctggggctgaccaagaaaaggacaaagtgaagatgaaaggttacaatccagcagaagtaggagctgctggcaagggctacctctggaaagctgcaggcatgaacatggaggaagaggaggaactgcagcagaatctgtggggactcaagatcaacatggaagaagagagtgaaagtgaaagtgagcaaagtatggattctgaggagccggacagccggggaggctcccctcagatggatgacatcaaagtgttccagaatgaagttttaggaacactacagcggggcaaagaggagaacatttcttgtgacaatctcgtcctggaaatcaactctctcaagtatgcctataacataagtctaaaggaggtgatgcaggtactgagccacgtggtcctggagttccccctgcaacagatggattccccgcttgactcaagccgctactgtgccctgctgcttcctctgctaaaggcctggagccctgtttttaggaactacataaagcgcgcagccgaccatttggaagcgttagcagccattgaggacttcttcctagagcatgaagctcttggtatttccatggccaaggtactgatggctttctaccagctggagatcctggctgaggaaacaattctgagctggttcagccaaagagatacaactgacaagggccagcagttgcgcaagaatcaacagctgcagaggttcatccagtggctaaaagaggcagaagaggagtcatctgaagatgactgaagtcacactgcctgctcctttgggtgtgattgagtgccctcctggctcctgggctgggacaagtgaggaactagctgcagagggatgagtgaccaccatccaggctgagactgaaaggagcagaggctggaactacagtattctttcccctgctagcaaccatgtgcctcccatcctgactgtggagttgggatgtggaagtggggctggaacaaagcttctgcctagggaggagctaagcaggcccggcagttggaggaaggccagaggaacagctttgtgctccggctttccctcagggaacagcagagagcagttggctctttctgctgcttgtatatgttaatattaaaagagagtggtgta

SEQ ID NO: 279906 - DNA, 2505 bp, Homo sapiens
gattcccgatggagctggccccttcgtggcgaccacaagtcctatcacgccacaagaatctcggcttgttcacctacaaatgaaggccgacgatacttgcagaccgagtctgacatctatgggaccccactcctaccctgcgcctcaggggccgggacaaccgtgacccgtaccgactcctcgcgcctccgggatcaacctcagacccctgtgggctcccggggaagacgcatgcgcactgctccctcctcgtctccttcccttcgttaattagtccatcgcatttcaagtgctggatcctttttgtcccctactgcgtgcggtggcagcttccttgcggaagtggtgaccgtgagagaagaagatggcggcccctgtagtggcgccgcctggtgtggtggttagtcgggctaacaagcgcagcggcgcggggccgggaggcagcggtggcgggggagccagaggggcggaggaggaaccgccgccgcccctacaagcagttctggtggccgatagcttcgatcgccgcttcttccccatctccaaggaccagcctcgggtcctcttgcccctggccaatgtggcattaattgactacactctggaattcctgactgccacaggtgtacaggaaacatttgtcttttgttgctggaaagctgctcaaatcaaagaacatttactgaagtcaaagtggtgccgccctacatctctcaatgtggttcgaataattacatcagagctctatcgatcactgggagatgtcctccgtgatgttgatgccaaggctttggtgcgctctgactttcttctggtgtatggggatgtcatctcaaacatcaatatcaccagagcccttgaggaacacaggttgagacggaagctagaaaaaaatgtttctgtgatgacgatgatcttcaaggagtcatcccccagccacccaactcgttgccacgaagacaatgtggtagtggctgtggatagtaccacaaacagggttctccattttcagaagacccagggtctccggcgttttgcatttcctctgagcctgtttcagggcagtagtgatggagtggaggttcgatatgatttactggattgtcatatcagcatctgttctcctcaggtgataacgtggtgctggaccagacctacctgtggcagggtgttcgagtggcggctggagcacagatccatcagtctctgctttgtgacaatgctgaggtcaaggaacgagtgacactgaaaccacgctctgtcctcacttcccaggtggtcgtgggcccaaatatcacgctgcctgagggctcggtgatctctttgcaccctccagatgcagaggaagatgaagatgatggcgagttcagtgatgattctggggctgaccaagaaaaggacaaagtgaagatgaaaggttacaatccagcagaagtaggagctgctggcaagggctacctctggaaagctgcaggcatgaacatggaggaagaggaggaactgcagcagaatctgtggggactcaagatcaacatggaagaagagagtgaaagtgaaagtgagcaaagtatggattctgaggagccggacagccggggaggctcccctcagatggatgacatcaaagtgttccagaatgaagttttaggaacactacagcggggcaaagaggagaacatttcttgtgacaatctcgtcctggaaatcaactctctcaagtatgcctataacataagtctaaaggaggtgatgcaggtactgagccacgtggtcctggagttccccctgcaacagatggattccccgcttgactcaagccgctactgtgccctgctgcttcctctgctaaaggcctggagccctgtttttaggaactacataaagcgcgcagccgaccatttggaagcgttagcagccattgaggacttcttcctagagcatgaagctcttggtatttccatggccaaggtactgatggctttctaccagctggagatcctggctgaggaaacaattctgagctggttcagccaaagagatacaactgacaagggccagcagttgcgcaagaatcaacagctgcagaggttcatccagtggctaaaagaggcagaagaggagtcatctgaagatgactgaagtcacactgcctgctcctttgggtgtgattgagtgccctcctggctcctgggctgggacaagtgaggaactagctgcagagggatgagtgaccaccatccaggctgagactgaaaggagcagaggctggaactacagtattctttcccctgctagcaaccatgtgcctcccatcctgactgtggagttgggatgtggaagtggggctggaacaaagcttctgcctagggaggagctaagcaggcccggcagttggaggaaggccagaggaacagctttgtgctccggctttccctcagggaacagcagagagcagttggctctttctgctgcttgtatatgttaatattaaaagagagtggtgta

SEQ ID NO: 279907 - DNA, 1401 bp, Homo sapiens
ccaactacggctaggtacgaggcgggtgataacgtggtgctggaccagacctacctgtggcagggtgttcgagtggcggctggagcacagatccatcagtctctgctttgtgacaatgctgaggtcaaggaacgagtgacactgaaaccacgctctgtcctcacttcccaggtggtcgtgggcccaaatatcacgctgcctgagggctcggtgatctctttgcaccctccagatgcagaggaagatgaagatgatggcgagttcagtgatgattctggggctgaccaagaaaaggacaaagtgaagatgaaaggttacaatccagcagaagtaggagctgctggcaagggctacctctggaaagctgcaggcatgaacatggaggaagaggaggaactgcagcagaatctgtggggactcaagatcaacatggaagaagagagtgaaagtgaaagtgagcaaagtatggattctgaggagccggacagccggggaggctcccctcagatggatgacatcaaagtgttccagaatgaagttttaggaacactacagcggggcaaagaggagaacatttcttgtgacaatctcgtcctggaaatcaactctctcaagtatgcctataacataagtctaaaggaggtgatgcaggtactgagccacgtggtcctggagttccccctgcaacagatggattccccgcttgactcaagccgctactgtgccctgctgcttcctctgctaaaggcctggagccctgtttttaggaactacataaagcgcgcagccgaccatttggaagcgttagcagccattgaggacttcttcctagagcatgaagctcttggtatttccatggccaaggtactgatggctttctaccagctggagatcctggctgaggaaacaattctgagctggttcagccaaagagatacaactgacaagggccagcagttgcgcaagaatcaacagctgcagaggttcatccagtggctaaaagaggcagaagaggagtcatctgaagatgactgaagtcacactgcctgctcctttgggtgtgattgagtgccctcctggctcctgggctgggacaagtgaggaactagctgcagagggatgagtgaccaccatccaggctgagactgaaaggagcagaggctggaactacagtattctttcccctgctagcaaccatgtgcctcccatcctgactgtggagttgggatgtggaagtggggctggaacaaagcttctgcctagggaggagctaagcaggcccggcagttggaggaaggccagaggaacagctttgtgctccggctttccctcagggaacagcagagagcagttggctctttctgctgcttgtatatgttaatattaaaagagagtggtgta

SEQ ID NO: 279908 - DNA, 1227 bp, Homo sapiens
  misc_feature (15)..(15): n is a, c, g, or t
tacgtcgataccccncgggtattgtagcgaggctcggtgatctctttgcaccctccagatgcagaggaagatgaagatgatggcgagttcagtgatgattctggggctgaccaagaaaaggacaaagtgaagatgaaaggttacaatccagcagaagtaggagctgctggcaagggctacctctggaaagctgcaggcatgaacatggaggaagaggaggaactgcagcagaatctgtggggactcaagatcaacatggaagaagagagtgaaagtgaaagtgagcaaagtatggattctgaggagccggacagccggggaggctcccctcagatggatgacatcaaagtgttccagaatgaagttttaggaacactacagcggggcaaagaggagaacatttcttgtgacaatctcgtcctggaaatcaactctctcaagtatgcctataacataagtctaaaggaggtgatgcaggtactgagccacgtggtcctggagttccccctgcaacagatggattccccgcttgactcaagccgctactgtgccctgctgcttcctctgctaaaggcctggagccctgtttttaggaactacataaagcgcgcagccgaccatttggaagcgttagcagccattgaggacttcttcctagagcatgaagctcttggtatttccatggccaaggtactgatggctttctaccagctggagatcctggctgaggaaacaattctgagctggttcagccaaagagatacaactgacaagggccagcagttgcgcaagaatcaacagctgcagaggttcatccagtggctaaaagaggcagaagaggagtcatctgaagatgactgaagtcacactgcctgctcctttgggtgtgattgagtgccctcctggctcctgggctgggacaagtgaggaactagctgcagagggatgagtgaccaccatccaggctgagactgaaaggagcagaggctggaactacagtattctttcccctgctagcaaccatgtgcctcccatcctgactgtggagttgggatgtggaagtggggctggaacaaagcttctgcctagggaggagctaagcaggcccggcagttggaggaaggccagaggaacagctttgtgctccggctttccctcagggaacagcagagagcagttggctctttctgctgcttgtatatgttaatattaaaagagagtggtgta

SEQ ID NO: 279909 - DNA, 1263 bp, Homo sapiens
gattcccgatggagctggccccttcgtggcgaccacaagtcctatcacgccacaagaatctcggcttgttcacctacaaatgaaggccgacgatacttgcagaccgagtctgacatctatgggaccccactcctaccctgcgcctcaggggccgggacaaccgtgacccgtaccgactcctcgcgcctccgggatcaacctcagacccctgtgggctcccggggaagacgcatgcgcactgctccctcctcgtctccttcccttcgttaattagtccatcgcatttcaagtgctggatcctttttgtcccctactgcgtgcggtggcagcttccttgcggaagtggtgaccgtgagagaagaagatggcggcccctgtagtggcgccgcctggtgtggtggttagtcgggctaacaagcgcagcggcgcggggccgggaggcagcggtggcgggggagccagaggggcggaggaggaaccgccgccgcccctacaagcagttctggtggccgatagcttcgatcgccgcttcttccccatctccaaggaccagcctcgggtgagcgccgcgcacgcgagcagccagagggcaggaagggtggcagggctggagcaagttctcatttcggctaactacaacagcatgcccttgaaggacctgcgtctatgctgttatcctaaaaccggatgcagagggactgtctaaaccctgatgactgctgaccaagttagtggccggcagatttgggcattcgtaatgctgtccacctcgggtttgaaaggaatgaagagagctaaatgtagaaacagcgcttgagagaagccttcacgcggggattcagtgcccctagaagaggctgcgccgcttttaaccttgccgatgacggttgcttaggtcctcttgcccctggccaatgtggcattaattgactacactctggaattcctgactgccacaggtgtacaggaaacatttgtcttttgttgctggaaagctgctcaaatcaaagaacatttactgtaaggccctgcaacttttctttccatgtttcgccatctttttccagttttttcaggatgaatgtaactaaggggaaatgtgagaggggaaaaatgtgtctacttagatgtcattgtaagttctaagggtattttctacacttatcaggaggtgagcagctgaaactttgtatctgtctgtcttgggttttctgtgacaaagattaaagaataaacttgggttttttctgaatctcattataa

SEQ ID NO: 279910 - DNA, 2348 bp, Homo sapiens
gagaggtgtagcagaaagcagtgccccaggcctccacgcgacggtgaagcaggaaccaggggctgccagcagagcagcccaggtgcgtcgccttagggacagagctgccaagtgccgagctggggctgccagagccgagccgggaacggcatttgccagagccgaggcggaagccggagcatttgggggacgggaccgcgggaacccggaaacgcctgggctgcaccgagctggcggtggctacggcgacgggagccggcggcgctgcgggtcagcggtcgcgtaggacccagcggactcggcagcctggggcgcccggcggagctgaaccgcggcccccggtggtgggctcagccggtcgagctgcgcgggaggcaaatgaagataaaacaatgttcgccaacctaaaatacgtttccctgggaattttggtctttcagactaccagtttggttctaacaatgcgttattccagaactttaaaagaagaaggacctcgttatctatcttctacagcagtggttgttgctgaacttttgaagataatggcctgcattttattggtctacaaagacagcaaatgtagtctaagagcactgaatcgagtactacatgatgaaattcttaataaacctatggaaacacttaaacttgctattccatcagggatctatactcttcagaataatttactgtatgtggcactatcaaatctagatgcagctacttatcaggtcacgtatcagttaaaaattcttacaacagcattattttctgtgtctatgcttagtaaaaaattgggtgtataccagtggctgtccctagtaattttgatgacaggagttgcttttgtacagtggccctcagattctcagcttgattctaaggaactttcagctggttctcaatttgtaggactcatggcagttctcacagcatgtttttcaagtggctttgctggggtttactttgagaaaatcttaaaagaaacaaaacaatcagtgtggataagaaatattcagcttggtttctttggaagtatatttggattaatgggtgtatacatttatgatggagaactggtatcaaagaatggattttttcagggatataaccgactgacctggatagtagttgttcttcaggcacttggaggccttgtaatagctgctgttattaagtatgcagataatattttaaaaggatttgcaacctctttatcgataatattatcaacattgatctcctatttttggcttcaagattttgtgccaaccagtgtctttttccttggagccatccttgtaataacagctacttttttgtatggttatgatcccaaacctgcaggaaatcccactaaagcatagttgtatactatctttaactggtttttcacgatggggcactaggaatctcgacattaatcttgcacagaggacttctacagagtctgagaagatatcatcatgctgaatctgatcatactgttttttaaaagtttaaggataagacatgtgtatatgtaacaaaacacattgcatctagaaatcaaaacttgaaagtatttccagggattaggattagaaggaatattagaggaaacttgaaatctgagtttaaaaagattttacctttttgattgctgcagaaatgtcctatgcactctttgcaagagcacacaacaaatgtcagataccaatttttgcaaattagatttaatcttattaaatgtttttatcttactctttctgtacagatatatcaaatcacatgaaatatttaaagtttgaaaattataattacctataaagctgtgaaaaatagaagtataatttgaaaaaacatttcacttatcagagatttttatatttatacaaaagattactaaatgaaggattgctaaatgtttttggttcaattacataaaaattaatattctgggtctgatctgtcagagaataaatatcaaatctaaatttaatgtagagatacatactatttctccatatgaattttaagatattttagtgcttcaagactgctgaaagcaatccagttgctcctgtgctagatggtagccagagaattttatagtaatggaggttagcccttaatctcttcattgcatttcatttctgtaaatcagattaagtccttaatattattttaaattaaaatttgtgtgtaattgccattaaattttcaaaatgtaatttaaaaggattaaatactcatttaataatttaaaataattattgtataatatctacatttggagaattttgaactatcaagcatatactgtatacagttagaaagttattaaatgaacattttactcattg

SEQ ID NO: 279911 - DNA, 2033 bp, Homo sapiens
ccagttgaaaagatttattctgaaagactcttgccttctcaggcctttggttagagaaagcaaatgaagataaaacaatgttcgccaacctaaaatacgtttccctgggaattttggtctttcagactaccagtttggttctaacaatgcgttattccagaactttaaaagaagaaggacctcgttatctatcttctacagcagtggttgttgctgaacttttgaagataatggcctgcattttattggtctacaaagacagcaaatgtagtctaagagcactgaatcgagtactacatgatgaaattcttaataaacctatggaaacacttaaacttgctattccatcagggatctatactcttcagaataatttactgtatgtggcactatcaaatctagatgcagctacttatcaggtcacgtatcagttaaaaattcttacaacagcattattttctgtgtctatgcttagtaaaaaattgggtgtataccagtggctgtccctagtaattttgatgacaggagttgcttttgtacagtggccctcagattctcagcttgattctaaggaactttcagctggttctcaatttgtaggactcatggcagttctcacagcatgtttttcaagtggctttgctggggtttactttgagaaaatcttaaaagaaacaaaacaatcagtgtggataagaaatattcagcttggtttctttggaagtatatttggattaatgggtgtatacatttatgatggagaactggtatcaaagaatggattttttcagggatataaccgactgacctggatagtagttgttcttcaggcacttggaggccttgtaatagctgctgttattaagtatgcagataatattttaaaaggatttgcaacctctttatcgataatattatcaacattgatctcctatttttggcttcaagattttgtgccaaccagtgtctttttccttggagccatccttgtaataacagctacttttttgtatggttatgatcccaaacctgcaggaaatcccactaaagcatagttgtatactatctttaactggtttttcacgatggggcactaggaatctcgacattaatcttgcacagaggacttctacagagtctgagaagatatcatcatgctgaatctgatcatactgttttttaaaagtttaaggataagacatgtgtatatgtaacaaaacacattgcatctagaaatcaaaacttgaaagtatttccagggattaggattagaaggaatattagaggaaacttgaaatctgagtttaaaaagattttacctttttgattgctgcagaaatgtcctatgcactctttgcaagagcacacaacaaatgtcagataccaatttttgcaaattagatttaatcttattaaatgtttttatcttactctttctgtacagatatatcaaatcacatgaaatatttaaagtttgaaaattataattacctataaagctgtgaaaaatagaagtataatttgaaaaaacatttcacttatcagagatttttatatttatacaaaagattactaaatgaaggattgctaaatgtttttggttcaattacataaaaattaatattctgggtctgatctgtcagagaataaatatcaaatctaaatttaatgtagagatacatactatttctccatatgaattttaagatattttagtgcttcaagactgctgaaagcaatccagttgctcctgtgctagatggtagccagagaattttatagtaatggaggttagcccttaatctcttcattgcatttcatttctgtaaatcagattaagtccttaatattattttaaattaaaatttgtgtgtaattgccattaaattttcaaaatgtaatttaaaaggattaaatactcatttaataatttaaaataattattgtataatatctacatttggagaattttgaactatcaagcatatactgtatacagttagaaagttattaaatgaacattttactcattg

SEQ ID NO: 279912 - DNA, 2294 bp, Homo sapiens
gagaggtgtagcagaaagcagtgccccaggcctccacgcgacggtgaagcaggaaccaggggctgccagcagagcagcccaggtgcgtcgccttagggacagagctgccaagtgccgagctggggctgccagagccgagccgggaacggcatttgccagagccgaggcggaagccggagcatttgggggacgggaccgcgggaacccggaaacgcctgggctgcaccgagctggcggtggctacggcgacgggagccggcggcgctgcgggtcagcggtcgcgtaggacccagcggactcggcagcctggggcgcccggcggagctgaaccgcggcccccggtggtgggctcagccggtcgagctgcgcgggaggcaaatgaagataaaacaatgttcgccaacctaaaatacgtttccctgggaattttggtctttcagactaccagtttggttctaacaatgcgttattccagaacttttttgaagataatggcctgcattttattggtctacaaagacagcaaatgtagtctaagagcactgaatcgagtactacatgatgaaattcttaataaacctatggaaacacttaaacttgctattccatcagggatctatactcttcagaataatttactgtatgtggcactatcaaatctagatgcagctacttatcaggtcacgtatcagttaaaaattcttacaacagcattattttctgtgtctatgcttagtaaaaaattgggtgtataccagtggctgtccctagtaattttgatgacaggagttgcttttgtacagtggccctcagattctcagcttgattctaaggaactttcagctggttctcaatttgtaggactcatggcagttctcacagcatgtttttcaagtggctttgctggggtttactttgagaaaatcttaaaagaaacaaaacaatcagtgtggataagaaatattcagcttggtttctttggaagtatatttggattaatgggtgtatacatttatgatggagaactggtatcaaagaatggattttttcagggatataaccgactgacctggatagtagttgttcttcaggcacttggaggccttgtaatagctgctgttattaagtatgcagataatattttaaaaggatttgcaacctctttatcgataatattatcaacattgatctcctatttttggcttcaagattttgtgccaaccagtgtctttttccttggagccatccttgtaataacagctacttttttgtatggttatgatcccaaacctgcaggaaatcccactaaagcatagttgtatactatctttaactggtttttcacgatggggcactaggaatctcgacattaatcttgcacagaggacttctacagagtctgagaagatatcatcatgctgaatctgatcatactgttttttaaaagtttaaggataagacatgtgtatatgtaacaaaacacattgcatctagaaatcaaaacttgaaagtatttccagggattaggattagaaggaatattagaggaaacttgaaatctgagtttaaaaagattttacctttttgattgctgcagaaatgtcctatgcactctttgcaagagcacacaacaaatgtcagataccaatttttgcaaattagatttaatcttattaaatgtttttatcttactctttctgtacagatatatcaaatcacatgaaatatttaaagtttgaaaattataattacctataaagctgtgaaaaatagaagtataatttgaaaaaacatttcacttatcagagatttttatatttatacaaaagattactaaatgaaggattgctaaatgtttttggttcaattacataaaaattaatattctgggtctgatctgtcagagaataaatatcaaatctaaatttaatgtagagatacatactatttctccatatgaattttaagatattttagtgcttcaagactgctgaaagcaatccagttgctcctgtgctagatggtagccagagaattttatagtaatggaggttagcccttaatctcttcattgcatttcatttctgtaaatcagattaagtccttaatattattttaaattaaaatttgtgtgtaattgccattaaattttcaaaatgtaatttaaaaggattaaatactcatttaataatttaaaataattattgtataatatctacatttggagaattttgaactatcaagcatatactgtatacagttagaaagttattaaatgaacattttactcattg

SEQ ID NO: 279913 - DNA, 749 bp, Homo sapiens
ttcaactaaagaattaaggccttttgttattgaatgtattgtatacaaaatccctattaaggtgaaatacagaacttaaaatagctttgctttggaagacagtatagtgcagtcgatgagagtgcaggctgtagagttagacatacctgggtttgatcctcttgaagttgtgggactttagacaagttatttaaattctttaaaactgtttcctcatgtgtaaaaaatgaatactaatacatcttcatagatttgctgtgacaactcaatgaaataatgcatataaagcacttagccagatacctggaatgtagtaagtactcaagatttgttagccgtgttactggaacatttttccccacattataattgtttttatagtaaagaaatagaaggaacttgttctgcttttaatctgattttctcttttttattttgtcttcatcttattcagtgtctttttccttggagccatccttgtaataacagctacttttttgtatggttatgatcccaaacctgcaggaaatcccactaaagcatagttgtatactatctttaactggtttttcacgatggggcactaggaatctcgacattaatcttgcacagaggacttctacagagtctgagaagatatcatcatgctgaatctgatcatactgttttttaaaagtttaaggataagacatgtgtatatgtaacaaaacacattgcatctagaaatcaaaacttgaaagtatttccag

SEQ ID NO: 279914 - DNA, 406 bp, Homo sapiens
tggtggcaggtggaggagagacctgcaggccctctcccttctccctctcggtgtttttaaatatactagttttcatatgttgtaatcttatttatttgccctgtttattttgtttttcaggcaaatgaagataaaacaatgttcgccaacctaaaatacgtttccctgggaattttggtctttcagactaccagtttggttctaacaatgcgttattccagaactttaaaagaagaaggacctcgttatctatcttctacagcagtggttgttgctgaacttttgaagataatggcctgcattttattggtctacaaagacagcagtaggtatctaggttttttgtttttaatcaatgcaatttatttagtttgcatatatatattggtaactacacatttgcact

SEQ ID NO: 279915 - DNA, 2666 bp, Homo sapiens
gagaggtgtagcagaaagcagtgccccaggcctccacgcgacggtgaagcaggaaccaggggctgccagcagagcagcccaggtgcgtcgccttagggacagagctgccaagtgccgagctggggctgccagagccgagccgggaacggcatttgccagagccgaggcggaagccggagcatttgggggacgggaccgcgggaacccggaaacgcctgggctgcaccgagctggcggtggctacggcgacgggagccggcggcgctgcgggtcagcggtcgcgtaggacccagcggactcggcagcctggggcgcccggcggagctgaaccgcggcccccggtggtgggctcagccggtcgagctgcgcgggaggcaaatgaagataaaacaatgttcgccaacctaaaatacgtttccctgggaattttggtctttcagactaccagtttggttctaacaatgcgttattccagaactttaaaagaagaaggacctcgttatctatcttctacagcagtggttgttgctgaacttttgaagataatggcctgcattttattggtctacaaagacagcaaatgtagtctaagagcactgaatcgagtactacatgatgaaattcttaataaacctatggaaacacttaaacttgctattccatcagggatctatactcttcagaataatttactgtatgtggcactatcaaatctagatgcagctacttatcaggtcacgtatcagttaaaaattcttacaacagcattattttctgtgtctatgcttagtaaaaaattgggtgtataccagtggctgtccctagtaattttgatgacaggagttgcttttgtacagtggccctcagattctcagcttgattctaaggaactttcagctggttctcaatttgtaggactcatggcagttctcacagcatgtttttcaagtggctttgctggggtttactttgagaaaatcttaaaagaaacaaaacaatcagtgtggataagaaatattcagcttgtgtctttttccttggagccatccttgtaataacagctacttttttgtatggttatgatcccaaacctgcaggaaatcccactaaagcatagttgtatactatctttaactggtttttcacgatggggcactaggaatctcgacattaatcttgcacagaggacttctacagagtctgagaagatatcatcatgctgaatctgatcatactgttttttaaaagtttaaggataagacatgtgtatatgtaacaaaacacattgcatctagaaatcaaaacttgaaagtatttccagggattaggattagaaggaatattagaggaaacttgaaatctgagtttaaaaagattttacctttttgattgctgcagaaatgtcctatgcactctttgcaagagcacacaacaaatgtcagataccaatttttgcaaattagatttaatcttattaaatgtttttatcttactctttctgtacagatatatcaaatcacatgaaatatttaaagtttgaaaattataattacctataaagctgtgaaaaatagaagtataatttgaaaaaacatttcacttatcagagatttttatatttatacaaaagattactaaatgaaggattgctaaatgtttttggttcaattacataaaaattaatattctgggtctgatctgtcagagaataaatatcaaatctaaatttaatgtagagatacatactatttctccatatgaattttaagatattttagtgcttcaagactgctgaaagcaatccagttgctcctgtgctagatggtagccagagaattttatagtaatggaggttagcccttaatctcttcattgcatttcatttctgtaaatcagattaagtccttaatattattttaaattaaaatttgtgtgtaattgccattaaattttcaaaatgtaatttaaaaggattaaatactcatttaataatttaaaataattattgtataatatctacatttggagaattttgaactatcaagcatatactgtatacagttagaaagttattaaatgaacattttactcattgatctgtaaaaacttctttaatctacaactgtttacaaaaacaacattcaaacaaatagtacagatgtcagtgacagaacaaaatgacttttcttggagacattccagattgccatattactttattttaaacagcgctatgactttaaatccaaggctgctcggaagatttttttaggtctctcataagcctattcttccctgatcacatgagtgggagaggtagccaaattttgaattccctttctgtgttcccacaagagctgctgagaaggcctggcgcagtggctcacgcctgtaatcctagcagtttgggaggctgaggcaggtggatcacaaggtcaagagattgagactatcctgaccaacatggtgaaaccccgtctctaccaaaaatacaaaaattagctgggtgtggtggcacgcacctgtagtcccagctactcgggagactgaggcaggagaatcacttgaacccgggaggcagaggttgcagtaagtggagatcacgccactgcactccaacctgggcgacacagtgagagtctgtctcaaaaaaaagaaaaaaaaaa

SEQ ID NO: 279916 - DNA, 2447 bp, Homo sapiens
gagaggtgtagcagaaagcagtgccccaggcctccacgcgacggtgaagcaggaaccaggggctgccagcagagcagcccaggtgcgtcgccttagggacagagctgccaagtgccgagctggggctgccagagccgagccgggaacggcatttgccagagccgaggcggaagccggagcatttgggggacgggaccgcgggaacccggaaacgcctgggctgcaccgagctggcggtggctacggcgacgggagccggcggcgctgcgggtcagcggtcgcgtaggacccagcggactcggcagcctggggcgcccggcggagctgaaccgcggcccccggtggtgggctcagccggtcgagctgcgcgggagggtctcactgtcaccttggctggagtacagaggcgcaatctcagctcactgcaacttccacctccctggctcaagtgatctcccaccttagcctcccaagcaaatgaagataaaacaatgttcgccaacctaaaatacgtttccctgggaattttggtctttcagactaccagtttggttctaacaatgcgttattccagaactttaaaagaagaaggacctcgttatctatcttctacagcagtggttgttgctgaacttttgaagataatggcctgcattttattggtctacaaagacagcaaatgtagtctaagagcactgaatcgagtactacatgatgaaattcttaataaacctatggaaacacttaaacttgctattccatcagggatctatactcttcagaataatttactgtatgtggcactatcaaatctagatgcagctacttatcaggtcacgtatcagttaaaaattcttacaacagcattattttctgtgtctatgcttagtaaaaaattgggtgtataccagtggctgtccctagtaattttgatgacaggagttgcttttgtacagtggccctcagattctcagcttgattctaaggaactttcagctggttctcaatttgtaggactcatggcagttctcacagcatgtttttcaagtggctttgctggggtttactttgagaaaatcttaaaagaaacaaaacaatcagtgtggataagaaatattcagcttggtttctttggaagtatatttggattaatgggtgtatacatttatgatggagaactggtatcaaagaatggattttttcagggatataaccgactgacctggatagtagttgttcttcaggcacttggaggccttgtaatagctgctgttattaagtatgcagataatattttaaaaggatttgcaacctctttatcgataatattatcaacattgatctcctatttttggcttcaagattttgtgccaaccagtgtctttttccttggagccatccttgtaataacagctacttttttgtatggttatgatcccaaacctgcaggaaatcccactaaagcatagttgtatactatctttaactggtttttcacgatggggcactaggaatctcgacattaatcttgcacagaggacttctacagagtctgagaagatatcatcatgctgaatctgatcatactgttttttaaaagtttaaggataagacatgtgtatatgtaacaaaacacattgcatctagaaatcaaaacttgaaagtatttccagggattaggattagaaggaatattagaggaaacttgaaatctgagtttaaaaagattttacctttttgattgctgcagaaatgtcctatgcactctttgcaagagcacacaacaaatgtcagataccaatttttgcaaattagatttaatcttattaaatgtttttatcttactctttctgtacagatatatcaaatcacatgaaatatttaaagtttgaaaattataattacctataaagctgtgaaaaatagaagtataatttgaaaaaacatttcacttatcagagatttttatatttatacaaaagattactaaatgaaggattgctaaatgtttttggttcaattacataaaaattaatattctgggtctgatctgtcagagaataaatatcaaatctaaatttaatgtagagatacatactatttctccatatgaattttaagatattttagtgcttcaagactgctgaaagcaatccagttgctcctgtgctagatggtagccagagaattttatagtaatggaggttagcccttaatctcttcattgcatttcatttctgtaaatcagattaagtccttaatattattttaaattaaaatttgtgtgtaattgccattaaattttcaaaatgtaatttaaaaggattaaatactcatttaataatttaaaataattattgtataatatctacatttggagaattttgaactatcaagcatatactgtatacagttagaaagttattaaatgaacattttactcattg

SEQ ID NO: 279917 - DNA, 2214 bp, Homo sapiens
gagaggtgtagcagaaagcagtgccccaggcctccacgcgacggtgaagcaggaaccaggggctgccagcagagcagcccaggtgcgtcgccttagggacagagctgccaagtgccgagctggggctgccagagccgagccgggaacggcatttgccagagccgaggcggaagccggagcatttgggggacgggaccgcgggaacccggaaacgcctgggctgcaccgagctggcggtggctacggcgacgggagccggcggcgctgcgggtcagcggtcgcgtaggacccagcggactcggcagcctggggcgcccggcggagctgaaccgcggcccccggtggtgggctcagccggtcgagctgcgcgggaggcaaatgaagataaaacaatgttcgccaacctaaaatacgtttccctgggaattttggtctttcagactaccagtttggttctaacaatgcgttattccagaactttaaaagaagaaggacctcgttatctatcttctacagcagtggttgttgctgaacttttgaagataatggcctgcattttattggtctacaaagacagcaaatgtagtctaagagcactgaatcgagtactacatgatgaaattcttaataaacctatggaaacacttaaacttgctattccatcagggatctatactcttcagaataatttactgtatgtggcactatcaaatctagatgcagctacttatcaggtcacgtatcagttaaaaattcttacaacagcattattttctgtgtctatgcttagtaaaaaattgggtgtataccagtggctgtccctagtaattttgatgacaggagttgcttttgtacagtggccctcagattctcagcttgattctaaggaactttcagctggttctcaatttgtaggactcatggcagttctcacagcatgtttttcaagtggctttgctggggtttactttgagaaaatcttaaaagaaacaaaacaatcagtgtggataagaaatattcagcttggtttctttggaagtatatttggattaatgggtgtatacatttatgatggagaactggtatcaaagaatggattttttcagggatataaccgactgacctggatagtagttgttcttcagtgtctttttccttggagccatccttgtaataacagctacttttttgtatggttatgatcccaaacctgcaggaaatcccactaaagcatagttgtatactatctttaactggtttttcacgatggggcactaggaatctcgacattaatcttgcacagaggacttctacagagtctgagaagatatcatcatgctgaatctgatcatactgttttttaaaagtttaaggataagacatgtgtatatgtaacaaaacacattgcatctagaaatcaaaacttgaaagtatttccagggattaggattagaaggaatattagaggaaacttgaaatctgagtttaaaaagattttacctttttgattgctgcagaaatgtcctatgcactctttgcaagagcacacaacaaatgtcagataccaatttttgcaaattagatttaatcttattaaatgtttttatcttactctttctgtacagatatatcaaatcacatgaaatatttaaagtttgaaaattataattacctataaagctgtgaaaaatagaagtataatttgaaaaaacatttcacttatcagagatttttatatttatacaaaagattactaaatgaaggattgctaaatgtttttggttcaattacataaaaattaatattctgggtctgatctgtcagagaataaatatcaaatctaaatttaatgtagagatacatactatttctccatatgaattttaagatattttagtgcttcaagactgctgaaagcaatccagttgctcctgtgctagatggtagccagagaattttatagtaatggaggttagcccttaatctcttcattgcatttcatttctgtaaatcagattaagtccttaatattattttaaattaaaatttgtgtgtaattgccattaaattttcaaaatgtaatttaaaaggattaaatactcatttaataatttaaaataattattgtataatatctacatttggagaattttgaactatcaagcatatactgtatacagttagaaagttattaaatgaacattttactcattg

SEQ ID NO: 279918 - DNA, 878 bp, Homo sapiens
ctcagaggtcgcagaccagacctctccgggcacgtccctccccgacgcgtcgccgggctgcgctggagccgctcaccgtccgggtccttctcgtggtagcagtggtagttgcactccacctccatgttctccaaaaaggacttgacctgctcctcatcctggaagtccaccatgccggccatggttcgcgccggcccaaagacggtcacgctagagtgcagtggcgtgattttggctcaccgcaacctccgccttacggtttcaagcaattctcctgcctcagcctcctgaatagctgggattacaggcgcccaccacaatgcccgcctaatttttgtatttttagtagagatggggtttcaccatatcggccaggctggtctcgaactcctgacctcgtgatccgtttgaactaactgttgcctctgccctagagtgcttttcccctgtatttttttttttttttttggcttgccttcttaagttctctgcttcaatttgacatcgtccatgtggtcttagctcattcttgttataataacagtgtcttgattgtgcccagcaatattaggtgcccaagtattgttgactgaattaagaagagggattatcattccaaataatttggttttcattaatggaacttagaatatcactgactcttgctcttttgacccaggtttttcttaaagctataagaaacattaaatgaaggtctaattgacatacaggaaactgcacataactttaaagtaacaattatgagtttctacatatgtatacacctgtaaaccattatcacaatcaagataatgagcatattcatcacctcaaaatttcctcatgtgactttgtacttcattccctccccagcaacc

SEQ ID NO: 279919 - DNA, 699 bp, Homo sapiens
cagcgcctgaaacaccttgtagtggtttcactaacataagttaaaacataagcacttaggaagaaagtcttccctcattaatttctggcatagtgcagctacatgttcattctggaacttaaagtaccttcctcttagaaaatcaaagtgttttcacagcaagtttaataaattaaaaatgtagagaaaaaaggaactagtgaacaaaagaattctccaaggttccctttttaaattaatgtttaaatgttacatgtgaatcatagcatttcacaagcacgtggcacatactcaaggccctagaaccaaatgtcaacgtttaacaaatacagcagaatcgtcttttcattgtgaatttttaaaagcaataattaagtcctgcatgaaacagccaaagaagcatttgggacaaagttactggttcttcacaatcaactctttaaggcataatcggaggtaagtgtgctgagacttttggtccctactgctatgttctcacatgctcccaaggaaatagacatgtcagttacttgcctgtttccatctctaggtgtggaaatgagaagtctgggtttctggaaattacagaaatcaagtcagaaaaacctggcaaaagtaataatactctgtgttctataatttgccacagtcacctcattttgcaaataaaatgactacacaactttcaagtactctaaa

SEQ ID NO: 279920 - DNA, 379 bp, Homo sapiens
ccttgatttcaggtcctaaagtatattcacaacacttcagcatttcacaagcacgtggcacatactcaaggccctagaaccaaatgtcaacgtttaacaaatacagcagaatcgtcttttcattgtgaatttttaaaagcaataattaagtcctgcatgaaacagccaaagaagcatttgggacaaagttactggttcttcacaatcaactctttaaggcataatcggaggtgtggaaatgagaagtctgggtttctggaaattacagaaatcaagtcagaaaaacctggcaaaagtaataatactctgtgttctataatttgccacagtcacctcattttgcaaataaaatgactacacaactttcaagtactctaaa

SEQ ID NO: 279921 - DNA, 1899 bp, Homo sapiens
  misc_feature (5)..(5): n is a, c, g, or t
aggcncgggctttctcctgcagcgataagggcagtcgacagtctttagtagggaaaggagacaagtgctagctactgccgcccaagtggaaggaattatctatagagtaagtatgctaatcttgactaagactgcaggagttttttttaaaccatcaaaaaggaaagtttatgaatttttaagaagttttaattttcatcctggaacactatttcttcataaaatagtattgggaattgaaactagttgtgatgatacagcagctgctgtggtggatgaaactggaaatgtgttgggagaagcaatacattcccaaactgaagttcatttaaaaacaggtgggattgttcctccagcagctcaacagcttcacagagaaaatattcaacgaatagtacaagaagctctttctgccagtggagtctctccaagtgacctctcagcaattgcaactaccataaaaccaggacttgctttaagcctgggagtgggcttatcatttagcttacagctggtaggacagttaaaaaagccattcattcccattcatcatatggaggctcatgcacttactattaggttgaccaataaagtagaatttccttttttagttcttttgatttctggaggtcactgtctgttggcattagttcaaggagtttcagattttctgcttcttggaaagtctttggacatagcaccaggtgacatgcttgacaaggtggcaagaagactttctttaataaaacatccagagtgctccaccatgagtggtgggaaagccatagaacatttggccaaacaaggaaatagatttcattttgacatcaaacctcccttgcatcatgctaaaaattgtgatttttcttttactggacttcaacacgttactgataaaataataatgaaaaaggaaaaagaggaaggtattgagaaggggcaaatcctgtcttcagcagcagacattgctgccacagtacagcacacaatggcatgtcatcttgtgaaaagaacacatcgggctattctgttttgtaagcagagagacttgttacctcaaaataatgcagtactggttgcatctggtggtgtcgcaagtaacttctatatccgcagagctctggaaattttaacaaacgcaacacagtgcactttgttgtgtcctcctcccagactatgcactgataatggcattatgattgcatggaatggtattgaaagactacgtgctggcttgggcattttacatgacatagaaggcatccgctatgaaccaaaatgtcctcttggagtagacatatcaaaagaagttggagaagcttccataaaagtaccacaattaaaaatggagatatgatttctgctgttcaaaaaagtccctaaagagacaggctcttgccatgttgcccgggctggtcctgaactgctgaattcaagtgatcctcccaccttggcctccagaagtgctgggattatgggtgtgagccaccatgcctagccaaaatgtttcttaaggtatacattttgggtcttagaagacttatacatttgtaatatttattactaaatatctcaaagtattacaataaatgttaccatgtgagctactttgaatcaggcttcttgcacaccaatttaaaaatgttaactcttgatatatacactagttataccactcatgtcagtcaataaattttaaggtttaagtgcaggcctttgtttacagaaatcctaattttttgaaaccataactctgacctgacactaaattcctgtagacatgctaaggaaaatctgcttagtatcgagatcaagaacttccattcaaaaagattattcagttatgttatttgcatattaccattgttaaaaataaaaaaatttttaaaagaaaaaaaa

SEQ ID NO: 279922 - DNA, 1913 bp, Homo sapiens
cgttctttggtaaccctgctagggggcgccgctagattccatcctatttctccgatgaaagtatcaggaattatctatagagtaagtatgctaatcttgactaagactgcaggagttttttttaaaccatcaaaaaggaaagtttatgaatttttaagaagttttaattttcatcctggaacactatttcttcataaaatagtattgggaattgaaactagttgtgatgatacagcagctgctgtggtggatgaaactggaaatgtgttgggagaagcaatacattcccaaactgaagttcatttaaaaacaggtgggattgttcctccagcagctcaacagcttcacagagaaaatattcaacgaatagtacaagaagctctttctgccagtggagtctctccaagtgacctctcagcaattgcaactaccataaaaccaggacttgctttaagcctgggagtgggcttatcatttagcttacagctggtaggacagttaaaaaagccattcattcccattcatcatatggaggctcatgcacttactattaggttgaccaataaagtagaatttccttttttagttcttttgatttctggaggtcactgtctgttggcattagttcaaggagtttcagattttctgcttcttggaaagtctttggacatagcaccaggtgacatgcttgacaaggtggcaagaagactttctttaataaaacatccagagtgctccaccatgagtggtgggaaagccatagaacatttggccaaacaaggaaatagatttcattttgacatcaaacctcccttgcatcatgctaaaaattgtgatttttcttttactggacttcaacacgttactgataaaataataatgaaaaaggaaaaagaggaaggtatatttctaattagtaaagttgaacagataaatattcctggattgtgcctaaaaatagctgctcatttctgcaggtattgagaaggggcaaatcctgtcttcagcagcagacattgctgccacagtacagcacacaatggcatgtcatcttgtgaaaagaacacatcgggctattctgttttgtaagcagagagacttgttacctcaaaataatgcagtactggttgcatctggtggtgtcgcaagtaacttctatatccgcagagctctggaaattttaacaaacgcaacacagtgcactttgttgtgtcctcctcccagactatgcactgataatggcattatgattgcatggaatggtattgaaagactacgtgctggcttgggcattttacatgacatagaaggcatccgctatgaaccaaaatgtcctcttggagtagacatatcaaaagaagttggagaagcttccataaaagtaccacaattaaaaatggagatatgatttctgctgttcaaaaaagtccctaaaggtagtattaaggttaaaattaagtttttattgttttgtgtatcaaattgtagaagatatataatattaattattcatcaagattttatttttttttttctatttgatgttttacctgctcttctgagatactataatgtgttaaaagtcttacaagggaagatagtttttttcttttaattattaaaaaccaaaataaaacatcttttgagaaaggaatgtattgatgctggcaggtagaaaggaagctttgaaagaagcacagtaattttgctgaattctggccctgtatcatacaggcctaggactttcccccacttcctcaaatcaggataggagaagctattttttaactcctactgaaacaagaacctgactttataatgagagagcagtttaatttttttttatcattattattttttggagataatctcccttgcactccagcccgggtgacagagtgagactccgtctc

SEQ ID NO: 279923 - DNA, 1945 bp, Homo sapiens
  misc_feature (5)..(5): n is a, c, g, or t
aggcncgggctttctcctgcagcgataagggcagtcgacagtctttagtagggaaaggagacaagtgctagctactgccgcccaagtggaagtatttcttcataaaatagtattgggaattgaaactagttgtgatgatacagcagctgctgtggtggatgaaactggaaatgtgttgggagaagcaatacattcccaaactgaagttcatttaaaaacaggtgggattgttcctccagcagctcaacagcttcacagagaaaatattcaacgaatagtacaagaagctctttctgccagtggagtctctccaagtgacctctcagcaattgcaactaccataaaaccaggacttgctttaagcctgggagtgggcttatcatttagcttacagctggtaggacagttaaaaaagccattcattcccattcatcatatggaggctcatgcacttactattaggttgaccaataaagtagaatttccttttttagttcttttgatttctggaggtcactgtctgttggcattagttcaaggagtttcagattttctgcttcttggaaagtctttggacatagcaccaggtgacatgcttgacaaggtggcaagaagactttctttaataaaacatccagagtgctccaccatgagtggtgggaaagccatagaacatttggccaaacaaggaaatagatttcattttgacatcaaacctcccttgcatcatgctaaaaattgtgatttttcttttactggacttcaacacgttactgataaaataataatgaaaaaggaaaaagaggaaggtattgagaaggggcaaatcctgtcttcagcagcagacattgctgccacagtacagcacacaatggcatgtcatcttgtgaaaagaacacatcgggctattctgttttgtaagcagagagacttgttacctcaaaataatgcagtactggttgcatctggtggtgtcgcaagtaacttctatatccgcagagctctggaaattttaacaaacgcaacacagtgcactttgttgtgtcctcctcccagactatgcactgataatggcattatgattgcatggaatggtattgaaagactacgtgctggcttgggcattttacatgacatagaaggcatccgctatgaaccaaaatgtcctcttggagtagacatatcaaaagaagttggagaagcttccataaaagtaccacaattaaaaatggagatatgatttctgctgttcaaaaaagtccctaaagggtctcactctctgacctcagctggagtacagtagccagatcacaactcactgcaaccctgacttcctgaactcaagaaatcctcctgccttagcctcttgaatagccgggactacaggtgtgcatgtccatgcccagccaactttatttctattttttgtagagacaggctcttgccatgttgcccgggctggtcctgaactgctgaattcaagtgatcctcccaccttggcctccagaagtgctgggattatgggtgtgagccaccatgcctagccaaaatgtttcttaaggtatacattttgggtcttagaagacttatacatttgtaatatttattactaaatatctcaaagtattacaataaatgttaccatgtgagctactttgaatcaggcttcttgcacaccaatttaaaaatgttaactcttgatatatacactagttataccactcatgtcagtcaataaattttaaggtttaagtgcaggcctttgtttacagaaatcctaattttttgaaaccataactctgacctgacactaaattcctgtagacatgctaaggaaaatctgcttagtatcgagatcaagaacttccattcaaaaagattattcagttatgttatttgcatattaccattgttaaaaataaaaaaatttttaaaagaaaaaaaa

SEQ ID NO: 279924 - DNA, 2704 bp, Homo sapiens
  misc_feature (873)..(873): n is a, c, g, or t
tttagctgtaatatcatttttcttcatttttacaatcttaaaactacaaaatgctgtctttctttctttcagaacaggtgggattgttcctccagcagctcaacagcttcacagagaaaatattcaacgaatagtacaagaagctctttctgccagtggagtctctccaagtgacctctcagcaattgcaactaccataaaaccaggacttgctttaagcctgggagtgggcttatcatttagcttacagctggtaggacagttaaaaaagccattcattcccattcatcatatggaggctcatgcacttactattaggttgaccaataaagtagaatttccttttttagttcttttgatttctggaggtcactgtctgttggcattagttcaaggagtttcagattttctgcttcttggaaagtctttggacatagcaccaggtgacatgcttgacaaggtaattaagaattaatttctccattcttttttgttatgttgtccatttcaactaagtagcaatagatgtgctaccaccattcacctaaatatttctgaattttatcttagtaaactgaaaaaaattcacatatggtgagaaaaaatagaaagagtagtacacaattttataattcttagcctttcttaataaaatggtaagaggttcatatctgtacataaaggctgaaatagtttgcagatacagttatgtattttgccaaataatgtatgtgaaagaacgtgcttcgtaaactaacatactgcaaaaaaggtaaaataagagaatatatatagattaacataaggacattaaagatgcaatgcacagaattaaatcacacaattacttacaccacagacagggtccccccncacccccctttgttttagaatactacagaggctactgccatatataggaaaacaaacaaacaaacaaacaaaacactgcttcccacagtgaaataataggaagtataggacaagttcttattattgacgttcatcattaagcagttattgtcaacttcaagcccattttccaaccaatagaagagcaaacatagacaggggcagtgattggcctcttattgttcgggtcatcataaggaacagggttgtctgcttacctgaatatcagctatagtctatatttgccaaagtatagcatgttttattcattcaggggttttttgttttgttagtaattttcaatttatttcctttgcatcttttcgtttcacagtatttaattttatgactctaaaaaatatgtttctttgataggtggcaagaagactttctttaataaaacatccagagtgctccaccatgagtggtgggaaagccatagaacatttggccaaacaaggaaatagatttcattttgacatcaaacctcccttgcatcatgctaaaaattgtgatttttcttttactggacttcaacacgttactgataaaataataatgaaaaaggaaaaagaggaaggtatatttctaattagtaaagttgaacagataaatattcctggattgtgcctaaaaatagctgctcatttctgcaggtattgagaaggggcaaatcctgtcttcagcagcagacattgctgccacagtacagcacacaatggcatgtcatcttgtgaaaagaacacatcgggctattctgttttgtaagcagagagacttgttacctcaaaataatgcagtactggttgcatctggtggtgtcgcaagtaacttctatatccgcagagctctggaaattttaacaaacgcaacacagtgcactttgttgtgtcctcctcccagactatgcactgataatggcattatgattgcatggaatggtattgaaagactacgtgctggcttgggcattttacatgacatagaaggcatccgctatgaaccaaaatgtcctcttggagtagacatatcaaaagaagttggagaagcttccataaaagtaccacaattaaaaatggagatatgatttctgctgttcaaaaaagtccctaaagggtctcactctctgacctcagctggagtacagtagccagatcacaactcactgcaaccctgacttcctgaactcaagaaatcctcctgccttagcctcttgaatagccgggactacaggtgtgcatgtccatgcccagccaactttatttctattttttgtagagacaggctcttgccatgttgcccgggctggtcctgaactgctgaattcaagtgatcctcccaccttggcctccagaagtgctgggattatgggtgtgagccaccatgcctagccaaaatgtttcttaaggtatacattttgggtcttagaagacttatacatttgtaatatttattactaaatatctcaaagtattacaataaatgttaccatgtgagctactttgaatcaggcttcttgcacaccaatttaaaaatgttaactcttgatatatacactagttataccactcatgtcagtcaataaattttaaggtttaagtgcaggcctttgtttacagaaatcctaattttttgaaaccataactctgacctgacactaaattcctgtagacatgctaaggaaaatctgcttagtatcgagatcaagaacttccattcaaaaagattattcagttatgttatttgcatattaccattgttaaaaataaaaaaatttttaaaagaaaaaaaa

SEQ ID NO: 279925 - DNA, 2215 bp, Homo sapiens
  misc_feature (5)..(5): n is a, c, g, or t
aggcncgggctttctcctgcagcgataagggcagtcgacagtctttagtagggaaaggagacaagtgctagctactgccgcccaagtggaaggtgggtgaaattgctcactcttcaccccactgacgcttttgcgcacctggaaaagcggttccagtttgcgcccgtcgccgccttacagccgacaggagaccagcgctacccaagtcacgtgggttcagcctgcagctttcttggcccgaaagggaattatctatagagtaagtatgctaatcttgactaagactgcaggagttttttttaaaccatcaaaaaggaaagtttatgaatttttaagaagttttaattttcatcctggaacactatttcttcataaaatagtattgggaattgaaactagttgtgatgatacagcagctgctgtggtggatgaaactggaaatgtgttgggagaagcaatacattcccaaactgaagttcatttaaaaacaggtgggattgttcctccagcagctcaacagcttcacagagaaaatattcaacgaatagtacaagaagctctttctgccagtggagtctctccaagtgacctctcagcaattgcaactaccataaaaccaggacttgctttaagcctgggagtgggcttatcatttagcttacagctggtaggacagttaaaaaagccattcattcccattcatcatatggaggctcatgcacttactattaggttgaccaataaagtagaatttccttttttagttcttttgatttctggaggtcactgtctgttggcattagttcaaggagtttcagattttctgcttcttggaaagtctttggacatagcaccaggtgacatgcttgacaaggtggcaagaagactttctttaataaaacatccagagtgctccaccatgagtggtgggaaagccatagaacatttggccaaacaaggaaatagatttcattttgacatcaaacctcccttgcatcatgctaaaaattgtgatttttcttttactggacttcaacacgttactgataaaataataatgaaaaaggaaaaagaggaaggtattgagaaggggcaaatcctgtcttcagcagcagacattgctgccacagtacagcacacaatggcatgtcatcttgtgaaaagaacacatcgggctattctgttttgtaagcagagagacttgttacctcaaaataatgcagtactggttgcatctggtggtgtcgcaagtaacttctatatccgcagagctctggaaattttaacaaacgcaacacagtgcactttgttgtgtcctcctcccagactatgcactgataatggcattatgattgcatggaatggtattgaaagactacgtgctggcttgggcattttacatgacatagaaggcatccgctatgaaccaaaatgtcctcttggagtagacatatcaaaagaagttggagaagcttccataaaagtaccacaattaaaaatggagatatgatttctgctgttcaaaaaagtccctaaagggtctcactctctgacctcagctggagtacagtagccagatcacaactcactgcaaccctgacttcctgaactcaagaaatcctcctgccttagcctcttgaatagccgggactacaggtgtgcatgtccatgcccagccaactttatttctattttttgtagagacaggctcttgccatgttgcccgggctggtcctgaactgctgaattcaagtgatcctcccaccttggcctccagaagtgctgggattatgggtgtgagccaccatgcctagccaaaatgtttcttaaggtatacattttgggtcttagaagacttatacatttgtaatatttattactaaatatctcaaagtattacaataaatgttaccatgtgagctactttgaatcaggcttcttgcacaccaatttaaaaatgttaactcttgatatatacactagttataccactcatgtcagtcaataaattttaaggtttaagtgcaggcctttgtttacagaaatcctaattttttgaaaccataactctgacctgacactaaattcctgtagacatgctaaggaaaatctgcttagtatcgagatcaagaacttccattcaaaaagattattcagttatgttatttgcatattaccattgttaaaaataaaaaaatttttaaaagaaaaaaaa

SEQ ID NO: 279926 - DNA, 302 bp, Homo sapiens
ccatctgtggaacacctactacacgccactgtgatgaacttcgtgttcttccacttcatcctcatgacagccctatcaggtccggatactgccccgaaggaactctgctgttggaatagtcgcgttgttcatcatcatcaggacttccataaagaggctgctgagggccatgtggcgggtctggctgtccatgtctgaaaggaatatagacacactcaagaatggctgccagaaagggtgctgaggaattgaaccatctgatgagtaaaagcttggcattttggaactgcatcctgaccaaa

SEQ ID NO: 279927 - DNA, 710 bp, Homo sapiens
  misc_feature (7)..(7): n is a, c, g, or t
  misc_feature (9)..(10): n is a, c, g, or t
ccacgcntnngcttgaagcagcagaggcgggagccccaggttctggccctgtggacctgtttcgggagctgctggaggaagggaaaggagtgatcagaggcaataaagagtacgaggaagaaaagcgacaggagaaagagaggcaagagaaagctctgggcatcctgacatacctgggccagagtgcagcggaggcacagactcaacccccttggtaccagctacccccagggcgagggggccccccgcccggcccagccccagatgagaagatcaagagccgtctggaccctctgcgggagatgcagaagcatctggggaagaagagacagcacggcggtgatgaaggcagtcgcagcagaaaggaaaaggaggggtctgagaagcagcgacccaaggagcctccatccctggaccagcttcgagctgaacgtctgcggagggaagcagctgagaggtctcgggcagaggccctgctggcccgggtccaaggccgggcactacaggagggtcagccggaagaagacgagacggatgaccggcggcggcggtacaactcccaattcaacccccagctggcccggcgcccccgccagcaggaccctcaccttactcactgactcctgagggggtacaggagaggccgctgctgccagccgtcatataaaactatttattcataaatattttccaaaatgaaaaaaaaatac

SEQ ID NO: 279928 - DNA, 563 bp, Homo sapiens
gcttgtattataataaggtaacacattcgcgtacatgttgggcctcacccattcacacctgtcatttatttacattttgccagtttcactaaaatactataaaactaaaaataattaaactctgctaatgatacaacaccagacagatcgtgaaaacacttgcaacctggcctaagactagtaagaattgagtattgaagatgacatgtggaattggaagggaaaagatgattctgcaaatggtttgtacaacgagcatgaatgtcaaatggattaaagattgacatggagaaagtgaaactgtaaaagtattagaagaaaatataggtagaggcttatatgataggttacggaaagactttcccagcatggcacagtaagcagaaatcctgggtaaaagttgaataaactcaaatgtgtaaaattaaagttctaaaatgcacaaatgtataaaaaataaagatctaaaaatgctcaacagaaactgaaattgaaagcaaatcatagagatgagaggttaatatactcttgctgtataaaataagaatcattgaaaataaacc

SEQ ID NO: 279929 - DNA, 459 bp, Homo sapiens
agacctcatagcctgcgggagatgggagtccgggacgcggacaggacgggcacttacctacgaatagccagagggagccccccgacacgaggaagaagcatgcagagcccaccaggactccagcaccgaggacagcgctcaggcagccgggccttctctatacgcagccctcccaggccaggagctggctgagccacagcccagaaagaagaggatagaaaaccagagagcagaagtcaggaagcagagagtggaagagcatgagatctcttcaggcccaccagagaccatcagccatgagtgcatgtgggctcacagctcagcagctgggatctggactcctgggagagctgctccagcttgaactcagccacagcctggcagggactttgctgggatctcaagcttggcagggctcctccaagagggtgtgacagaggctgtatggcaggactcctc

SEQ ID NO: 279930 - DNA, 459 bp, Homo sapiens
ttctgcttcattccatggccagagcaagccacgtgggcaagcccgaaaccagggggcgggaaagtaccctccacccacaaggaaaccatggcaagcggtggttgcagacgcaaaaaccaaggccaaacagctgagttttctgccctggaggaggaaagtggtctctgaaagccagaagactctcacattacataattcctgccagctgctgtcaagagctgctaagctgtcctcaagtcctgtgtctgatgtcaagctaataacagatttcgggtgcattagtaaaggtatcttaatcaagtctagatgccttcgagattagactcagccatgatgagcagctaaggattagcaagaaagattacaaattgtttccaggaatttatttctttcaacactgattatatgtatagtcttaagtcaaattaaaatgttgtttatgttcagctgtttttgtga

SEQ ID NO: 279931 - DNA, 432 bp, Homo sapiens
aatatatgcgacatgtacagtggtttgatctggaaaggctggacaactggaatggggttggggaagtggacgacttccagacgcaaaaaccaaggccaaacagctgagttttctgccctggaggaggaaagtggtctctgaaagccagaagactctcacattacataattcctgccagctgctgtcaagagctgctaagctgtcctcaagtcctgtgtctgatgtcaagctaataacagatttcgggtgcattagtaaaggtatcttaatcaagtctagatgccttcgagattagactcagccatgatgagcagctaaggattagcaagaaagattacaaattgtttccaggaatttatttctttcaacactgattatatgtatagtcttaagtcaaattaaaatgttgtttatgttcagctgtttttgtga

SEQ ID NO: 279932 - DNA, 709 bp, Homo sapiens
catcatttctgagtgtgtctgtgtggtgttccagaagagattagcatcagaagactaaagaagatctgccctcaccaatgcaggcaggcatagcaagtttgccaacctgtatcttaattcatctttgtggccagagaagtggatttactgatttgtttcagctgatcaatgtctataacaagcaatgttgatgggctgaaaaccacacagactaccagaggggttgcttttccgaagaatcatgtaaggataaaagagaaagaaagagagaaagaccttggaacccaactagtatctaccaaatagacaggatctcactgtgttgcccaggctggtcgccaactcctggcctcaagtgttcctctggccctggcctcccaaagcactgggattacagttctcttcagggaattttgtctggttcaagaagtcataccccaacccaagagaagccttggacatctctcataagacatccaagggacagagctcctgggagacctagagtgagctggagagtgaacaacataccccactgggaagtaagcagccctggattctgcctcttgctaactgattcgtttcgaaccctgtttttctatctgtaaaagggactgtaactcccctgcccctgcctagattctcatacctggagactagggggctaagaccccttctagagataaaaataaaagtcttaaagagaaag

SEQ ID NO: 279933 - DNA, 3717 bp, Homo sapiens
tttgtttaacatgcaagaatggtgttcagtctgaaggtgattctcttcctatccttgcttctctcgcctgtattgaaaagctcactggtaactttgaataacaatggatatgatggcattgtgattgcaattaatcccagtgtaccagaagatgaaaaactcattcaaaacataaaggaaatggtaactgaagcatctactcacctgtttcatgccaccaaacaaagagcttatttcaggaatgtaagcattttaattccaatgacctacaaatcaaaatctgagtacttaatcccaaaacaagaaacatatgaccaggcagatgtcatagttgctgatctttacctgaaatacggagatgatccctatacacttcaatatggacaatgtggagataaaggacaatatatacattttactccaaacttcttgttgactaataacttggctacctatgggcctcgaggtaaagtatttgtccatgggtgggcccatctccggtggggagtatttgatgagtataatgtggaccagccattctatatttccagaagaaacactactgaagcaacaagatgttccactcgtattactgtttacatggttttgaacgaatgcaagggggccagctgtatagcacgaccattcagacgtgactcacagacagggctgtatgaagcaaaatgtacatttatcccaaagagatcccagactgccaaggaatccattgtgtttatgcaaaatcttgattctgtgactgaattttgtactgaaaaaacacacaataaagaagctccaaacctatagaacaaaatgtgcaatcacagaagcacatgggatgtaatcatgagctctgaagattttcagcatttatctcccatgacagaaataaatttacctcgtcctacattttcattgctcaagtccaaacagcgtgtagtctgtttggtacttgataaatctggaagcatgaatgcagaagaccgtctctttcgaatgaatcaagcagcagaattgtacttgattcaaattattgaaaagggatccttggttgggttggtcacatttgacagttttgctaaaatccaaagtaagctcataaaaataattgatgataacacttaccaaaagatcactgcaaacctgcctcaagaagctgatggtggcacttcaatttgcaggggactcaaagcaggatttcaggcaattccccagagtaatcagagtactttcggttctgaaatcatattactaacagatggggaagattatcaaataagcttatgctttggagaggtaaaacaaagtggcacagtcatccacaccattgctctggggccgtctgctgacgaagaactggagaccctgtcaaatatgacaggattacataagggacactgatatactgaaagttcataaagtgctgggaagttcatcttttgaggacatcgtttttatgcccataaaaacataaatggccttattgatgctttcagcagaatttcatctagaagtggcagcatctctcagcaggctcttcagttggaaagtaaaactttgaatatcccagcgaagaaatggataaatggtacagtgcctgtggatagtacagttagaaatgatacttcctttgttgtcacatggacgatacaaaagccagcaataattcttcaagatccaaaaggaaaaaaatatactacctcagattttcaagaaggtgaactaaatattcggtctgcccgtcttcgaataccaggtattgcagaggtaggtctattattttatgttctctaagttttcttaatcaatttctatttttaaaagataaaaataacatagataacatcttatacattgccaatattaaaatgatgacagatcatctgtaataaagaaatcaaatggaataattagggattcatattcatactatttactagtttgtgaaattcaatattaaaaatcatgattattattctgcttaaatttgtaaataattttgtattccaaacaaaaagtaggaaaatattaccaaagctctcagacagatttttttttaatgtttcagacaggcacttggacttacagcgttcgaaacaatcataccaaatctcaattgctaactgtgacaatgaccactcgagcaagaagccctaccacactcccagtaattgcaactgctcacatgagtcaaaatacagctcattaccctagcccagtgattgtttatgcatgagtcagtcaagggtttcttcctgttctgggaatcaatgtaacagccattatagaaaatgaagagggacatcaagtaacattggagctctgggacaatggcgcaggtgctgattctgtcaagaatgatggcatctactcaaggtattttacagattaccatggaaatggtagatacagtttaaaagtgcttacccaggcaagaaaaaacacagctaggctaagtcaacaacagaataaagctctgtatgtaccgcgctatgctgaaaatggaaaaattatactgaacccatccaaacctgaagtcacagatgatgtggaaggagctcaaacagacgacttcagcagactcacctctggagggtcgtttactgtatcaggagtgcctcctaatggtaatcattctcaggtgttctcacctggtaaaattgtagacctcgaggctaagtttcaaggagatcatattcaactttcatggactgcccctggcaaggtcctcgataaaggaagagctgagagctacattataagaataagtaaacatttcctggacctccaagaagattttgataaagctgctttaataaatacttctggtctgatacctaaggagcctggttcagtagaaagttttgaatttaaaccagaaccttctaaaatagagaatggtacgacattctatattgcaattcaagccatccatgaagccaatgtcacctcagaggtttcaaacattgcacaagcaactaactttattcctccacaggaacccagcattcctgatctgggtaccaatatttctgcaatcagtttggcaatttttggattagctgtaattttatctatattttaaactagaaattatattagaactcaaattcaatgttatacatacttggtaaacatttatttaaaatttaatttactatacttattgtctattataaagctcattataatataaaaagtgaagtacaaaagttgtaagtttcctaattacttgattaattaatactatttgagttattaaatgttaatcaaaatgagtatatcatttcctgtcttggaataatccactcattaatttttaatatgaaaagatatatatttgtacttgtaagcattttaagaaacatttttaaagtgtgctacaaattcatttggtgtactaacatcaaaatgtatccaagccatttaaaaaatatttatatatacatagtagcaaatagttttatagatttatttgtatcgcattttttattacaaatgaatatttcatgtttatataagctgtaatcaaaaaggactagtagtagtagtaaggaagtcaaatttgtttttttatcattgattataagtggtatatttgttttttgtcattgattaaaagtgattttagccctaggcccgaaatgactagcaaatatcattttctgtatgaattgtggaacatcacaataaaattatttctgtgctgatgctaaa

SEQ ID NO: 279934 - DNA, 490 bp, Homo sapiens
caactcatagacatagcacttatgccatttttaaattttatgaacaattttgctttttccatggaacttaagagcacaatttttctctattttcattaatgtcagtgtttcatatatgctttcttcagttgctttttcttattttgataagtattttttatgaaataatagtaacagctaatattaattgaatcccttccatgaattagacttttccaaaaacacagagttagcaagtggcccaagctttcaaccaaaatagtctgattccagaattcatgtacttaaaacgctgtgctacatactatctcccaaattactaacattatcagtgttcataaacagatatgactgtcatttttactttattgtatgactaatttttacatttcattatcaaggtgctgattctgtcaagaatgatggcatctactcaaggtattttacagattaccatggaaatggtagatacagtttaaaagtgcttacc

SEQ ID NO: 279935 - DNA, 3416 bp, Homo sapiens
tttgtttaacatgcaagaatggtgttcagtctgaaggtgattctcttcctatccttgcttctctcgcctgtattgaaaagctcactggtaactttgaataacaatggatatgatggcattgtgattgcaattaatcccagtgtaccagaagatgaaaaactcattcaaaacataaaggaaatggtaactgaagcatctactcacctgtttcatgccaccaaacaaagagcttatttcaggaatgtaagcattttaattccaatgacctacaaatcaaaatctgagtacttaatcccaaaacaagaaacatatgaccaggcagatgtcatagttgctgatctttacctgaaatacggagatgatccctatacacttcaatatggacaatgtggagataaaggacaatatatacattttactccaaacttcttgttgactaataacttggctacctatgggcctcgaggtaaagtatttgtccatgggtgggcccatctccggtggggagtatttgatgagtataatgtggaccagccattctatatttccagaagaaacactactgaagcaacaagatgttccactcgtattactgtttacatggttttgaacgaatgcaagggggccagctgtatagcacgaccattcagacgtgactcacagacagggctgtatgaagcaaaatgtacatttatcccaaagagatcccagactgccaaggaatccattgtgtttatgcaaaatcttgattctgtgactgaattttgtactgaaaaaacacacaataaagaagctccaaacctatagaacaaaatgtgcaatcacagaagcacatgggatgtaatcatgagctctgaagattttcagcatttatctcccatgacagaaataaatttacctcgtcctacattttcattgctcaagtccaaacagcgtgtagtctgtttggtacttgataaatctggaagcatgaatgcagaagaccgtctctttcgaatgaatcaagcagcagaattgtacttgattcaaattattgaaaagggatccttggttgggttggtcacatttgacagttttgctaaaatccaaagtaagctcataaaaataattgatgataacacttaccaaaagatcactgcaaacctgcctcaagaagctgatggtggcacttcaatttgcaggggactcaaagcaggatttcaggcaattccccagagtaatcagagtactttcggttctgaaatcatattactaacagatggggaagattatcaaataagcttatgctttggagaggtaaaacaaagtggcacagtcatccacaccattgctctggggccgtctgctgacgaagaactggagaccctgtcaaatatgacaggattacataagggacactgatatactgaaagttcataaagtgctgggaagttcatcttttgaggacatcgtttttatgcccataaaaacataaatggccttattgatgctttcagcagaatttcatctagaagtggcagcatctctcagcaggctcttcagttggaaagtaaaactttgaatatcccagcgaagaaatggataaatggtacagtgcctgtggatagtacagttagaaatgatacttcctttgttgtcacatggacgatacaaaagccagcaataattcttcaagatccaaaaggaaaaaaatatactacctcagattttcaagaaggtgaactaaatattcggtctgcccgtcttcgaataccaggtattgcagagacaggcacttggacttacagcgttcgaaacaatcataccaaatctcaattgctaactgtgacaatgaccactcgagcaagaagccctaccacactcccagtaattgcaactgctcacatgagtcaaaatacagctcattaccctagcccagtgattgtttatgcatgagtcagtcaagggtttcttcctgttctgggaatcaatgtaacagccattatagaaaatgaagagggacatcaagtaacattggagctctgggacaatggcgcaggtgctgattctgtcaagaatgatggcatctactcaaggtattttacagattaccatggaaatggtagatacagtttaaaagtgcttacccaggcaagaaaaaacacagctaggctaagtcaacaacagaataaagctctgtatgtaccgcgctatgctgaaaatggaaaaattatactgaacccatccaaacctgaagtcacagatgatgtggaaggagctcaaacagacgacttcagcagactcacctctggagggtcgtttactgtatcaggagtgcctcctaatggtaatcattctcaggtgttctcacctggtaaaattgtagacctcgaggctaagtttcaaggagatcatattcaactttcatggactgcccctggcaaggtcctcgataaaggaagagctgagagctacattataagaataagtaaacatttcctggacctccaagaagattttgataaagctgctttaataaatacttctggtctgatacctaaggagcctggttcagtagaaagttttgaatttaaaccagaaccttctaaaatagagaatggtacgacattctatattgcaattcaagccatccatgaagccaatgtcacctcagaggtttcaaacattgcacaagcaactaactttattcctccacaggaacccagcattcctgatctgggtaccaatatttctgcaatcagtttggcaatttttggattagctgtaattttatctatattttaaactagaaattatattagaactcaaattcaatgttatacatacttggtaaacatttatttaaaatttaatttactatacttattgtctattataaagctcattataatataaaaagtgaagtacaaaagttgtaagtttcctaattacttgattaattaatactatttgagttattaaatgttaatcaaaatgagtatatcatttcctgtcttggaataatccactcattaatttttaatatgaaaagatatatatttgtacttgtaagcattttaagaaacatttttaaagtgtgctacaaattcatttggtgtactaacatcaaaatgtatccaagccatttaaaaaatatttatatatacatagtagcaaatagttttatagatttatttgtatcgcattttttattacaaatgaatatttcatgtttatataagctgtaatcaaaaaggactagtagtagtagtaaggaagtcaaatttgtttttttatcattgattataagtggtatatttgttttttgtcattgattaaaagtgattttagccctaggcccgaaatgactagcaaatatcattttctgtatgaattgtggaacatcacaataaaattatttctgtgctgatgctaaa

SEQ ID NO: 279936 - DNA, 1986 bp, Homo sapiens
tttacttcctgcgtccccggacgccgtatgtggaaaggcgaaccctgagtggaggatgttcccgctgcctaaagaatgattgactgtaactgcacttttgtgagattataaatataccacggagggtaacgaagctacagaagaatggaagaagacagcctggaagactcaaaccttcctccaaaagtttggcattctgagatgacggtgtcagtgacaggcgaaccacctagtaccgtagaagaagaaggaatacctaaagaaacagacatagaaatcatcccagaaatcccggaaactctagagccactgtcccttccagatgtgctgaggatctcggcagttctggaggacaccacagaccagctctctattctgaactacatcatgcccgttcagtacgaagggagacagagcatctgcgtgaaaagcagagaaatgaatctagaaggaacgaatctagacaaacttccaatggcctcaacaatcacaaaaatacccagtccgttaataactgaggaaggacccaacttgccagaaatcagacacagaggccggttcgctgtggagtttaacaaaatgcaggatcttgtcttcaaaaaacctacaaggcagaccatcatgactacggagacactgaagaaaattcagattgataggcagtttttcagcgatgtgattgcagataccattaaggagttgcaagattcggccacttacaacagtctcctgcaagctttgagcaaagagagggaaaacaaaatgcatttctatgacatcattgccagggaggaaaaaggaagaaaacagataatatcacttcaaaaacagctaattaatgtcaaaaaggaatggcaatttgaagtccagagtcagaatgagtatattgctaacctcaaggaccaactgcaagagatgaaggcaaaatccaacttggagaatcgctacatgaaaaccaataccgagctgcagattgcccagacccagaaaaagtgtaacagaacagaggaactcttggtggaagagattgagaaactcaggatgaaaaccgaagaagaggcccggactcatacagagattgaaatgttccttagaaaggagcagcagaaacttgaggagaggctggagttctggatggagaaatacgataaggacacagaaatgaaacagaatgaactaaatgctctcaaagccacaaaggccagtgacttagcacaccttcaagacctggcaaagatgataagagagtatgaacaggtcatcattgaagatcgtatagaaaaggagaggagcaagaagaaggtaaaacaggatctcttggaattaaagagcgttataaagctccaggcctggtggcgaggcactatgatacggagagaaattggtggtttcaagatgcctaaagacaaagttgatagcaaggattcaaaaggcaaaggtaaaggcaaggataagaggagaggcaagaagaagtgaccaagttctcttttgtgttttctgctggtattctggaggtgggaaggacttggagagagttaagaaacacctggtacctcaaagatgactcatctacaggttgtttcctattgagactttcccagggaagcctgatttcactttgcctgttaatttcactctgcctgttaggtgggttttcaaaccctgatttaggattacaccattgacttagggcttcctcataccttgctgggaagaagtttctagtagtcctgtgaagattcattcttcttgctctttctcagcagaacaaaggagttcactggcttagctacagtgacgcattgaaacttgagtaattcctgtaatgtcagattttgattttacccaatttgtctgtagtgaaaaaactcttatgagcaaaagtattcagtaggaattacaatatgatgttattagctgtccagcataatatatacacagcaaagttttaataaatgttggttcctgcctgccttttaaaaaaat

SEQ ID NO: 279937 - DNA, 2000 bp, Homo sapiens
tggccacatttattgaatatccaatcttgttccaaaaataacttgagactagtcttcaaaaaaagtttttcttgaagtggaaccaagatctctaagacactgtccccccgaccctagaaaccacgacctgatggagatactttataaaaaattacaacatgagaaatgcctgctaacagagatatttcacaaagaactttacttttgagcagagtgtaccaggtggtaagttggggaatgacggagaagaagaatgttgtgtgaagttagcagcagggcgcgtgtggtttggtgtggctgaagaaaggggcacattttcttggagtatagagtagaagtcagagaagatagtgttgaaaaatgtacacaaaggcctctttcttgttgtattgtctctttaaaaaaattctttctaattgtttattgttttaaaagaaaagaaaagcagagaaatgaatctagaaggaacgaatctagacaaacttccaatggcctcaacaatcacaaaaatacccagtccgttaataactgaggaaggacccaacttgccagaaatcagacacagaggccggttcgctgtggagtttaacaaaatgcaggatcttgtcttcaaaaaacctacaaggcagaccatcatgactacggagacactgaagaaaattcagattgataggcagtttttcagcgatgtgattgcagataccattaaggagttgcaagattcggccacttacaacagtctcctgcaagctttgagcaaagagagggaaaacaaaatgcatttctatgacatcattgccagggaggaaaaaggaagaaaacagataatatcacttcaaaaacagctaattaatgtcaaaaaggaatggcaatttgaagtccagagtcagaatgagtatattgctaacctcaaggaccaactgcaagagatgaaggcaaaatccaacttggagaatcgctacatgaaaaccaataccgagctgcagattgcccagacccagaaaaagtgtaacagaacagaggaactcttggtggaagagattgagaaactcaggatgaaaaccgaagaagaggcccggactcatacagagattgaaatgttccttagaaaggagcagcagaaacttgaggagaggctggagttctggatggagaaatacgataaggacacagaaatgaaacagaatgaactaaatgctctcaaagccacaaaggccagtgacttagcacaccttcaagacctggcaaagatgataagagagtatgaacaggtcatcattgaagatcgtatagaaaaggagaggagcaagaagaaggtaaaacaggatctcttggaattaaagagcgttataaagctccaggcctggtggcgaggcactatgatacggagagaaattggtggtttcaagatgcctaaagacaaagttgatagcaaggattcaaaaggcaaaggtaaaggcaaggataagaggagaggcaagaagaagtgaccaagttctcttttgtgttttctgctggtattctggaggtgggaaggacttggagagagttaagaaacacctggtacctcaaagatgactcatctacaggttgtttcctattgagactttcccagggaagcctgatttcactttgcctgttaatttcactctgcctgttaggtgggttttcaaaccctgatttaggattacaccattgacttagggcttcctcataccttgctgggaagaagtttctagtagtcctgtgaagattcattcttcttgctctttctcagcagaacaaaggagttcactggcttagctacagtgacgcattgaaacttgagtaattcctgtaatgtcagattttgattttacccaatttgtctgtagtgaaaaaactcttatgagcaaaagtattcagtaggaattacaatatgatgttattagctgtccagcataatatatacacagcaaagttttaataaatgttggttcctgcctgccttttaaaaaaat

SEQ ID NO: 279938 - DNA, 573 bp, Homo sapiens
tactactactaaattcgcggccgcgtcgacggcaaggataagaggagaggcaagaagaagtgaccaagttctcttttgtgttttctgctggtattctggaggtgggaaggacttggagagagttaagaaacacctggtacctcaaagatgactcatctacaggttgtttcctattgagactttcccagggaagcctgatttcactttgcctgttaatttcactctgcctgttaggtgggttttcaaaccctgatttaggattacaccattgacttagggcttcctcataccttgctgggaagaagtttctagtagtcctgtgaagattcattcttcttgctctttctcagcagaacaaaggagttcactggcttagctacagtgacgcattgaaacttgagtaattcctgtaatgtcagattttgattttacccaatttgtctgtagtgaaaaaactcttatgagcaaaagtattcagtaggaattacaatatgatgttattagctgtccagcataatatatacacagcaaagttttaataaatgttggttcctgcctgccttttaaaaaaat

SEQ ID NO: 279939 - DNA, 1414 bp, Homo sapiens
ctcacaaaaaagaaaagaaaacaagaaagagcagcaggcagatgggaagagggaagcaggaacaaacgtccttgggccgtggaatctgtgtgtgggaggactcctcgctctgagactgacgtggctcaaggccacgtcaacactcttcctggcactccggaatccccctttttaagccccacagccttgtgcccttggagcgccgtttctgtccttcagtgggcacctctgttcagctcacgggattgtgctcgtctcgttagggacacacgcagtccacacagtgccgcgccacgtggctctgcagtgttggtgaacaggagttgcagggaactgaaagcccgggatcccagctggtaaagggagcctcagctaccgaccgagctgctgctctcatcttgagaacttctgattcccagccctgcggggaagacgtactggtatctgattgttcttacagaaactcaggatgaaaaccgaagaagaggcccggactcatacagagattgaaatgttccttagaaaggagcagcagaaacttgaggagaggctggagttctggatggagaaatacgataaggacacagaaatgaaacagaatgaactaaatgctctcaaagccacaaaggccagtgacttagcacaccttcaagacctggcaaagatgataagagagtatgaacaggtcatcattgaagatcgtatagaaaaggagaggagcaagaagaaggtaaaacaggatctcttggaattaaagagcgttataaagctccaggcctggtggcgaggcactatgatacggagagaaattggtggtttcaagatgcctaaagacaaagttgatagcaaggattcaaaaggcaaaggtaaaggcaaggataagaggagaggcaagaagaagtgaccaagttctcttttgtgttttctgctggtattctggaggtgggaaggacttggagagagttaagaaacacctggtacctcaaagatgactcatctacaggttgtttcctattgagactttcccagggaagcctgatttcactttgcctgttaatttcactctgcctgttaggtgggttttcaaaccctgatttaggattacaccattgacttagggcttcctcataccttgctgggaagaagtttctagtagtcctgtgaagattcattcttcttgctctttctcagcagaacaaaggagttcactggcttagctacagtgacgcattgaaacttgagtaattcctgtaatgtcagattttgattttacccaatttgtctgtagtgaaaaaactcttatgagcaaaagtattcagtaggaattacaatatgatgttattagctgtccagcataatatatacacagcaaagttttaataaatgttggttcctgcctgccttttaaaaaaat

SEQ ID NO: 279940 - DNA, 916 bp, Homo sapiens
  misc_feature (24)..(24): n is a, c, g, or t
  misc_feature (37)..(37): n is a, c, g, or t
gattgctggaacgactctctaatnaccaccgctacanaaacttgaggagaggctggagttctggatggagaaatacgataaggacacagaaatgaaacagaatgaactaaatgctctcaaagccacaaaggccagtgacttagcacaccttcaagacctggcaaagatgataagagagtatgaacaggtcatcattgaagatcgtatagaaaaggagaggagcaagaagaaggtaaaacaggatctcttggaattaaagagcgttataaagctccaggcctggtggcgaggcactatgatacggagagaaattggtggtttcaagatgcctaaagacaaagttgatagcaaggattcaaaaggcaaaggtaaaggcaaggataagaggagaggcaagaagaagtgaccaagttctcttttgtgttttctgctggtattctggaggtgggaaggacttggagagagttaagaaacacctggtacctcaaagatgactcatctacaggttgtttcctattgagactttcccagggaagcctgatttcactttgcctgttaatttcactctgcctgttaggtgggttttcaaaccctgatttaggattacaccattgacttagggcttcctcataccttgctgggaagaagtttctagtagtcctgtgaagattcattcttcttgctctttctcagcagaacaaaggagttcactggcttagctacagtgacgcattgaaacttgagtaattcctgtaatgtcagattttgattttacccaatttgtctgtagtgaaaaaactcttatgagcaaaagtattcagtaggaattacaatatgatgttattagctgtccagcataatatatacacagcaaagttttaataaatgttggttcctgcctgccttttaaaaaaat

SEQ ID NO: 279941 - DNA, 1361 bp, Homo sapiens
ctcacaaaaaagaaaagaaaacaagaaagagcagcaggcagatgggaagagggaagcaggaacaaacgtccttgggccgtggaatctgtgtgtgggaggactcctcgctctgagactgacgtggctcaaggccacgtcaacactcttcctggcactccggaatccccctttttaagccccacagccttgtgcccttggagcgccgtttctgtccttcagtgggcacctctgttcagctcacgggattgtgctcgtctcgttagggacacacgcagtccacacagtgccgcgccacgtggctctgcagtgttggtgaacaggagttgcagggaactgaaagcccgggatcccagctggtaaagggagcctcagctaccgaccgagctgctgctctcatcttgagaacttctgattcccagccctgcggggaagacgtactggtatctgattgttcttacagaaactcaggatgaaaaccgaagaaacttgaggagaggctggagttctggatggagaaatacgataaggacacagaaatgaaacagaatgaactaaatgctctcaaagccacaaaggccagtgacttagcacaccttcaagacctggcaaagatgataagagagtatgaacaggtcatcattgaagatcgtatagaaaaggagaggagcaagaagaaggtaaaacaggatctcttggaattaaagagcgttataaagctccaggcctggtggcgaggcactatgatacggagagaaattggtggtttcaagatgcctaaagacaaagttgatagcaaggattcaaaaggcaaaggtaaaggcaaggataagaggagaggcaagaagaagtgaccaagttctcttttgtgttttctgctggtattctggaggtgggaaggacttggagagagttaagaaacacctggtacctcaaagatgactcatctacaggttgtttcctattgagactttcccagggaagcctgatttcactttgcctgttaatttcactctgcctgttaggtgggttttcaaaccctgatttaggattacaccattgacttagggcttcctcataccttgctgggaagaagtttctagtagtcctgtgaagattcattcttcttgctctttctcagcagaacaaaggagttcactggcttagctacagtgacgcattgaaacttgagtaattcctgtaatgtcagattttgattttacccaatttgtctgtagtgaaaaaactcttatgagcaaaagtattcagtaggaattacaatatgatgttattagctgtccagcataatatatacacagcaaagttttaataaatgttggttcctgcctgccttttaaaaaaat

SEQ ID NO: 279942 - DNA, 932 bp, Homo sapiens
tcttgcttctctcccccgctcgcctccctcaacctccgccagcctcccttctgaaacttgaggagaggctggagttctggatggagaaatacgataaggacacagaaatgaaacagaatgaactaaatgctctcaaagccacaaaggccagtgacttagcacaccttcaagacctggcaaagatgataagagagtatgaacaggtcatcattgaagatcgtatagaaaaggagaggagcaagaagaaggtaaaacaggatctcttggaattaaagagcgttataaagctccaggcctggtggcgaggcactatgatacggagagaaattggtggtttcaagatgcctaaagacaaagttgatagcaaggattcaaaaggcaaaggtaaaggcaaggataagaggagaggcaagaagaagtgaccaagttctcttttgtgttttctgctggtattctggaggtgggaaggacttggagagagttaagaaacacctggtacctcaaagatgactcatctacaggttgtttcctattgagactttcccagggaagcctgatttcactttgcctgttaatttcactctgcctgttaggtgggttttcaaaccctgatttaggattacaccattgacttagggcttcctcataccttgctgggaagaagtttctagtagtcctgtgaagattcattcttcttgctctttctcagcagaacaaaggagttcactggcttagctacagtgacgcattgaaacttgagtaattcctgtaatgtcagattttgattttacccaatttgtctgtagtgaaaaaactcttatgagcaaaagtattcagtaggaattacaatatgatgttattagctgtccagcataatatatacacagcaaagttttaataaatgttggttcctgcctgccttttaaaaaaat

SEQ ID NO: 279943 - DNA, 2148 bp, Homo sapiens
ggaagaaaggctagcgggcgttggccgtatgtgggtgtcttgaggcagtttttcagttctttcatttaccaaagtgacatgcacctactaggtgccaggtgtttagacgtacatacaaccctctgcaaaatctttcagtgtagtcctctgtatgaaaagtttccagccaagaattgccactgcacctgagataagggggatcctggccattaaggaaaccttgccttcgaaactgagccgtgaggaactatacaaaatgggaaattgggacaaatcccagtggctcatgacactaagaagtaaaattacgaactcactgagctggaagtcattcaacgggaattgaataggtaactgcacttttgtgagattataaatataccacggagggtaacgaagctacagaagaatggaagaagacagcctggaagactcaaaccttcctccaaaagtttggcattctgagatgacggtgtcagtgacaggcgaaccacctagtaccgtagaagaagaaggaatacctaaagaaacagacatagaaatcatcccagaaatcccggaaactctagagccactgtcccttccagatgtgctgaggatctcggcagttctggaggacaccacagaccagctctctattctgaactacatcatgcccgttcagtacgaagggagacagagcatctgcgtgaaaagcagagaaatgaatctagaaggaacgaatctagacaaacttccaatggcctcaacaatcacaaaaatacccagtccgttaataactgaggaaggacccaacttgccagaaatcagacacagaggccggttcgctgtggagtttaacaaaatgcaggatcttgtcttcaaaaaacctacaaggcagaccatcatgactacggagacactgaagaaaattcagattgataggcagtttttcagcgatgtgattgcagataccattaaggagttgcaagattcggccacttacaacagtctcctgcaagctttgagcaaagagagggaaaacaaaatgcatttctatgacatcattgccagggaggaaaaaggaagaaaacagataatatcacttcaaaaacagctaattaatgtcaaaaaggaatggcaatttgaagtccagagtcagaatgagtatattgctaacctcaaggaccaactgcaagagatgaaggcaaaatccaacttggagaatcgctacatgaaaaccaataccgagctgcagattgcccagacccagaaaaagtgtaacagaacagaggaactcttggtggaagagattgagaaactcaggatgaaaaccgaagaagaggcccggactcatacagagattgaaatgttccttagaaaggagcagcagaaacttgaggagaggctggagttctggatggagaaatacgataaggacacagaaatgaaacagaatgaactaaatgctctcaaagccacaaaggccagtgacttagcacaccttcaagacctggcaaagatgataagagagtatgaacaggtcatcattgaagatcgtatagaaaaggagaggagcaagaagaaggtaaaacaggatctcttggaattaaagagcgttataaagctccaggcctggtggcgaggcactatgatacggagagaaattggtggtttcaagatgcctaaagacaaagttgatagcaaggattcaaaaggcaaaggtaaagcagcgccctaggacctgcgcggccggtgttcacactcagaagcctgtgctttctggggcaccctcacctcccagctggactagagggagtgccgtgtgttctcaagagaatgtacaattacaacccctaaaccacatgagagcctgtgtgtgttttttaacaggtgtttcaactctgagacatcttaaaaatataaccaacccaattccccaaagtctgaaaggcacctactgacacagaaaactgaagttttcatcatcacagtgttgagtgtttcagcattaatagtgaacagtcttttgacctgtgaaaatagctgtcccatttcatatggaagaaaaccaaaccagtgagcccctcaggctgaattctacacccagatgttatgctcctccctcaggctgaattctaaaccggatattatgctcctcacaatctc

SEQ ID NO: 279944 - DNA, 2251 bp, Homo sapiens
ggaagaaaggctagcgggcgttggccgtatgtgggtgtcttgaggcagtttttcagttctttcatttaccaaagtgacatgcacctactaggtgccaggtgtttagacgtacatacaaccctctgcaaaatctttcagtgtagtcctctgtatgaaaagtttccagccaagaattgccactgcacctgagataagggggatcctggccattaaggaaaccttgccttcgaaactgagccgtgaggaactatacaaaatgggaaattgggacaaatcccagtggctcatgacactaagaagtaaaattacgaactcactgagctggaagtcattcaacgggaattgaataggtaactgcacttttgtgagattataaatataccacggagggtaacgaagctacagaagaatggaagaagacagcctggaagactcaaaccttcctccaaaagtttggcattctgagatgacggtgtcagtgacaggcgaaccacctagtaccgtagaagaagaaggaatacctaaagaaacagacatagaaatcatcccagaaatcccggaaactctagagccactgtcccttccagatgtgctgaggatctcggcagttctggaggacaccacagaccagctctctattctgaactacatcatgcccgttcagtacgaagggagacagagcatctgcgtgaaaagcagagaaatgaatctagaaggaacgaatctagacaaacttccaatggcctcaacaatcacaaaaatacccagtccgttaataactgaggaaggacccaacttgccagaaatcagacacagaggccggttcgctgtggagtttaacaaaatgcaggatcttgtcttcaaaaaacctacaaggcagaccatcatgactacggagacactgaagaaaattcagattgataggcagtttttcagcgatgtgattgcagataccattaaggagttgcaagattcggccacttacaacagtctcctgcaagctttgagcaaagagagggaaaacaaaatgcatttctatgacatcattgccagggaggaaaaaggaagaaaacagataatatcacttcaaaaacagctaattaatgtcaaaaaggaatggcaatttgaagtccagagtcagaatgagtatattgctaacctcaaggaccaactgcaagagatgaaggcaaaatccaacttggagaatcgctacatgaaaaccaataccgagctgcagattgcccagacccagaaaaagtgtaacagaacagaggaactcttggtggaagagattgagaaactcaggatgaaaaccgaagaagaggcccggactcatacagagattgaaatgttccttagaaaggagcagcagaaacttgaggagaggctggagttctggatggagaaatacgataaggacacagaaatgaaacagaatgaactaaatgctctcaaagccacaaaggccagtgacttagcacaccttcaagacctggcaaagatgataagagagtatgaacaggtcatcattgaagatcgtatagaaaaggagaggagcaagaagaaggtaaaacaggatctcttggaattaaagagcgttataaagctccaggcctggtggcgaggcactatgatacggagagaaattggtggtttcaagatgcctaaagacaaagttgatagcaaggattcaaaaggcaaaggtaaaggcaaggataagaggagaggcaagaagaagtgaccaagttctcttttgtgttttctgctggtattctggaggtgggaaggacttggagagagttaagaaacacctggtacctcaaagatgactcatctacaggttgtttcctattgagactttcccagggaagcctgatttcactttgcctgttaatttcactctgcctgttaggtgggttttcaaaccctgatttaggattacaccattgacttagggcttcctcataccttgctgggaagaagtttctagtagtcctgtgaagattcattcttcttgctctttctcagcagaacaaaggagttcactggcttagctacagtgacgcattgaaacttgagtaattcctgtaatgtcagattttgattttacccaatttgtctgtagtgaaaaaactcttatgagcaaaagtattcagtaggaattacaatatgatgttattagctgtccagcataatatatacacagcaaagttttaataaatgttggttcctgcctgccttttaaaaaaat

SEQ ID NO: 279945 - DNA, 2187 bp, Homo sapiens
agcggagaagttcgccgcagaagatgagggcggcgatcacgtccatcgcgtctcgtggcgcgaagccggccaataaatgctgtttggaggcccactttccagccaagaattgccactgcacctgagataagggggatcctggccattaaggaaaccttgccttcgaaactgagccgtgaggaactatacaaaatgggaaattgggacaaatcccagtggctcatgacactaagaagtaaaattacgaactcactgagctggaagtcattcaacgggaattgaataggtaactgcacttttgtgagattataaatataccacggagggtaacgaagctacagaagaatggaagaagacagcctggaagactcaaaccttcctccaaaagtttggcattctgagatgacggtgtcagtgacaggcgaaccacctagtaccgtagaagaagaaggaatacctaaagaaacagacatagaaatcatcccagaaatcccggaaactctagagccactgtcccttccagatgtgctgaggatctcggcagttctggaggacaccacagaccagctctctattctgaactacatcatgcccgttcagtacgaagggagacagagcatctgcgtgaaaagcagagaaatgaatctagaaggaacgaatctagacaaacttccaatggcctcaacaatcacaaaaatacccagtccgttaataactgaggaaggacccaacttgccagaaatcagacacagaggccggttcgctgtggagtttaacaaaatgcaggatcttgtcttcaaaaaacctacaaggcagaccatcatgactacggagacactgaagaaaattcagattgataggcagtttttcagcgatgtgattgcagataccattaaggagttgcaagattcggccacttacaacagtctcctgcaagctttgagcaaagagagggaaaacaaaatgcatttctatgacatcattgccagggaggaaaaaggaagaaaacagataatatcacttcaaaaacagctaattaatgtcaaaaaggaatggcaatttgaagtccagagtcagaatgagtatattgctaacctcaaggaccaactgcaagagatgaaggcaaaatccaacttggagaatcgctacatgaaaaccaataccgagctgcagattgcccagacccagaaaaagtgtaacagaacagaggaactcttggtggaagagattgagaaactcaggatgaaaaccgaagaagaggcccggactcatacagagattgaaatgttccttagaaaggagcagcagaaacttgaggagaggctggagttctggatggagaaatacgataaggacacagaaatgaaacagaatgaactaaatgctctcaaagccacaaaggccagtgacttagcacaccttcaagacctggcaaagatgataagagagtatgaacaggtcatcattgaagatcgtatagaaaaggagaggagcaagaagaaggtaaaacaggatctcttggaattaaagagcgttataaagctccaggcctggtggcgaggcactatgatacggagagaaattggtggtttcaagatgcctaaagacaaagttgatagcaaggattcaaaaggcaaaggtaaaggcaaggataagaggagaggcaagaagaagtgaccaagttctcttttgtgttttctgctggtattctggaggtgggaaggacttggagagagttaagaaacacctggtacctcaaagatgactcatctacaggttgtttcctattgagactttcccagggaagcctgatttcactttgcctgttaatttcactctgcctgttaggtgggttttcaaaccctgatttaggattacaccattgacttagggcttcctcataccttgctgggaagaagtttctagtagtcctgtgaagattcattcttcttgctctttctcagcagaacaaaggagttcactggcttagctacagtgacgcattgaaacttgagtaattcctgtaatgtcagattttgattttacccaatttgtctgtagtgaaaaaactcttatgagcaaaagtattcagtaggaattacaatatgatgttattagctgtccagcataatatatacacagcaaagttttaataaatgttggttcctgcctgccttttaaaaaaat

SEQ ID NO: 279946 - DNA, 2197 bp, Homo sapiens
ggaagaaaggctagcgggcgttggccgtatgtgggtgtcttgaggcagtttttcagttctttcatttaccaaagtgacatgcacctactaggtgccaggtgtttagacgtacatacaaccctctgcaaaatctttcagtgtagtcctctgtatgaaaagtttccagccaagaattgccactgcacctgagataagggggatcctggccattaaggaaaccttgccttcgaaactgagccgtgaggaactatacaaaatgggaaattgggacaaatcccagtggctcatgacactaagaagtaaaattacgaactcactgagctggaagtcattcaacgggaattgaataggtaactgcacttttgtgagattataaatataccacggagggtaacgaagctacagaagaatggaagaagacagcctggaagactcaaaccttcctccaaaagtttggcattctgagatgacggtgtcagtgacaggcgaaccacctagtaccgtagaagaagaaggaatacctaaagaaacagacatagaaatcatcccagaaatcccggaaactctagagccactgtcccttccagatgtgctgaggatctcggcagttctggaggacaccacagaccagctctctattctgaactacatcatgcccgttcagtacgaagggagacagagcatctgcgtgaaaagcagagaaatgaatctagaaggaacgaatctagacaaacttccaatggcctcaacaatcacaaaaatacccagtccgttaataactgaggaaggacccaacttgccagaaatcagacacagaggccggttcgctgtggagtttaacaaaatgcaggatcttgtcttcaaaaaacctacaaggcagaccatcatgactacggagacactgaagaaaattcagattgataggcagtttttcagcgatgtgattgcagataccattaaggagttgcaagattcggccacttacaacagtctcctgcaagctttgagcaaagagagggaaaacaaaatgcatttctatgacatcattgccagggaggaaaaaggaagaaaacagataatatcacttcaaaaacagctaattaatgtcaaaaaggaatggcaatttgaagtccagagtcagaatgagtatattgctaacctcaaggaccaactgcaagagatgaaggcaaaatccaacttggagaatcgctacatgaaaaccaataccgagctgcagattgcccagacccagaaaaagtgtaacagaacagaggaactcttggtggaagagattgagaaactcaggatgaaaaccgaagaagaggcccggactcatacagagattgaaatgttccttagaaaggagcagcagaaacttgaggagaggctggagttctggatggagaaatacgataaggacacagaaatgaaacagaatgaactaaatgctctcaaagccacaaaggccagtgacttagcacaccttcaagacctggcaaagatgataagagagtatgaacaggtcatcattgaagatcgtatagaaaaggagaggagcaagaagaaggtaaaacaggatctcttggaattaaagagcgttataaagctccaggcctggtggcgaggcactatgatacggagagaaattggtggtttcaagatgcctaaagacaaagttgatagcaaggattcaaaaggcaaaggtaaaggcaaggataagaggagaggcaagaagaagtgaccaagttctcttttgtgttttctgctggtattctggaggtgggaaggacttggagagagttaagaaacacctggtacctcaaagatgactcatctacaggttgtttcctattgagactttcccagggaagccctgatttaggattacaccattgacttagggcttcctcataccttgctgggaagaagtttctagtagtcctgtgaagattcattcttcttgctctttctcagcagaacaaaggagttcactggcttagctacagtgacgcattgaaacttgagtaattcctgtaatgtcagattttgattttacccaatttgtctgtagtgaaaaaactcttatgagcaaaagtattcagtaggaattacaatatgatgttattagctgtccagcataatatatacacagcaaagttttaataaatgttggttcctgcctgccttttaaaaaaat

SEQ ID NO: 279947 - DNA, 935 bp, Homo sapiens
  misc_feature (47)..(47): n is a, c, g, or t
cgggtagggcatcgcgttatgatggtcccccaactcccaaccctgangacttacagaaacttgaggagaggctggagttctggatggagaaatacgataaggacacagaaatgaaacagaatgaactaaatgctctcaaagccacaaaggccagtgacttagcacaccttcaagacctggcaaagatgataagagagtatgaacaggtcatcattgaagatcgtatagaaaaggagaggagcaagaagaaggtaaaacaggatctcttggaattaaagagcgttataaagctccaggcctggtggcgaggcactatgatacggagagaaattggtggtttcaagatgcctaaagacaaagttgatagcaaggattcaaaaggcaaaggtaaaggcaaggataagaggagaggcaagaagaagtgaccaagttctcttttgtgttttctgctggtattctggaggtgggaaggacttggagagagttaagaaacacctggtacctcaaagatgactcatctacaggttgtttcctattgagactttcccagggaagcctgatttcactttgcctgttaatttcactctgcctgttaggtgggttttcaaaccctgatttaggattacaccattgacttagggcttcctcataccttgctgggaagaagtttctagtagtcctgtgaagattcattcttcttgctctttctcagcagaacaaaggagttcactggcttagctacagtgacgcattgaaacttgagtaattcctgtaatgtcagattttgattttacccaatttgtctgtagtgaaaaaactcttatgagcaaaagtattcagtaggaattacaatatgatgttattagctgtccagcataatatatacacagcaaagttttaataaatgttggttcctgcctgccttttaaaaaaat

SEQ ID NO: 279948 - DNA, 1466 bp, Homo sapiens
ggaagaaaggctagcgggcgttggccgtatgtgggtgtcttgaggcagtttttcagttctttcatttaccaaagtgacatgcacctactaggtgccaggtgtttagacgtacatacaaccctctgcaaaatctttcagtgtagtcctctgtatgaaaagtttccagccaagaattgccactgcacctgagataagggggatcctggccattaaggaaaccttgccttcgaaactgagccgtgaggaactatacaaaatgggaaattgggacaaatcccagtggctcatgacactaagaagtaaaattacgaactcactgagctggaagtcattcaacgggaattgaataggtaactgcacttttgtgagattataaatataccacggagggtaacgaagctacagaagaatggaagaagacagcctggaagactcaaaccttcctccaaaagtttggcattctgagatgacggtgtcagtgacaggcgaaccacctagtaccgtagaagaagaaggaatacctaaagaaacagacatagaaatcatcccagaaatcccggaaactctagagccactgtcccttccagatgtgctgaggatctcggcagttctggaggacaccacagaccagctctctattctgaactacatcatgcccgttcagtacgaagggagacagagcatctgcgtgaaaagcagagaaatgaatctagaaggaacgaatctagacaaacttccaatggcctcaacaatcacaaaaatacccagtccgttaataactgaggaaggacccaacttgccagaaatcagacacagaggccggttcgctgtggagtttaacaaaatgcaggatcttgtcttcaaaaaacctacaaggcagaccatcatgactacggagacactgaagaaaattcagattgataggcagtttttcagcgatgtgattgcagataccattaaggagttgcaagattcggccacttacaacagtctcctgcaagctttgagcaaagagagggaaaacaaaatgcatttctatgacatcattgccagggaggaaaaaggaagaaaacagataatatcacttcaaaaacagctaattaatgtcaaaaaggaatggcaatttgaagtccagagtcagaatgagtatattgctaacctcaaggaccaactgcaagagatgaaggcaaaatccaacttggagaatcgctacatgaaaaccaataccgagctgcagattgcccagacccagaaaaagtgtaacagaacagaggaactcttggtggaagagattgagtaagaaatacagcatcgagagcgctgaacttcgttcaaacctgagtttataggatgagaagtcacggtgaaaaatgccaggaggaagaaagaagtggtagatcttctttgaggggaatgctaaatggcacacacgcacgcacgcacacacgcacgcacgcacgcacgca

SEQ ID NO: 279949 - DNA, 837 bp, Homo sapiens
aagtttcataattttcatttttctttttcttcttaaaggtgtcaacaaaagtaaacaattttataatcatttaacaaattatataccatactctctccaatagtcagtgtaggatgctattcttttaaattgtaaacttacatttgaaaaaaaggtcggattttttttgtttcctgaaaagatcactggcatcttagaaaaataacatgtagaccagtgctactcaaagtgtgctcaatgactggtgctgtcaaactactgctggtatgtgacaacatagaaattagacatttcaaaatatgtatggcaagttgacattgtcatgacatgatcatcgtgcttatattctgtatgtcttttctttcaaagattatttcatttttctaataatttagtgtatcttacaaaagtattactagtgatgaactagagggaaactggtccatcaccccagacagtctgagaagcactgacaagagccgcagactacagtgtccattgctgcggggcacaaatgactggtatgtgtataacatcagcagatgtagtcacctcttgaatgccttatccatggggtcatttccttcactttcttaaaaagatggtaataaataaaggaagtagaatatgagccctggaagcagacatatgggggcttgaattctgattctaccactttagctatatgtgtccttcagcaactttctcctaccttctctgggtctttcctcatctgtaaaatgaaaataccaaaacatatcacagagtggtcatgaggtgcaaattaagaggtatcgaaggtgcctcatatagtgcctgatggatctctagtcaatg

SEQ ID NO: 279950 - DNA, 3607 bp, Homo sapiens
tggtagttgtcataataggagaatttttcagtgcctcttctgtcacaatcgtagacacggtcacactccagtatctgggaaaacacagagatcgctatgggttgcagcgcatgtggggctccctgggctggggcctggcgatgctgtctgtgggcatcgggatcgactacacccacatcgaagtgctcatcgatggaaaggggtgtaagccccccgagtacaggaattaccagatcgtcttcatcgtcttcggcgttctcatgaccatggccttgatcgttgccactcagttccggttccgctacaaccatttcaaaaacgatgattctaaagggaaagaggtggagatcccgcaggtggaaaggaacaactctacagagtcctctgaggagacaccaaccaccacaagccactcgcaggccttcaacttttgggacttaatcaagctgctctgcagcgtgcagtatggctcagtgctgtttgtggcttggttcatgggttttggatatggcttcgtgttcacctttctctactggcatttggaagacctcaatggaactacaaccctctttggggtctgttcagtcctgagtcatgtgtctgagctgacagcatatttttttagtcacaagcttattgaattgatcggccacatcagggttctgtacattggcctggcctgcaatacggctcgctatatttatatttcctacctggagaatgcctggactgttctccccatggaagttcttcaaggagtgacacacgcggccatctgggcagcatgcatttcttacctcagtgcagccgttccccctgagctgaggacatctgctcagggcatcctgcagggccttcacctgggtttgggaagaggatgtggtgccatgatcggaggcgtgttagtcaattattttggggctgctgcaaccttccgaggaattggcatggcctgcttggtgatcctactgctctttgccctgatccagtggctggcagtgccagatgaggaagaagacaagacaatgttggcagaaagaattcctgttccctccagtcccgttcctatagcaaccatcgacttggtacagcaacagacagaagatgtcatgccacgcattgagcccagacttccacccaagaaaactaagcaccaggaagaacaggaagatgtgaacaaaccagcctggggagtcagctcttctccctgggtgacctttgtctatgcactctaccaaattaaagagatgatgcaactcacaagagacaaccgtgcttctgagatacagcctttacaggggaccaatgagaatagggaaaattctcctgctggtagagcccagcctgtcccatgtgagactcactctgacccatctagaaaccagccatcccctgacgcagcagcatctcagacgcagaccagccccgctcaccccagtgtggacccgtgcacagaggagagtgaagagcagcaggctcagctggccgcgggaggacactgagggcatcctgctcatctcacaccctgcatggaatcaggctcctcagccaggacacagggtgaggccccccagccaggatatgcctcccctggaggagcacagcactgcatatgcttctaaatatctaaactcattaacatggaaacacacacacaggagctacagtacatattggcaggaaaaggtaaactttcgtaatctcattggaattacaacagggaaatggagttcaatgaggactttcagttctttgcttggttaggttaaggatgatagaatttctctgccagtgcagtaagagttgaaaccggcagttacactaagtaagtggagggaatgaaagtgtttcgaggtgaatgtggatataatttccctcttctgattatttattcttatttggttcctaacacaaactgggaagagatagaattcatctatactttcttttttcttggagagaaccgtttaaaaaattacaagatatatttaaaaagtaaccagataaaagtagcacatgtgcttttgttaaaaataaagttaaaagttaaagttaaaaaatgaagttaaaagtttcatcagaaactttacatatctttagcaaatatatttttatatgtgtatggcatataatggaaataattctttgagcaacagaagctattattaactactgcaagctaagccgagcttaaaaatgccttttgttttaaatgggctttgagaaaaaaaacagaaacaagcgattatttcaaatcaaccaaccaactcagtatcctgtgttttgatagacaagagtttactaaatatattgatactgtaaatagcctctctcgctatttactatcttatagtaattcaggctctaattagctgagggaatgaaacacacaaaaatcactgaattcctaagagttccttaaataagcagtactagttacaaatcacagtataagatttaagtgcctgggggaaggatacaatttttagaaattacatattgggtcagttttgttttgtttttggtgaggaaaaggtggtaaataggaaaccatgaatgggaaggatggcaataagtagcaactatactttccaatgactaaagaaagaaaatctcagtatattcgttctcatgaagacacagtcagacactggacaatgtaatgtatgcaactgcaaacgttacaactgcagccagaacaatggctgggtggatcgcacgtaaagcttgccactaaaaatcaaagcagaggttaacaggaaacctggggggagtgtggaaaagggaaaactgttttagctgaataaaggtgaattatataatttataatagctgtggatgagcacaggagagagaggaaagaaaagaacagtcgaaatgagcaactcaccttaccctctgaccctgattagacaggatcaattgtaaagtgagggcttctccatgacaccatagttctgcccaatactgcatttgggataagaaattctacacttggatgtctcgcttcacaataaaacacagcttaaaaataaaataactgaaagaaatagaattcagcaaatagttattttttgcacttgaactgaaacgtactgtactgtaaattatgactcattttaagtgacctttaaaatcagatgtatttattatgcttgtgtaattatagaaataaagaaatgggtgacaggcttaacctcacctatgaatgtacagtatgtggatttgtgaaactgactgtaggaagtcaaaaacttgtactgtatcttgtgtttacagttctgatttattcctttgaaaagcctgctgttttggaaatgcacagttgacatgttgaaataaaaatgaataccatttttaaatgtttcttaaatgataaagatgtgaccaaacaaaagtcctatactctaatgaatgagaccaaattcaacatgcctttgttatggaacatttactgtgacagcagaatcgataatgcagtcatttccagccttgtgagctgacaccttcatgggtttgtggactttgtgactttttcttcctgtccccaaagtgccatatgctaccttaaaaaatattaaagtgaattcaaattaaaaaaaaaaat

SEQ ID NO: 279951 - DNA, 2270 bp, Homo sapiens
acacttttatattaacaagcattttgaaaaggctgagggcagatatgttagaagccatcttcttattcctaaattcatgcttaaatgtaattgtccttcagttttcccactcctgagtttggagtctgctggatgatgggtggtttggggaaggaaaagggttctgtacattggcctggcctgcaatacggctcgctatatttatatttcctacctggagaatgcctggactgttctccccatggaagttcttcaaggaagagcagcaggctcagctggccgcgggaggacactgagggcatcctgctcatctcacaccaggagctacagtacatattggcaggaaaaggtaaactttcgtaatctcattggaattacaacagggaaatggagttcaatgaggactttcagttctttgcttggttaggttaaggatgatagaatttctctgccagtgcagtaagagttgaaaccggcagttacactaagtaagtggagggaatgaaagtgtttcgaggtgaatgtggatataatttccctcttctgattatttattcttatttggttcctaacacaaactgggaagagatagaattcatctatactttcttttttcttggagagaaccgtttaaaaaattacaagatatatttaaaaagtaaccagataaaagtagcacatgtgcttttgttaaaaataaagttaaaagttaaagttaaaaaatgaagttaaaagtttcatcagaaactttacatatctttagcaaatatatttttatatgtgtatggcatataatggaaataattctttgagcaacagaagctattattaactactgcaagctaagccgagcttaaaaatgccttttgttttaaatgggctttgagaaaaaaaacagaaacaagcgattatttcaaatcaaccaaccaactcagtatcctgtgttttgatagacaagagtttactaaatatattgatactgtaaatagcctctctcgctatttactatcttatagtaattcaggctctaattagctgagggaatgaaacacacaaaaatcactgaattcctaagagttccttaaataagcagtactagttacaaatcacagtataagatttaagtgcctgggggaaggatacaatttttagaaattacatattgggtcagttttgttttgtttttggtgaggaaaaggtggtaaataggaaaccatgaatgggaaggatggcaataagtagcaactatactttccaatgactaaagaaagaaaatctcagtatattcgttctcatgaagacacagtcagacactggacaatgtaatgtatgcaactgcaaacgttacaactgcagccagaacaatggctgggtggatcgcacgtaaagcttgccactaaaaatcaaagcagaggttaacaggaaacctggggggagtgtggaaaagggaaaactgttttagctgaataaaggtgaattatataatttataatagctgtggatgagcacaggagagagaggaaagaaaagaacagtcgaaatgagcaactcaccttaccctctgaccctgattagacaggatcaattgtaaagtgagggcttctccatgacaccatagttctgcccaatactgcatttgggataagaaattctacacttggatgtctcgcttcacaataaaacacagcttaaaaataaaataactgaaagaaatagaattcagcaaatagttattttttgcacttgaactgaaacgtactgtactgtaaattatgactcattttaagtgacctttaaaatcagatgtatttattatgcttgtgtaattatagaaataaagaaatgggtgacaggcttaacctcacctatgaatgtacagtatgtggatttgtgaaactgactgtaggaagtcaaaaacttgtactgtatcttgtgtttacagttctgatttattcctttgaaaagcctgctgttttggaaatgcacagttgacatgttgaaataaaaatgaataccatttttaaatgtttcttaaatgataaagatgtgaccaaacaaaagtcctatactctaatgaatgagaccaaattcaacatgcctttgttatggaacatttactgtgacagcagaatcgataatgcagtcatttccagccttgtgagctgacaccttcatgggtttgtggactttgtgactttttcttcctgtccccaaagtgccatatgctaccttaaaaaatattaaagtgaattcaaattaaaaaaaaaaat

SEQ ID NO: 279952 - DNA, 2896 bp, Homo sapiens
  misc_feature (40)..(40): n is a, c, g, or t
  misc_feature (42)..(42): n is a, c, g, or t
agaggatcgcttagagctggttttctccccatggaagtcntnaaggagtgacacacgcggccatctgggcagcatgcatttcttacctcagtgcagccgttccccctgagctgaggacatctgctcagggcatcctgcagggccttcacctgggtttgggaagaggatgtggtgccatgatcggaggcgtgttagtcaattattttggggctgctgcaaccttccgaggaattggcatggcctgcttggtgatcctactgctctttgccctgatccagtggctggcagtgccagatgaggaagaagacaagacaatgttggcagaaagaattcctgttccctccagtcccgttcctatagcaaccatcgacttggtacagcaacagacagaagatgtcatgccacgcattgagcccagacttccacccaagaaaactaagcaccaggaagaacaggaagatgtgaacaaaccagcctggggagtcagctcttctccctgggtgacctttgtctatgcactctaccaaattaaagagatgatgcaactcacaagagacaaccgtgcttctgagatacagcctttacaggggaccaatgagaatagggaaaattctcctgctggtagagcccagcctgtcccatgtgagactcactctgacccatctagaaaccagccatcccctgacgcagcagcatctcagacgcagaccagccccgctcaccccagtgtggacccgtgcacagaggagagtgaagagcagcaggctcagctggccgcgggaggacactgagggcatcctgctcatctcacaccctgcatggaatcaggctcctcagccaggacacagggtgaggccccccagccaggatatgcctcccctggaggagcacagcactgcatatgcttctaaatatctaaactcattaacatggaaacacacacacaggagctacagtacatattggcaggaaaaggtaaactttcgtaatctcattggaattacaacagggaaatggagttcaatgaggactttcagttctttgcttggttaggttaaggatgatagaatttctctgccagtgcagtaagagttgaaaccggcagttacactaagtaagtggagggaatgaaagtgtttcgaggtgaatgtggatataatttccctcttctgattatttattcttatttggttcctaacacaaactgggaagagatagaattcatctatactttcttttttcttggagagaaccgtttaaaaaattacaagatatatttaaaaagtaaccagataaaagtagcacatgtgcttttgttaaaaataaagttaaaagttaaagttaaaaaatgaagttaaaagtttcatcagaaactttacatatctttagcaaatatatttttatatgtgtatggcatataatggaaataattctttgagcaacagaagctattattaactactgcaagctaagccgagcttaaaaatgccttttgttttaaatgggctttgagaaaaaaaacagaaacaagcgattatttcaaatcaaccaaccaactcagtatcctgtgttttgatagacaagagtttactaaatatattgatactgtaaatagcctctctcgctatttactatcttatagtaattcaggctctaattagctgagggaatgaaacacacaaaaatcactgaattcctaagagttccttaaataagcagtactagttacaaatcacagtataagatttaagtgcctgggggaaggatacaatttttagaaattacatattgggtcagttttgttttgtttttggtgaggaaaaggtggtaaataggaaaccatgaatgggaaggatggcaataagtagcaactatactttccaatgactaaagaaagaaaatctcagtatattcgttctcatgaagacacagtcagacactggacaatgtaatgtatgcaactgcaaacgttacaactgcagccagaacaatggctgggtggatcgcacgtaaagcttgccactaaaaatcaaagcagaggttaacaggaaacctggggggagtgtggaaaagggaaaactgttttagctgaataaaggtgaattatataatttataatagctgtggatgagcacaggagagagaggaaagaaaagaacagtcgaaatgagcaactcaccttaccctctgaccctgattagacaggatcaattgtaaagtgagggcttctccatgacaccatagttctgcccaatactgcatttgggataagaaattctacacttggatgtctcgcttcacaataaaacacagcttaaaaataaaataactgaaagaaatagaattcagcaaatagttattttttgcacttgaactgaaacgtactgtactgtaaattatgactcattttaagtgacctttaaaatcagatgtatttattatgcttgtgtaattatagaaataaagaaatgggtgacaggcttaacctcacctatgaatgtacagtatgtggatttgtgaaactgactgtaggaagtcaaaaacttgtactgtatcttgtgtttacagttctgatttattcctttgaaaagcctgctgttttggaaatgcacagttgacatgttgaaataaaaatgaataccatttttaaatgtttcttaaatgataaagatgtgaccaaacaaaagtcctatactctaatgaatgagaccaaattcaacatgcctttgttatggaacatttactgtgacagcagaatcgataatgcagtcatttccagccttgtgagctgacaccttcatgggtttgtggactttgtgactttttcttcctgtccccaaagtgccatatgctaccttaaaaaatattaaagtgaattcaaattaaaaaaaaaaat

SEQ ID NO: 279953 - DNA, 3632 bp, Homo sapiens
tggtagttgtcataataggagaatttttcagtgcctcttctgtcacaatcgtagacacggtcacactccagtatctgggaaaacacagagatcgctatgggttgcagcgcatgtggggctccctgggctggggcctggcgatgctgtctgtgggcatcgggatcgactacacccacatcgaagtgctcatcgatggaaaggggtgtaagccccccgagtacaggaattaccagatcgtcttcatcgtcttcggcgttctcatgaccatggccttgatcgttgccactcagttccggttccgctacaaccatttcaaaaacgatgattctaaagggaaagaggtggagatcccgcaggtggaaaggaacaactctacagagtcctctgaggagacaccaaccaccacaagccactcgcaggccttcaacttttgggacttaatcaagctgctctgcagcgtgcagtatggctcagtgctgtttgtggcttggttcatgggttttggatatggcttcgtgttcacctttctctactggcatttggaagacctcaatggaactacaaccctctttggggtctgttcagtcctgagtcatgtgtctgagctgacagcatatttttttagtcacaagcttattgaattgatcggccacatcagggttctgtacattggcctggcctgcaatacggctcgctatatttatatttcctacctggagaatgcctggactgttctccccatggaagttcttcaaggagtgacacacgcggccatctgggcagcatgcatttcttacctcagtgcagccgttccccctgagctgaggacatctgctcagggcatcctgcagggccttcacctgggtttgggaagaggatgtggtgccatgatcggaggcgtgttagtcaattattttggggctgctgcaaccttccgaggaattggcatggcctgcttggtgatcctactgctctttgccctgatccagtggctggcagtgccagatgaggaagaagacaagacaatgttggcagaaagaattcctgttccctccagtcccgttcctatagcaaccatcgacttggtacagcaacagacagaagatgtcatgccacgcattgagcccagacttccacccaagaaaactaagcaccaggaagaacaggaagatgtgaacaaaccagcctggggagtcagctcttctccctgggtgacctttgtctatgcactctaccaaattaaagagatgatgcaactcacaagagacaaccgtgcttctgagatacagcctttacagttgcacataggaaaggagatgaaaggggaccaatgagaatagggaaaattctcctgctggtagagcccagcctgtcccatgtgagactcactctgacccatctagaaaccagccatcccctgacgcagcagcatctcagacgcagaccagccccgctcaccccagtgtggacccgtgcacagaggagagtgaagagcagcaggctcagctggccgcgggaggacactgagggcatcctgctcatctcacaccctgcatggaatcaggctcctcagccaggacacagggtgaggccccccagccaggatatgcctcccctggaggagcacagcactgcatatgcttctaaatatctaaactcattaacatggaaacacacacacaggagctacagtacatattggcaggaaaaggtaaactttcgtaatctcattggaattacaacagggaaatggagttcaatgaggactttcagttctttgcttggttaggttaaggatgatagaatttctctgccagtgcagtaagagttgaaaccggcagttacactaagtaagtggagggaatgaaagtgtttcgaggtgaatgtggatataatttccctcttctgattatttattcttatttggttcctaacacaaactgggaagagatagaattcatctatactttcttttttcttggagagaaccgtttaaaaaattacaagatatatttaaaaagtaaccagataaaagtagcacatgtgcttttgttaaaaataaagttaaaagttaaagttaaaaaatgaagttaaaagtttcatcagaaactttacatatctttagcaaatatatttttatatgtgtatggcatataatggaaataattctttgagcaacagaagctattattaactactgcaagctaagccgagcttaaaaatgccttttgttttaaatgggctttgagaaaaaaaacagaaacaagcgattatttcaaatcaaccaaccaactcagtatcctgtgttttgatagacaagagtttactaaatatattgatactgtaaatagcctctctcgctatttactatcttatagtaattcaggctctaattagctgagggaatgaaacacacaaaaatcactgaattcctaagagttccttaaataagcagtactagttacaaatcacagtataagatttaagtgcctgggggaaggatacaatttttagaaattacatattgggtcagttttgttttgtttttggtgaggaaaaggtggtaaataggaaaccatgaatgggaaggatggcaataagtagcaactatactttccaatgactaaagaaagaaaatctcagtatattcgttctcatgaagacacagtcagacactggacaatgtaatgtatgcaactgcaaacgttacaactgcagccagaacaatggctgggtggatcgcacgtaaagcttgccactaaaaatcaaagcagaggttaacaggaaacctggggggagtgtggaaaagggaaaactgttttagctgaataaaggtgaattatataatttataatagctgtggatgagcacaggagagagaggaaagaaaagaacagtcgaaatgagcaactcaccttaccctctgaccctgattagacaggatcaattgtaaagtgagggcttctccatgacaccatagttctgcccaatactgcatttgggataagaaattctacacttggatgtctcgcttcacaataaaacacagcttaaaaataaaataactgaaagaaatagaattcagcaaatagttattttttgcacttgaactgaaacgtactgtactgtaaattatgactcattttaagtgacctttaaaatcagatgtatttattatgcttgtgtaattatagaaataaagaaatgggtgacaggcttaacctcacctatgaatgtacagtatgtggatttgtgaaactgactgtaggaagtcaaaaacttgtactgtatcttgtgtttacagttctgatttattcctttgaaaagcctgctgttttggaaatgcacagttgacatgttgaaataaaaatgaataccatttttaaatgtttcttaaatgataaagatgtgaccaaacaaaagtcctatactctaatgaatgagaccaaattcaacatgcctttgttatggaacatttactgtgacagcagaatcgataatgcagtcatttccagccttgtgagctgacaccttcatgggtttgtggactttgtgactttttcttcctgtccccaaagtgccatatgctaccttaaaaaatattaaagtgaattcaaattaaaaaaaaaaat

SEQ ID NO: 279954 - DNA, 2546 bp, Homo sapiens
tggtagttgtcataataggagaatttttcagtgcctcttctgtcacaatcgtagacacggtcacactccagtatctgggaaaacacagagatcgctatgggttgcagcgcatgtggggctccctgggctggggcctggcgatgctgtctgtgggcatcgggatcgactacacccacatcgaagtgctcatcgatggaaaggggtgtaagccccccgagtacaggaattaccagatcgtcttcatcgtcttcggcgttctcatgaccatggccttgatcgttgccactcagttccggttccgctacaaccatttcaaaaacgatgattctaaagggaaagaggtggagatcccgcaggtggaaaggaacaactctacagagtcctctgaggagacaccaaccaccacaagccactcgcaggccttcaacttttgggaactgagggcatcctgctcatctcacaccctgcatggaatcaggctcctcagccaggacacagggtgaggccccccagccaggatatgcctcccctggaggagcacagcactgcatatgcttctaaatatctaaactcattaacatggaaacacacacacaggagctacagtacatattggcaggaaaaggtaaactttcgtaatctcattggaattacaacagggaaatggagttcaatgaggactttcagttctttgcttggttaggttaaggatgatagaatttctctgccagtgcagtaagagttgaaaccggcagttacactaagtaagtggagggaatgaaagtgtttcgaggtgaatgtggatataatttccctcttctgattatttattcttatttggttcctaacacaaactgggaagagatagaattcatctatactttcttttttcttggagagaaccgtttaaaaaattacaagatatatttaaaaagtaaccagataaaagtagcacatgtgcttttgttaaaaataaagttaaaagttaaagttaaaaaatgaagttaaaagtttcatcagaaactttacatatctttagcaaatatatttttatatgtgtatggcatataatggaaataattctttgagcaacagaagctattattaactactgcaagctaagccgagcttaaaaatgccttttgttttaaatgggctttgagaaaaaaaacagaaacaagcgattatttcaaatcaaccaaccaactcagtatcctgtgttttgatagacaagagtttactaaatatattgatactgtaaatagcctctctcgctatttactatcttatagtaattcaggctctaattagctgagggaatgaaacacacaaaaatcactgaattcctaagagttccttaaataagcagtactagttacaaatcacagtataagatttaagtgcctgggggaaggatacaatttttagaaattacatattgggtcagttttgttttgtttttggtgaggaaaaggtggtaaataggaaaccatgaatgggaaggatggcaataagtagcaactatactttccaatgactaaagaaagaaaatctcagtatattcgttctcatgaagacacagtcagacactggacaatgtaatgtatgcaactgcaaacgttacaactgcagccagaacaatggctgggtggatcgcacgtaaagcttgccactaaaaatcaaagcagaggttaacaggaaacctggggggagtgtggaaaagggaaaactgttttagctgaataaaggtgaattatataatttataatagctgtggatgagcacaggagagagaggaaagaaaagaacagtcgaaatgagcaactcaccttaccctctgaccctgattagacaggatcaattgtaaagtgagggcttctccatgacaccatagttctgcccaatactgcatttgggataagaaattctacacttggatgtctcgcttcacaataaaacacagcttaaaaataaaataactgaaagaaatagaattcagcaaatagttattttttgcacttgaactgaaacgtactgtactgtaaattatgactcattttaagtgacctttaaaatcagatgtatttattatgcttgtgtaattatagaaataaagaaatgggtgacaggcttaacctcacctatgaatgtacagtatgtggatttgtgaaactgactgtaggaagtcaaaaacttgtactgtatcttgtgtttacagttctgatttattcctttgaaaagcctgctgttttggaaatgcacagttgacatgttgaaataaaaatgaataccatttttaaatgtttcttaaatgataaagatgtgaccaaacaaaagtcctatactctaatgaatgagaccaaattcaacatgcctttgttatggaacatttactgtgacagcagaatcgataatgcagtcatttccagccttgtgagctgacaccttcatgggtttgtggactttgtgactttttcttcctgtccccaaagtgccatatgctaccttaaaaaatattaaagtgaattcaaattaaaaaaaaaaat

SEQ ID NO: 279955 - DNA, 3038 bp, Homo sapiens
tggtagttgtcataataggagaatttttcagtgcctcttctgtcacaatcgtagacacggtcacactccagtatctgggaaaacacagagatcgctatgggttgcagcgcatgtggggctccctgggctggggcctggcgatgctgtctgtgggcatcgggatcgactacacccacatcgaagtgctcatcgatggaaaggggtgtaagccccccgagtacaggaattaccagatcgtcttcatcgtcttcggcgttctcatgaccatggccttgatcgttgccactcagttccggttccgctacaaccatttcaaaaacgatgattctaaagggaaagaggtggagatcccgcaggtggaaaggaacaactctacagagtcctctgaggagacaccaaccaccacaagccactcgcaggccttcaacttttgggacttaatcaagctgctctgcagcgtgcagtatggctcagtgctgtttgtggcttggttcatgggttttggatatggcttcgtgttcacctttctctactggcatttggaagacctcaatggaactacaaccctctttggggtctgttcagtcctgagtcatgtgtctgagctgacagcatatttttttagtcacaagcttattgaattgatcggccacatcagggttctgtacattggcctggcctgcaatacggctcgctatatttatatttcctacctggagaatgcctggactgttctccccatggaagttcttcaaggagtgacacacgcggccatctgggcagcatgcatttcttacctcagtgcagccgttccccctgagctgaggacatctgctcagggcatcctgcagggccttcacctgggtttgggaagaggatgtggtgccatgatcggaggcgtgttagtcaattattttggggctgctgcaaccttccgaggaattggcatggcctgcttggtgatcctactgctctttgccctgatccagtggctggcagtgccagatgaggaagaagacaagacaatgttggcagaaagaattcctgttccctccagtcccgttcctatagcaaccatcgacttggtacagcaacagacagaagatgtcatgccacgcattgagcccagacttccacccaagaaaactaagcaccaggaagaacaggaagatgtgaacaaaccagcctggggagtcagctcttctccctgggtgacctttgtctatgcactctaccaaattaaagagatgatgcaactcacaagagacaaccgtgcttctgagatacagcctttacaggggaccaatgagaatagggaaaattctcctgctggtagagcccagcctgtcccatgtgagactcactctgacccatctagaaaccagccatcccctgacgcagcagcatctcagacgcagaccagccccgctcaccccagtgtggacccgtgcacagaggagagtgaagagcagcaggctcagctggccgcgggaggacactgagggcatcctgctcatctcacaccctgcatggaatcaggctcctcagccaggacacagggtgaggccccccagccaggatatgcctcccctggaggagcacagcactgcatatgcttctaaatatctaaactcattaacatggaaacacacacacaggagctacagtacatattggcaggaaaaggtaaactttcgtaatctcattggaattacaacagggaaatggagttcaatgaggactttcagttctttgcttggttaggttaaggatgatagaatttctctgccagtgcagtaagagttgaaaccggcagttacactaagtaagtggagggaatgaaagtgtttcgaggtgaatgtggatataatttccctcttctgattatttattcttatttggttcctaacacaaactgggaagagatagaattcatctatactttcttttttcttggagagaaccgtttaaaaaattacaagatatatttaaaaagtaaccagataaaagtagcacatgtgcttttgttaaaaataaagttaaaagttaaagttaaaaaatgaagttaaaagtttcatcagaaactttacatatctttagcaaatatatttttatatgtgtatggcatataatggaaataattctttgagcaacagaagctattattaactactgcaagctaagccgagcttaaaaatgccttttgttttaaatgggctttgagaaaaaaaacagaaacaagcgattatttcaaatcaaccaaccaactcagtatcctgtgttttgatagacaagagtttactaaatatattgatactgtaaatagcctctctcgctatttactatcttatagtaattcaggctctaattagctgagggaatgaaacacacaaaaatcactgaattcctaagagttccttaaataagcagtactagttacaaatcacagtataagatttaagtgcctgggggaaggatacaatttttagaaattacatattgggtcagttttgttttgtttttggtgaggaaaaggtggtaaataggaaaccatgaatgggaaggatggcaataagtagcaactatactttccaatgactaaagaaagaaaatctcagtatattcgttctcatgaagacacagtcagacactggacaatgtaatgtatgcaactgcaaacgttacaactgcagccagaacaatggctgggtggatcgcacgtaaagcttgccactaaaaatcaaagcagaggttaacaggaaacctggggggagtgtggaaaagggaaaactgttttagctgaataaaggtgaattatataatttataatagctgtggatgagcacaggagagagaggaaagaaaagaacagtcgaaatgagcaactcaccttaccctctgaccctgattagacaggatcaattgtaaagtgagggcttctccatgacaccatagttctgcccaatactgcatttgggataagaaattctacacttggatgtctcgcttcactcgaaacccgggtcctctggcgcccg

SEQ ID NO: 279956 - DNA, 1364 bp, Homo sapiens
ctctagaaggagtccccaagatacgtgtgtatcctgtgttttgatagacaagagtttactaaatatattgatactgtaaatagcctctctcgctatttactatcttatagtaattcaggctctaattagctgagggaatgaaacacacaaaaatcactgaattcctaagagttccttaaataagcagtactagttacaaatcacagtataagatttaagtgcctgggggaaggatacaatttttagaaattacatattgggtcagttttgttttgtttttggtgaggaaaaggtggtaaataggaaaccatgaatgggaaggatggcaataagtagcaactatactttccaatgactaaagaaagaaaatctcagtatattcgttctcatgaagacacagtcagacactggacaatgtaatgtatgcaactgcaaacgttacaactgcagccagaacaatggctgggtggatcgcacgtaaagcttgccactaaaaatcaaagcagaggttaacaggaaacctggggggagtgtggaaaagggaaaactgttttagctgaataaaggtgaattatataatttataatagctgtggatgagcacaggagagagaggaaagaaaagaacagtcgaaatgagcaactcaccttaccctctgaccctgattagacaggatcaattgtaaagtgagggcttctccatgacaccatagttctgcccaatactgcatttgggataagaaattctacacttggatgtctcgcttcacaataaaacacagcttaaaaataaaataactgaaagaaatagaattcagcaaatagttattttttgcacttgaactgaaacgtactgtactgtaaattatgactcattttaagtgacctttaaaatcagatgtatttattatgcttgtgtaattatagaaataaagaaatgggtgacaggcttaacctcacctatgaatgtacagtatgtggatttgtgaaactgactgtaggaagtcaaaaacttgtactgtatcttgtgtttacagttctgatttattcctttgaaaagcctgctgttttggaaatgcacagttgacatgttgaaataaaaatgaataccatttttaaatgtttcttaaatgataaagatgtgaccaaacaaaagtcctatactctaatgaatgagaccaaattcaacatgcctttgttatggaacatttactgtgacagcagaatcgataatgcagtcatttccagccttgtgagctgacaccttcatgggtttgtggactttgtgactttttcttcctgtccccaaagtgccatatgctaccttaaaaaatattaaagtgaattcaaattaaaaaaaaaaat

SEQ ID NO: 279957 - DNA, 1177 bp, Homo sapiens
acccacgcgtcgcccacgcgtccggatttaagtgcctgggggaaggatacaatttttagaaattacatattgggtcagttttgttttgtttttggtgaggaaaaggtggtaaataggaaaccatgaatgggaaggatggcaataagtagcaactatactttccaatgactaaagaaagaaaatctcagtatattcgttctcatgaagacacagtcagacactggacaatgtaatgtatgcaactgcaaacgttacaactgcagccagaacaatggctgggtggatcgcacgtaaagcttgccactaaaaatcaaagcagaggttaacaggaaacctggggggagtgtggaaaagggaaaactgttttagctgaataaaggtgaattatataatttataatagctgtggatgagcacaggagagagaggaaagaaaagaacagtcgaaatgagcaactcaccttaccctctgaccctgattagacaggatcaattgtaaagtgagggcttctccatgacaccatagttctgcccaatactgcatttgggataagaaattctacacttggatgtctcgcttcacaataaaacacagcttaaaaataaaataactgaaagaaatagaattcagcaaatagttattttttgcacttgaactgaaacgtactgtactgtaaattatgactcattttaagtgacctttaaaatcagatgtatttattatgcttgtgtaattatagaaataaagaaatgggtgacaggcttaacctcacctatgaatgtacagtatgtggatttgtgaaactgactgtaggaagtcaaaaacttgtactgtatcttgtgtttacagttctgatttattcctttgaaaagcctgctgttttggaaatgcacagttgacatgttgaaataaaaatgaataccatttttaaatgtttcttaaatgataaagatgtgaccaaacaaaagtcctatactctaatgaatgagaccaaattcaacatgcctttgttatggaacatttactgtgacagcagaatcgataatgcagtcatttccagccttgtgagctgacaccttcatgggtttgtggactttgtgactttttcttcctgtccccaaagtgccatatgctaccttaaaaaatattaaagtgaattcaaattaaaaaaaaaaat

SEQ ID NO: 279958 - DNA, 1729 bp, Homo sapiens
tggtagttgtcataataggagaatttttcagtgcctcttctgtcacaatcgtagacacggtcacactccagtatctgggaaaacacagagatcgctatgggttgcagcgcatgtggggctccctgggctggggcctggcgatgctgtctgtgggcatcgggatcgactacacccacatcgaagtgctcatcgatggaaaggggtgtaagccccccgagtacaggaattaccagatcgtcttcatcgtcttcggcgttctcatgaccatggccttgatcgttgccactcagttccggttccgctacaaccatttcaaaaacgatgattctaaagggaaagaggtggagatcccgcaggtggaaaggaacaactctacagagtcctctgaggagacaccaaccaccacaagccactcgcaggccttcaacttttgggacttaatcaagctgctctgcagcgtgcagtatggctcagtgctgtttgtggcttggttcatgggttttggatatggcttcgtgttcacctttctctactggcatttggaagacctcaatggaactacaaccctctttggggtctgttcagtcctgagtcatgtgtctgagctgacagcatatttttttagtcacaagcttattgaattgatcggccacatcagggttctgtacattggcctggcctgcaatacggctcgctatatttatatttcctacctggagaatgcctggactgttctccccatggaagttcttcaaggagtgacacacgcggccatctgggcagcatgcatttcttacctcagtgcagccgttccccctgagctgaggacatctgctcagggcatcctgcagggccttcacctgggtttgggaagaggatgtggtgccatgatcggaggcgtgttagtcaattattttggggctgctgcaaccttccgaggaattggcatggcctgcttggtgatcctactgctctttgccctgatccagtggctggcagtgccagatgaggaagaagacaagacaatgttggcagaaagaattcctgttccctccagtcccgttcctatagcaaccatcgacttggtacagcaacagacagaagatgtcatgccacgcattgagcccagacttccacccaagaaaactaagcaccaggaagaacaggaagatgtgaacaaaccagcctggggagtcagctcttctccctgggtgacctttgtctatgcactctaccaaattaaagagatgatgcaactcacaagagacaaccgtgcttctgagatacagcctttacaggggaccaatgagaatagggaaaattctcctgctggtagagcccagcctgtcccatgtgagactcactctgacccatctagaaaccagccatcccctgacgcagcagcatctcagacgcagaccagccccgctcaccccagtgtggacccgtgcacagaggagagtgaagagcagcaggctcagctggccgcgggaggacactgagggcatcctgctcatctcacaccctgcatggaatcaggctcctcagccaggacacaggtgtatcttacaaaagtattactagtgatgaactagagggaaactggtccatcaccccagacagtctgagaagcactgacaagagccgcagactacagtgtccattgctgcggggcacaaatgactgaatgaagtcaacttgaaggtcgcatgtcaggcagtactcgggt

SEQ ID NO: 279959 - DNA, 2002 bp, Homo sapiens
tggtagttgtcataataggagaatttttcagtgcctcttctgtcacaatcgtagacacggtcacactccagtatctgggaaaacacagagatcgctatgggttgcagcgcatgtggggctccctgggctggggcctggcgatgctgtctgtgggcatcgggatcgactacacccacatcgaagtgctcatcgatggaaaggggtgtaagccccccgagtacaggaattaccagatcgtcttcatcgtcttcggcgttctcatgaccatggccttgatcgttgccactcagttccggttccgctacaaccatttcaaaaacgatgattctaaagggaaagaggtggagatcccgcaggtggaaaggaacaactctacagagtcctctgaggagacaccaaccaccacaagccactcgcaggccttcaacttttgggacttaatcaagctgctctgcagcgtgcagtatggctcagtgctgtttgtggcttggttcatgggttttggatatggcttcgtgttcacctttctctactggcatttggaagacctcaatggaactacaaccctctttggggtctgttcagtcctgagtcatgtgtctgagctgacagcatatttttttagtcacaagcttattgaattgatcggccacatcagggttctgtacattggcctggcctgcaatacggctcgctatatttatatttcctacctggagaatgcctggactgttctccccatggaagttcttcaaggagtgacacacgcggccatctgggcagcatgcatttcttacctcagtgcagccgttccccctgagctgaggacatctgctcagggcatcctgcagggccttcacctgggtttgggaagaggatgtggtgccatgatcggaggcgtgttagtcaattattttggggctgctgcaaccttccgaggaattggcatggcctgcttggtgatcctactgctctttgccctgatccagtggctggcagtgccagatgaggaagaagacaagacaatgttggcagaaagaattcctgttccctccagtcccgttcctatagcaaccatcgacttggtacagcaacagacagaagatgtcatgccacgcattgagcccagacttccacccaagaaaactaagcaccaggaagaacaggaagatgtgaacaaaccagcctggggagtcagctcttctccctgggtgacctttgtctatgcactctaccaaattaaagagatgatgcaactcacaagagacaaccgtgcttctgagatacagcctttacaggggaccaatgagaatagggaaaattctcctgctggtagagcccagcctgtcccatgtgagactcactctgacccatctagaaaccagccatcccctgacgcagcagcatctcagacgcagaccagccccgctcaccccagtgtggacccgtgcacagaggagagtgaagagcagcaggctcagctggccgcgggaggacactgagggcatcctgctcatctcacaccctgcatggaatcaggctcctcagccaggacacaggtgtatcttacaaaagtattactagtgatgaactagagggaaactggtccatcaccccagacagtctgagaagcactgacaagagccgcagactacagtgtccattgctgcggggcacaaatgactggtatgtgtataacatcagcagatgtagtcacctcttgaatgccttatccatggggtcatttccttcactttcttaaaaagatggtaataaataaaggaagtagaatatgagccctggaagcagacatatgggggcttgaattctgattctaccactttagctatatgtgtccttcagcaactttctcctaccttctctgggtctttcctcatctgtaaaatgaaaataccaaaacatatcacagagtggtcatgaggtgcaaattaagaggtatcgaaggtgcctcatatagtgcctgatggatctctagtcaatg

SEQ ID NO: 279960 - DNA, 534 bp, Homo sapiens
tttgggtatatgggattcttggtttatttatttatttttacctttgttcaaatatgtagaaaatgctgaaaaaatagtttaaacattcttttctctccagacaagacaatgttggcagaaagaattcctgttccctccagtcccgttcctatagcaaccatcgacttggtacagcaacagacagaagatgtcatgccacgcattgagcccagacttccacccaagaaaactaagcaccaggaagaacaggaagatgtgaacaaaccagcctggggagtcagctcttctccctgggtgacctttgtctatgcactctaccaaattaaagagatgatgcaactcacaagagacaaccgtgcttctgagatacagcctttacaggtacagttcctttgctgggctagcaatattacctgtcactcaagataccttaactgggctcagttttaattactcacttttcattcaacaagatttattgaaagtctggtgggggaaatagacatgcaaacaatttcagtactctgtgagcac

SEQ ID NO: 279961 - DNA, 587 bp, Homo sapiens
  misc_feature (40)..(40): n is a, c, g, or t
  misc_feature (42)..(42): n is a, c, g, or t
agaggatcgcttagagctggttttctccccatggaagtcntnaaggagtgacacacgcggccatctgggcagcatgcatttcttacctcagtgcagccgttccccctgagctgaggacatctgctcagggcatcctgcagggccttcacctgggtttgggaagaggatgtggtgccatgatcggaggcgtgttagtcaattattttggggctgctgcaaccttccgaggaattggcatggcctgcttggtgatcctactgctctttgccctgatccagtggctggcagtgccagatgaggaagaagacaagacaatgttggcagaaagaattcctgttccctccagtcccgttcctatagcaaccatcgacttggtacagcaacagacagaagatgtcatgccacgcattgagcccagacttccacccaagaaaactaagcaccaggaagaacaggaagatgtgaacaaaccagcctggggagtcagctcttctccctgggtgacctttgtctatgcactctaccaaattaaagagatgatgcaactcacaagagacaaaggaacaccgggatcctctagaacactc

SEQ ID NO: 279962 - DNA, 3360 bp, Homo sapiens
tggtagttgtcataataggagaatttttcagtgcctcttctgtcacaatcgtagacacggtcacactccagtatctgggaaaacacagagatcgctatgggttgcagcgcatgtggggctccctgggctggggcctggcgatgctgtctgtgggcatcgggatcgactacacccacatcgaagtgctcatcgatggaaaggggtgtaagccccccgagtacaggaattaccagatcgtcttcatcgtcttcggcgttctcatgaccatggccttgatcgttgccactcagttccggttccgctacaaccatttcaaaaacgatgattctaaagggaaagaggtggagatcccgcaggtggaaaggaacaactctacagagtcctctgaggagacaccaaccaccacaagccactcgcaggccttcaacttttgggacttaatcaagctgctctgcagcgtgcagtatggctcagtgctgtttgtggcttggttcatgggttttggatatggcttcgtgttcacctttctctactggcatttggaagacctcaatggaactacaaccctctttggggtctgttcagtcctgagtcatgtgtctgagctgacagcatatttttttagtcacaagcttattgaattgatcggccacatcagggttctgtacattggcctggcctgcaatacggctcgctatatttatatttcctacctggagaatgcctggactgttctccccatggaagttcttcaaggagtgacacacgcggccatctgggcagcatgcatttcttacctcagtgcagccgttccccctgagctgaggacatctgctcagggcatcctgcagggccttcacctgggtttgggaagaggatgtggtgccatgatcggaggcgtgttagtcaattattttggggctgctgcaaccttccgaggaattggcatggcctgcttggtgatcctactgctctttgccctgatccagtggctggcagtgccagatgaggaagaagacaagacaatgttggcagaaagaattcctgttccctccagtcccgttcctatagcaaccatcgacttggtacagcaacagacagaagatgtcatgccacgcattgagcccagacttccacccaagaaaactaagcaccaggaagaacaggaagatgtgaacaaaccagcctggggagtcagctcttctccctgggtgacctttgtctatgcactctaccaaattaaagagatgatgcaactcacaagagacaaccgtgcttctgagatacagcctttacaggggaccaatgagaatagggaaaattctcctgctggtagagcccagcctgtcccatgtgagactcactctgacccatctagaaaccagccatcccctgacgcagcagcatctcagacgcagaccagccccgctcaccccagtgtggacccgtgcacagaggagagtgaagagcagcaggctcagctggccgcgggaggacactgagggcatcctgctcatctcacaccctgcatggaatcaggctcctcagccaggacacagggtgaggccccccagccaggatatgcctcccctggaggagcacagcactgcatatgcttctaaatatctaaactcattaacatggaaacacacacacaggagctacagtacatattggcaggaaaaggtaaactttcgtaatctcattggaattacaacagggaaatggagttcaatgaggactttcagttctttgcttggttaggttaaggatgatagaatttctctgccagtgcagtaagagttgaaaccggcagttacactaagtaagtggagggaatgaaagtgtttcgaggtgaatgtggatataatttccctcttctgattatttattcttatttggttcctaacacaaactgggaagagatagaattcatctatactttcttttttcttggagagaaccgtttaaaaaattacaagatatatttaaaaagtaaccagataaaagtagcacatgtgcttttgttaaaaataaagttaaaagttaaagttaaaaaatgaagttaaaagtttcatcagaaactttacatatctttagcaaatatatttttatatgtgtatggcatataatggaaataattctttgagcaacagaagctattattaactactgcaagctaagccgagcttaaaaatgccttttgttttaaatgggctttgagaaaaaaaacagaaacaagcgattatttcaaatcaaccaaccaactcagtatcctgtgttttgatagacaagagtttactaaatatattgatactgtaaatagcctctctcgctatttactatcttatagtaattcaggctctaattagctgagggaatgaaacacacaaaaatcactgaattcctaagagttccttaaataagcagtactagttacaaatcacagtataagatttaagtgcctgggggaaggatacaatttttagaaattacatattgggtcagttttgttttgtttttggtgaggaaaaggtggtaaataggaaaccatgaatgggaaggatggcaataagtagcaactatactttccaatgactaaagaaagaaaatctcagtatattcgttctcatgaagacacagtcagacactggacaatgtaatgtatgcaactgcaaacgttacaactgcagccagaacaatggctgggtggatcgcacgtaaagcttgccactaaaaatcaaagcagaggttaacaggaaacctggggggagtgtggaaaagggaaaactgttttagctgaataaaggtgaattatataatttataatagctgtggatgagcacaggagagagaggaaagaaaagaacagtcgaaatgagcaactcaccttaccctctgaccctgattagacaggatcaattgtaaagtgagggcttctccatgacaccatagttctgcccaatactgcatttgggataagaaattctacacttggatgtctcgcttcacaataaaacacagcttaaaaataaaataactgaaagaaatagaattcagcaaatagttattttttgcacttgaactgaaacgtactgtactgtaaattatgactcattttaagtgacctttaaaatcagatgtatttattatgcttgtgtaattatagaaataaagaaatgggtgacaggcttaacctcacctatgaatgtacagtatgtggatttgtgaaactgactgtaggaagtcaaaaacttgtactgtatcttgtgtttacagttctgatttattcctttgaaaagcctgctgttttggaaatgcacagttgacatgttgaaataaaaatgaataccattttta

SEQ ID NO: 279963 - DNA, 3322 bp, Homo sapiens
tggtagttgtcataataggagaatttttcagtgcctcttctgtcacaatcgtagacacggtcacactccagtatctgggaaaacacagagatcgctatgggttgcagcgcatgtggggctccctgggctggggcctggcgatgctgtctgtgggcatcgggatcgactacacccacatcgaagtgctcatcgatggaaaggggtgtaagccccccgagtacaggaattaccagatcgtcttcatcgtcttcggcgttctcatgaccatggccttgatcgttgccactcagttccggttccgctacaaccatttcaaaaacgatgattctaaagggaaagaggtggagatcccgcaggtggaaaggaacaactctacagagtcctctgaggagacaccaaccaccacaagccactcgcaggccttcaacttttgggacttaatcaagctgctctgcagcgtgcagtatggctcagtgctgtttgtggcttggttcatgggttttggatatggcttcgtgttcacctttctctactggcatttggaagacctcaatggaactacaaccctctttggggtctgttcagtcctgagtcatgtgtctgagctgacagcatatttttttagtcacaagcttattgaattgatcggccacatcagggttctgtacattggcctggcctgcaatacggctcgctatatttatatttcctacctggagaatgcctggactgttctccccatggaagttcttcaaggagtgacacacgcggccatctgggcagcatgcatttcttacctcagtgcagccgttccccctgagctgaggacatctgctcagggcatcctgcagggccttcacctgggtttgggaagaggatgtggtgccatgatcggaggcgtgttagtcaattattttggggctgctgcaaccttccgaggaattggcatggcctgcttggtgatcctactgctctttgccctgatccagtggctggcagtgccagatgaggaagaagacaagacaatgttggcagaaagaattcctgttccctccagtcccgttcctatagcaaccatcgacttggtacagcaacagacagaagatgtcatgccacgcattgagcccagacttccacccaagaaaactaagcaccaggaagaacaggaagatgtgaacgaagagcagcaggctcagctggccgcgggaggacactgagggcatcctgctcatctcacaccctgcatggaatcaggctcctcagccaggacacagggtgaggccccccagccaggatatgcctcccctggaggagcacagcactgcatatgcttctaaatatctaaactcattaacatggaaacacacacacaggagctacagtacatattggcaggaaaaggtaaactttcgtaatctcattggaattacaacagggaaatggagttcaatgaggactttcagttctttgcttggttaggttaaggatgatagaatttctctgccagtgcagtaagagttgaaaccggcagttacactaagtaagtggagggaatgaaagtgtttcgaggtgaatgtggatataatttccctcttctgattatttattcttatttggttcctaacacaaactgggaagagatagaattcatctatactttcttttttcttggagagaaccgtttaaaaaattacaagatatatttaaaaagtaaccagataaaagtagcacatgtgcttttgttaaaaataaagttaaaagttaaagttaaaaaatgaagttaaaagtttcatcagaaactttacatatctttagcaaatatatttttatatgtgtatggcatataatggaaataattctttgagcaacagaagctattattaactactgcaagctaagccgagcttaaaaatgccttttgttttaaatgggctttgagaaaaaaaacagaaacaagcgattatttcaaatcaaccaaccaactcagtatcctgtgttttgatagacaagagtttactaaatatattgatactgtaaatagcctctctcgctatttactatcttatagtaattcaggctctaattagctgagggaatgaaacacacaaaaatcactgaattcctaagagttccttaaataagcagtactagttacaaatcacagtataagatttaagtgcctgggggaaggatacaatttttagaaattacatattgggtcagttttgttttgtttttggtgaggaaaaggtggtaaataggaaaccatgaatgggaaggatggcaataagtagcaactatactttccaatgactaaagaaagaaaatctcagtatattcgttctcatgaagacacagtcagacactggacaatgtaatgtatgcaactgcaaacgttacaactgcagccagaacaatggctgggtggatcgcacgtaaagcttgccactaaaaatcaaagcagaggttaacaggaaacctggggggagtgtggaaaagggaaaactgttttagctgaataaaggtgaattatataatttataatagctgtggatgagcacaggagagagaggaaagaaaagaacagtcgaaatgagcaactcaccttaccctctgaccctgattagacaggatcaattgtaaagtgagggcttctccatgacaccatagttctgcccaatactgcatttgggataagaaattctacacttggatgtctcgcttcacaataaaacacagcttaaaaataaaataactgaaagaaatagaattcagcaaatagttattttttgcacttgaactgaaacgtactgtactgtaaattatgactcattttaagtgacctttaaaatcagatgtatttattatgcttgtgtaattatagaaataaagaaatgggtgacaggcttaacctcacctatgaatgtacagtatgtggatttgtgaaactgactgtaggaagtcaaaaacttgtactgtatcttgtgtttacagttctgatttattcctttgaaaagcctgctgttttggaaatgcacagttgacatgttgaaataaaaatgaataccatttttaaatgtttcttaaatgataaagatgtgaccaaacaaaagtcctatactctaatgaatgagaccaaattcaacatgcctttgttatggaacatttactgtgacagcagaatcgataatgcagtcatttccagccttgtgagctgacaccttcatgggtttgtggactttgtgactttttcttcctgtccccaaagtgccatatgctaccttaaaaaatattaaagtgaattcaaattaaaaaaaaaaat

SEQ ID NO: 279964 - DNA, 2690 bp, Homo sapiens
tttgggtatatgggattcttggtttatttatttatttttacctttgttcaaatatgtagaaaatgctgaaaaaatagtttaaacattcttttctctccagacaagacaatgttggcagaaagaattcctgttccctccagtcccgttcctatagcaaccatcgacttggtacagcaacagacagaagatgtcatgccacgcattgagcccagacttccacccaagaaaactaagcaccaggaagaacaggaagatgtgaacaaaccagcctggggagtcagctcttctccctgggtgacctttgtctatgcactctaccaaattaaagagatgatgcaactcacaagagacaaccgtgcttctgagatacagcctttacaggggaccaatgagaatagggaaaattctcctgctggtagagcccagcctgtcccatgtgagactcactctgacccatctagaaaccagccatcccctgacgcagcagcatctcagacgcagaccagccccgctcaccccagtgtggacccgtgcacagaggagagtgaagagcagcaggctcagctggccgcgggaggacactgagggcatcctgctcatctcacaccctgcatggaatcaggctcctcagccaggacacagggtgaggccccccagccaggatatgcctcccctggaggagcacagcactgcatatgcttctaaatatctaaactcattaacatggaaacacacacacaggagctacagtacatattggcaggaaaaggtaaactttcgtaatctcattggaattacaacagggaaatggagttcaatgaggactttcagttctttgcttggttaggttaaggatgatagaatttctctgccagtgcagtaagagttgaaaccggcagttacactaagtaagtggagggaatgaaagtgtttcgaggtgaatgtggatataatttccctcttctgattatttattcttatttggttcctaacacaaactgggaagagatagaattcatctatactttcttttttcttggagagaaccgtttaaaaaattacaagatatatttaaaaagtaaccagataaaagtagcacatgtgcttttgttaaaaataaagttaaaagttaaagttaaaaaatgaagttaaaagtttcatcagaaactttacatatctttagcaaatatatttttatatgtgtatggcatataatggaaataattctttgagcaacagaagctattattaactactgcaagctaagccgagcttaaaaatgccttttgttttaaatgggctttgagaaaaaaaacagaaacaagcgattatttcaaatcaaccaaccaactcagtatcctgtgttttgatagacaagagtttactaaatatattgatactgtaaatagcctctctcgctatttactatcttatagtaattcaggctctaattagctgagggaatgaaacacacaaaaatcactgaattcctaagagttccttaaataagcagtactagttacaaatcacagtataagatttaagtgcctgggggaaggatacaatttttagaaattacatattgggtcagttttgttttgtttttggtgaggaaaaggtggtaaataggaaaccatgaatgggaaggatggcaataagtagcaactatactttccaatgactaaagaaagaaaatctcagtatattcgttctcatgaagacacagtcagacactggacaatgtaatgtatgcaactgcaaacgttacaactgcagccagaacaatggctgggtggatcgcacgtaaagcttgccactaaaaatcaaagcagaggttaacaggaaacctggggggagtgtggaaaagggaaaactgttttagctgaataaaggtgaattatataatttataatagctgtggatgagcacaggagagagaggaaagaaaagaacagtcgaaatgagcaactcaccttaccctctgaccctgattagacaggatcaattgtaaagtgagggcttctccatgacaccatagttctgcccaatactgcatttgggataagaaattctacacttggatgtctcgcttcacaataaaacacagcttaaaaataaaataactgaaagaaatagaattcagcaaatagttattttttgcacttgaactgaaacgtactgtactgtaaattatgactcattttaagtgacctttaaaatcagatgtatttattatgcttgtgtaattatagaaataaagaaatgggtgacaggcttaacctcacctatgaatgtacagtatgtggatttgtgaaactgactgtaggaagtcaaaaacttgtactgtatcttgtgtttacagttctgatttattcctttgaaaagcctgctgttttggaaatgcacagttgacatgttgaaataaaaatgaataccatttttaaatgtttcttaaatgataaagatgtgaccaaacaaaagtcctatactctaatgaatgagaccaaattcaacatgcctttgttatggaacatttactgtgacagcagaatcgataatgcagtcatttccagccttgtgagctgacaccttcatgggtttgtggactttgtgactttttcttcctgtccccaaagtgccatatgctaccttaaaaaatattaaagtgaattcaaattaaaaaaaaaaat

SEQ ID NO: 279965 - DNA, 2336 bp, Homo sapiens
tggtagttgtcataataggagaatttttcagtgcctcttctgtcacaatcgtagacacggtcacactccagtatctgggaaaacacagagatcgctatgggttgcagcgcatgtggggctccctgggctggggcctggcgatgctgtctgtgggcatcgggatcgactacacccacatcgaagtgctcatcgatggaaaggggtgtaagccccccgagtacaggaattaccagatcgtcttcatcgtcttcggcgttctcatgaccatggccttgatcgttgccactcagttccggttccgctacaaccatttcaaaaacgatgattctaaagggaaagaggtggagatcccgcaggtggaaaggaacaactctacagagtcctctgaggagacaccaaccaccacaagccactcgcaggccttcaacttttgggacttaatcaagctgctctgcagcgtgcagtatggctcagtgctgtttgtggcttggttcatgggttttggatatggcttcgtgttcacctttctctactggcatttggaagacctcaatggaactacaaccctctttggggtctgttcagtcctgagtcatgtgtctgagctgacagcatatttttttagtcacaagcttattgaattgatcggccacatcagggttctgtacattggcctggcctgcaatacggctcgctatatttatatttcctacctggagaatgcctggactgttctccccatggaagttcttcaaggagtgacacacgcggccatctgggcagcatgcatttcttacctcagtgcagccgttccccctgagctgaggacatctgctcagggcatcctgcagggccttcacctgggtttgggaagaggatgtggtgccatgatcggaggcgtgttagtcaattattttggggctgctgcaaccttccgaggaattggcatggcctgcttggtgatcctactgctctttgccctgatccagtggctggcagtgccagatgaggaagaagacaagacaatgttggcagaaagaattcctgttccctccagtcccgttcctatagcaaccatcgacttggtacagcaacagacagaagatgtcatgccacgcattgagcccagacttccacccaagaaaactaagcaccaggaagaacaggaagatgtgaacaaaccagcctggggagtcagctcttctccctgggtgacctttgtctatgcactctaccaaattaaagagatgatgcaactcacaagagacaaccgtgcttctgagatacagcctttacaggggaccaatgagaatagggaaaattctcctgctggtagagcccagcctgtcccatgtgagactcactctgacccatctagaaaccagccatcccctgacgcagcagcatctcagacgcagaccagccccgctcaccccagtgtggacccgtgcacagaggagagtgaagagcagcaggctcagctggccgcgggaggacactgagggcatcctgctcatctcacaccctgcatggaatcaggctcctcagccaggacacagggtgaggccccccagccaggatatgcctcccctggaggagcacagcactgcatatgcttctaaatatctaaactcattaacatggaaacacacacacaggagctacagtacatattggcaggaaaaggtaaactttcgtaatctcattggaattacaacagggaaatggagttcaatgaggactttcagttctttgcttggttaggttaagtgaaagaaatagaattcagcaaatagttattttttgcacttgaactgaaacgtactgtactgtaaattatgactcattttaagtgacctttaaaatcagatgtatttattatgcttgtgtaattatagaaataaagaaatgggtgacaggcttaacctcacctatgaatgtacagtatgtggatttgtgaaactgactgtaggaagtcaaaaacttgtactgtatcttgtgtttacagttctgatttattcctttgaaaagcctgctgttttggaaatgcacagttgacatgttgaaataaaaatgaataccatttttaaatgtttcttaaatgataaagatgtgaccaaacaaaagtcctatactctaatgaatgagaccaaattcaacatgcctttgttatggaacatttactgtgacagcagaatcgataatgcagtcatttccagccttgtgagctgacaccttcatgggtttgtggactttgtgactttttcttcctgtccccaaagtgccatatgctaccttaaaaaatattaaagtgaattcaaattaaaaaaaaaaat

SEQ ID NO: 279966 - DNA, 1309 bp, Homo sapiens
tggtagttgtcataataggagaatttttcagtgcctcttctgtcacaatcgtagacacggtcacactccagtatctgggaaaacacagagatcgctatgggttgcagcgcatgtggggctccctgggctggggcctggcgatgctgtctgtgggcatcgggatcgactacacccacatcgaagtgctcatcgatggaaaggggtgtaagccccccgagtacaggaattaccagatcgtcttcatcgtcttcggcgttctcatgaccatggccttgatcgttgccactcagttccggttccgctacaaccatttcaaaaacgatgattctaaagggaaagaggtggagatcccgcaggtggaaaggaacaactctacagagtcctctgaggagacaccaaccaccacaagccactcgcaggccttcaacttttgggacttaatcaagctgctctgcagcgtgcagtatggctcagtgctgtttgtggcttggttcatgggttttggatatggcttcgtgttcacctttctctactggcatttggaagacctcaatggaactacaaccctctttggggtctgttcagtcctgagtcatgtgtctgagctgacagcatatttttttagtcacaagcttattgaattgatcggccacatcagggttctgtacattggcctggcctgcaatacggctcgctatatttatatttcctacctggagaatgcctggactgttctccccatggaagttcttcaaggtaagttaacagctgggattgaaattatttctctgccttccctgagctgtggctaaaagcccagtggccttcagcatctgattctataaaggaagggcaggcctactgtttcatgtgattttgaagtggttgttaaggaagagatgacatcaggagggatggttccttggttacctgagtgctgctttgtgttgagccaaacaaagctggacttgatccacacccttgtgattaaacaaaggaagaggaactctagaataaactcctgtgcacaactattagacatggacatccaagggtggttttaagatataaaaatatttatcttttaaagtttttggtggttttagttttgtagggtaactatagttactgaaaaaaagattgttgccataattattttatctcttcaggtatttttatcacatctggtgacttataactaaagttttatagccacaccgttgtttttccatgaactttaaaaaatctctgctcaaatgtcctcgccctgagttctttttgcttaagtatcctgcttccatcaagacac

SEQ ID NO: 279967 - DNA, 791 bp, Homo sapiens
tacggctgcgagaagacacagactgtgcaacccccaaagcaggtctcctcactcaccgggatagatagaactatcggccccaattcctcagccctacctgcaaccaccgcttgccatggtttccttgtgggtggagggtactttcccgccccctggtttcgggcttgcccacgtggcttgctctggccatggaatgaagcagaaacgaaagcctgccagttctgagcctatgccggaagacgccttgggcggttccgcggtccctgtgcgcttccaccttcacccagaaggacttctctggtgcagccgctgcttcttcagccacggcccaaaaggatcggagccccctggccgatccgcaggtctgcagggagccacagagcgcagcggccggcccagcgttcaagcccaagcacaggcctgcgagaaccttgttccagccaccgtttgggatggttgattaggacttgttgctgtggcggtagctcaccaatccaatgcgtgcacccgctcctttattaggctatagggcccagtggctgcgacagggacctgatacaacagtgcgttaaataaggagcttattgagctatcatgtcgtaagccggtggagaagtccagggctagtgtgggggctccggcgggggctgtggcccccatccgcatggagcctccccacggttcacaggtctcggtcttcggagccttcagccccgtgagcccgaacagtccacacggcggcgccagaccctcttcccaacgccaccctttgtcgtcttctcgcagccgta

SEQ ID NO: 279968 - DNA, 393 bp, Homo sapiens
ttgcaggctgccaccctccaagtcctgcttctctccagagatgggcagaagcaccagcccttgcctggcaccagcattctcttcagggaattttgtctggttcaagaagtcataccccaacccaagagaaaccttggacatctctcataagacatccaagggacagagctcctgggagacctagagtgagctggagagtgaacaacataccccactgggaagtaagcagccctggattctgcctcttgctaactgattcgtttcgaaccctgtttttctatctgtaaaagggactgtaactcccctgcccctgcctagattctcatacctggagactagggggctaagaccccttctagagataaaaataaaagtcttaaagagaaagaccaa

SEQ ID NO: 279969 - DNA, 897 bp, Homo sapiens
gttgagggggtgttgagggcggagaaatgcaagtttcattacaaaagttaacgtaacaaagaatctggtagaagtgagttttggatagtaaaataagtttcgaactctggcacctttcaattttgtcgcactctccttgtttttgacaatgcaatcatatgcttctgctatgttaagcgtattcaacagcgatgattacagtccagctgtgcaagagaatattcccgctctccggagaagctcttccttcctttgcactgaaagctgtaactctaagtatcagtgtgaaacgggagaaaacagtaaaggcaacgtccaggatagagtgaagcgacccatgaacgcattcatcgtgtggtctcgcgatcagaggcgcaagatggctctagagaatcccagaatgcgaaactcagagatcagcaagcagctgggataccagtggaaaatgcttactgaagccgaaaaatggccattcttccaggaggcacagaaattacaggccatgcacagagagaaatacccgaattataagtatcgacctcgtcggaaggcgaagatgctgccgaagaattgcagtttgcttcccgcagatcccgcttcggtactctgcagcgaagtgcaactggacaacaggttgtacagggatgactgtacgaaagccacacactcaagaatggagcaccagctaggccacttaccgcccatcaacgcagccagctcaccgcagcaacgggaccgctacagccactggacaaagctgtaggacaatcgggtaacattggctacaaagacctacctagatgctcctttttacgataacttacagccctcactttcttatgtttagtttcaatattgttttcttttctctggctaataaaggccttattcatttca

SEQ ID NO: 279970 - DNA, 3546 bp, Homo sapiens
agccgcgccgcgctgccgctggcccctcagcaaccctcgacatggcgctgaggcggccaccgcgactccggctctgcgctcggctgcctgacttcttcctgctgctgcttttcaggggctgcctgataggggctgtaaatctcaaatccagcaatcgaaccccagtggtacaggaatttgaaagtgtggaactgtcttgcatcattacggattcgcagacaagtgaccccaggatcgagtggaagaaaattcaagatgaacaaaccacatatgtgttttttgacaacaaaattcagggagacttggcgggtcgtgcagaaatactggggaagacatccctgaagatctggaatgtgacacggagagactcagccctttatcgctgtgaggtcgttgctcgaaatgaccgcaaggaaattgatgagattgtgatcgagttaactgtgcaagtgaagccagtgacccctgtctgtagagtgccgaaggctgtaccagtaggcaagatggcaacactgcactgccaggagagtgagggccacccccggcctcactacagctggtatcgcaatgatgtaccactgcccacggattccagagccaatcccagatttcgcaattcttctttccacttaaactctgaaacaggcactttggtgttcactgctgttcacaaggacgactctgggcagtactactgcattgcttccaatgacgcaggctcagccaggtgtgaggagcaggagatggaagtctatgacctgaacattggcggaattattgggggggttctggttgtccttgctgtactggccctgatcacgttgggcatctgctgtgcatacagacgtggctacttcatcaacaataaacaggatggagaaagttacaagaacccagggaaaccagatggagttaactacatccgcactgacgaggagggcgacttcagacacaagtcatcgtttgtgatctgagacccgcggtgtggctgagagcgcacagagcgcacgtgcacatacctctgctagaaactcctgtcaaggcagcgagagctgatgcactcggacagagctagacactcattcagaagcttttcgttttggccaaagttgaccactactcttcttactctaacaagccacatgaatagaagaattttcctcaagatggacccggtaaatataaccacaaggaagcgaaactgggtgcgttcactgagttgggttcctaatctgtttctggcctgattcccgcatgagtattagggtgatcttaaagagtttgctcacgtaaacgcccgtgctgggccctgtgaagccagcatgttcaccactggtcgttcagcagccacgacagcaccatgtgagatggcgaggtggctggacagcaccagcagcgcatcccggcgggaacccagaaaaggcttcttacacagcagccttacttcatcggcccacagacaccaccgcagtttcttcttaaaggctctgctgatcggtgttgcagtgtccattgtggagaagctttttggatcagcattttgtaaaaacaaccaaaatcaggaaggtaaattggttgctggaagagggatcttgcctgaggaaccctgcttgtccaacagggtgtcaggatttaaggaaaaccttcgtcttaggctaagtctgaaatggtactgaaatatgcttttctatgggtcttgtttattttataaaattttacatctaaatttttgctaaggatgtattttgattattgaaaagaaaatttctatttaaactgtaaatatattgtcatacaatgttaaataacctatttttttaaaaaagttcaacttaaggtagaagttccaagctactagtgttaaattggaaaatatcaataattaagagtattttacccaaggaatcctctcatggaagtttactgtgatgttccttttctcacacaagttttagcctttttcacaagggaactcatactgtctacacatcagaccatagttgcttaggaaacctttaaaaattccagttaagcaatgttgaaatcagtttgcatctcttcaaaagaaacctctcaggttagctttgaactgcctcttcctgagatgactaggacagtctgtacccagaggccacccagaagccctcagatgtacatacacagatgccagtcagctcctggggttgcgccaggcgcccccgctctagctcactgttgcctcgctgtctgccaggaggccctgccatccttgggccctggcagtggctgtgtcccagtgagctttactcacgtggcccttgcttcatccagcacagctctcaggtgggcactgcagggacactggtgtcttccatgtagcgtcccagctttgggctcctgtaacagacctctttttggttatggatggctcacaaaatagggcccccaatgctatttttttttttttaagtttgtttaattatttgttaagattgtctaaggccaaaggcaattgcgaaatcaagtctgtcaagtacaataacatttttaaaagaaaatggatcccactgttcctctttgccacagagaaagcacccagacgccacaggctctgtcgcatttcaaaacaaaccatgatggagtggcggccagtccagccttttaaagaacgtcaggtggagcagccaggtgaaaggcctggcggggaggaaagtgaaacgcctgaatcaaaagcagttttctaattttgactttaaatttttcatccgccggagacactgctcccatttgtggggggacattagcaacatcactcagaagcctgtgttcttcaagagcaggtgttctcagcctcacatgccctgccgtgctggactcaggactgaagtgctgtaaagcaaggagctgctgagaaggagcactccactgtgtgcctggagaatggctctcactactcaccttgtctttcagcttccagtgtcttgggttttttatactttgacagcttttttttaattgcatacatgagactgtgttgactttttttagttatgtgaaacactttgccgcaggccgcctggcagaggcaggaaatgctccagcagtggctcagtgctccctggtgtctgctgcatggcatcctggatgcttagcatgcaagttccctccatcattgccaccttggtagagagggatggctccccaccctcagcgttggggattcacgctccagcctccttcttggttgtcatagtgatagggtagccttattgccccctcttcttataccctaaaaccttctacactagtgccatgggaaccaggtctgaaaaagtagagagaagtgaaagtagagtctgggaagtagctgcctataactgagactagacggaaaaggaatactcgtgtattttaagatatgaatgtgactcaagactcgaggccgatacgaggctgtgattctgcctttggatggatgttgctgtacacagatgctacagacttgtactaacacaccgtaatttggcatttgtttaacctcatttataaaagcttcaaaaaaaccca

SEQ ID NO: 279971 - DNA, 582 bp, Homo sapiens
gcatttgctttgctgaggctctctaaacaaatgaggaaaaggctgttgttcagaggtggtgactcatatgcagatggatggccacagtgcgctccatccctgccatctctctttgtcatcctctgtcttgcccatgctgcagtgccttgcagatttgtttatatgcatgactttgtcatctgttgctgagagctgaggaaaacctcctgactggctgcctgataggggctgtaaatctcaaatccagcaatcgaaccccagtggtacaggaatttgaaagtgtggaactgtcttgcatcattacggattcgcagacaagtgaccccaggatcgagtggaagaaaattcaagatgaacaaaccacatatgtgttttttgacaacaaaattcagggtatgatcctgtagtcctcttgcctgctgacctttcctctgtccatagacctgggtgtacactcttggccagaaacttacctcagactggtaacctgcatctgtagctaggaccgtttttttttttttaaagatttataattatggaaaatttcaaatatatgcaaaagtaatgcaaatggtatatcaa

SEQ ID NO: 279972 - DNA, 2759 bp, Homo sapiens
tcgactctagaggtcccccctggccctgatcacgttgggcatctgctgtgcatacagacgtggctacttcatcaacaataaacaggatggagaaagttacaagaacccagggaaaccagatggagttaactacatccgcactgacgaggagggcgacttcagacacaagtcatcgtttgtgatctgagacccgcggtgtggctgagagcgcacagagcgcacgtgcacatacctctgctagaaactcctgtcaaggcagcgagagctgatgcactcggacagagctagacactcattcagaagcttttcgttttggccaaagttgaccactactcttcttactctaacaagccacatgaatagaagaattttcctcaagatggacccggtaaatataaccacaaggaagcgaaactgggtgcgttcactgagttgggttcctaatctgtttctggcctgattcccgcatgagtattagggtgatcttaaagagtttgctcacgtaaacgcccgtgctgggccctgtgaagccagcatgttcaccactggtcgttcagcagccacgacagcaccatgtgagatggcgaggtggctggacagcaccagcagcgcatcccggcgggaacccagaaaaggcttcttacacagcagccttacttcatcggcccacagacaccaccgcagtttcttcttaaaggctctgctgatcggtgttgcagtgtccattgtggagaagctttttggatcagcattttgtaaaaacaaccaaaatcaggaaggtaaattggttgctggaagagggatcttgcctgaggaaccctgcttgtccaacagggtgtcaggatttaaggaaaaccttcgtcttaggctaagtctgaaatggtactgaaatatgcttttctatgggtcttgtttattttataaaattttacatctaaatttttgctaaggatgtattttgattattgaaaagaaaatttctatttaaactgtaaatatattgtcatacaatgttaaataacctatttttttaaaaaagttcaacttaaggtagaagttccaagctactagtgttaaattggaaaatatcaataattaagagtattttacccaaggaatcctctcatggaagtttactgtgatgttccttttctcacacaagttttagcctttttcacaagggaactcatactgtctacacatcagaccatagttgcttaggaaacctttaaaaattccagttaagcaatgttgaaatcagtttgcatctcttcaaaagaaacctctcaggttagctttgaactgcctcttcctgagatgactaggacagtctgtacccagaggccacccagaagccctcagatgtacatacacagatgccagtcagctcctggggttgcgccaggcgcccccgctctagctcactgttgcctcgctgtctgccaggaggccctgccatccttgggccctggcagtggctgtgtcccagtgagctttactcacgtggcccttgcttcatccagcacagctctcaggtgggcactgcagggacactggtgtcttccatgtagcgtcccagctttgggctcctgtaacagacctctttttggttatggatggctcacaaaatagggcccccaatgctatttttttttttttaagtttgtttaattatttgttaagattgtctaaggccaaaggcaattgcgaaatcaagtctgtcaagtacaataacatttttaaaagaaaatggatcccactgttcctctttgccacagagaaagcacccagacgccacaggctctgtcgcatttcaaaacaaaccatgatggagtggcggccagtccagccttttaaagaacgtcaggtggagcagccaggtgaaaggcctggcggggaggaaagtgaaacgcctgaatcaaaagcagttttctaattttgactttaaatttttcatccgccggagacactgctcccatttgtggggggacattagcaacatcactcagaagcctgtgttcttcaagagcaggtgttctcagcctcacatgccctgccgtgctggactcaggactgaagtgctgtaaagcaaggagctgctgagaaggagcactccactgtgtgcctggagaatggctctcactactcaccttgtctttcagcttccagtgtcttgggttttttatactttgacagcttttttttaattgcatacatgagactgtgttgactttttttagttatgtgaaacactttgccgcaggccgcctggcagaggcaggaaatgctccagcagtggctcagtgctccctggtgtctgctgcatggcatcctggatgcttagcatgcaagttccctccatcattgccaccttggtagagagggatggctccccaccctcagcgttggggattcacgctccagcctccttcttggttgtcatagtgatagggtagccttattgccccctcttcttataccctaaaaccttctacactagtgccatgggaaccaggtctgaaaaagtagagagaagtgaaagtagagtctgggaagtagctgcctataactgagactagacggaaaaggaatactcgtgtattttaagatatgaatgtgactcaagactcgaggccgatacgaggctgtgattctgcctttggatggatgttgctgtacacagatgctacagacttgtactaacacaccgtaatttggcatttgtttaacctcatttataaaagcttcaaaaaaaccca

SEQ ID NO: 279973 - DNA, 2012 bp, Homo sapiens
  misc_feature (51)..(51): n is a, c, g, or t
  misc_feature (73)..(73): n is a, c, g, or t
  misc_feature (148)..(148): n is a, c, g, or t
actgggcctactgacctcccccctcctctgattcatggaatgaaacttgtncatgagttcttccagctccganccactttgctgcttctccaggaaggccttctgcatggtgagctggctgtacacgcggacgccctcctcgccgcanattttctatgggtcttgtttattttataaaattttacatctaaatttttgctaaggatgtattttgattattgaaaagaaaatttctatttaaactgtaaatatattgtcatacaatgttaaataacctatttttttaaaaaagttcaacttaaggtagaagttccaagctactagtgttaaattggaaaatatcaataattaagagtattttacccaaggaatcctctcatggaagtttactgtgatgttccttttctcacacaagttttagcctttttcacaagggaactcatactgtctacacatcagaccatagttgcttaggaaacctttaaaaattccagttaagcaatgttgaaatcagtttgcatctcttcaaaagaaacctctcaggttagctttgaactgcctcttcctgagatgactaggacagtctgtacccagaggccacccagaagccctcagatgtacatacacagatgccagtcagctcctggggttgcgccaggcgcccccgctctagctcactgttgcctcgctgtctgccaggaggccctgccatccttgggccctggcagtggctgtgtcccagtgagctttactcacgtggcccttgcttcatccagcacagctctcaggtgggcactgcagggacactggtgtcttccatgtagcgtcccagctttgggctcctgtaacagacctctttttggttatggatggctcacaaaatagggcccccaatgctatttttttttttttaagtttgtttaattatttgttaagattgtctaaggccaaaggcaattgcgaaatcaagtctgtcaagtacaataacatttttaaaagaaaatggatcccactgttcctctttgccacagagaaagcacccagacgccacaggctctgtcgcatttcaaaacaaaccatgatggagtggcggccagtccagccttttaaagaacgtcaggtggagcagccaggtgaaaggcctggcggggaggaaagtgaaacgcctgaatcaaaagcagttttctaattttgactttaaatttttcatccgccggagacactgctcccatttgtggggggacattagcaacatcactcagaagcctgtgttcttcaagagcaggtgttctcagcctcacatgccctgccgtgctggactcaggactgaagtgctgtaaagcaaggagctgctgagaaggagcactccactgtgtgcctggagaatggctctcactactcaccttgtctttcagcttccagtgtcttgggttttttatactttgacagcttttttttaattgcatacatgagactgtgttgactttttttagttatgtgaaacactttgccgcaggccgcctggcagaggcaggaaatgctccagcagtggctcagtgctccctggtgtctgctgcatggcatcctggatgcttagcatgcaagttccctccatcattgccaccttggtagagagggatggctccccaccctcagcgttggggattcacgctccagcctccttcttggttgtcatagtgatagggtagccttattgccccctcttcttataccctaaaaccttctacactagtgccatgggaaccaggtctgaaaaagtagagagaagtgaaagtagagtctgggaagtagctgcctataactgagactagacggaaaaggaatactcgtgtattttaagatatgaatgtgactcaagactcgaggccgatacgaggctgtgattctgcctttggatggatgttgctgtacacagatgctacagacttgtactaacacaccgtaatttggcatttgtttaacctcatttataaaagcttcaaaaaaaccca

SEQ ID NO: 279974 - DNA, 2034 bp, Homo sapiens
agccgcgccgcgctgccgctggcccctcagcaaccctcgacatggcgctgaggcggccaccgcgactccggctctgcgctcggctgcctgacttcttcctgctgctgcttttcaggggctgcctgataggggctgtaaatctcaaatccagcaatcgaaccccagtggtacaggaatttgaaagtgtggaactgtcttgcatcattacggattcgcagacaagtgaccccaggatcgagtggaagaaaattcaagatgaacaaaccacatatgtgttttttgacaacaaaattcagggagacttggcgggtcgtgcagaaatactggggaagacatccctgaagatctggaatgtgacacggagagactcagccctttatcgctgtgaggtcgttgctcgaaatgaccgcaaggaaattgatgagattgtgatcgagttaactgtgcaagtgaagccagtgacccctgtctgtagagtgccgaaggctgtaccagtaggcaagatggcaacactgcactgccaggagagtgagggccacccccggcctcactacagctggtatcgcaatgatgtaccactgcccacggattccagagccaatcccagatttcgcaattcttctttccacttaaactctgaaacaggcactttggtgttcactgctgttcacaaggacgactctgggcagtactactgcattgcttccaatgacgcaggctcagccaggtgtgaggagcaggagatggaagtctatgacctgaacattggcggaattattgggggggttctggttgtccttgctgtactggccctgatcacgttgggcatctgctgtgcatacagacgtggctacttcatcaacaataaacaggatggagaaagttacaagaacccagggaaaccagatggagttaactacatccgcactgacgaggagggcgacttcagacacaagtcatcgtttgtgatctgagacccgcggtgtggctgagagcgcacagagcgcacgtgcacatacctctgctagaaactcctgtcaaggcagcgagagctgatgcactcggacagagctagacactcattcagaagcttttcgttttggccaaagttgaccactactcttcttactctaacaagccacatgaatagaagaattttcctcaagatggacccggtaaatataaccacaaggaagcgaaactgggtgcgttcactgagttgggttcctaatctgtttctggcctgattcccgcatgagtattagggtgatcttaaagagtttgctcacgtaaacgcccgtgctgggccctgtgaagccagcatgttcaccactggtcgttcagcagccacgacagcaccatgtgagatggcgaggtggctggacagcaccagcagcgcatcccggcgggaacccagaaaaggcttcttacacagcagccttacttcatcggcccacagacaccaccgcagtttcttcttaaaggctctgctgatcggtgttgcagtgtccattgtggagaagctttttggatcagcattttgtaaaaacaaccaaaatcaggaaggtaaattggttgctggaagagggatcttgcctgaggaaccctgcttgtccaacagggtgtcaggatttaaggaaaaccttcgtcttaggctaagtctgaaatggtactgaaatatgcttttctatgggtcttgtttattttataaaattttacatctaaatttttgctaaggatgtattttgattattgaaaagaaaatttctatttaaactgtaaatatattgtcatacaatgttaaataacctatttttttaaaaaagttcaacttaaggtagaagttccaagctactagtgttaaattggaaaatatcaataattaagagtattttacccaaggaatcctctcatggcccccccccctcgcgatggtttccttttttctcaacaacaagttttttagccctttttttcaccaaggggaaccctcataactggtcttacaacattcagaaaccaataagtttgcct

SEQ ID NO: 279975 - DNA, 922 bp, Homo sapiens
aaccaagaagcggaccgatgagatagcacggtggagcagccaggtgaaaggcctggcggggaggaaagtgaaacgcctgaatcaaaagcagttttctaattttgactttaaatttttcatccgccggagacactgctcccatttgtggggggacattagcaacatcactcagaagcctgtgttcttcaagagcaggtgttctcagcctcacatgccctgccgtgctggactcaggactgaagtgctgtaaagcaaggagctgctgagaaggagcactccactgtgtgcctggagaatggctctcactactcaccttgtctttcagcttccagtgtcttgggttttttatactttgacagcttttttttaattgcatacatgagactgtgttgactttttttagttatgtgaaacactttgccgcaggccgcctggcagaggcaggaaatgctccagcagtggctcagtgctccctggtgtctgctgcatggcatcctggatgcttagcatgcaagttccctccatcattgccaccttggtagagagggatggctccccaccctcagcgttggggattcacgctccagcctccttcttggttgtcatagtgatagggtagccttattgccccctcttcttataccctaaaaccttctacactagtgccatgggaaccaggtctgaaaaagtagagagaagtgaaagtagagtctgggaagtagctgcctataactgagactagacggaaaaggaatactcgtgtattttaagatatgaatgtgactcaagactcgaggccgatacgaggctgtgattctgcctttggatggatgttgctgtacacagatgctacagacttgtactaacacaccgtaatttggcatttgtttaacctcatttataaaagcttcaaaaaaaccca

SEQ ID NO: 279976 - DNA, 737 bp, Homo sapiens
gcaagcgagcaggtgtcgacctagttctggacccagctggctgtgctctcagaaatcggccccatgatgggtccgattatttacttgtcattccctgaaacaggtgttcactgctgttcacaaggacgactctgggcagtactactgcattgcttccaatgacgcaggctcagccaggtgtgaggagcaggagatggaagtctgtgagtttcttttttgaagaggtttcatcgcaagactgggaagtgaatagaacattttaatttaatattataccatcagcttagagaactcttccgccatgggttagctttcttctggagctgcctaggtccaccagaacccactgcacagtgaagggaaggctgagaaaaccgagtccagataagcaggtcctcaaaacaaaaccttctgggatctgctggtgttgggaacgtggccagccttgcaactttcactgcaagtttagtaaactccattctttggtaattgatagaattatcaaaatgtaaggtggtgtcaggtctccagaaatttatccagttataaccctcttgtagaaaactgacagagttttagcccgagtaattttacctgcagacaaagcttagcccctagagtaatgttatctcagggctctggttcccctaatggaggggcgttgagaggagggtgggggcagagaggatgtgtccaaatcacttggggagcttttttttttcttaaaaaacaaaaaa

SEQ ID NO: 279977 - DNA, 3854 bp, Homo sapiens
agccgcgccgcgctgccgctggcccctcagcaaccctcgacatggcgctgaggcggccaccgcgactccggctctgcgctcggctgcctgacttcttcctgctgctgcttttcaggggctgcctgataggggctgtaaatctcaaatccagcaatcgaaccccagtggtacaggaatttgaaagtgtggaactgtcttgcatcattacggattcgcagacaagtgaccccaggatcgagtggaagaaaattcaagatgaacaaaccacatatgtgttttttgacaacaaaattcagggagacttggcgggtcgtgcagaaatactggggaagacatccctgaagatctggaatgtgacacggagagactcagccctttatcgctgtgaggtcgttgctcgaaatgaccgcaaggaaattgatgagattgtgatcgagttaactgtgcaagtgaagccagtgacccctgtctgtagagtgccgaaggctgtaccagtaggcaagatggcaacactgcactgccaggagagtgagggccacccccggcctcactacagctggtatcgcaatgatgtaccactgcccacggattccagagccaatcccagatttcgcaattcttctttccacttaaactctgaaacaggcactttggtgttcactgctgttcacaaggacgactctgggcagtactactgcattgcttccaatgacgcaggctcagccaggtgtgaggagcaggagatggaagtctatgacctgaacattggcggaattattgggggggttctggttgtccttgctgtactggccctgatcacgttgggcatctgctgtgcatacagacgtggctacttcatcaacaataaacaggatggagaaagttacaagaacccagggaaaccagatggagttaactacatccgcactgacgaggagggcgacttcagacacaagtcatcgtttgtgatctgagacccgcggtgtggctgagagcgcacagagcgcacgtgcacatacctctgctagaaactcctgtcaaggcagcgagagctgatgcactcggacagagctagacactcattcagaagcttttcgttttggccaaagttgaccactactcttcttactctaacaagccacatgaatagaagaattttcctcaagatggacccggtaaatataaccacaaggaagcgaaactgggtgcgttcactgagttgggttcctaatctgtttctggcctgattcccgcatgagtattagggtgatcttaaagagtttgctcacgtaaacgcccgtgctgggccctgtgaagccagcatgttcaccactggtcgttcagcagccacgacagcaccatgtgagatggcgaggtggctggacagcaccagcagcgcatcccggcgggaacccagaaaaggcttcttacacagcagccttacttcatcggcccacagacaccaccgcagtttcttcttaaaggctctgctgatcggtgttgcagtgtccattgtggagaagctttttggatcagcattttgtaaaaacaaccaaaatcaggaaggtaaattggttgctggaagagggatcttgcctgaggaaccctgcttgtccaacagggtgtcaggatttaaggaaaaccttcgtcttaggctaagtctgaaatggtactgaaatatgcttttctatgggtcttgtttattttataaaattttacatctaaatttttgctaaggatgtattttgattattgaaaagaaaatttctatttaaactgtaaatatattgtcatacaatgttaaataacctatttttttaaaaaagttcaacttaaggtagaagttccaagctactagtgttaaattggaaaatatcaataattaagagtattttacccaaggaatcctctcatggaagtttactgtgatgttccttttctcacacaagttttagcctttttcacaagggaactcatactgtctacacatcagaccatagttgcttaggaaacctttaaaaattccagttaagcaatgttgaaatcagtttgcatctcttcaaaagaaacctctcaggttagctttgaactgcctcttcctgagatgactaggacagtctgtacccagaggccacccagaagccctcagatgtacatacacagatgccagtcagctcctggggttgcgccaggcgcccccgctctagctcactgttgcctcgctgtctgccaggaggccctgccatccttgggccctggcagtggctgtgtcccagtgagctttactcacgtggcccttgcttcatccagcacagctctcaggtgggcactgcagggacactggtgtcttccatgtagcgtcccagctttgggctcctgtaacagacctctttttggttatggatggctcacaaaatagggcccccaatgctatttttttttttttaagtttgtttaattatttgttaagattgtctaaggccaaaggcaattgcgaaatcaagtctgtcaagtacaataacatttttaaaagaaaatggatcccactgttcctctttgccacagagaaagcacccagacgccacaggctctgtcgcatttcaaaacaaaccatgatggagtggcggccagtccagccttttaaagaacgtcaggtggagcagccaggtgaaaggcctggcggggaggaaagtgaaacgcctgaatcaaaagcagttttctaattttgactttaaatttttcatccgccggagacactgctcccatttgtggggggacattagcaacatcactcagaagcctgtgttcttcaagagcaggtgttctcagcctcacatgccctgccgtgctggactcaggactgaagtgctgtaaagcaaggagctgctgagaaggagcactccactgtgtgcctggagaatggctctcactactcaccttgtctttcagcttccagtgtcttgggttttttatactttgacagcttttttttaattgcatacatgagactgtgttgactttttttagttatgtgaaacactttgccgcaggccgcctggcagaggcaggaaatgctccagcagtggctcagtgctccctggtgtctgctgcatggcatcctggatgcttagcatgcaagttccctccatcattgccaccttggtagagagggatggctccccaccctcagcgttggggattcacgctccagcctccttcttggttgtcatagtgatagggtagccttattgccccctcttcttataccctaaaaccttctacactagtgccatgggaaccaggtctgaaaaagtagagagaagtgaaagtagagtctgggaagtagctgcctataactgagactagacggaaaaggaatactcgtgtattttaagatatgaatgtgactcaagactcgaggccgatacgaggctgtgattctgcctttggatggatgttgctgtacacagatgctacagacttgtactaacacaccgtaatttggcatttgtttaacctcatttataaaagcttcaaaaaaacccaaacattgcttcattctttgttatttgctcttacgttgggtttgtctcttcttcctagcatttcagtggttaggcatgcacactaaaaatgctatcaatcacccatccaccagggaagtcagtgctgggcaggaggtcagcctgtgtgctcaagagcagtgctgcgcctctccgccaccgagcccacctgtgttgcggttcccacttgggatggcagtgggcagatctcagtggcatcccatcccccaaaccaaccaacgcacatcatcactttgtacttttgcttttgtaatactgggattaaaaaac

SEQ ID NO: 279978 - DNA, 3509 bp, Homo sapiens
agccgcgccgcgctgccgctggcccctcagcaaccctcgacatggcgctgaggcggccaccgcgactccggctctgcgctcggctgcctgacttcttcctgctgctgcttttcaggggctgcctgataggggctgtaaatctcaaatccagcaatcgaaccccagtggtacaggaatttgaaagtgtggaactgtcttgcatcattacggattcgcagacaagtgaccccaggatcgagtggaagaaaattcaagatgaacaaaccacatatgtgttttttgacaacaaaattcagggagacttggcgggtcgtgcagaaatactggggaagacatccctgaagatctggaatgtgacacggagagactcagccctttatcgctgtgaggtcgttgctcgaaatgaccgcaaggaaattgatgagattgtgatcgagttaactgtgcaagtgaagccagtgacccctgtctgtagagtgccgaaggctgtaccagtaggcaagatggcaacactgcactgccaggagagtgagggccacccccggcctcactacagctggtatcgcaatgatgtaccactgcccacggattccagagccaatcccagatttcgcaattcttctttccacttaaactctgaaacaggcactttggtgttcactgctgttcacaaggacgactctgggcagtactactgcattgcttccaatgacgcaggctcagccaggtgtgaggagcaggagatggaagtctatgacctgaacattggcggaattattgggggggttctggttgtccttgctgtactggccctgatcacgttgggcatctgctgtgcatacagacgtggctacttcatcaacaataaacaggatggagaaagttacaagaacccagggaaaccagatggagttaactacatccgcactgacgaggagggcgacttcagacacaagtcatcgtttgtgatctgagacccgcggtgtggctgagagcgcacagagcgcacgtgcacatacctctgctagaaactcctgtcaaggcagcgagagctgatgcactcggacagagctagacactcattcagaagcttttcgttttggccaaagttgaccactactcttcttactctaacaagccacatgaatagaagaattttcctcaagatggacccggtaaatataaccacaaggaagcgaaactgggtgcgttcactgagttgggttcctaatctgtttctggcctgattcccgcatgagtattagggtgatcttaaagagtttgctcacgtaaacgcccgtgctgggccctgtgaagccagcatgttcaccactggtcgttcagcagccacgacagcaccatgtgagatggcgaggtggctggacagcaccagcagcgcatcccggcgggaacccagaaaaggcttcttacacagcagccttacttcatcggcccacagacaccaccgcagtttcttcttaaaggctctgctgatcggtgttgcagtgtccattgtggagaagctttttggatcagcattttgtaaaaacaaccaaaatcaggaaggtaaattggttgctggaagagggatcttgcctgaggaaccctgcttgtccaacagggtgtcaggatttaaggaaaaccttcgtcttaggctaagtctgaaatggtactgaaatatgcttttctatgggtcttgtttattttataaaattttacatctaaatttttgctaaggatgtattttgattattgaaaagaaaatttctatttaaactgtaaatatattgtcatacaatgttaaataacctatttttttaaaaaagttcaacttaaggtagaagttccaagctactagtgttaaattggaaaatatcaataattaagagtattttacccaaggaatcctctcatggaagtttactgtgatgttccttttctcacacaagttttagcctttttcacaagggaactcatactgtctacacatcagaccatagttgcttaggaaacctttaaaaattccagttaagcaatgttgaaatcagtttgcatctcttcaaaagaaacctctcaggttagctttgaactgcctcttcctgagatgactaggacagtctgtacccagaggccacccagaagccctcagatgtacatacacagatgccagtcagctcctggggttgcgccaggcgcccccgctctagctcactgttgcctcgctgtctgccaggaggccctgccatccttgggccctggcagtggctgtgtcccagtgagctttactcacgtggcccttgcttcatccagcacagctctcaggtgggcactgcagggacactggtgtcttccatgtagcgtcccagctttgggctcctgtaacagacctctttttggttatggatggctcacaaaatagggcccccaatgctatttttttttttttaagtttgtttaattatttgttaagattgtctaaggccaaaggcaattgcgaaatcaagtctgtcaagtacaataacatttttaaaagaaaatggatcccactgttcctctttgccacagagaaagcacccagacgccacaggctctgtcgcatttcaaaacaaaccatgatggagtggcggccagtccagccttttaaagaacgtcaggtggagcagccaggtgaaaggcctggcggggaggaaagtgaaacgcctgaatcaaaagcagttttctaattttgactttaaatttttcatccgccggagacactgctcccatttgtggggggacattagcaacatcactcagaagcctgtgttcttcaagagcaggtgttctcagcctcacatgccctgccgtgctggactcaggactgaagtgctgtaaagcaaggagctgctgagaaggagcactccactgtgtgcctggagaatggctctcactactcaccttgtctttcagcttccagtgtcttgggttttttatactttgacagcttttttttaattgcatacatgagactgtgttgactttttttagttatgtgaaacactttgccgcaggccgcctggcagaggcaggaaatgctccagcagtggctcagtgctccctggtgtctgctgcatggcatcctggatgcttagcatgcaagttccctccatcattgccaccttggtagagagggatggctccccaccctcagcgttggggattcacgctccagcctccttcttggttgtcatagtgatagggtagccttattgccccctcttcttataccctaaaaccttctacactagtgccatgggaaccaggtctgaaaaagtagagagaagtgaaagtagagtctgggaagtagctgcctataactgagactagacggaaaaggaatactcgtgtattttaagatatgaatgtgactcaagactcgaggctggagcgtgaatccccaacgctgagggtggggagccatccctctctaccaaggtggcaatgatggagggaacttgcatgctaagcat

SEQ ID NO: 279979 - DNA, 1689 bp, Homo sapiens
agccgcgccgcgctgccgctggcccctcagcaaccctcgacatggcgctgaggcggccaccgcgactccggctctgcgctcggctgcctgacttcttcctgctgctgcttttcaggggctgcctgataggggctgtaaatctcaaatccagcaatcgaaccccagtggtacaggaatttgaaagtgtggaactgtcttgcatcattacggattcgcagacaagtgaccccaggatcgagtggaagaaaattcaagatgaacaaaccacatatgtgttttttgacaacaaaattcagggagacttggcgggtcgtgcagaaatactggggaagacatccctgaagatctggaatgtgacacggagagactcagccctttatcgctgtgaggtcgttgctcgaaatgaccgcaaggaaattgatgagattgtgatcgagttaactgtgcaagtgaagccagtgacccctgtctgtagagtgccgaaggctgtaccagtaggcaagatggcaacactgcactgccaggagagtgagggccacccccggcctcactacagctggtatcgcaatgatgtaccactgcccacggattccagagccaatcccagatttcgcaattcttctttccacttaaactctgaaacaggcactttggtgttcactgctgttcacaaggacgactctgggcagtactactgcattgcttccaatgacgcaggctcagccaggtgtgaggagcaggagatggaagtctatgacctgaacattggcggaattattgggggggttctggttgtccttgctgtactggccctgatcacgttgggcatctgctgtgcatacagacgtggctacttcatcaacaataaacaggatggagaaagttacaagaacccagggaaaccagatggagttaactacatccgcactgacgaggagggcgacttcagacacaagtcatcgtttgtgatctgagacccgcggtgtggctgagagcgcacagagcgcacgtgcacatacctctgctagaaactcctgtcaaggcagcgagagctgatgcactcggacagagctagacactcattcagaagcttttcgttttggccaaagttgaccactactcttcttactctaacaagccacatgaatagaagaattttcctcaagatggacccggtaaatataaccacaaggaagcgaaactgggtgcgttcactgagttgggttcctaatctgtttctggcctgattcccgcatgagtattagggtgatcttaaagagtttgctcacgtaaacgcccgtgctgggccctgtgaagccagcatgttcaccactggtcgttcagcagccacgacagcaccatgtgagatggcgaggtggctggacagcaccagcagcgcatcccggcgggaacccagaaaaggcttcttacacagcagccttacttcatcggcccacagacaccaccgcagtttctttctgggaagtagctgcctataactgagactagacggaaaaggaatactcgtgtattttaagatatgaatgtgactcaagactcgaggccgatacgaggctgtgattctgcctttggatggatgttgctgtacacagatgctacagacttgtactaacacaccgtaatttggcatttgtttaacctcatttataaaagcttcaaaaaaaccca

SEQ ID NO: 279980 - DNA, 516 bp, Homo sapiens
actttgcttttgagtgttcagaaccaagatggttcttgctggaagggctccggagaagcagtaacggccttgtgggttgggctgcagcagagaaatggaccaaacctcccccagccttcatggcccaagccccatcctccctccccaactgactgctgctccaggcaggatggatggagcatgtgcggtgcctcccccgcaaaaatgatgacgaggttaaaggaaaaaataagttacattacagtttccaaaatggttctcgctctccgctgaagatgggccaccgttggggctgcaatgtgctcgcggtcccagcttgtgctttgcaagaagagggaatataactagactgttattttaggttaaaatagccaagagacagacgccttcgcctcaaaaatattctgagacacataaaagtagaaggaaacaagtctcttcagtcacaaaatgtcgtacatcccgcatatactagattcaattaatttaataaaatagaatatacatagagaaaaa

SEQ ID NO: 279981 - DNA, 732 bp, Homo sapiens
tcaacaaactataactgagcacttactctgtgctagaaacagcatttctgctttccaaggacctctaagttcatgtggaatcaagtggattatttctatttgtcgctgagagtgaaactctccaccctgatgttcttcgtgctttctgggaaatctcagaaaaatactaacctgctgaagagctgtcactccaactttccatcctggaaatgtatatagaagtttactacaagaagaaaaatagttgaaagctgtatttttttttttttggaggaaaacaatatcagctacacattaaaaagtgaaataataataggtgatatttattaagttcttactcttccacacactattctgatgattaagctaatgtcacaaggttagtaatattgtccagacaaattctaggtctcaaactaactactatgctatgccacctcattaagaaattaaatgtcctaagtggaaaaaaaaatacgtgtgtaaaaatcatgttatattacaggctacagtaaaaaaaatttaggactgcagtatctttatagaaacatcatgaaagggaataacttatattttaataaaaatattatttgcatgttatatgactgttatatgacaacagtaatgctgctctcaatttcagaagcaagtcatgaatgataaataacacatccatggagcaaacagaggtatctgaaatcattataattatcattaaaatattaaatcatg

SEQ ID NO: 279982 - DNA, 767 bp, Homo sapiens
tttttttttttgagacagggtctcactcagttgcctaggctgaattgcagtggcacaatcatagtttactgcagccttgacctcctgggctcaagtgatcctctcacctcagcctcccaagtaactgggatgacaggcatgtgccaccctacccggctgatttcatttttatttttgtagaaacggagtctcattttgcttcccaggctgatcttgaatcctgggctcaactgatcctcctgccttggcctcccaaagcactgggattacaggtttgagccaccgtgcctagccccttgaacaaaatcctaaaatccacaaagttctaaagactaaagttttacataacttatttgacggtaaaacctgacctgaactgaaatgcatattagtatttttcaattcagaattgctgatatatttgattatagggttctgcaatagatctctctaggaaatgttacataatatatagtatttaccactaatacagtttttaaaattcagaatattttggattccaaggcaaatccaatttcaaggtttgaggctaaagaactgtgcagtaatatctttgtattttaaaaaacaggtttatataattattttccctctacagctttcttgcaaaaagaaatgcaaccttctatcagttccattcacaaaaggagaaaggaaggaaggaaagaaggaaggaagcaaacaagccacaataaggctcatgtctttaacttctctctctaatagttaccaatctctcttttgcc

SEQ ID NO: 279983 - DNA, 497 bp, Homo sapiens
tttttttttttgagacagggtctcactcagttgcctaggctgaattgcagtggcacaatcatagtttactgcagccttgacctcctgggctcaagtgatcctctcacctcagcctcccaagtaactgggatgacaggcatgtgccaccctacccggctgatttcatttttatttttgtagaaacggagtctcattttgcttcccaggctgatcttgaatcctgggctcaactgatcctcctgccttggcctcccaaagcactgggattacaggtttgaggctaaagaactgtgcagtaatatctttgtattttaaaaaacaggtttatataattattttccctctacagctttcttgcaaaaagaaatgcaaccttctatcagttccattcacaaaaggagaaaggaaggaaggaaagaaggaaggaagcaaacaagccacaataaggctcatgtctttaacttctctctctaatagttaccaatctctcttttgcc

SEQ ID NO: 279984 - DNA, 376 bp, Homo sapiens
  misc_feature (374)..(374): n is a, c, g, or t
cctgtcaatcgctcttggcctgtcactcgtcctgtcactcgctcttggcccctgtcaatcgctcctggcctgcgtcttcgtggagcagatgcagaccggcttctgctgggtcatccagctcttcagccttgtatgcaccgtcaagggctactatgaccccaaggagatgatggacagagaccaggactgcctgctgcctgtggaggaggctggcatcatctgggacagcgtctgcttcttcttcctgctgctgcagcgccgcgtcttccttagccattactacctgcacgtcagggccgacctccaggccaccgccctgctagcctccaggggcttcgccctctacaactgccaacacccaatgagcgactgancg

SEQ ID NO: 279985 - DNA, 4863 bp, Homo sapiens
tgtcagttctggagacaccaggtgtgcgcgaggtgattcccatggaccctgagggctggtgatagactcgggtcaacgggtggggaccgggtgtctcaggccccaggcaggcccggcccttcctgacatgacaccccttcccccagattatccctggcgctggagccgggccgtccccatgaactccgcactcatcaagtggctgtacctgcctgatttcttccgggcccccaactccaccaacctcatcagcgactttctcctgctgctgtgcgcctcccagcagtggcaggtgttctcagctgagcgcacagaggagtggcagcgcatggctggcgtcaacaccgaccgcctggagccgctgcggggggagcccaaccccgtgcccaactttatccactgcaggtcctaccttgacatgctgaaggtggccgtcttccgatacctgttctggctggtgctggtggtggtgtttgtcacgggggccacccgcatcagcatcttcgggctgggctacctgctggcctgcttctacctgctgctcttcggcacggccctgctgcagagggacacacgggcccgcctcgtgctgtgggactgcctcattctgtacaacgtcaccgtcatcatctccaagaacatgctgtcgctcctggcctgcgtcttcgtggagcagatgcagaccggcttctgctgggtcatccagctcttcagccttgtatgcaccgtcaagggctactatgaccccaaggagatgatggacagagaccaggactgcctgctgcctgtggaggaggctggcatcatctgggacagcgtctgcttcttcttcctgctgctgcagcgccgcgtcttccttagccattactacctgcacgtcagggccgacctccaggccaccgccctgctagcctccaggggcttcgccctctacaacgctgccaacctcaagagcattgacttccaccgcaggatagaggagaagtccctggcccagctgaaaagacagatggagcgtatccgtgccaagcaggagaagcacaggcagggccgggtggaccgcagtcgcccccaggacaccctgggccccaaggaccccggcctggagccagggcccgacagtccagggggctcctccccgccacggaggcagtggtggcggccctggctggaccacgccacagtcatccactccggggactacttcctgtttgagtccgacagtgaggaagaggaggaggctgttcctgaagacccgaggccgtcggcacagagtgccttccagctggcgtaccaggcatgggtgaccaacgcccaggcggtgctgaggcggcggcagcaggagcaggagcaggcaaggcaggaacaggcaggacagctacccacaggaggtggtcccagccaggaggtggagccagcagagggccccgaggaggcagcggcaggccggagccatgtggtgcagagggtgctgagcacggcgcagttcctgtggatgctggggcaggcgctagtggatgagctgacacgctggctgcaggagttcacccggcaccacggcaccatgagcgacgtgctgcgggcagagcgctacctcctcacacaggagctcctgcagggcggcgaagtgcacaggggcgtgctggatcagctgtacacaagccaggccgaggccacgctgccaggccccaccgaggcccccaatgccccaagcaccgtgtccagtgtgggcttgtggctgctggagtgaagccactcaagcagcatgacatgactgaccattggtgcatgcccccctgagtcacctgtgctatcaacgacgctgcatgtggcatgtgaggagggcatgtcacctgaccccctgggggagctgttgagtgctcgggttgcctcttcttgtacgcacggggactcgattgcgggactgtgccatgccgacgcttgtgtccttgtgacatggcgcctcgctgcaattcccacgaagcttggcctggacgtgcgcaggagcttgtttgtgccggatgggcgccgtggccgggcgctgcggctgctgcgggccgtgtaccagtgtgtggccgcccactcggagctgctctgctacttcatcatcatcctcaaccacatggtcacggcctccgccggctcgctggtgctgcccgtgctcgtcttcctgtgggccatgctgtcgatcccgaggcccagcaagcgcttctggatgacggccatcgtcttcaccgagatcgcggtggtcgtcaagtacctgttccagtttgggttcttcccctggaacagccacgtggtgctgcggcgctacgagaacaagccctacttcccgccccgcatcctgggcctggagaagactgacggctacatcaagtacgacctggtgcagctcatggcccttttcttccaccgctcccagctgctgtgctatggcctctgggaccatgaggaggactcaccatccaaggagcatgacaagagcggcgaggaggagcagggagccgaggaggggccaggggtgcctgcggccaccaccgaagaccacattcaggtggaagcgagggtcggacccacggacgggaccccagaaccccaagtggagctcaggccccgtgatacgaggcgcatcagtctacgttttagaagaaggaagaaggagggcccagcacggaaaggagcggcagccatcgaagctgaggacagggaggaagaagagggggaggaagagaaagaggcccccacggggagagagaagaggccaagccgctctggaggaagagtaagggcggccgggcggcggctgcagggcttctgcctgtccctggcccagggcacatatcggccgctacggcgcttcttccacgacatcctgcacaccaagtaccgcgcagccaccgacgtctatgccctcatgttcctggctgatgttgtcgacttcatcatcatcatttttggcttctgggcctttgggaagcactcggcggccacagacatcacgtcctccctatcagacgaccaggtacccgaggctttcctggtcatgctgctgatccagttcagtaccatggtggttgaccgcgccctctacctgcgcaagaccgtgctgggcaagctggccttccaggtggcgctggtgctggccatccacctatggatgttcttcatcctgcccgccgtcactgagaggatgttcaaccagaatgtggtggcccagctctggtacttcgtgaagtgcatctacttcgccctgtccgcctaccagatccgctgcggctaccccacccgcatcctcggcaacttcctcaccaagaagtacaatcatctcaacctcttcctcttccaggggttccggctggtgccgttcctggtggagctgcgggcagtgatggactgggtgtggacggacaccacgctgtccctgtccagctggatgtgtgtggaggacatctatgccaacatcttcatcatcaaatgcagccgagagacagagaagaaatacccgcagcccaaagggcagaagaagaagaagatcgtcaagtacggcatgggtggcctcatcatcctcttcctcatcgccatcatctggttcccgctgctcttcatgtcgctggtgcgctccgtggttggggttgtcaaccagcccatcgatgtcaccgtcaccctcaagctgggcggctatgagccgctgttcaccatgagcgcccagcagccgtccatcatccccttcacggcccaggcctatgaggagctgtcccggcagtttgacccccagccgctggccatgcagttcatcagccagtacagccctgaggacatcgtcacggcgcagattgagggcagctccggggcgctgtggcgcatcagtccccccagccgtgcccagatgaagcgggagctctacaacggcacggccgacatcaccctgcgcttcacctggaacttccagagggacctggcgaagggaggcactgtggagtatgccaacgagaagcacatgctggccctggcccccaacagcactgcacggcggcagctggccagcctgctcgagggcacctcggaccagtctgtggtcatccccaatctcttccccaagtacatccgtgcccccaacgggcccgaagccaaccctgtgaagcagctgcagcccaatgaggaggccgactacctcggcgtgcgtatccagctgcggagggagcagggtgcgggggccaccggcttcctcgaatggtgggtcatcgagctgcaggagtgccggaccgactgcaacctgctgcccatggtcattttcagtgacaaggtcagcccaccgagcctcggcttcctggctggctacggcatcatggggctgtacgtgtccatcgtgctggtcatcggcaagttcgtgcgcggattcttcagcgagatctcgcactccattatgttcgaggagctgccgtgcgtggaccgcatcctcaagctctgccaggacatcttcctggtgcgggagactcgggagctggagctggaggaggagttgtacgccaagctcatcttcctctaccgctcaccggagaccatgatcaagtggactcgtgagaaggagtaggagctgctgctggcgcccgagagggaaggagccggcctgctgggcagcgtggccacaaggggcggcactcctcaggccgggggagccactgccccgtccaaggccgccagctgtgatgcatcctcccggcctgcctgagccctgatgctgctgtcagagaaggacactgcgtccccacggcctgcgtggcgctgccgtcccccacgtgtactgtagagttttttttttaattaaaaaatgttttatttatacaaatggacaaaaaaaaaaca

SEQ ID NO: 279986 - DNA, 5518 bp, Homo sapiens
gacagtcaggcatctctgcctgggaccttctcgcacatccctccttctccctggacctctcttcactcccctagcctctgcccgtggtctccctgtttctcaaacacgtggtccccttccccgtgaaggtggctccaaggctggcagcccccgtgtccctggctggggagcggtggacctgccccagagctgtggctgtggtgggctccgggcagggccagggggcactgtggcctgggagggggcactgatgcctggcctcttgccagcccttccccaacagcaccaacttgctgcccacggagatcagccagtccctgctgtaccgggggcccgtggaccctgccaactggtttggggtgcggaaagggttccccaacctgggctacatccagaaccacctgcaagtgctgctgctgctggtattcgaggccatcgtgtaccggcgccaggagcactaccgccggcagcaccagctggccccgctgcctgcccaggccgtgtttgccagcggcacccgccagcagctggaccaggatctgctcggctgcctcaagtacttcatcaacttcttcttctacaaattcgggctggagatctgcttcctgatggccgtgaacgtgatcgggcagcgcatgaactttctggtgaccctgcacggttgctggctggtggccatcctcacccgcaggcaccgccaggccattgcccgcctctggcccaactactgcctcttcctggcgctgttcctgctgtaccagtacctgctgtgcctggggatgcccccggccctgtgcattgattatccctggcgctggagccgggccgtccccatgaactccgcactcatcaagtggctgtacctgcctgatttcttccgggcccccaactccaccaacctcatcagcgactttctcctgctgctgtgcgcctcccagcagtggcaggtgttctcagctgagcgcacagaggagtggcagcgcatggctggcgtcaacaccgaccgcctggagccgctgcggggggagcccaaccccgtgcccaactttatccactgcaggtcctaccttgacatgctgaaggtggccgtcttccgatacctgttctggctggtgctggtggtggtgtttgtcacgggggccacccgcatcagcatcttcgggctgggctacctgctggcctgcttctacctgctgctcttcggcacggccctgctgcagagggacacacgggcccgcctcgtgctgtgggactgcctcattctgtacaacgtcaccgtcatcatctccaagaacatgctgtcgctcctggcctgcgtcttcgtggagcagatgcagaccggcttctgctgggtcatccagctcttcagccttgtatgcaccgtcaagggctactatgaccccaaggagatgatggacagagaccaggactgcctgctgcctgtggaggaggctggcatcatctgggacagcgtctgcttcttcttcctgctgctgcagcgccgcgtcttccttagccattactacctgcacgtcagggccgacctccaggccaccgccctgctagcctccaggggcttcgccctctacaacgctgccaacctcaagagcattgacttccaccgcaggatagaggagaagtccctggcccagctgaaaagacagatggagcgtatccgtgccaagcaggagaagcacaggcagggccgggtggaccgcagtcgcccccaggacaccctgggccccaaggaccccggcctggagccagggcccgacagtccagggggctcctccccgccacggaggcagtggtggcggccctggctggaccacgccacagtcatccactccggggactacttcctgtttgagtccgacagtgaggaagaggaggaggctgttcctgaagacccgaggccgtcggcacagagtgccttccagctggcgtaccaggcatgggtgaccaacgcccaggcggtgctgaggcggcggcagcaggagcaggagcaggcaaggcaggaacaggcaggacagctacccacaggaggtggtcccagccaggaggtggagccagcagagggccccgaggaggcagcggcaggccggagccatgtggtgcagagggtgctgagcacggcgcagttcctgtggatgctggggcaggcgctagtggatgagctgacacgctggctgcaggagttcacccggcaccacggcaccatgagcgacgtgctgcgggcagagcgctacctcctcacacaggagctcctgcagggcggcgaagtgcacaggggcgtgctggatcagctgtacacaagccaggccgaggccacgctgccaggccccaccgaggcccccaatgccccaagcaccgtgtccagtgtgggcttgtggctgctggagtgaagccactcaagcagcatgacatgactgaccattggtgcatgcccccctgagtcacctgtgctatcaacgacgctgcatgtggcatgtgaggagggcatgtcacctgaccccctgggggagctgttgagtgctcgggttgcctcttcttgtacgcacggggactcgattgcgggactgtgccatgccgacgcttgtgtccttgtgacatggcgcctcgctgcaattcccacgaagcttggcctggacgtgcgcaggagcttgtttgtgccggatgggcgccgtggccgggcgctgcggctgctgcgggccgtgtaccagtgtgtggccgcccactcggagctgctctgctacttcatcatcatcctcaaccacatggtcacggcctccgccggctcgctggtgctgcccgtgctcgtcttcctgtgggccatgctgtcgatcccgaggcccagcaagcgcttctggatgacggccatcgtcttcaccgagatcgcggtggtcgtcaagtacctgttccagtttgggttcttcccctggaacagccacgtggtgctgcggcgctacgagaacaagccctacttcccgccccgcatcctgggcctggagaagactgacggctacatcaagtacgacctggtgcagctcatggcccttttcttccaccgctcccagctgctgtgctatggcctctgggaccatgaggaggactcaccatccaaggagcatgacaagagcggcgaggaggagcagggagccgaggaggggccaggggtgcctgcggccaccaccgaagaccacattcaggtggaagcgagggtcggacccacggacgggaccccagaaccccaagtggagctcaggccccgtgatacgaggcgcatcagtctacgttttagaagaaggaagaaggagggcccagcacggaaaggagcggcagccatcgaagctgaggacagggaggaagaagagggggaggaagagaaagaggcccccacggggagagagaagaggccaagccgctctggaggaagagtaagggcggccgggcggcggctgcagggcttctgcctgtccctggcccagggcacatatcggccgctacggcgcttcttccacgacatcctgcacaccaagtaccgcgcagccaccgacgtctatgccctcatgttcctggctgatgttgtcgacttcatcatcatcatttttggcttctgggcctttgggaagcactcggcggccacagacatcacgtcctccctatcagacgaccaggtacccgaggctttcctggtcatgctgctgatccagttcagtaccatggtggttgaccgcgccctctacctgcgcaagaccgtgctgggcaagctggccttccaggtggcgctggtgctggccatccacctatggatgttcttcatcctgcccgccgtcactgagaggatgttcaaccagaatgtggtggcccagctctggtacttcgtgaagtgcatctacttcgccctgtccgcctaccagatccgctgcggctaccccacccgcatcctcggcaacttcctcaccaagaagtacaatcatctcaacctcttcctcttccaggggttccggctggtgccgttcctggtggagctgcgggcagtgatggactgggtgtggacggacaccacgctgtccctgtccagctggatgtgtgtggaggacatctatgccaacatcttcatcatcaaatgcagccgagagacagagaagaaatacccgcagcccaaagggcagaagaagaagaagatcgtcaagtacggcatgggtggcctcatcatcctcttcctcatcgccatcatctggttcccgctgctcttcatgtcgctggtgcgctccgtggttggggttgtcaaccagcccatcgatgtcaccgtcaccctcaagctgggcggctatgagccgctgttcaccatgagcgcccagcagccgtccatcatccccttcacggcccaggcctatgaggagctgtcccggcagtttgacccccagccgctggccatgcagttcatcagccagtacagccctgaggacatcgtcacggcgcagattgagggcagctccggggcgctgtggcgcatcagtccccccagccgtgcccagatgaagcgggagctctacaacggcacggccgacatcaccctgcgcttcacctggaacttccagagggacctggcgaagggaggcactgtggagtatgccaacgagaagcacatgctggccctggcccccaacagcactgcacggcggcagctggccagcctgctcgagggcacctcggaccagtctgtggtcatccccaatctcttccccaagtacatccgtgcccccaacgggcccgaagccaaccctgtgaagcagctgcagcccaatgaggaggccgactacctcggcgtgcgtatccagctgcggagggagcagggtgcgggggccaccggcttcctcgaatggtgggtcatcgagctgcaggagtgccggaccgactgcaacctgctgcccatggtcattttcagtgacaaggtcagcccaccgagcctcggcttcctggctggctacggcatcatggggctgtacgtgtccatcgtgctggtcatcggcaagttcgtgcgcggattcttcagcgagatctcgcactccattatgttcgaggagctgccgtgcgtggaccgcatcctcaagctctgccaggacatcttcctggtgcgggagactcgggagctggagctggaggaggagttgtacgccaagctcatcttcctctaccgctcaccggagaccatgatcaagtggactcgtgagaaggagtaggagctgctgctggcgcccgagagggaaggagccggcctgctgggcagcgtggccacaaggggcggcactcctcaggccgggggagccactgccccgtccaaggccgccagctgtgatgcatcctcccggcctgcctgagccctgatgctgctgtcagagaaggacactgcgtccccacggcctgcgtggcgctgccgtcccccacgtgtactgtagagttttttttttaattaaaaaatgttttatttatacaaatggacaaaaaaaaaaca

SEQ ID NO: 279987 - DNA, 3213 bp, Homo sapiens
cttaaggatccagtgctactaccacaaacaggagctcctgcagggcggcgaagtgcacaggggcgtgctggatcagctgtacacaagccaggccgaggccacgctgccaggccccaccgaggcccccaatgccccaagcaccgtgtccagtgggctgggcgcggaggagccactcagcagcatgacagacgacatgggcagccccctgagcaccggctaccacacgcgcagtggcagtgaggaggcagtcaccgaccccggggagcgtgaggctggtgcctctctgtaccagggactgatgcggacggccagcgagctgctcctggacaggcgcctgcgcatcccagagctggaggaggcagagctgtttgcggaggggcagggccgggcgctgcggctgctgcgggccgtgtaccagtgtgtggccgcccactcggagctgctctgctacttcatcatcatcctcaaccacatggtcacggcctccgccggctcgctggtgctgcccgtgctcgtcttcctgtgggccatgctgtcgatcccgaggcccagcaagcgcttctggatgacggccatcgtcttcaccgagatcgcggtggtcgtcaagtacctgttccagtttgggttcttcccctggaacagccacgtggtgctgcggcgctacgagaacaagccctacttcccgccccgcatcctgggcctggagaagactgacggctacatcaagtacgacctggtgcagctcatggcccttttcttccaccgctcccagctgctgtgctatggcctctgggaccatgaggaggactcaccatccaaggagcatgacaagagcggcgaggaggagcagggagccgaggaggggccaggggtgcctgcggccaccaccgaagaccacattcaggtggaagcgagggtcggacccacggacgggaccccagaaccccaagtggagctcaggccccgtgatacgaggcgcatcagtctacgttttagaagaaggaagaaggagggcccagcacggaaaggagcggcagccatcgaagctgaggacagggaggaagaagagggggaggaagagaaagaggcccccacggggagagagaagaggccaagccgctctggaggaagagtaagggcggccgggcggcggctgcagggcttctgcctgtccctggcccagggcacatatcggccgctacggcgcttcttccacgacatcctgcacaccaagtaccgcgcagccaccgacgtctatgccctcatgttcctggctgatgttgtcgacttcatcatcatcatttttggcttctgggcctttgggaagcactcggcggccacagacatcacgtcctccctatcagacgaccaggtacccgaggctttcctggtcatgctgctgatccagttcagtaccatggtggttgaccgcgccctctacctgcgcaagaccgtgctgggcaagctggccttccaggtggcgctggtgctggccatccacctatggatgttcttcatcctgcccgccgtcactgagaggatgttcaaccagaatgtggtggcccagctctggtacttcgtgaagtgcatctacttcgccctgtccgcctaccagatccgctgcggctaccccacccgcatcctcggcaacttcctcaccaagaagtacaatcatctcaacctcttcctcttccaggggttccggctggtgccgttcctggtggagctgcgggcagtgatggactgggtgtggacggacaccacgctgtccctgtccagctggatgtgtgtggaggacatctatgccaacatcttcatcatcaaatgcagccgagagacagagaagaaatacccgcagcccaaagggcagaagaagaagaagatcgtcaagtacggcatgggtggcctcatcatcctcttcctcatcgccatcatctggttcccgctgctcttcatgtcgctggtgcgctccgtggttggggttgtcaaccagcccatcgatgtcaccgtcaccctcaagctgggcggctatgagccgctgttcaccatgagcgcccagcagccgtccatcatccccttcacggcccaggcctatgaggagctgtcccggcagtttgacccccagccgctggccatgcagttcatcagccagtacagccctgaggacatcgtcacggcgcagattgagggcagctccggggcgctgtggcgcatcagtccccccagccgtgcccagatgaagcgggagctctacaacggcacggccgacatcaccctgcgcttcacctggaacttccagagggacctggcgaagggaggcactgtggagtatgccaacgagaagcacatgctggccctggcccccaacagcactgcacggcggcagctggccagcctgctcgagggcacctcggaccagtctgtggtcatccccaatctcttccccaagtacatccgtgcccccaacgggcccgaagccaaccctgtgaagcagctgcagcccaatgaggaggccgactacctcggcgtgcgtatccagctgcggagggagcagggtgcgggggccaccggcttcctcgaatggtgggtcatcgagctgcaggagtgccggaccgactgcaacctgctgcccatggtcattttcagtgacaaggtcagcccaccgagcctcggcttcctggctggctacggcatcatggggctgtacgtgtccatcgtgctggtcatcggcaagttcgtgcgcggattcttcagcgagatctcgcactccattatgttcgaggagctgccgtgcgtggaccgcatcctcaagctctgccaggacatcttcctggtgcgggagactcgggagctggagctggaggaggagttgtacgccaagctcatcttcctctaccgctcaccggagaccatgatcaagtggactcgtgagaaggagtaggagctgctgctggcgcccgagagggaaggagccggcctgctgggcagcgtggccacaaggggcggcactcctcaggccgggggagccactgccccgtccaaggccgccagctgtgatgcatcctcccggcctgcctgagccctgatgctgctgtcagagaaggacactgcgtccccacggcctgcgtggcgctgccgtcccccacgtgtactgtagagttttttttttaattaaaaaatgttttatttatacaaatggacaaaaaaaaaaca

SEQ ID NO: 279988 - DNA, 8821 bp, Homo sapiens
ccatggacctgcgccctgagctgcccaccaccctgggccccgtcagcctgcgccagctggggctggagcacacccgctacccctgtctggaccttggtgccatgttgctctacaccctgaccttctggctcctgctgcgccagtttgtgaaagagaagctgctgaagtgggcagagtctccagctgcgctgacggaggtcaccgtggcagacacagagcctacgcggacgcagacgctgttgcagagcctgggggagctggtgaagggcgtgtacgccaagtactggatctatgtgtgtgctggcatgttcatcgtggtcagcttcgccggccgcctcgtggtctacaagattgtctacatgttcctcttcctgctctgcctcaccctcttccaggtctactacagcctgtggcggaagctgctcaaggccttctggtggctcgtggtggcctacaccatgctggtcctcatcgccgtctacaccttccagttccaggacttccctgcctactggcgcaacctcactggcttcaccgacgagcagctgggggacctgggcctggagcagttcagcgtatccgagctcttctccagcatcctggtgcccggcttcttcctcctggcctgcatcctgcagctgcactacttccacaggcccttcatgcagctcaccgacatggagcacgtgtccctgcctggcacgcgcctcccgcgctgggctcacaggcaggatgcagtgagtgggaccccactgctgcgggaggagcagcaggagcatcagcagcagcagcaggaggaggaggaggaggaggactccagggacgaggggctgggcgtggccactccccaccaggccacgcaggtgcctgaaggggcagccaagtggggcctggtggctgagcgcctgctggagctggcagccggcttctcggacgtcctctcacgcgtgcaggtgttcctgcggcggctgctggagcttcacgttttcaagctggtggccctgtacaccgtctgggtggccctgaaggaggtgtcggtgatgaacctgctgctggtggtgctgtgggccttcgccctgccctacccacgcttccggcccatggcctcctgcctgtccaccgtgtggacctgcgtcatcatcgtgtgtaagatgctgtaccagctcaaggttgtcaacccccaggagtattccagcaactgcaccgagcccttccccaacagcaccaacttgctgcccacggagatcagccagtccctgctgtaccgggggcccgtggaccctgccaactggtttggggtgcggaaagggttccccaacctgggctacatccagaaccacctgcaagtgctgctgctgctggtattcgaggccatcgtgtaccggcgccaggagcactaccgccggcagcaccagctggccccgctgcctgcccaggccgtgtttgccagcggcacccgccagcagctggaccaggatctgctcggctgcctcaagtacttcatcaacttcttcttctacaaattcgggctggagatctgcttcctgatggccgtgaacgtgatcgggcagcgcatgaactttctggtgaccctgcacggttgctggctggtggccatcctcacccgcaggcaccgccaggccattgcccgcctctggcccaactactgcctcttcctggcgctgttcctgctgtaccagtacctgctgtgcctggggatgcccccggccctgtgcattgattatccctggcgctggagccgggccgtccccatgaactccgcactcatcaagtggctgtacctgcctgatttcttccgggcccccaactccaccaacctcatcagcgactttctcctgctgctgtgcgcctcccagcagtggcaggtgttctcagctgagcgcacagaggagtggcagcgcatggctggcgtcaacaccgaccgcctggagccgctgcggggggagcccaaccccgtgcccaactttatccactgcaggtcctaccttgacatgctgaaggtggccgtcttccgatacctgttctggctggtgctggtggtggtgtttgtcacgggggccacccgcatcagcatcttcgggctgggctacctgctggcctgcttctacctgctgctcttcggcacggccctgctgcagagggacacacgggcccgcctcgtgctgtgggactgcctcattctgtacaacgtcaccgtcatcatctccaagaacatgctgtcgctcctggcctgcgtcttcgtggagcagatgcagaccggcttctgctgggtcatccagctcttcagccttgtatgcaccgtcaagggctactatgaccccaaggagatgatggacagagaccaggactgcctgctgcctgtggaggaggctggcatcatctgggacagcgtctgcttcttcttcctgctgctgcagcgccgcgtcttccttagccattactacctgcacgtcagggccgacctccaggccaccgccctgctagcctccaggggcttcgccctctacaacgctgccaacctcaagagcattgacttccaccgcaggatagaggagaagtccctggcccagctgaaaagacagatggagcgtatccgtgccaagcaggagaagcacaggcagggccgggtggaccgcagtcgcccccaggacaccctgggccccaaggaccccggcctggagccagggcccgacagtccagggggctcctccccgccacggaggcagtggtggcggccctggctggaccacgccacagtcatccactccggggactacttcctgtttgagtccgacagtgaggaagaggaggaggctgttcctgaagacccgaggccgtcggcacagagtgccttccagctggcgtaccaggcatgggtgaccaacgcccaggcggtgctgaggcggcggcagcaggagcaggagcaggcaaggcaggaacaggcaggacagctacccacaggaggtggtcccagccaggaggtggagccagcagagggccccgaggaggcagcggcaggccggagccatgtggtgcagagggtgctgagcacggcgcagttcctgtggatgctggggcaggcgctagtggatgagctgacacgctggctgcaggagttcacccggcaccacggcaccatgagcgacgtgctgcgggcagagcgctacctcctcacacaggagctcctgcagggcggcgaagtgcacaggggcgtgctggatcagctgtacacaagccaggccgaggccacgctgccaggccccaccgaggcccccaatgccccaagcaccgtgtccagtgtgggcttgtggctgctggagtgaagccactcaagcagcatgacatgactgaccattggtgcatgcccccctgagtcacctgtgctatcaacgacgctgcatgtggcatgtgaggagggcatgtcacctgaccccctgggggagctgttgagtgctcgggttgcctcttcttgtacgcacggggactcgattgcgggactgtgccatgccgacgcttgtgtccttgtgacatggcgcctcgctgcaattcccacgaagcttggcctggacgtgcgcaggagcttgtttgtgccggatgggcgccgtggccgggcgctgcggctgctgcgggccgtgtaccagtgtgtggccgcccactcggagctgctctgctacttcatcatcatcctcaaccacatggtcacggcctccgccggctcgctggtgctgcccgtgctcgtcttcctgtgggccatgctgtcgatcccgaggcccagcaagcgcttctggatgacggccatcgtcttcaccgagatcgcggtggtcgtcaagtacctgttccagtttgggttcttcccctggaacagccacgtggtgctgcggcgctacgagaacaagccctacttcccgccccgcatcctgggcctggagaagactgacggctacatcaagtacgacctggtgcagctcatggcccttttcttccaccgctcccagctgctgtgctatggcctctgggaccatgaggaggactcaccatccaaggagcatgacaagagcggcgaggaggagcagggagccgaggaggggccaggggtgcctgcggccaccaccgaagaccacattcaggtggaagcgagggtcggacccacggacgggaccccagaaccccaagtggagctcaggccccgtgatacgaggcgcatcagtctacgttttagaagaaggaagaaggagggcccagcacggaaaggagcggcagccatcgaagctgaggacagggaggaagaagagggggaggaagagaaagaggcccccacggggagagagaagaggccaagccgctctggaggaagagtaagggcggccgggcggcggctgcagggcttctgcctgtccctggcccagggcacatatcggccgctacggcgcttcttccacgacatcctgcacaccaagtaccgcgcagccaccgacgtctatgccctcatgttcctggctgatgttgtcgacttcatcatcatcatttttggcttctgggcctttgggaagcactcggcggccacagacatcacgtcctccctatcagacgaccaggtacccgaggctttcctggtcatgctgctgatccagttcagtaccatggtggttgaccgcgccctctacctgcgcaagaccgtgctgggcaagctggccttccaggtggcgctggtgctggccatccacctatggatgttcttcatcctgcccgccgtcactgagaggatgttcaaccagaatgtggtggcccagctctggtacttcgtgaagtgcatctacttcgccctgtccgcctaccagatccgctgcggctaccccacccgcatcctcggcaacttcctcaccaagaagtacaatcatctcaacctcttcctcttccaggggttccggctggtgccgttcctggtggagctgcgggcagtgatggactgggtgtggacggacaccacgctgtccctgtccagctggatgtgtgtggaggacatctatgccaacatcttcatcatcaaatgcagccgagagacagagaaggtgcctgggcccagggcgggggccgggacaagggccagggatatgccctctccctaagacagaggcactgctgccacgagaacccgtggtgctggaggccctcccagggctcggagcccatggggacatgaggcgagcccacccactagctgatcacgaggccagtgatcttggcagctgcgagtgagtgctgggcgcagaagtgggcagcggagttggtcctgttccaggcaggctggcagcagagcagggcctggtgcagggaggaccggacagccactgtttgctgcattcttgtttaatggcctttctcagagagaattcgtgcgtcagaccactcccccacgtaaaaagtacaactcaggggtttctagtggattcacagttgagcatctgccttctcaccacttcaaaaagaaaccccgggccgggcacagcggctcacccctatcatcccagcactgtaagagacccaggagggaggtactgctcaaggccaggagttcaagatctgcacggccacaagcgagaccctgcctcagcaaatgtaaaaataaaacaattagctggcaatggcagctcatgcctatggtcccagcactttgggaggccaaaggaggaggatcagttgaggccaggagttttaagaccagcctgggcaacatagtgagtgagactctctctacaaaaaataaacgttagctgggtgtgatggtgcacacttgtgctcccagctactctggaggctgaggtgggaggatggcttgaggccaggagtacagggctgcattaagcctgatcacaccactgcactccagcttgggcaacagagtgagaccctgtctctaaaaaagcaaaaagaagaaacccagtgcccattggctgtcactcggtttcccctcccctgggccctagtaaccccttgtctaggtcctggttctatgagatttgcctacagtggatatttcatgaaaacaggctcagacagcgtttgtccttttgtaatcagctttcctcgctcagcatggtgtctctgaggtccacccacgtggcagtatggccttcctgtttatgggcaaatgatattctgtggcatggatggaccacaacatgctcatctgttgatgggctgttgcccgtgatgctgccaggcacgccggtgtacacgtctgtgtgcccgtgcccctggtcctgtggctgcacgccagggccggtaagtgctggtggtggtttccatcatgaggagctgctggttttccatagcagctccaccatctaaggttcccaccaccaacacgaggttgcggtttctccacatcctcaacaacctgttactatgtcttttttgttctggccatgctgctgaacgggtagcttgctgtgggctcttctcagttccctgttgaccgacgctgagcgtcttttcatgtgcttggccatttgtgtatcttctctggggaaatgtctattcaaatcctttctccatagtttagttgggcttttgagataggatctcaggctgaagtgcagtggcatgaccttcactcactgtagcctctgcctcccaggttcaagcgattctcccacctcagcctcccgagtagctgggactacaggtgtgcaccaccaggcctggctagtcttttgtatttttggccaggttcgtctcaaactcctgacctcaaagtgctgggatgacaagtgtgagccgccacacccagcagttgggttgttttttattagagttttttctgtttttctgcagatacattggctagaaatgactgaattggaagaattctctgtattctctggttgctagaaccttatcaattaaaatttgcagaaaatttctccaattctatggactgtctcttaaattttcttggtgtctttggaagcacaaagtatttattttggtaatatctggtttactttgtttccttcgccaaatccaggttcatgaagatttgcccgttttcttctaaaagttctatagttttagctctgaagtttcgctctttgatccactttgaggtaaattttggcacatggtatgaggcaggagttgcgtttcattctcctgcctggggcggtgcctgcaccgtgttgaaaaaggttgtccgttcccactgaacggtcacagctcccttgtctaagatcaacgacccctgaacatgagggttccaactggactcttagttctactccactggcctgtgtctgcccaccattactaccgccgtgccatactgaggtcaggctggggcttttctgggctgctgggtgagctggagaatgcggttgtgtgacccgcaggaagggcagagctgagcgtatgacctgtgtcgttcccctccagaaaaatacccgcagcccaaagggcagaagaagaagaagatcgtcaagtacggcatgggtggcctcatcatcctcttcctcatcgccatcatctggttcccgctgctcttcatgtcgctggtgcgctccgtggttggggttgtcaaccagcccatcgatgtcaccgtcaccctcaagctgggcggctatgagccgctgttcaccatgagcgcccagcagccgtccatcatccccttcacggcccaggcctatgaggagctgtcccggcagtttgacccccagccgctggccatgcagttcatcagccagtacagccctgaggacatcgtcacggcgcagattgagggcagctccggggcgctgtggcgcatcagtccccccagccgtgcccagatgaagcgggagctctacaacggcacggccgacatcaccctgcgcttcacctggaacttccagagggacctggcgaagggaggcactgtggagtatgccaacgagaagcacatgctggccctggcccccaacagcactgcacggcggcagctggccagcctgctcgagggcacctcggaccagtctgtggtcatccccaatctcttccccaagtacatccgtgcccccaacgggcccgaagccaaccctgtgaagcagctgcagcccaatgaggaggccgactacctcggcgtgcgtatccagctgcggagggagcagggtgcgggggccaccggcttcctcgaatggtgggtcatcgagctgcaggagtgccggaccgactgcaacctgctgcccatggtcattttcagtgacaaggtcagcccaccgagcctcggcttcctggctggctacggcatcatggggctgtacgtgtccatcgtgctggtcatcggcaagttcgtgcgcggattcttcagcgagatctcgcactccattatgttcgaggagctgccgtgcgtggaccgcatcctcaagctctgccaggacatcttcctggtgcgggagactcgggagctggagctggaggaggagttgtacgccaagctcatcttcctctaccgctcaccggagaccatgatcaagtggactcgtgagaaggagtaggagctgctgctggcgcccgagagggaaggagccggcctgctgggcagcgtggccacaaggggcggcactcctcaggccgggggagccactgccccgtccaaggccgccagctgtgatgcatcctcccggcctgcctgagccctgatgctgctgtcagagaaggacactgcgtccccacggcctgcgtggcgctgccgtcccccacgtgtactgtagagttttttttttaattaaaaaatgttttatttatacaaatggacaaaaaaaaaaca

SEQ ID NO: 279989 - DNA, 7962 bp, Homo sapiens
ccatggacctgcgccctgagctgcccaccaccctgggccccgtcagcctgcgccagctggggctggagcacacccgctacccctgtctggaccttggtgccatgttgctctacaccctgaccttctggctcctgctgcgccagtttgtgaaagagaagctgctgaagtgggcagagtctccagctgcgctgacggaggtcaccgtggcagacacagagcctacgcggacgcagacgctgttgcagagcctgggggagctggtgaagggcgtgtacgccaagtactggatctatgtgtgtgctggcatgttcatcgtggtcagcttcgccggccgcctcgtggtctacaagattgtctacatgttcctcttcctgctctgcctcaccctcttccaggtctactacagcctgtggcggaagctgctcaaggccttctggtggctcgtggtggcctacaccatgctggtcctcatcgccgtctacaccttccagttccaggacttccctgcctactggcgcaacctcactggcttcaccgacgagcagctgggggacctgggcctggagcagttcagcgtatccgagctcttctccagcatcctggtgcccggcttcttcctcctggcctgcatcctgcagctgcactacttccacaggcccttcatgcagctcaccgacatggagcacgtgtccctgcctggcacgcgcctcccgcgctgggctcacaggcaggatgcagtgagtgggaccccactgctgcgggaggagcagcaggagcatcagcagcagcagcaggaggaggaggaggaggaggactccagggacgaggggctgggcgtggccactccccaccaggccacgcaggtgcctgaaggggcagccaagtggggcctggtggctgagcgcctgctggagctggcagccggcttctcggacgtcctctcacgcgtgcaggtgttcctgcggcggctgctggagcttcacgttttcaagctggtggccctgtacaccgtctgggtggccctgaaggaggtgtcggtgatgaacctgctgctggtggtgctgtgggccttcgccctgccctacccacgcttccggcccatggcctcctgcctgtccaccgtgtggacctgcgtcatcatcgtgtgtaagatgctgtaccagctcaaggttgtcaacccccaggagtattccagcaactgcaccgagcccttccccaacagcaccaacttgctgcccacggagatcagccagtccctgctgtaccgggggcccgtggaccctgccaactggtttggggtgcggaaagggttccccaacctgggctacatccagaaccacctgcaagtgctgctgctgctggtattcgaggccatcgtgtaccggcgccaggagcactaccgccggcagcaccagctggccccgctgcctgcccaggccgtgtttgccagcggcacccgccagcagctggaccaggatctgctcggctgcctcaagtacttcatcaacttcttcttctacaaattcgggctggagatctgcttcctgatggccgtgaacgtgatcgggcagcgcatgaactttctggtgaccctgcacggttgctggctggtggccatcctcacccgcaggcaccgccaggccattgcccgcctctggcccaactactgcctcttcctggcgctgttcctgctgtaccagtacctgctgtgcctggggatgcccccggccctgtgcattgattatccctggcgctggagccgggccgtccccatgaactccgcactcatcaagtggctgtacctgcctgatttcttccgggcccccaactccaccaacctcatcagcgactttctcctgctgctgtgcgcctcccagcagtggcaggtgttctcagctgagcgcacagaggagtggcagcgcatggctggcgtcaacaccgaccgcctggagccgctgcggggggagcccaaccccgtgcccaactttatccactgcaggtcctaccttgacatgctgaaggtggccgtcttccgatacctgttctggctggtgctggtggtggtgtttgtcacgggggccacccgcatcagcatcttcgggctgggctacctgctggcctgcttctacctgctgctcttcggcacggccctgctgcagagggacacacgggcccgcctcgtgctgtgggactgcctcattctgtacaacgtcaccgtcatcatctccaagaacatgctgtcgctcctggcctgcgtcttcgtggagcagatgcagaccggcttctgctgggtcatccagctcttcagccttgtatgcaccgtcaagggctactatgaccccaaggagatgatggacagagaccaggactgcctgctgcctgtggaggaggctggcatcatctgggacagcgtctgcttcttcttcctgctgctgcagcgccgcgtcttccttagccattactacctgcacgtcagggccgacctccaggccaccgccctgctagcctccaggggcttcgccctctacaacgctgccaacctcaagagcattgacttccaccgcaggatagaggagaagtccctggcccagctgaaaagacagatggagcgtatccgtgccaagcaggagaagcacaggcagggccgggtggaccgcagtcgcccccaggacaccctgggccccaaggaccccggcctggagccagggcccgacagtccagggggctcctccccgccacggaggcagtggtggcggccctggctggaccacgccacagtcatccactccggggactacttcctgtttgagtccgacagtgaggaagaggaggaggctgttcctgaagacccgaggccgtcggcacagagtgccttccagctggcgtaccaggcatgggtgaccaacgcccaggcggtgctgaggcggcggcagcaggagcaggagcaggcaaggcaggaacaggcaggacagctacccacaggaggtggtcccagccaggaggtggagccagcagagggccccgaggaggcagcggcaggccggagccatgtggtgcagagggtgctgagcacggcgcagttcctgtggatgctggggcaggcgctagtggatgagctgacacgctggctgcaggagttcacccggcaccacggcaccatgagcgacgtgctgcgggcagagcgctacctcctcacacaggagctcctgcagggcggcgaagtgcacaggggcgtgctggatcagctgtacacaagccaggccgaggccacgctgccaggccccaccgaggcccccaatgccccaagcaccgtgtccagtgtgggcttgtggctgctggagtgaagccactcaagcagcatgacatgactgaccattggtgcatgcccccctgagtcacctgtgctatcaacgacgctgcatgtggcatgtgaggagggcatgtcacctgaccccctgggggagctgttgagtgctcgggttgcctcttcttgtacgcacggggactcgattgcgggactgtgccatgccgacgcttgtgtccttgtgacatggcgcctcgctgcaattcccacgaagcttggcctggacgtgcgcaggagcttgtttgtgccggatgggcgccgtggccgggcgctgcggctgctgcgggccgtgtaccagtgtgtggccgcccactcggagctgctctgctacttcatcatcatcctcaaccacatggtcacggcctccgccggctcgctggtgctgcccgtgctcgtcttcctgtgggccatgctgtcgatcccgaggcccagcaagcgcttctggatgacggccatcgtcttcaccgagatcgcggtggtcgtcaagtacctgttccagtttgggttcttcccctggaacagccacgtggtgctgcggcgctacgagaacaagccctacttcccgccccgcatcctgggcctggagaagactgacggctacatcaagtacgacctggtgcagctcatggcccttttcttccaccgctcccagctgctgtgctatggcctctgggaccatgaggaggactcaccatccaaggagcatgacaagagcggcgaggaggagcagggagccgaggaggggccaggggtgcctgcggccaccaccgaagaccacattcaggtggaagcgagggtcggacccacggacgggaccccagaaccccaagtggagctcaggccccgtgatacgaggcgcatcagtctacgttttagaagaaggaagaaggagggcccagcacggaaaggagcggcagccatcgaagctgaggacagggaggaagaagagggggaggaagagaaagaggcccccacggggagagagaagaggccaagccgctctggaggaagagtaagggcggccgggcggcggctgcagggcttctgcctgtccctggcccagggcacatatcggccgctacggcgcttcttccacgacatcctgcacaccaagtaccgcgcagccaccgacgtctatgccctcatgttcctggctgatgttgtcgacttcatcatcatcatttttggcttctgggcctttgggaagcactcggcggccacagacatcacgtcctccctatcagacgaccaggtacccgaggctttcctggtcatgctgctgatccagttcagtaccatggtggttgaccgcgccctctacctgcgcaagaccgtgctgggcaagctggccttccaggtggcgctggtgctggccatccacctatggatgttcttcatcctgcccgccgtcactgagaggatgttcaaccagaatgtggtggcccagctctggtacttcgtgaagtgcatctacttcgccctgtccgcctaccagatccgctgcggctaccccacccgcatcctcggcaacttcctcaccaagaagtacaatcatctcaacctcttcctcttccaggggttccggctggtgccgttcctggtggagctgcgggcagtgatggactgggtgtggacggacaccacgctgtccctgtccagctggatgtgtgtggaggacatctatgccaacatcttcatcatcaaatgcagccgagagacagagaaggtgcctgggcccagggcgggggccgggacaagggccagggatatgccctctccctaagacagaggcactgctgccacgagaacccgtggtgctggaggccctcccagggctcggagcccatggggacatgaggcgagcccacccactagctgatcacgaggccagtgatcttggcagctgcgagtgagtgctgggcgcagaagtgggcagcggagttggtcctgttccaggcaggctggcagcagagcagggcctggtgcagggaggaccggacagccactgtttgctgcattcttgtttaatggcctttctcagagagaattcgtgcgtcagaccactcccccacgtaaaaagtacaactcaggggtttctagtggattcacagttgagcatctgccttctcaccacttcaaaaagaaaccccgggccgggcacagcggctcacccctatcatcccagcactgtaagagacccaggagggaggtactgctcaaggccaggagttcaagatctgcacggccacaagcgagaccctgcctcagcaaatgtaaaaataaaacaattagctggcaatggcagctcatgcctatggtcccagcactttgggaggccaaaggaggaggatcagttgaggccaggagttttaagaccagcctgggcaacatagtgagtgagactctctctacaaaaaataaacgttagctgggtgtgatggtgcacacttgtgctcccacctcccgagtagctgggactacaggtgtgcaccaccaggcctggctagtcttttgtatttttggccaggttcgtctcaaactcctgacctcaaagtgctgggatgacaagtgtgagccgccacacccagcagttgggttgttttttattagagttttttctgtttttctgcagatacattggctagaaatgactgaattggaagaattctctgtattctctggttgctagaaccttatcaattaaaatttgcagaaaatttctccaattctatggactgtctcttaaattttcttggtgtctttggaagcacaaagtatttattttggtaatatctggtttactttgtttccttcgccaaatccaggttcatgaagatttgcccgttttcttctaaaagttctatagttttagctctgaagtttcgctctttgatccactttgaggtaaattttggcacatggtatgaggcaggagttgcgtttcattctcctgcctggggcggtgcctgcaccgtgttgaaaaaggttgtccgttcccactgaacggtcacagctcccttgtctaagatcaacgacccctgaacatgagggttccaactggactcttagttctactccactggcctgtgtctgcccaccattactaccgccgtgccatactgaggtcaggctggggcttttctgggctgctgggtgagctggagaatgcggttgtgtgacccgcaggaagggcagagctgagcgtatgacctgtgtcgttcccctccagaaaaatacccgcagcccaaagggcagaagaagaagaagatcgtcaagtacggcatgggtggcctcatcatcctcttcctcatcgccatcatctggttcccgctgctcttcatgtcgctggtgcgctccgtggttggggttgtcaaccagcccatcgatgtcaccgtcaccctcaagctgggcggctatgagccgctgttcaccatgagcgcccagcagccgtccatcatccccttcacggcccaggcctatgaggagctgtcccggcagtttgacccccagccgctggccatgcagttcatcagccagtacagccctgaggacatcgtcacggcgcagattgagggcagctccggggcgctgtggcgcatcagtccccccagccgtgcccagatgaagcgggagctctacaacggcacggccgacatcaccctgcgcttcacctggaacttccagagggacctggcgaagggaggcactgtggagtatgccaacgagaagcacatgctggccctggcccccaacagcactgcacggcggcagctggccagcctgctcgagggcacctcggaccagtctgtggtcatccccaatctcttccccaagtacatccgtgcccccaacgggcccgaagccaaccctgtgaagcagctgcagcccaatgaggaggccgactacctcggcgtgcgtatccagctgcggagggagcagggtgcgggggccaccggcttcctcgaatggtgggtcatcgagctgcaggagtgccggaccgactgcaacctgctgcccatggtcattttcagtgacaaggtcagcccaccgagcctcggcttcctggctggctacggcatcatggggctgtacgtgtccatcgtgctggtcatcggcaagttcgtgcgcggattcttcagcgagatctcgcactccattatgttcgaggagctgccgtgcgtggaccgcatcctcaagctctgccaggacatcttcctggtgcgggagactcgggagctggagctggaggaggagttgtacgccaagctcatcttcctctaccgctcaccggagaccatgatcaagtggactcgtgagaaggagtaggagctgctgctggcgcccgagagggaaggagccggcctgctgggcagcgtggccacaaggggcggcactcctcaggccgggggagccactgccccgtccaaggccgccagctgtgatgcatcctcccggcctgcctgagccctgatgctgctgtcagagaaggacactgcgtccccacggcctgcgtggcgctgccgtcccccacgtgtactgtagagttttttttttaattaaaaaatgttttatttatacaaatggacaaaaaaaaaaca

SEQ ID NO: 279990 - DNA, 8896 bp, Homo sapiens
ccatggacctgcgccctgagctgcccaccaccctgggccccgtcagcctgcgccagctggggctggagcacacccgctacccctgtctggaccttggtgccatgttgctctacaccctgaccttctggctcctgctgcgccagtttgtgaaagagaagctgctgaagtgggcagagtctccagctgcgctgacggaggtcaccgtggcagacacagagcctacgcggacgcagacgctgttgcagagcctgggggagctggtgaagggcgtgtacgccaagtactggatctatgtgtgtgctggcatgttcatcgtggtcagcttcgccggccgcctcgtggtctacaagattgtctacatgttcctcttcctgctctgcctcaccctcttccaggtctactacagcctgtggcggaagctgctcaaggccttctggtggctcgtggtggcctacaccatgctggtcctcatcgccgtctacaccttccagttccaggacttccctgcctactggcgcaacctcactggcttcaccgacgagcagctgggggacctgggcctggagcagttcagcgtatccgagctcttctccagcatcctggtgcccggcttcttcctcctggcctgcatcctgcagctgcactacttccacaggcccttcatgcagctcaccgacatggagcacgtgtccctgcctggcacgcgcctcccgcgctgggctcacaggcaggatgcagtgagtgggaccccactgctgcgggaggagcagcaggagcatcagcagcagcagcaggaggaggaggaggaggaggactccagggacgaggggctgggcgtggccactccccaccaggccacgcaggtgcctgaaggggcagccaagtggggcctggtggctgagcgcctgctggagctggcagccggcttctcggacgtcctctcacgcgtgcaggtgttcctgcggcggctgctggagcttcacgttttcaagctggtggccctgtacaccgtctgggtggccctgaaggaggtgtcggtgatgaacctgctgctggtggtgctgtgggccttcgccctgccctacccacgcttccggcccatggcctcctgcctgtccaccgtgtggacctgcgtcatcatcgtgtgtaagatgctgtaccagctcaaggttgtcaacccccaggagtattccagcaactgcaccgagcccttccccaacagcaccaacttgctgcccacggagatcagccagtccctgctgtaccgggggcccgtggaccctgccaactggtttggggtgcggaaagggttccccaacctgggctacatccagaaccacctgcaagtgctgctgctgctggtattcgaggccatcgtgtaccggcgccaggagcactaccgccggcagcaccagctggccccgctgcctgcccaggccgtgtttgccagcggcacccgccagcagctggaccaggatctgctcggctgcctcaagtacttcatcaacttcttcttctacaaattcgggctggagatctgcttcctgatggccgtgaacgtgatcgggcagcgcatgaactttctggtgaccctgcacggttgctggctggtggccatcctcacccgcaggcaccgccaggccattgcccgcctctggcccaactactgcctcttcctggcgctgttcctgctgtaccagtacctgctgtgcctggggatgcccccggccctgtgcattgattatccctggcgctggagccgggccgtccccatgaactccgcactcatcaagtggctgtacctgcctgatttcttccgggcccccaactccaccaacctcatcagcgactttctcctgctgctgtgcgcctcccagcagtggcaggtgttctcagctgagcgcacagaggagtggcagcgcatggctggcgtcaacaccgaccgcctggagccgctgcggggggagcccaaccccgtgcccaactttatccactgcaggtcctaccttgacatgctgaaggtggccgtcttccgatacctgttctggctggtgctggtggtggtgtttgtcacgggggccacccgcatcagcatcttcgggctgggctacctgctggcctgcttctacctgctgctcttcggcacggccctgctgcagagggacacacgggcccgcctcgtgctgtgggactgcctcattctgtacaacgtcaccgtcatcatctccaagaacatgctgtcgctcctggcctgcgtcttcgtggagcagatgcagaccggcttctgctgggtcatccagctcttcagccttgtatgcaccgtcaagggctactatgaccccaaggagatgatggacagagaccaggactgcctgctgcctgtggaggaggctggcatcatctgggacagcgtctgcttcttcttcctgctgctgcagcgccgcgtcttccttagccattactacctgcacgtcagggccgacctccaggccaccgccctgctagcctccaggggcttcgccctctacaacgctgccaacctcaagagcattgacttccaccgcaggatagaggagaagtccctggcccagctgaaaagacagatggagcgtatccgtgccaagcaggagaagcacaggcagggccgggtggaccgcagtcgcccccaggacaccctgggccccaaggaccccggcctggagccagggcccgacagtccagggggctcctccccgccacggaggcagtggtggcggccctggctggaccacgccacagtcatccactccggggactacttcctgtttgagtccgacagtgaggaagaggaggaggctgttcctgaagacccgaggccgtcggcacagagtgccttccagctggcgtaccaggcatgggtgaccaacgcccaggcggtgctgaggcggcggcagcaggagcaggagcaggcaaggcaggaacaggcaggacagctacccacaggaggtggtcccagccaggaggtggagccagcagagggccccgaggaggcagcggcaggccggagccatgtggtgcagagggtgctgagcacggcgcagttcctgtggatgctggggcaggcgctagtggatgagctgacacgctggctgcaggagttcacccggcaccacggcaccatgagcgacgtgctgcgggcagagcgctacctcctcacacaggagctcctgcagggcggcgaagtgcacaggggcgtgctggatcagctgtacacaagccaggccgaggccacgctgccaggccccaccgaggcccccaatgccccaagcaccgtgtccagtgtgggcttgtggctgctggagtgaagccactcaagcagcatgacatgactgaccattggtgcatgcccccctgagtcacctgtgctatcaacgacgctgcatgtggcatgtgaggagggcatgtcacctgaccccctgggggagctgttgagtgctcgggttgcctcttcttgtacgcacggggactcgattgcgggactgtgccatgccgacgcttgtgtccttgtgacatggcgcctcgctgcaattcccacgaagcttggcctggacgtgcgcaggagcttgtttgtgccggatgggcgccgtggccgggcgctgcggctgctgcgggccgtgtaccagtgtgtggccgcccactcggagctgctctgctacttcatcatcatcctcaaccacatggtcacggcctccgccggctcgctggtgctgcccgtgctcgtcttcctgtgggccatgctgtcgatcccgaggcccagcaagcgcttctggatgacggccatcgtcttcaccgagatcgcggtggtcgtcaagtacctgttccagtttgggttcttcccctggaacagccacgtggtgctgcggcgctacgagaacaagccctacttcccgccccgcatcctgggcctggagaagactgacggctacatcaagtacgacctggtgcagctcatggcccttttcttccaccgctcccagctgctgtgctatggcctctgggaccatgaggaggactcaccatccaaggagcatgacaagagcggcgaggaggagcagggagccgaggaggggccaggggtgcctgcggccaccaccgaagaccacattcaggtggaagcgagggtcggacccacggacgggaccccagaaccccaagtggagctcaggccccgtgatacgaggcgcatcagtctacgttttagaagaaggaagaaggagggcccagcacggaaaggagcggcagccatcgaagctgaggacagggaggaagaagagggggaggaagagaaagaggcccccacggggagagagaagaggccaagccgctctggaggaagagtaagggcggccgggcggcggctgcagggcttctgcctgtccctggcccagggcacatatcggccgctacggcgcttcttccacgacatcctgcacaccaagtaccgcgcagccaccgacgtctatgccctcatgttcctggctgatgttgtcgacttcatcatcatcatttttggcttctgggcctttgggaagcactcggcggccacagacatcacgtcctccctatcagacgaccaggtacccgaggctttcctggtcatgctgctgatccagttcagtaccatggtggttgaccgcgccctctacctgcgcaagaccgtgctgggcaagctggccttccaggtggcgctggtgctggccatccacctatggatgttcttcatcctgcccgccgtcactgagaggatgttcaaccagaatgtggtggcccagctctggtacttcgtgaagtgcatctacttcgccctgtccgcctaccagatccgctgcggctaccccacccgcatcctcggcaacttcctcaccaagaagtacaatcatctcaacctcttcctcttccaggggttccggctggtgccgttcctggtggagctgcgggcagtgatggactgggtgtggacggacaccacgctgtccctgtccagctggatgtgtgtggaggacatctatgccaacatcttcatcatcaaatgcagccgagagacagagaaggtgcctgggcccagggcgggggccgggacaagggccagggatatgccctctccctaagacagaggcactgctgccacgagaacccgtggtgctggaggccctcccagggctcggagcccatggggacatgaggcgagcccacccactagctgatcacgaggccagtgatcttggcagctgcgagtgagtgctgggcgcagaagtgggcagcggagttggtcctgttccaggcaggctggcagcagagcagggcctggtgcagggaggaccggacagccactgtttgctgcattcttgtttaatggcctttctcagagagaattcgtgcgtcagaccactcccccacgtaaaaagtacaactcaggggtttctagtggattcacagttgagcatctgccttctcaccacttcaaaaagaaaccccgggccgggcacagcggctcacccctatcatcccagcactgtaagagacccaggagggaggtactgctcaaggccaggagttcaagatctgcacggccacaagcgagaccctgcctcagcaaatgtaaaaataaaacaattagctggcaatggcagctcatgcctatggtcccagcactttgggaggccaaaggaggaggatcagttgaggccaggagttttaagaccagcctgggcaacatagtgagtgagactctctctacaaaaaataaacgttagctgggtgtgatggtgcacacttgtgctcccagctactctggaggctgaggtgggaggatggcttgaggccaggagtacagggctgcattaagcctgatcacaccactgcactccagcttgggcaacagagtgagaccctgtctctaaaaaagcaaaaagaagaaacccagtgcccattggctgtcactcggtttcccctcccctgggccctagtaaccccttgtctaggtcctggttctatgagatttgcctacagtggatatttcatgaaaacaggctcagacagcgtttgtccttttgtaatcagctttcctcgctcagcatggtgtctctgaggtccacccacgtggcagtatggccttcctgtttatgggcaaatgatattctgtggcatggatggaccacaacatgctcatctgttgatgggctgttgcccgtgatgctgccaggcacgccggtgtacacgtctgtgtgcccgtgcccctggtcctgtggctgcacgccagggccggtaagtgctggtggtggtttccatcatgaggagctgctggttttccatagcagctccaccatctaaggttcccaccaccaacacgaggttgcggtttctccacatcctcaacaacctgttactatgtcttttttgttctggccatgctgctgaacgggtagcttgctgtgggctcttctcagttccctgttgaccgacgctgagcgtcttttcatgtgcttggccatttgtgtatcttctctggggaaatgtctattcaaatcctttctccatagtttagttgggcttttgagataggatctcaggctgaagtgcagtggcatgaccttcactcactgtagcctctgcctcccaggttcaagcgattctcccacctcagcctcccgagtagctgggactacaggtgtgcaccaccaggcctggctagtcttttgtatttttggccaggttcgtctcaaactcctgacctcaaagtgctgggatgacaagtgtgagccgccacacccagcagttgggttgttttttattagagttttttctgtttttctgcagatacattggctagaaatgactgaattggaagaattctctgtattctctggttgctagaaccttatcaattaaaatttgcagaaaatttctccaattctatggactgtctcttaaattttcttggtgtctttggaagcacaaagtatttattttggtaatatctggtttactttgtttccttcgccaaatccaggttcatgaagatttgcccgttttcttctaaaagttctatagttttagctctgaagtttcgctctttgatccactttgaggtaaattttggcacatggtatgaggcaggagttgcgtttcattctcctgcctggggcggtgcctgcaccgtgttgaaaaaggttgtccgttcccactgaacggtcacagctcccttgtctaagatcaacgacccctgaacatgagggttccaactggactcttagttctactccactggcctgtgtctgcccaccattactaccgccgtgccatactgaggtcaggctggggcttttctgggctgctgggtgagctggagaatgcggttgtgtgacccgcaggaagggcagagctgagcgtatgacctgtgtcgttcccctccagaaaaatacccgcagcccaaagggcagaagaagaagaagatcgtcaagtacggcatgggtggcctcatcatcctcttcctcatcgccatcatctggttcccgctgctcttcatgtcgctggtgcgctccgtggttggggttgtcaaccagcccatcgatgtcaccgtcaccctcaagctgggcggctatgagccgctgttcaccatgagcgcccagcagccgtccatcatccccttcacggcccaggcctatgaggagctgtcccggcagtttgacccccagccgctggccatgcagttcatcagccagtacagccctgaggacatcgtcacggcgcagattgagggcagctccggggcgctgtggcgcatcagtccccccagccgtgcccagatgaagcgggagctctacaacggcacggccgacatcaccctgcgcttcacctggaacttccagaggttcgtcctggacttggggcagtgcctgggtgggtggacccactacagtgggtcacgctgtgttcccacccccagggacctggcgaagggaggcactgtggagtatgccaacgagaagcacatgctggccctggcccccaacagcactgcacggcggcagctggccagcctgctcgagggcacctcggaccagtctgtggtcatccccaatctcttccccaagtacatccgtgcccccaacgggcccgaagccaaccctgtgaagcagctgcagcccaatgaggaggccgactacctcggcgtgcgtatccagctgcggagggagcagggtgcgggggccaccggcttcctcgaatggtgggtcatcgagctgcaggagtgccggaccgactgcaacctgctgcccatggtcattttcagtgacaaggtcagcccaccgagcctcggcttcctggctggctacggcatcatggggctgtacgtgtccatcgtgctggtcatcggcaagttcgtgcgcggattcttcagcgagatctcgcactccattatgttcgaggagctgccgtgcgtggaccgcatcctcaagctctgccaggacatcttcctggtgcgggagactcgggagctggagctggaggaggagttgtacgccaagctcatcttcctctaccgctcaccggagaccatgatcaagtggactcgtgagaaggagtaggagctgctgctggcgcccgagagggaaggagccggcctgctgggcagcgtggccacaaggggcggcactcctcaggccgggggagccactgccccgtccaaggccgccagctgtgatgcatcctcccggcctgcctgagccctgatgctgctgtcagagaaggacactgcgtccccacggcctgcgtggcgctgccgtcccccacgtgtactgtagagttttttttttaattaaaaaatgttttatttatacaaatggacaaaaaaaaaaca

SEQ ID NO: 279991 - DNA, 5898 bp, Homo sapiens
ccatggacctgcgccctgagctgcccaccaccctgggccccgtcagcctgcgccagctggggctggagcacacccgctacccctgtctggaccttggtgccatgttgctctacaccctgaccttctggctcctgctgcgccagtttgtgaaagagaagctgctgaagtgggcagagtctccagctgcgctgacggaggtcaccgtggcagacacagagcctacgcggacgcagacgctgttgcagagcctgggggagctggtgaagggcgtgtacgccaagtactggatctatgtgtgtgctggcatgttcatcgtggtcagcttcgccggccgcctcgtggtctacaagattgtctacatgttcctcttcctgctctgcctcaccctcttccaggtctactacagcctgtggcggaagctgctcaaggccttctggtggctcgtggtggcctacaccatgctggtcctcatcgccgtctacaccttccagttccaggacttccctgcctactggcgcaacctcactggcttcaccgacgagcagctgggggacctgggcctggagcagttcagcgtatccgagctcttctccagcatcctggtgcccggcttcttcctcctggcctgcatcctgcagctgcactacttccacaggcccttcatgcagctcaccgacatggagcacgtgtccctgcctggcacgcgcctcccgcgctgggctcacaggcaggatgcagtgagtgggaccccactgctgcgggaggagcagcaggagcatcagcagcagcagcaggaggaggaggaggaggaggactccagggacgaggggctgggcgtggccactccccaccaggccacgcaggtgcctgaaggggcagccaagtggggcctggtggctgagcgcctgctggagctggcagccggcttctcggacgtcctctcacgcgtgcaggtgttcctgcggcggctgctggagcttcacgttttcaagctggtggccctgtacaccgtctgggtggccctgaaggaggtgtcggtgatgaacctgctgctggtggtgctgtgggccttcgccctgccctacccacgcttccggcccatggcctcctgcctgtccaccgtgtggacctgcgtcatcatcgtgtgtaagatgctgtaccagctcaaggttgtcaacccccaggagtattccagcaactgcaccgagcccttccccaacagcaccaacttgctgcccacggagatcagccagtccctgctgtaccgggggcccgtggaccctgccaactggtttggggtgcggaaagggttccccaacctgggctacatccagaaccacctgcaagtgctgctgctgctggtattcgaggccatcgtgtaccggcgccaggagcactaccgccggcagcaccagctggccccgctgcctgcccaggccgtgtttgccagcggcacccgccagcagctggaccaggatctgctcggctgcctcaagtacttcatcaacttcttcttctacaaattcgggctggagatctgcttcctgatggccgtgaacgtgatcgggcagcgcatgaactttctggtgaccctgcacggttgctggctggtggccatcctcacccgcaggcaccgccaggccattgcccgcctctggcccaactactgcctcttcctggcgctgttcctgctgtaccagtacctgctgtgcctggggatgcccccggccctgtgcattgattatccctggcgctggagccgggccgtccccatgaactccgcactcatcaagtggctgtacctgcctgatttcttccgggcccccaactccaccaacctcatcagcgactttctcctgctgctgtgcgcctcccagcagtggcaggtgttctcagctgagcgcacagaggagtggcagcgcatggctggcgtcaacaccgaccgcctggagccgctgcggggggagcccaaccccgtgcccaactttatccactgcaggtcctaccttgacatgctgaaggtggccgtcttccgatacctgttctggctggtgctggtggtggtgtttgtcacgggggccacccgcatcagcatcttcgggctgggctacctgctggcctgcttctacctgctgctcttcggcacggccctgctgcagagggacacacgggcccgcctcgtgctgtgggactgcctcattctgtacaacgtcaccgtcatcatctccaagaacatgctgtcgctcctggcctgcgtcttcgtggagcagatgcagaccggcttctgctgggtcatccagctcttcagccttgtatgcaccgtcaagggctactatgaccccaaggagatgatggacagagaccaggactgcctgctgcctgtggaggaggctggcatcatctgggacagcgtctgcttcttcttcctgctgctgcagcgccgcgtcttccttagccattactacctgcacgtcagggccgacctccaggccaccgccctgctagcctccaggggcttcgccctctacaacgctgccaacctcaagagcattgacttccaccgcaggatagaggagaagtccctggcccagctgaaaagacagatggagcgtatccgtgccaagcaggagaagcacaggcagggccgggtggaccgcagtcgcccccaggacaccctgggccccaaggaccccggcctggagccagggcccgacagtccagggggctcctccccgccacggaggcagtggtggcggccctggctggaccacgccacagtcatccactccggggactacttcctgtttgagtccgacagtgaggaagaggaggaggctgttcctgaagacccgaggccgtcggcacagagtgccttccagctggcgtaccaggcatgggtgaccaacgcccaggcggtgctgaggcggcggcagcaggagcaggagcaggcaaggcaggaacaggcaggacagctacccacaggaggtggtcccagccaggaggtggagccagcagagggccccgaggaggcagcggcaggccggagccatgtggtgcagagggtgctgagcacggcgcagttcctgtggatgctggggcaggcgctagtggatgagctgacacgctggctgcaggagttcacccggcaccacggcaccatgagcgacgtgctgcgggcagagcgctacctcctcacacaggagctcctgcagggcggcgaagtgcacaggggcgtgctggatcagctgtacacaagccaggccgaggccacgctgccaggccccaccgaggcccccaatgccccaagcaccgtgtccagtgtgggcttgtggctgctggagtgaagccactcaagcagcatgacatgactgaccattggtgcatgcccccctgagtcacctgtgctatcaacgacgctgcatgtggcatgtgaggagggcatgtcacctgaccccctgggggagctgttgagtgctcgggttgcctcttcttgtacgcacggggactcgattgcgggactgtgccatgccgacgcttgtgtccttgtgacatggcgcctcgctgcaattcccacgaagcttggcctggacgtgcgcaggagcttgtttgtgccggatgggcgccgtggccgggcgctgcggctgctgcgggccgtgtaccagtgtgtggccgcccactcggagctgctctgctacttcatcatcatcctcaaccacatggtcacggcctccgccggctcgctggtgctgcccgtgctcgtcttcctgtgggccatgctgtcgatcccgaggcccagcaagcgcttctggatgacggccatcgtcttcaccgagatcgcggtggtcgtcaagtacctgttccagtttgggttcttcccctggaacagccacgtggtgctgcggcgctacgagaacaagccctacttcccgccccgcatcctgggcctggagaagactgacggctacatcaagtacgacctggtgcagctcatggcccttttcttccaccgctcccagctgctgtgctatggcctctgggaccatgaggaggactcaccatccaaggagcatgacaagagcggcgaggaggagcagggagccgaggaggggccaggggtgcctgcggccaccaccgaagaccacattcaggtggaagcgagggtcggacccacggacgggaccccagaaccccaagtggagctcaggccccgtgatacgaggcgcatcagtctacgttttagaagaaggaagaaggagggcccagcacggaaaggagcggcagccatcgaagctgaggacagggaggaagaagagggggaggaagagaaagaggcccccacggggagagagaagaggccaagccgctctggaggaagagtaagggcggccgggcggcggctgcagggcttctgcctgtccctggcccagggcacatatcggccgctacggcgcttcttccacgacatcctgcacaccaagtaccgcgcagccaccgacgtctatgccctcatgttcctggctgatgttgtcgacttcatcatcatcatttttggcttctgggcctttgggaagcactcggcggccacagacatcacgtcctccctatcagacgaccaggtacccgaggctttcctggtcatgctgctgatccagttcagtaccatggtggttgaccgcgccctctacctgcgcaagaccgtgctgggcaagctggccttccaggtggcgctggtgctggccatccacctatggatgttcttcatcctgcccgccgtcactgagaggatgttcaaccagaatgtggtggcccagctctggtacttcgtgaagtgcatctacttcgccctgtccgcctaccagatccgctgcggctaccccacccgcatcctcggcaacttcctcaccaagaagtacaatcatctcaacctcttcctcttccaggggttccggctggtgccgttcctggtggagctgcgggcagtgatggactgggtgtggacggacaccacgctgtccctgtccagctggatgtgtgtggaggacatctatgccaacatcttcatcatcaaatgcagccgagagacagagaagaaatacccgcagcccaaagggcagaagaagaagaagatcgtcaatacatccgtgcccccaacgggcccgaagccaaccctgtgaagcagctgcagcccaatgaggaggccgactacctcggcgtgcgtatccagctgcggagggagcagggtgcgggggccaccggcttcctcgaatggtgggtcatcgagctgcaggagtgccggaccgactgcaacctgctgcccatggtcattttcagtgacaaggtcagcccaccgagcctcggcttcctggctggctacggcatcatggggctgtacgtgtccatcgtgctggtcatcggcaagttcgtgcgcggattcttcagcgagatctcgcactccattatgttcgaggagctgccgtgcgtggaccgcatcctcaagctctgccaggacatcttcctggtgcgggagactcgggagctggagctggaggaggagttgtacgccaagctcatcttcctctaccgctcaccggagaccatgatcaagtggactcgtgagaaggagtaggagctgctgctggcgcccgagagggaaggagccggcctgctgggcagcgtggccacaaggggcggcactcctcaggccgggggagccactgccccgtccaaggccgccagctgtgatgcatcctcccggcctgcctgagccctgatgctgctgtcagagaaggacactgcgtccccacggcctgcgtggcgctgccgtcccccacgtgtactgtagagttttttttttaattaaaaaatgttttatttatacaaatggacaaaaaaaaaaca

SEQ ID NO: 279992 - DNA, 6457 bp, Homo sapiens
  misc_feature (5846)..(5847): n is a, c, g, or t
  misc_feature (5849)..(5849): n is a, c, g, or t
  misc_feature (5863)..(5863): n is a, c, g, or t
  misc_feature (5875)..(5875): n is a, c, g, or t
  misc_feature (5890)..(5890): n is a, c, g, or t
  misc_feature (5892)..(5892): n is a, c, g, or t
  misc_feature (5904)..(5905): n is a, c, g, or t
  misc_feature (5908)..(5908): n is a, c, g, or t
  misc_feature (5911)..(5912): n is a, c, g, or t
  misc_feature (5915)..(5916): n is a, c, g, or t
  misc_feature (5919)..(5919): n is a, c, g, or t
  misc_feature (5924)..(5924): n is a, c, g, or t
  misc_feature (5934)..(5935): n is a, c, g, or t
  misc_feature (5945)..(5945): n is a, c, g, or t
  misc_feature (5951)..(5952): n is a, c, g, or t
  misc_feature (5954)..(5955): n is a, c, g, or t
  misc_feature (5957)..(5957): n is a, c, g, or t
  misc_feature (5969)..(5969): n is a, c, g, or t
  misc_feature (5972)..(5973): n is a, c, g, or t
  misc_feature (5975)..(5975): n is a, c, g, or t
  misc_feature (5987)..(5987): n is a, c, g, or t
  misc_feature (5989)..(5989): n is a, c, g, or t
  misc_feature (5998)..(5998): n is a, c, g, or t
ccatggacctgcgccctgagctgcccaccaccctgggccccgtcagcctgcgccagctggggctggagcacacccgctacccctgtctggaccttggtgccatgttgctctacaccctgaccttctggctcctgctgcgccagtttgtgaaagagaagctgctgaagtgggcagagtctccagctgcgctgacggaggtcaccgtggcagacacagagcctacgcggacgcagacgctgttgcagagcctgggggagctggtgaagggcgtgtacgccaagtactggatctatgtgtgtgctggcatgttcatcgtggtcagcttcgccggccgcctcgtggtctacaagattgtctacatgttcctcttcctgctctgcctcaccctcttccaggtctactacagcctgtggcggaagctgctcaaggccttctggtggctcgtggtggcctacaccatgctggtcctcatcgccgtctacaccttccagttccaggacttccctgcctactggcgcaacctcactggcttcaccgacgagcagctgggggacctgggcctggagcagttcagcgtatccgagctcttctccagcatcctggtgcccggcttcttcctcctggcctgcatcctgcagctgcactacttccacaggcccttcatgcagctcaccgacatggagcacgtgtccctgcctggcacgcgcctcccgcgctgggctcacaggcaggatgcagtgagtgggaccccactgctgcgggaggagcagcaggagcatcagcagcagcagcaggaggaggaggaggaggaggactccagggacgaggggctgggcgtggccactccccaccaggccacgcaggtgcctgaaggggcagccaagtggggcctggtggctgagcgcctgctggagctggcagccggcttctcggacgtcctctcacgcgtgcaggtgttcctgcggcggctgctggagcttcacgttttcaagctggtggccctgtacaccgtctgggtggccctgaaggaggtgtcggtgatgaacctgctgctggtggtgctgtgggccttcgccctgccctacccacgcttccggcccatggcctcctgcctgtccaccgtgtggacctgcgtcatcatcgtgtgtaagatgctgtaccagctcaaggttgtcaacccccaggagtattccagcaactgcaccgagcccttccccaacagcaccaacttgctgcccacggagatcagccagtccctgctgtaccgggggcccgtggaccctgccaactggtttggggtgcggaaagggttccccaacctgggctacatccagaaccacctgcaagtgctgctgctgctggtattcgaggccatcgtgtaccggcgccaggagcactaccgccggcagcaccagctggccccgctgcctgcccaggccgtgtttgccagcggcacccgccagcagctggaccaggatctgctcggctgcctcaagtacttcatcaacttcttcttctacaaattcgggctggagatctgcttcctgatggccgtgaacgtgatcgggcagcgcatgaactttctggtgaccctgcacggttgctggctggtggccatcctcacccgcaggcaccgccaggccattgcccgcctctggcccaactactgcctcttcctggcgctgttcctgctgtaccagtacctgctgtgcctggggatgcccccggccctgtgcattgattatccctggcgctggagccgggccgtccccatgaactccgcactcatcaagtggctgtacctgcctgatttcttccgggcccccaactccaccaacctcatcagcgactttctcctgctgctgtgcgcctcccagcagtggcaggtgttctcagctgagcgcacagaggagtggcagcgcatggctggcgtcaacaccgaccgcctggagccgctgcggggggagcccaaccccgtgcccaactttatccactgcaggtcctaccttgacatgctgaaggtggccgtcttccgatacctgttctggctggtgctggtggtggtgtttgtcacgggggccacccgcatcagcatcttcgggctgggctacctgctggcctgcttctacctgctgctcttcggcacggccctgctgcagagggacacacgggcccgcctcgtgctgtgggactgcctcattctgtacaacgtcaccgtcatcatctccaagaacatgctgtcgctcctggcctgcgtcttcgtggagcagatgcagaccggcttctgctgggtcatccagctcttcagccttgtatgcaccgtcaagggctactatgaccccaaggagatgatggacagagaccaggactgcctgctgcctgtggaggaggctggcatcatctgggacagcgtctgcttcttcttcctgctgctgcagcgccgcgtcttccttagccattactacctgcacgtcagggccgacctccaggccaccgccctgctagcctccaggggcttcgccctctacaacgctgccaacctcaagagcattgacttccaccgcaggatagaggagaagtccctggcccagctgaaaagacagatggagcgtatccgtgccaagcaggagaagcacaggcagggccgggtggaccgcagtcgcccccaggacaccctgggccccaaggaccccggcctggagccagggcccgacagtccagggggctcctccccgccacggaggcagtggtggcggccctggctggaccacgccacagtcatccactccggggactacttcctgtttgagtccgacagtgaggaagaggaggaggctgttcctgaagacccgaggccgtcggcacagagtgccttccagctggcgtaccaggcatgggtgaccaacgcccaggcggtgctgaggcggcggcagcaggagcaggagcaggcaaggcaggaacaggcaggacagctacccacaggaggtggtcccagccaggaggtggagccagcagagggccccgaggaggcagcggcaggccggagccatgtggtgcagagggtgctgagcacggcgcagttcctgtggatgctggggcaggcgctagtggatgagctgacacgctggctgcaggagttcacccggcaccacggcaccatgagcgacgtgctgcgggcagagcgctacctcctcacacaggagctcctgcagggcggcgaagtgcacaggggcgtgctggatcagctgtacacaagccaggccgaggccacgctgccaggccccaccgaggcccccaatgccccaagcaccgtgtccagtgtgggcttgtggctgctggagtgaagccactcaagcagcatgacatgactgaccattggtgcatgcccccctgagtcacctgtgctatcaacgacgctgcatgtggcatgtgaggagggcatgtcacctgaccccctgggggagctgttgagtgctcgggttgcctcttcttgtacgcacggggactcgattgcgggactgtgccatgccgacgcttgtgtccttgtgacatggcgcctcgctgcaattcccacgaagcttggcctggacgtgcgcaggagcttgtttgtgccggatgggcgccgtggccgggcgctgcggctgctgcgggccgtgtaccagtgtgtggccgcccactcggagctgctctgctacttcatcatcatcctcaaccacatggtcacggcctccgccggctcgctggtgctgcccgtgctcgtcttcctgtgggccatgctgtcgatcccgaggcccagcaagcgcttctggatgacggccatcgtcttcaccgagatcgcggtggtcgtcaagtacctgttccagtttgggttcttcccctggaacagccacgtggtgctgcggcgctacgagaacaagccctacttcccgccccgcatcctgggcctggagaagactgacggctacatcaagtacgacctggtgcagctcatggcccttttcttccaccgctcccagctgctgtgctatggcctctgggaccatgaggaggactcaccatccaaggagcatgacaagagcggcgaggaggagcagggagccgaggaggggccaggggtgcctgcggccaccaccgaagaccacattcaggtggaagcgagggtcggacccacggacgggaccccagaaccccaagtggagctcaggccccgtgatacgaggcgcatcagtctacgttttagaagaaggaagaaggagggcccagcacggaaaggagcggcagccatcgaagctgaggacagggaggaagaagagggggaggaagagaaagaggcccccacggggagagagaagaggccaagccgctctggaggaagagtaagggcggccgggcggcggctgcagggcttctgcctgtccctggcccagggcacatatcggccgctacggcgcttcttccacgacatcctgcacaccaagtaccgcgcagccaccgacgtctatgccctcatgttcctggctgatgttgtcgacttcatcatcatcatttttggcttctgggcctttgggaagcactcggcggccacagacatcacgtcctccctatcagacgaccaggtacccgaggctttcctggtcatgctgctgatccagttcagtaccatggtggttgaccgcgccctctacctgcgcaagaccgtgctgggcaagctggccttccaggtggcgctggtgctggccatccacctatggatgttcttcatcctgcccgccgtcactgagaggatgttcaaccagaatgtggtggcccagctctggtacttcgtgaagtgcatctacttcgccctgtccgcctaccagatccgctgcggctaccccacccgcatcctcggcaacttcctcaccaagaagtacaatcatctcaacctcttcctcttccaggggttccggctggtgccgttcctggtggagctgcgggcagtgatggactgggtgtggacggacaccacgctgtccctgtccagctggatgtgtgtggaggacatctatgccaacatcttcatcatcaaatgcagccgagagacagagaagaaatacccgcagcccaaagggcagaagaagaagaagatcgtcaagtacggcatgggtggcctcatcatcctcttcctcatcgccatcatctggttcccgctgctcttcatgtcgctggtgcgctccgtggttggggttgtcaaccagcccatcgatgtcaccgtcaccctcaagctgggcggctatgagccgctgttcaccatgagcgcccagcagccgtccatcatccccttcacggcccaggcctatgaggagctgtcccggcagtttgacccccagccgctggccatgcagttcatcagccagtacagccctgaggacatcgtcacggcgcagattgagggcagctccggggcgctgtggcgcatcagtccccccagccgtgcccagatgaagcgggagctctacaacggcacggccgacatcaccctgcgcttcacctggaacttccagagggacctggcgaagggaggcactgtggagtatgccaacgagaagcacatgctggccctggcccccaacagcactgcacggcggcagctggccagcctgctcgagggcacctcggaccagtctgtggtcatccccaatctcttccccaagtacatccgtgcccccaacgggcccgaagccaaccctgtgaagcagctgcagcccaatgaggaggccgactacctcggcgtgcgtatccagctgcggagggagcagggtgcgggggccaccggcttcctcgaatggtgggaaaaagaaaagaannantaaaggaaaaaaanaaaaaaaaagcnaaaggaaaaaaaaantnaaaaggtcagcnnacngannaannganaaatngatggaaaannaaaaaagggnaagaannanncnaaagtgatggtnaanngnaaaattgagagngnaaaaaaaancgagatctcgcactccattatgttcgaggagctgccgtgcgtggaccgcatcctcaagctctgccaggacatcttcctggtgcgggagactcgggagctggagctggaggaggagttgtacgccaagctcatcttcctctaccgctcaccggagaccatgatcaagtggactcgtgagaaggagtaggagctgctgctggcgcccgagagggaaggagccggcctgctgggcagcgtggccacaaggggcggcactcctcaggccgggggagccactgccccgtccaaggccgccagctgtgatgcatcctcccggcctgcctgagccctgatgctgctgtcagagaaggacactgcgtccccacggcctgcgtggcgctgccgtcccccacgtgtactgtagagttttttttttaattaaaaaatgttttatttatacaaatggacaaaaaaaaaaca

SEQ ID NO: 279993 - DNA, 1146 bp, Homo sapiens
gccctgtgaaagctggtgtggggaggcggctgcagtcactgagggtgtcacttgtacccagctggccatgcagttcatcagccagtacagccctgaggacatcgtcacggcgcagattgagggcagctccggggcgctgtggcgcatcagtccccccagccgtgcccagatgaagcgggagctctacaacggcacggccgacatcaccctgcgcttcacctggaacttccagagggacctggcgaagggaggcactgtggagtatgccaacgagaagcacatgctggccctggcccccaacagcactgcacggcggcagctggccagcctgctcgagggcacctcggaccagtctgtggtcatccccaatctcttccccaagtacatccgtgcccccaacgggcccgaagccaaccctgtgaagcagctgcagcccaatgaggaggccgactacctcggcgtgcgtatccagctgcggagggagcagggtgcgggggccaccggcttcctcgaatggtgggtcatcgagctgcaggagtgccggaccgactgcaacctgctgcccatggtcattttcagtgacaaggtcagcccaccgagcctcggcttcctggctggctacggcatcatggggctgtacgtgtccatcgtgctggtcatcggcaagttcgtgcgcggattcttcagcgagatctcgcactccattatgttcgaggagctgccgtgcgtggaccgcatcctcaagctctgccaggacatcttcctggtgcgggagactcgggagctggagctggaggaggagttgtacgccaagctcatcttcctctaccgctcaccggagaccatgatcaagtggactcgtgagaaggagtaggagctgctgctggcgcccgagagggaaggagccggcctgctgggcagcgtggccacaaggggcggcactcctcaggccgggggagccactgccccgtccaaggccgccagctgtgatgcatcctcccggcctgcctgagccctgatgctgctgtcagagaaggacactgcgtccccacggcctgcgtggcgctgccgtcccccacgtgtactgtagagttttttttttaattaaaaaatgttttatttatacaaatggacaaaaaaaaaaca

SEQ ID NO: 279994 - DNA, 5331 bp, Homo sapiens
ccatggacctgcgccctgagctgcccaccaccctgggccccgtcagcctgcgccagctggggctggagcacacccgctacccctgtctggaccttggtgccatgttgctctacaccctgaccttctggctcctgctgcgccagtttgtgaaagagaagctgctgaagtgggcagagtctccagctgcgctgacggaggtcaccgtggcagacacagagcctacgcggacgcagacgctgttgcagagcctgggggagctggtgaagggcgtgtacgccaagtactggatctatgtgtgtgctggcatgttcatcgtggtcagcttcgccggccgcctcgtggtctacaagattgtctacatgttcctcttcctgctctgcctcaccctcttccaggtctactacagcctgtggcggaagctgctcaaggccttctggtggctcgtggtggcctacaccatgctggtcctcatcgccgtctacaccttccagttccaggacttccctgcctactggcgcaacctcactggcttcaccgacgagcagctgggggacctgggcctggagcagttcagcgtatccgagctcttctccagcatcctggtgcccggcttcttcctcctggcctgcatcctgcagctgcactacttccacaggcccttcatgcagctcaccgacatggagcacgtgtccctgcctggcacgcgcctcccgcgctgggctcacaggcaggatgcagtgagtgggaccccactgctgcgggaggagcagcaggagcatcagcagcagcagcaggaggaggaggaggaggaggactccagggacgaggggctgggcgtggccactccccaccaggccacgcaggtgcctgaaggggcagccaagtggggcctggtggctgagcgcctgctggagctggcagccggcttctcggacgtcctctcacgcgtgcaggtgttcctgcggcggctgctggagcttcacgttttcaagctggtggccctgtacaccgtctgggtggccctgaaggaggtgtcggtgatgaacctgctgctggtggtgctgtgggccttcgccctgccctacccacgcttccggcccatggcctcctgcctgtccaccgtgtggacctgcgtcatcatcgtgtgtaagatgctgtaccagctcaaggttgtcaacccccaggagtattccagcaactgcaccgagcccttccccaacagcaccaacttgctgcccacggagatcagccagtccctgctgtaccgggggcccgtggaccctgccaactggtttggggtgcggaaagggttccccaacctgggctacatccagaaccacctgcaagtgctgctgctgctggtattcgaggccatcgtgtaccggcgccaggagcactaccgccggcagcaccagctggccccgctgcctgcccaggccgtgtttgccagcggcacccgccagcagctggaccaggatctgctcggctgcctcaagtacttcatcaacttcttcttctacaaattcgggctggagatctgcttcctgatggccgtgaacgtgatcgggcagcgcatgaactttctggtgaccctgcacggttgctggctggtggccatcctcacccgcaggcaccgccaggccattgcccgcctctggcccaactactgcctcttcctggcgctgttcctgctgtaccagtacctgctgtgcctggggatgcccccggccctgtgcattgattatccctggcgctggagccgggccgtccccatgaactccgcactcatcaagtggctgtacctgcctgatttcttccgggcccccaactccaccaacctcatcagcgactttctcctgctgctgtgcgcctcccagcagtggcaggtgttctcagctgagcgcacagaggagtggcagcgcatggctggcgtcaacaccgaccgcctggagccgctgcggggggagcccaaccccgtgcccaactttatccactgcaggtcctaccttgacatgctgaaggtggccgtcttccgatacctgttctggctggtgctggtggtggtgtttgtcacgggggccacccgcatcagcatcttcgggctgggctacctgctggcctgcttctacctgctgctcttcggcacggccctgctgcagagggacacacgggcccgcctcgtgctgtgggactgcctcattctgtacaacgtcaccgtcatcatctccaagaacatgctgtcgctcctggcctgcgtcttcgtggagcagatgcagaccggcttctgctgggtcatccagctcttcagccttgtatgcaccgtcaagggctactatgaccccaaggagatgatggacagagaccaggactgcctgctgcctgtggaggaggctggcatcatctgggacagcgtctgcttcttcttcctgctgctgcagcgccgcgtcttccttagccattactacctgcacgtcagggccgacctccaggccaccgccctgctagcctccaggggcttcgccctctacaacgctgccaacctcaagagcattgacttccaccgcaggatagaggagaagtccctggcccagctgaaaagacagatggagcgtatccgtgccaagcaggagaagcacaggcagggccgggtggaccgcagtcgcccccaggacaccctgggccccaaggaccccggcctggagccagggcccgacagtccagggggctcctccccgccacggaggcagtggtggcggccctggctggaccacgccacagtcatccactccggggactacttcctgtttgagtccgacagtgaggaagaggaggaggctgttcctgaagacccgaggccgtcggcacagagtgccttccagctggcgtaccaggcatgggtgaccaacgcccaggcggtgctgaggcggcggcagcaggagcaggagcaggcaaggcaggaacaggcaggacagctacccacaggaggtggtcccagccaggaggtggagccagcagagggccccgaggaggcagcggcaggccggagccatgtggtgcagagggtgctgagcacggcgcagttcctgtggatgctggggcaggcgctagtggatgagctgacacgctggctgcaggagttcacccggcaccacggcaccatgagcgacgtgctgcgggcagagcgctacctcctcacacaggagctcctgcagggcggcgaagtgcacaggggcgtgctggatcagctgtacacaagccaggccgaggccacgctgccaggccccaccgaggcccccaatgccccaagcaccgtgtccagtgtgggcttgtggctgctggagtgaagccactcaagcagcatgacatgactgaccattggtgcatgcccccctgagtcacctgtgctatcaacgacgctgcatgtggcatgtgaggagggcatgtcacctgaccccctgggggagctgttgagtgctcgggttgcctcttcttgtacgcacggggactcgattgcgggactgtgccatgccgacgcttgtgtccttgtgacatggcgcctcgctgcaattcccacgaagcttggcctggacgtgcgcaggagcttgtttgtgccggatgggcgccgtggccgggcgctgcggctgctgcgggccgtgtaccagtgtgtggccgcccactcggagctgctctgctacttcatcatcatcctcaaccacatggtcacggcctccgccggctcgctggtgctgcccgtgctcgtcttcctgtgggccatgctgtcgatcccgaggcccagcaagcgcttctggatgacggccatcgtcttcaccgagatcgcggtggtcgtcaagtacctgttccagtttgggttcttcccctggaacagccacgtggtgctgcggcgctacgagaacaagccctacttcccgccccgcatcctgggcctggagaagactgacggctacatcaagtacgacctggtgcagctcatggcccttttcttccaccgctcccagctgctgtgctatggcctctgggaccatgaggaggactcaccatccaaggagcatgacaagagcggcgaggaggagcagggagccgaggaggggccaggggtgcctgcggccaccaccgaagaccacattcaggtggaagcgagggtcggacccacggacgggaccccagaaccccaagtggagctcaggccccgtgatacgaggcgcatcagtctacgttttagaagaaggaagaaggagggcccagcacggaaaggagcggcagccatcgaagctgaggacagggaggaagaagagggggaggaagagaaagaggcccccacggggagagagaagaggccaagccgctctggaggaagagtaagggcggccgggcggcggctgcagggcttctgcctgtccctggcccagggcacatatcggccgctacggcgcttcttccacgacatcctgcacaccaagtaccgcgcagccaccgacgtctatgccctcatgttcctggctgatgttgtcgacttcatcatcatcatttttggcttctgggcctttgggaagcactcggcggccacagacatcacgtcctccctatcagacgaccaggtacccgaggctttcctggtcatgctgctgatccagttcagtaccatggtggttgaccgcgccctctacctgcgcaagaccgtgctgggcaagctggccttccaggtggcgctggtgctggccatccacctatggatgttcttcatcctgcccgccgtcactgagaggatgttcaaccagaatgtggtggcccagctctggtacttcgtgaagtgcatctacttcgccctgtccgcctaccagatccgctgcggctaccccacccgcatcctcggcaacttcctcaccaagaagtacaatcatctcaacctcttcctcttccagggatcttcctggtgcgggagactcgggagctggagctggaggaggagttgtacgccaagctcatcttcctctaccgctcaccggagaccatgatcaagtggactcgtgagaaggagtaggagctgctgctggcgcccgagagggaaggagccggcctgctgggcagcgtggccacaaggggcggcactcctcaggccgggggagccactgccccgtccaaggccgccagctgtgatgcatcctcccggcctgcctgagccctgatgctgctgtcagagaaggacactgcgtccccacggcctgcgtggcgctgccgtcccccacgtgtactgtagagttttttttttaattaaaaaatgttttatttatacaaatggacaaaaaaaaaaca

SEQ ID NO: 279995 - DNA, 7641 bp, Homo sapiens
ccatggacctgcgccctgagctgcccaccaccctgggccccgtcagcctgcgccagctggggctggagcacacccgctacccctgtctggaccttggtgccatgttgctctacaccctgaccttctggctcctgctgcgccagtttgtgaaagagaagctgctgaagtgggcagagtctccagctgcgctgacggaggtcaccgtggcagacacagagcctacgcggacgcagacgctgttgcagagcctgggggagctggtgaagggcgtgtacgccaagtactggatctatgtgtgtgctggcatgttcatcgtggtcagcttcgccggccgcctcgtggtctacaagattgtctacatgttcctcttcctgctctgcctcaccctcttccaggtctactacagcctgtggcggaagctgctcaaggccttctggtggctcgtggtggcctacaccatgctggtcctcatcgccgtctacaccttccagttccaggacttccctgcctactggcgcaacctcactggcttcaccgacgagcagctgggggacctgggcctggagcagttcagcgtatccgagctcttctccagcatcctggtgcccggcttcttcctcctggcctgcatcctgcagctgcactacttccacaggcccttcatgcagctcaccgacatggagcacgtgtccctgcctggcacgcgcctcccgcgctgggctcacaggcaggatgcagtgagtgggaccccactgctgcgggaggagcagcaggagcatcagcagcagcagcaggaggaggaggaggaggaggactccagggacgaggggctgggcgtggccactccccaccaggccacgcaggtgcctgaaggggcagccaagtggggcctggtggctgagcgcctgctggagctggcagccggcttctcggacgtcctctcacgcgtgcaggtgttcctgcggcggctgctggagcttcacgttttcaagctggtggccctgtacaccgtctgggtggccctgaaggaggtgtcggtgatgaacctgctgctggtggtgctgtgggccttcgccctgccctacccacgcttccggcccatggcctcctgcctgtccaccgtgtggacctgcgtcatcatcgtgtgtaagatgctgtaccagctcaaggttgtcaacccccaggagtattccagcaactgcaccgagcccttccccaacagcaccaacttgctgcccacggagatcagccagtccctgctgtaccgggggcccgtggaccctgccaactggtttggggtgcggaaagggttccccaacctgggctacatccagaaccacctgcaagtgctgctgctgctggtattcgaggccatcgtgtaccggcgccaggagcactaccgccggcagcaccagctggccccgctgcctgcccaggccgtgtttgccagcggcacccgccagcagctggaccaggatctgctcggctgcctcaagtacttcatcaacttcttcttctacaaattcgggctggagatctgcttcctgatggccgtgaacgtgatcgggcagcgcatgaactttctggtgaccctgcacggttgctggctggtggccatcctcacccgcaggcaccgccaggccattgcccgcctctggcccaactactgcctcttcctggcgctgttcctgctgtaccagtacctgctgtgcctggggatgcccccggccctgtgcattgattatccctggcgctggagccgggccgtccccatgaactccgcactcatcaagtggctgtacctgcctgatttcttccgggcccccaactccaccaacctcatcagcgactttctcctgctgctgtgcgcctcccagcagtggcaggtgttctcagctgagcgcacagaggagtggcagcgcatggctggcgtcaacaccgaccgcctggagccgctgcggggggagcccaaccccgtgcccaactttatccactgcaggtcctaccttgacatgctgaaggtggccgtcttccgatacctgttctggctggtgctggtggtggtgtttgtcacgggggccacccgcatcagcatcttcgggctgggctacctgctggcctgcttctacctgctgctcttcggcacggccctgctgcagagggacacacgggcccgcctcgtgctgtgggactgcctcattctgtacaacgtcaccgtcatcatctccaagaacatgctgtcgctcctggcctgcgtcttcgtggagcagatgcagaccggcttctgctgggtcatccagctcttcagccttgtatgcaccgtcaagggctactatgaccccaaggagatgatggacagagaccaggactgcctgctgcctgtggaggaggctggcatcatctgggacagcgtctgcttcttcttcctgctgctgcagcgccgcgtcttccttagccattactacctgcacgtcagggccgacctccaggccaccgccctgctagcctccaggggcttcgccctctacaacgctgccaacctcaagagcattgacttccaccgcaggatagaggagaagtccctggcccagctgaaaagacagatggagcgtatccgtgccaagcaggagaagcacaggcagggccgggtggaccgcagtcgcccccaggacaccctgggccccaaggaccccggcctggagccagggcccgacagtccagggggctcctccccgccacggaggcagtggtggcggccctggctggaccacgccacagtcatccactccggggactacttcctgtttgagtccgacagtgaggaagaggaggaggctgttcctgaagacccgaggccgtcggcacagagtgccttccagctggcgtaccaggcatgggtgaccaacgcccaggcggtgctgaggcggcggcagcaggagcaggagcaggcaaggcaggaacaggcaggacagctacccacaggaggtggtcccagccaggaggtggagccagcagagggccccgaggaggcagcggcaggccggagccatgtggtgcagagggtgctgagcacggcgcagttcctgtggatgctggggcaggcgctagtggatgagctgacacgctggctgcaggagttcacccggcaccacggcaccatgagcgacgtgctgcgggcagagcgctacctcctcacacaggagctcctgcagggcggcgaagtgcacaggggcgtgctggatcagctgtacacaagccaggccgaggccacgctgccaggccccaccgaggcccccaatgccccaagcaccgtgtccagtgtgggcttgtggctgctggagtgaagccactcaagcagcatgacatgactgaccattggtgcatgcccccctgagtcacctgtgctatcaacgacgctgcatgtggcatgtgaggagggcatgtcacctgaccccctgggggagctgttgagtgctcgggttgcctcttcttgtacgcacggggactcgattgcgggactgtgccatgccgacgcttgtgtccttgtgacatggcgcctcgctgcaattcccacgaagcttggcctggacgtgcgcaggagcttgtttgtgccggatgggcgccgtggccgggcgctgcggctgctgcgggccgtgtaccagtgtgtggccgcccactcggagctgctctgctacttcatcatcatcctcaaccacatggtcacggcctccgccggctcgctggtgctgcccgtgctcgtcttcctgtgggccatgctgtcgatcccgaggcccagcaagcgcttctggatgacggccatcgtcttcaccgagatcgcggtggtcgtcaagtacctgttccagtttgggttcttcccctggaacagccacgtggtgctgcggcgctacgagaacaagccctacttcccgccccgcatcctgggcctggagaagactgacggctacatcaagtacgacctggtgcagctcatggcccttttcttccaccgctcccagctgctgtgctatggcctctgggaccatgaggaggactcaccatccaaggagcatgacaagagcggcgaggaggagcagggagccgaggaggggccaggggtgcctgcggccaccaccgaagaccacattcaggtggaagcgagggtcggacccacggacgggaccccagaaccccaagtggagctcaggccccgtgatacgaggcgcatcagtctacgttttagaagaaggaagaaggagggcccagcacggaaaggagcggcagccatcgaagctgaggacagggaggaagaagagggggaggaagagaaagaggcccccacggggagagagaagaggccaagccgctctggaggaagagtaagggcggccgggcggcggctgcagggcttctgcctgtccctggcccagggcacatatcggccgctacggcgcttcttccacgacatcctgcacaccaagtaccgcgcagccaccgacgtctatgccctcatgttcctggctgatgttgtcgacttcatcatcatcatttttggcttctgggcctttgggaagcactcggcggccacagacatcacgtcctccctatcagacgaccaggtacccgaggctttcctggtcatgctgctgatccagttcagtaccatggtggttgaccgcgccctctacctgcgcaagaccgtgctgggcaagctggccttccaggtggcgctggtgctggccatccacctatggatgttcttcatcctgcccgccgtcactgagaggatgttcaaccagaatgtggtggcccagctctggtacttcgtgaagtgcatctacttcgccctgtccgcctaccagatccgctgcggctaccccacccgcatcctcggcaacttcctcaccaagaagtacaatcatctcaacctcttcctcttccaggggttccggctggtgccgttcctggtggagctgcgggcagtgatggactgggtgtggacggacaccacgctgtccctgtccagctggatgtgtgtggaggacatctatgccaacatcttcatcatcaaatgcagccgagagacagagaaggtgcctgggcccagggcgggggccgggacaagggccagggatatgccctctccctaagacagaggcactgctgccacgagaacccgtggtgctggaggccctcccagggctcggagcccatggggacatgaggcgagcccacccactagctgatcacgaggccagtgatcttggcagctgcgagtgagtgctgggcgcagaagtgggcagcggagttggtcctgttccaggcaggctggcagcagagcagggcctggtgcagggaggaccggacagccactgtttgctgcattcttgtttaatggcctttctcagagagaattcgtgcgtcagaccactcccccacgtaaaaagtacaactcaggggtttctagtggattcacagttgagcatctgccttctcaccacttcaaaaagaaaccccgggccgggcacagcggctcacccctatcatcccagcactgtaagagacccaggagggaggtactgctcaaggccaggagttcaagatctgcacggccacaagcgagaccctgcctcagcaaatgtaaaaataaaacaattagctggcaatggcagctcatgcctatggtcccagcactttgggaggccaaaggaggaggatcagttgaggccaggagttttaagaccagcctgggcaacatagtgagtgagactctctctacaaaaaataaacgttagctgggtgtgatggtgcacacttgtgctcccagctactctggaggctgaggtgggaggatggcttgaggccaggagtacagggctgcattaagcctgatcacaccactgcactccagcttgggcaacagagtgagaccctgtctctaaaaaagcaaaaagaagaaacccagtgcccattggctgtcactcggtttcccctcccctgggccctagtaaccccttgtctaggtcctggttctatgagatttgcctacagtggatatttcatgaaaacaggctcagacagcgtttgtccttttgtaatcagctttcctcgctcagcatggtgtctctgaggtccacccacgtggcagtatggccttcctgtttatgggcaaatgatattctgtggcatggatggaccacaacatgctcatctgttgatgggctgttgcccgtgatgctgccaggcacgccggtgtacacgtctgtgtgcccgtgcccctggtcctgtggctgcacgccagggccggtaagtgctggtggtggtttccatcatgaggagctgctggttttccatagcagctccaccatctaaggttcccaccaccaacacgaggttgcggtttctccacatcctcaacaacctgttactatgtcttttttgttctggccatgctgctgaacgggtagcttgctgtgggctcttctcagttccctgttgaccgacgctgagcgtcttttcatgtgcttggccatttgtgtatcttctctggggaaatgtctattcaaatcctttctccatagtttagttgggcttttgagataggatctcaggctgaagtgcagtggcatgaccttcactcactgtagcctctgcctcccaggttcaagcgattctcccacctcagcctcccgagtagctgggactacaggtgtgcaccaccaggcctggctagtcttttgtatttttggccaggttcgtctcaaactcctgacctcaaagtgctgggatgacaagtgtgagccgccacacccagcagttgggttgttttttattagagttttttctgtttttctgcagatacattggctagaaatgactgaattggaagaattctctgtattctctggttgctagaaccttatcaattaaaatttgcagaaaatttctccaattctatggactgtctcttaaattttcttggtgtctttggaagcacaaagtatttattttggtaatatctggtttactttgtttccttcgccaaatccaggttcatgaagatttgcccgttttcttctaaaagttctatagttttagctctgaagtttcgctctttgatccactttgaggtaaattttggcacatggtatgaggcaggagttgcgtttcattctcctgcctggggcggtgcctgcaccgtgttgaaaaaggttgtccgttcccactgaacggtcacagctcccttgtctaagatcaacgacccctgaacatgagggttccaactggactcttagttctactccactggcctgtgtctgcccaccattactaccgccgtgccatactgaggtcaggctggggcttttctgggctgctgggtgagctggagaatgcggttgtgtgacccgcaggaagggcagagctgagcgtatgacctgtgtcgttcccctccagaaaaatacccgcagcccaaagggcagaagaagaagaagatcgtcaagtacggcatgggtggcctcatcatcctcttcctcatcgccatcatctggttcccgctgctcttcatgtcgctggtgcgctccgtggttggggttgtcaaccagcccatcgaagccagagcagtgaaggagtcagttctctcag

SEQ ID NO: 279996 - DNA, 815 bp, Homo sapiens
gttatcctatcgtcgacccacgcgctccgggcccaagctctggtacttcgtgaagtgcatctacttcgccctgtccgcctaccagatccgctgcggctaccccacccgcatcctcggcaacttcctcaccaagaagtacaatcatctcaacctcttcctcttccaggggttccggctggtgccgttcctggtggagctgcgggcagtgatggactgggtgtggacggacaccacgctgtccctgtccagctggatgtgtgtggaggacatctatgccaacatcttcatcatcaaatgcagccgagagacagagaagaaatacccgcagcccaaagggcagaagaagaagaagatcgtcaagtacggcatgggtggcctcatcatcctcttcctcatcgccatcatctggttcccgctgctcttcatgtcgctggtgcgctccgtggttggggttgtcaaccagcccatcgatgtcaccgtcaccctcaagctgggcggctatgagcggagaccatgatcaagtggactcgtgagaaggagtaggagctgctgctggcgcccgagagggaaggagccggcctgctgggcagcgtggccacaaggggcggcactcctcaggccgggggagccactgccccgtccaaggccgccagctgtgatgcatcctcccggcctgcctgagccctgatgctgctgtcagagaaggacactgcgtccccacggcctgcgtggcgctgccgtcccccacgtgtactgtagagttttttttttaattaaaaaatgttttatttatacaaatggacaaaaaaaaaaca

SEQ ID NO: 279997 - DNA, 768 bp, Homo sapiens
catgagcgcccagcagccgtccatcatccccttcacggcccaggcctatgaggagctgtcccggcagtttgacccccagccggtaagtggcctctgccctgtgaaagctggtgtggggaggcggctgcagtcactgagggtgtcacttgtacccagctggccatgcagttcatcagccagtacagccctgaggacatcgtcacggcgcagattgagggcagctccggggcgctgtggcgcatcagtccccccagccgtgcccagatgaagcgggagctctacaacggcacggccgacatcaccctgcgcttcacctggaacttccagaggttcgtcctggacttggggcagtgcctgggtgggtggacccactacagtgggtcacgctgtgttcccacccccagggacctggcgaagggaggcactgtggagtatgccaacgagaagcacatgctggccctggcccccaacagcactgcacggcggcagctggccagcctgctcgagggcacctcggaccagtctgtgtgagtgaagggcccgggtggtgggcaggagggctgtgccaggttggctgggccaggcctgacctgccagcacctccctgcagggtcatccccaatctcttccccaagtacatccgtgcccccaacgggcccgaagccaaccctgtgaagcagctgcagcccagtgagtatgggcgtgggggttgggggaggctagagaggggtgacctgcggcctcaacgatcttctccctccatcccag

SEQ ID NO: 279998 - DNA, 144 bp, Homo sapiens
cactttccaccctgaccctccctgtagcctggggtcaggccatagagcaggattctctgtgactcggcttccctccccagtgggctgggcgcggaggagccactcagcagcatgacagacgacatgggcagccccctgagcacc

SEQ ID NO: 279999 - DNA, 6382 bp, Homo sapiens
ccatggacctgcgccctgagctgcccaccaccctgggccccgtcagcctgcgccagctggggctggagcacacccgctacccctgtctggaccttggtgccatgttgctctacaccctgaccttctggctcctgctgcgccagtttgtgaaagagaagctgctgaagtgggcagagtctccagctgcgctgacggaggtcaccgtggcagacacagagcctacgcggacgcagacgctgttgcagagcctgggggagctggtgaagggcgtgtacgccaagtactggatctatgtgtgtgctggcatgttcatcgtggtcagcttcgccggccgcctcgtggtctacaagattgtctacatgttcctcttcctgctctgcctcaccctcttccaggtctactacagcctgtggcggaagctgctcaaggccttctggtggctcgtggtggcctacaccatgctggtcctcatcgccgtctacaccttccagttccaggacttccctgcctactggcgcaacctcactggcttcaccgacgagcagctgggggacctgggcctggagcagttcagcgtatccgagctcttctccagcatcctggtgcccggcttcttcctcctggcctgcatcctgcagctgcactacttccacaggcccttcatgcagctcaccgacatggagcacgtgtccctgcctggcacgcgcctcccgcgctgggctcacaggcaggatgcagtgagtgggaccccactgctgcgggaggagcagcaggagcatcagcagcagcagcaggaggaggaggaggaggaggactccagggacgaggggctgggcgtggccactccccaccaggccacgcaggtgcctgaaggggcagccaagtggggcctggtggctgagcgcctgctggagctggcagccggcttctcggacgtcctctcacgcgtgcaggtgttcctgcggcggctgctggagcttcacgttttcaagctggtggccctgtacaccgtctgggtggccctgaaggaggtgtcggtgatgaacctgctgctggtggtgctgtgggccttcgccctgccctacccacgcttccggcccatggcctcctgcctgtccaccgtgtggacctgcgtcatcatcgtgtgtaagatgctgtaccagctcaaggttgtcaacccccaggagtattccagcaactgcaccgagcccttccccaacagcaccaacttgctgcccacggagatcagccagtccctgctgtaccgggggcccgtggaccctgccaactggtttggggtgcggaaagggttccccaacctgggctacatccagaaccacctgcaagtgctgctgctgctggtattcgaggccatcgtgtaccggcgccaggagcactaccgccggcagcaccagctggccccgctgcctgcccaggccgtgtttgccagcggcacccgccagcagctggaccaggatctgctcggctgcctcaagtacttcatcaacttcttcttctacaaattcgggctggagatctgcttcctgatggccgtgaacgtgatcgggcagcgcatgaactttctggtgaccctgcacggttgctggctggtggccatcctcacccgcaggcaccgccaggccattgcccgcctctggcccaactactgcctcttcctggcgctgttcctgctgtaccagtacctgctgtgcctggggatgcccccggccctgtgcattgattatccctggcgctggagccgggccgtccccatgaactccgcactcatcaagtggctgtacctgcctgatttcttccgggcccccaactccaccaacctcatcagcgactttctcctgctgctgtgcgcctcccagcagtggcaggtgttctcagctgagcgcacagaggagtggcagcgcatggctggcgtcaacaccgaccgcctggagccgctgcggggggagcccaaccccgtgcccaactttatccactgcaggtcctaccttgacatgctgaaggtggccgtcttccgatacctgttctggctggtgctggtggtggtgtttgtcacgggggccacccgcatcagcatcttcgggctgggctacctgctggcctgcttctacctgctgctcttcggcacggccctgctgcagagggacacacgggcccgcctcgtgctgtgggactgcctcattctgtacaacgtcaccgtcatcatctccaagaacatgctgtcgctcctggcctgcgtcttcgtggagcagatgcagaccggcttctgctgggtcatccagctcttcagccttgtatgcaccgtcaagggctactatgaccccaaggagatgatggacagagaccaggactgcctgctgcctgtggaggaggctggcatcatctgggacagcgtctgcttcttcttcctgctgctgcagcgccgcgtcttccttagccattactacctgcacgtcagggccgacctccaggccaccgccctgctagcctccaggggcttcgccctctacaacgctgccaacctcaagagcattgacttccaccgcaggatagaggagaagtccctggcccagctgaaaagacagatggagcgtatccgtgccaagcaggagaagcacaggcagggccgggtggaccgcagtcgcccccaggacaccctgggccccaaggaccccggcctggagccagggcccgacagtccagggggctcctccccgccacggaggcagtggtggcggccctggctggaccacgccacagtcatccactccggggactacttcctgtttgagtccgacagtgaggaagaggaggaggctgttcctgaagacccgaggccgtcggcacagagtgccttccagctggcgtaccaggcatgggtgaccaacgcccaggcggtgctgaggcggcggcagcaggagcaggagcaggcaaggcaggaacaggcaggacagctacccacaggaggtggtcccagccaggaggtggagccagcagagggccccgaggaggcagcggcaggccggagccatgtggtgcagagggtgctgagcacggcgcagttcctgtggatgctggggcaggcgctagtggatgagctgacacgctggctgcaggagttcacccggcaccacggcaccatgagcgacgtgctgcgggcagagcgctacctcctcacacaggagctcctgcagggcggcgaagtgcacaggggcgtgctggatcagctgtacacaagccaggccgaggccacgctgccaggccccaccgaggcccccaatgccccaagcaccgtgtccagtgggctgggcgcggaggagccactcagcagcatgacagacgacatgggcagccccctgagcaccggctaccacacgcgcagtggcagtgaggaggcagtcaccgaccccggggagcgtgaggctggtgcctctctgtaccagggactgatgcggacggccagcgagctgctcctggacaggcgcctgcgcatcccagagctggaggaggcagagctgtttgcggaggggcagggccgggcgctgcggctgctgcgggccgtgtaccagtgtgtggccgcccactcggagctgctctgctacttcatcatcatcctcaaccacatggtcacggcctccgccggctcgctggtgctgcccgtgctcgtcttcctgtgggccatgctgtcgatcccgaggcccagcaagcgcttctggatgacggccatcgtcttcaccgagatcgcggtggtcgtcaagtacctgttccagtttgggttcttcccctggaacagccacgtggtgctgcggcgctacgagaacaagccctacttcccgccccgcatcctgggcctggagaagactgacggctacatcaagtacgacctggtgcagctcatggcccttttcttccaccgctcccagctgctgtgctatggcctctgggaccatgaggaggactcaccatccaaggagcatgacaagagcggcgaggaggagcagggagccgaggaggggccaggggtgcctgcggccaccaccgaagaccacattcaggtggaagcgagggtcggacccacggacgggaccccagaaccccaagtggagctcaggccccgtgatacgaggcgcatcagtctacgttttagaagaaggaagaaggagggcccagcacggaaaggagcggcagccatcgaagctgaggacagggaggaagaagagggggaggaagagaaagaggcccccacggggagagagaagaggccaagccgctctggaggaagagtaagggcggccgggcggcggctgcagggcttctgcctgtccctggcccagggcacatatcggccgctacggcgcttcttccacgacatcctgcacaccaagtaccgcgcagccaccgacgtctatgccctcatgttcctggctgatgttgtcgacttcatcatcatcatttttggcttctgggcctttgggaagcactcggcggccacagacatcacgtcctccctatcagacgaccaggtacccgaggctttcctggtcatgctgctgatccagttcagtaccatggtggttgaccgcgccctctacctgcgcaagaccgtgctgggcaagctggccttccaggtggcgctggtgctggccatccacctatggatgttcttcatcctgcccgccgtcactgagaggatgttcaaccagaatgtggtggcccagctctggtacttcgtgaagtgcatctacttcgccctgtccgcctaccagatccgctgcggctaccccacccgcatcctcggcaacttcctcaccaagaagtacaatcatctcaacctcttcctcttccaggggttccggctggtgccgttcctggtggagctgcgggcagtgatggactgggtgtggacggacaccacgctgtccctgtccagctggatgtgtgtggaggacatctatgccaacatcttcatcatcaaatgcagccgagagacagagaagaaatacccgcagcccaaagggcagaagaagaagaagatcgtcaagtacggcatgggtggcctcatcatcctcttcctcatcgccatcatctggttcccgctgctcttcatgtcgctggtgcgctccgtggttggggttgtcaaccagcccatcgatgtcaccgtcaccctcaagctgggcggctatgagccgctgttcaccatgagcgcccagcagccgtccatcatccccttcacggcccaggcctatgaggagctgtcccggcagtttgacccccagccgctggccatgcagttcatcagccagtacagccctgaggacatcgtcacggcgcagattgagggcagctccggggcgctgtggcgcatcagtccccccagccgtgcccagatgaagcgggagctctacaacggcacggccgacatcaccctgcgcttcacctggaacttccagagggacctggcgaagggaggcactgtggagtatgccaacgagaagcacatgctggccctggcccccaacagcactgcacggcggcagctggccagcctgctcgagggcacctcggaccagtctgtggtcatccccaatctcttccccaagtacatccgtgcccccaacgggcccgaagccaaccctgtgaagcagctgcagcccaatgaggaggccgactacctcggcgtgcgtatccagctgcggagggagcagggtgcgggggccaccggcttcctcgaatggtgggtcatcgagctgcaggagtgccggaccgactgcaacctgctgcccatggtcattttcagtgacaaggtcagcccaccgagcctcggcttcctggctggctacggcatcatggggctgtacgtgtccatcgtgctggtcatcggcaagttcgtgcgcggattcttcagcgagatctcgcactccattatgttcgaggagctgccgtgcgtggaccgcatcctcaagctctgccaggacatcttcctggtgcgggagactcgggagctggagctggaggaggagttgtacgccaagctcatcttcctctaccgctcaccggagaccatgatcaagtggactcgtgagaaggagtaggagctgctgctggcgcccgagagggaaggagccggcctgctgggcagcgtggccacaaggggcggcactcctcaggccgggggagccactgccccgtccaaggccgccagctgtgatgcatcctcccggcctgcctgagccctgatgctgctgtcagagaaggacactgcgtccccacggcctgcgtggcgctgccgtcccccacgtgtactgtagagttttttttttaattaaaaaatgttttatttatacaaatggacaaaaaaaaaaca

SEQ ID NO: 280000 - DNA, 6457 bp, Homo sapiens
ccatggacctgcgccctgagctgcccaccaccctgggccccgtcagcctgcgccagctggggctggagcacacccgctacccctgtctggaccttggtgccatgttgctctacaccctgaccttctggctcctgctgcgccagtttgtgaaagagaagctgctgaagtgggcagagtctccagctgcgctgacggaggtcaccgtggcagacacagagcctacgcggacgcagacgctgttgcagagcctgggggagctggtgaagggcgtgtacgccaagtactggatctatgtgtgtgctggcatgttcatcgtggtcagcttcgccggccgcctcgtggtctacaagattgtctacatgttcctcttcctgctctgcctcaccctcttccaggtctactacagcctgtggcggaagctgctcaaggccttctggtggctcgtggtggcctacaccatgctggtcctcatcgccgtctacaccttccagttccaggacttccctgcctactggcgcaacctcactggcttcaccgacgagcagctgggggacctgggcctggagcagttcagcgtatccgagctcttctccagcatcctggtgcccggcttcttcctcctggcctgcatcctgcagctgcactacttccacaggcccttcatgcagctcaccgacatggagcacgtgtccctgcctggcacgcgcctcccgcgctgggctcacaggcaggatgcagtgagtgggaccccactgctgcgggaggagcagcaggagcatcagcagcagcagcaggaggaggaggaggaggaggactccagggacgaggggctgggcgtggccactccccaccaggccacgcaggtgcctgaaggggcagccaagtggggcctggtggctgagcgcctgctggagctggcagccggcttctcggacgtcctctcacgcgtgcaggtgttcctgcggcggctgctggagcttcacgttttcaagctggtggccctgtacaccgtctgggtggccctgaaggaggtgtcggtgatgaacctgctgctggtggtgctgtgggccttcgccctgccctacccacgcttccggcccatggcctcctgcctgtccaccgtgtggacctgcgtcatcatcgtgtgtaagatgctgtaccagctcaaggttgtcaacccccaggagtattccagcaactgcaccgagcccttccccaacagcaccaacttgctgcccacggagatcagccagtccctgctgtaccgggggcccgtggaccctgccaactggtttggggtgcggaaagggttccccaacctgggctacatccagaaccacctgcaagtgctgctgctgctggtattcgaggccatcgtgtaccggcgccaggagcactaccgccggcagcaccagctggccccgctgcctgcccaggccgtgtttgccagcggcacccgccagcagctggaccaggatctgctcggctgcctcaagtacttcatcaacttcttcttctacaaattcgggctggagatctgcttcctgatggccgtgaacgtgatcgggcagcgcatgaactttctggtgaccctgcacggttgctggctggtggccatcctcacccgcaggcaccgccaggccattgcccgcctctggcccaactactgcctcttcctggcgctgttcctgctgtaccagtacctgctgtgcctggggatgcccccggccctgtgcattgattatccctggcgctggagccgggccgtccccatgaactccgcactcatcaagtggctgtacctgcctgatttcttccgggcccccaactccaccaacctcatcagcgactttctcctgctgctgtgcgcctcccagcagtggcaggtgttctcagctgagcgcacagaggagtggcagcgcatggctggcgtcaacaccgaccgcctggagccgctgcggggggagcccaaccccgtgcccaactttatccactgcaggtcctaccttgacatgctgaaggtggccgtcttccgatacctgttctggctggtgctggtggtggtgtttgtcacgggggccacccgcatcagcatcttcgggctgggctacctgctggcctgcttctacctgctgctcttcggcacggccctgctgcagagggacacacgggcccgcctcgtgctgtgggactgcctcattctgtacaacgtcaccgtcatcatctccaagaacatgctgtcgctcctggcctgcgtcttcgtggagcagatgcagaccggcttctgctgggtcatccagctcttcagccttgtatgcaccgtcaagggctactatgaccccaaggagatgatggacagagaccaggactgcctgctgcctgtggaggaggctggcatcatctgggacagcgtctgcttcttcttcctgctgctgcagcgccgcgtcttccttagccattactacctgcacgtcagggccgacctccaggccaccgccctgctagcctccaggggcttcgccctctacaacgctgccaacctcaagagcattgacttccaccgcaggatagaggagaagtccctggcccagctgaaaagacagatggagcgtatccgtgccaagcaggagaagcacaggcagggccgggtggaccgcagtcgcccccaggacaccctgggccccaaggaccccggcctggagccagggcccgacagtccagggggctcctccccgccacggaggcagtggtggcggccctggctggaccacgccacagtcatccactccggggactacttcctgtttgagtccgacagtgaggaagaggaggaggctgttcctgaagacccgaggccgtcggcacagagtgccttccagctggcgtaccaggcatgggtgaccaacgcccaggcggtgctgaggcggcggcagcaggagcaggagcaggcaaggcaggaacaggcaggacagctacccacaggaggtggtcccagccaggaggtggagccagcagagggccccgaggaggcagcggcaggccggagccatgtggtgcagagggtgctgagcacggcgcagttcctgtggatgctggggcaggcgctagtggatgagctgacacgctggctgcaggagttcacccggcaccacggcaccatgagcgacgtgctgcgggcagagcgctacctcctcacacaggagctcctgcagggcggcgaagtgcacaggggcgtgctggatcagctgtacacaagccaggccgaggccacgctgccaggccccaccgaggcccccaatgccccaagcaccgtgtccagtgtgggcttgtggctgctggagtgaagccactcaagcagcatgacatgactgaccattggtgcatgcccccctgagtcacctgtgctatcaacgacgctgcatgtggcatgtgaggagggcatgtcacctgaccccctgggggagctgttgagtgctcgggttgcctcttcttgtacgcacggggactcgattgcgggactgtgccatgccgacgcttgtgtccttgtgacatggcgcctcgctgcaattcccacgaagcttggcctggacgtgcgcaggagcttgtttgtgccggatgggcgccgtggccgggcgctgcggctgctgcgggccgtgtaccagtgtgtggccgcccactcggagctgctctgctacttcatcatcatcctcaaccacatggtcacggcctccgccggctcgctggtgctgcccgtgctcgtcttcctgtgggccatgctgtcgatcccgaggcccagcaagcgcttctggatgacggccatcgtcttcaccgagatcgcggtggtcgtcaagtacctgttccagtttgggttcttcccctggaacagccacgtggtgctgcggcgctacgagaacaagccctacttcccgccccgcatcctgggcctggagaagactgacggctacatcaagtacgacctggtgcagctcatggcccttttcttccaccgctcccagctgctgtgctatggcctctgggaccatgaggaggactcaccatccaaggagcatgacaagagcggcgaggaggagcagggagccgaggaggggccaggggtgcctgcggccaccaccgaagaccacattcaggtggaagcgagggtcggacccacggacgggaccccagaaccccaagtggagctcaggccccgtgatacgaggcgcatcagtctacgttttagaagaaggaagaaggagggcccagcacggaaaggagcggcagccatcgaagctgaggacagggaggaagaagagggggaggaagagaaagaggcccccacggggagagagaagaggccaagccgctctggaggaagagtaagggcggccgggcggcggctgcagggcttctgcctgtccctggcccagggcacatatcggccgctacggcgcttcttccacgacatcctgcacaccaagtaccgcgcagccaccgacgtctatgccctcatgttcctggctgatgttgtcgacttcatcatcatcatttttggcttctgggcctttgggaagcactcggcggccacagacatcacgtcctccctatcagacgaccaggtacccgaggctttcctggtcatgctgctgatccagttcagtaccatggtggttgaccgcgccctctacctgcgcaagaccgtgctgggcaagctggccttccaggtggcgctggtgctggccatccacctatggatgttcttcatcctgcccgccgtcactgagaggatgttcaaccagaatgtggtggcccagctctggtacttcgtgaagtgcatctacttcgccctgtccgcctaccagatccgctgcggctaccccacccgcatcctcggcaacttcctcaccaagaagtacaatcatctcaacctcttcctcttccaggggttccggctggtgccgttcctggtggagctgcgggcagtgatggactgggtgtggacggacaccacgctgtccctgtccagctggatgtgtgtggaggacatctatgccaacatcttcatcatcaaatgcagccgagagacagagaagaaatacccgcagcccaaagggcagaagaagaagaagatcgtcaagtacggcatgggtggcctcatcatcctcttcctcatcgccatcatctggttcccgctgctcttcatgtcgctggtgcgctccgtggttggggttgtcaaccagcccatcgatgtcaccgtcaccctcaagctgggcggctatgagccgctgttcaccatgagcgcccagcagccgtccatcatccccttcacggcccaggcctatgaggagctgtcccggcagtttgacccccagccgctggccatgcagttcatcagccagtacagccctgaggacatcgtcacggcgcagattgagggcagctccggggcgctgtggcgcatcagtccccccagccgtgcccagatgaagcgggagctctacaacggcacggccgacatcaccctgcgcttcacctggaacttccagagggacctggcgaagggaggcactgtggagtatgccaacgagaagcacatgctggccctggcccccaacagcactgcacggcggcagctggccagcctgctcgagggcacctcggaccagtctgtggtcatccccaatctcttccccaagtacatccgtgcccccaacgggcccgaagccaaccctgtgaagcagctgcagcccaatgaggaggccgactacctcggcgtgcgtatccagctgcggagggagcagggtgcgggggccaccggcttcctcgaatggtgggtcatcgagctgcaggagtgccggaccgactgcaacctgctgcccatggtcattttcagtgacaaggtcagcccaccgagcctcggcttcctggctggctacggcatcatggggctgtacgtgtccatcgtgctggtcatcggcaagttcgtgcgcggattcttcagcgagatctcgcactccattatgttcgaggagctgccgtgcgtggaccgcatcctcaagctctgccaggacatcttcctggtgcgggagactcgggagctggagctggaggaggagttgtacgccaagctcatcttcctctaccgctcaccggagaccatgatcaagtggactcgtgagaaggagtaggagctgctgctggcgcccgagagggaaggagccggcctgctgggcagcgtggccacaaggggcggcactcctcaggccgggggagccactgccccgtccaaggccgccagctgtgatgcatcctcccggcctgcctgagccctgatgctgctgtcagagaaggacactgcgtccccacggcctgcgtggcgctgccgtcccccacgtgtactgtagagttttttttttaattaaaaaatgttttatttatacaaatggacaaaaaaaaaaca

SEQ ID NO: 280001 - DNA, 4256 bp, Homo sapiens
cacgagctcccccctgtaccgtcgctcttgcccgtgtactcgctcctggcctgcgtcttcgtggagcagatgcagaccggcttctgctgggtcatccagctcttcagccttgtatgcaccgtcaagggctactatgaccccaaggagatgatggacagagaccaggactgcctgctgcctgtggaggaggctggcatcatctgggacagcgtctgcttcttcttcctgctgctgcagcgccgcgtcttccttagccattactacctgcacgtcagggccgacctccaggccaccgccctgctagcctccaggggcttcgccctctacaacgctgccaacctcaagagcattgacttccaccgcaggatagaggagaagtccctggcccagctgaaaagacagatggagcgtatccgtgccaagcaggagaagcacaggcagggccgggtggaccgcagtcgcccccaggacaccctgggccccaaggaccccggcctggagccagggcccgacagtccagggggctcctccccgccacggaggcagtggtggcggccctggctggaccacgccacagtcatccactccggggactacttcctgtttgagtccgacagtgaggaagaggaggaggctgttcctgaagacccgaggccgtcggcacagagtgccttccagctggcgtaccaggcatgggtgaccaacgcccaggcggtgctgaggcggcggcagcaggagcaggagcaggcaaggcaggaacaggcaggacagctacccacaggaggtggtcccagccaggaggtggagccagcagagggccccgaggaggcagcggcaggccggagccatgtggtgcagagggtgctgagcacggcgcagttcctgtggatgctggggcaggcgctagtggatgagctgacacgctggctgcaggagttcacccggcaccacggcaccatgagcgacgtgctgcgggcagagcgctacctcctcacacaggagctcctgcagggcggcgaagtgcacaggggcgtgctggatcagctgtacacaagccaggccgaggccacgctgccaggccccaccgaggcccccaatgccccaagcaccgtgtccagtgtgggcttgtggctgctggagtgaagccactcaagcagcatgacatgactgaccattggtgcatgcccccctgagtcacctgtgctatcaacgacgctgcatgtggcatgtgaggagggcatgtcacctgaccccctgggggagctgttgagtgctcgggttgcctcttcttgtacgcacggggactcgattgcgggactgtgccatgccgacgcttgtgtccttgtgacatggcgcctcgctgcaattcccacgaagcttggcctggacgtgcgcaggagcttgtttgtgccggatgggcgccgtggccgggcgctgcggctgctgcgggccgtgtaccagtgtgtggccgcccactcggagctgctctgctacttcatcatcatcctcaaccacatggtcacggcctccgccggctcgctggtgctgcccgtgctcgtcttcctgtgggccatgctgtcgatcccgaggcccagcaagcgcttctggatgacggccatcgtcttcaccgagatcgcggtggtcgtcaagtacctgttccagtttgggttcttcccctggaacagccacgtggtgctgcggcgctacgagaacaagccctacttcccgccccgcatcctgggcctggagaagactgacggctacatcaagtacgacctggtgcagctcatggcccttttcttccaccgctcccagctgctgtgctatggcctctgggaccatgaggaggactcaccatccaaggagcatgacaagagcggcgaggaggagcagggagccgaggaggggccaggggtgcctgcggccaccaccgaagaccacattcaggtggaagcgagggtcggacccacggacgggaccccagaaccccaagtggagctcaggccccgtgatacgaggcgcatcagtctacgttttagaagaaggaagaaggagggcccagcacggaaaggagcggcagccatcgaagctgaggacagggaggaagaagagggggaggaagagaaagaggcccccacggggagagagaagaggccaagccgctctggaggaagagtaagggcggccgggcggcggctgcagggcttctgcctgtccctggcccagggcacatatcggccgctacggcgcttcttccacgacatcctgcacaccaagtaccgcgcagccaccgacgtctatgccctcatgttcctggctgatgttgtcgacttcatcatcatcatttttggcttctgggcctttgggaagcactcggcggccacagacatcacgtcctccctatcagacgaccaggtacccgaggctttcctggtcatgctgctgatccagttcagtaccatggtggttgaccgcgccctctacctgcgcaagaccgtgctgggcaagctggccttccaggtggcgctggtgctggccatccacctatggatgttcttcatcctgcccgccgtcactgagaggatgttcaaccagaatgtggtggcccagctctggtacttcgtgaagtgcatctacttcgccctgtccgcctaccagatccgctgcggctaccccacccgcatcctcggcaacttcctcaccaagaagtacaatcatctcaacctcttcctcttccaggggttccggctggtgccgttcctggtggagctgcgggcagtgatggactgggtgtggacggacaccacgctgtccctgtccagctggatgtgtgtggaggacatctatgccaacatcttcatcatcaaatgcagccgagagacagagaagaaatacccgcagcccaaagggcagaagaagaagaagatcgtcaagtacggcatgggtggcctcatcatcctcttcctcatcgccatcatctggttcccgctgctcttcatgtcgctggtgcgctccgtggttggggttgtcaaccagcccatcgatgtcaccgtcaccctcaagctgggcggctatgagccgctgttcaccatgagcgcccagcagccgtccatcatccccttcacggcccaggcctatgaggagctgtcccggcagtttgacccccagccgctggccatgcagttcatcagccagtacagccctgaggacatcgtcacggcgcagattgagggcagctccggggcgctgtggcgcatcagtccccccagccgtgcccagatgaagcgggagctctacaacggcacggccgacatcaccctgcgcttcacctggaacttccagagggacctggcgaagggaggcactgtggagtatgccaacgagaagcacatgctggccctggcccccaacagcactgcacggcggcagctggccagcctgctcgagggcacctcggaccagtctgtggtcatccccaatctcttccccaagtacatccgtgcccccaacgggcccgaagccaaccctgtgaagcagctgcagcccaatgaggaggccgactacctcggcgtgcgtatccagctgcggagggagcagggtgcgggggccaccggcttcctcgaatggtgggtcatcgagctgcaggagtgccggaccgactgcaacctgctgcccatggtcattttcagtgacaaggtcagcccaccgagcctcggcttcctggctggctacggcatcatggggctgtacgtgtccatcgtgctggtcatcggcaagttcgtgcgcggattcttcagcgagatctcgcactccattatgttcgaggagctgccgtgcgtggaccgcatcctcaagctctgccaggacatcttcctggtgcgggagactcgggagctggagctggaggaggagttgtacgccaagctcatcttcctctaccgctcaccggagaccatgatcaagtggactcgtgagaaggagtaggagctgctgctggcgcccgagagggaaggagccggcctgctgggcagcgtggccacaaggggcggcactcctcaggccgggggagccactgccccgtccaaggccgccagctgtgatgcatcctcccggcctgcctgagccctgatgctgctgtcagagaaggacactgcgtccccacggcctgcgtggcgctgccgtcccccacgtgtactgtagagttttttttttaattaaaaaatgttttatttatacaaatggacaaaaaaaaaaca

SEQ ID NO: 280002 - DNA, 6558 bp, Homo sapiens
ccatggacctgcgccctgagctgcccaccaccctgggccccgtcagcctgcgccagctggggctggagcacacccgctacccctgtctggaccttggtgccatgttgctctacaccctgaccttctggctcctgctgcgccagtttgtgaaagagaagctgctgaagtgggcagagtctccagctgcgctgacggaggtcaccgtggcagacacagagcctacgcggacgcagacgctgttgcagagcctgggggagctggtgaagggcgtgtacgccaagtactggatctatgtgtgtgctggcatgttcatcgtggtcagcttcgccggccgcctcgtggtctacaagattgtctacatgttcctcttcctgctctgcctcaccctcttccaggtctactacagcctgtggcggaagctgctcaaggccttctggtggctcgtggtggcctacaccatgctggtcctcatcgccgtctacaccttccagttccaggacttccctgcctactggcgcaacctcactggcttcaccgacgagcagctgggggacctgggcctggagcagttcagcgtatccgagctcttctccagcatcctggtgcccggcttcttcctcctggcctgcatcctgcagctgcactacttccacaggcccttcatgcagctcaccgacatggagcacgtgtccctgcctggcacgcgcctcccgcgctgggctcacaggcaggatgcagtgagtgggaccccactgctgcgggaggagcagcaggagcatcagcagcagcagcaggaggaggaggaggaggaggactccagggacgaggggctgggcgtggccactccccaccaggccacgcaggtgcctgaaggggcagccaagtggggcctggtggctgagcgcctgctggagctggcagccggcttctcggacgtcctctcacgcgtgcaggtgttcctgcggcggctgctggagcttcacgttttcaagctggtggccctgtacaccgtctgggtggccctgaaggaggtgtcggtgatgaacctgctgctggtggtgctgtgggccttcgccctgccctacccacgcttccggcccatggcctcctgcctgtccaccgtgtggacctgcgtcatcatcgtgtgtaagatgctgtaccagctcaaggttgtcaacccccaggagtattccagcaactgcaccgagcccttccccaacagcaccaacttgctgcccacggagatcagccagtccctgctgtaccgggggcccgtggaccctgccaactggtttggggtgcggaaagggttccccaacctgggctacatccagaaccacctgcaagtgctgctgctgctggtattcgaggccatcgtgtaccggcgccaggagcactaccgccggcagcaccagctggccccgctgcctgcccaggccgtgtttgccagcggcacccgccagcagctggaccaggatctgctcggctgcctcaagtacttcatcaacttcttcttctacaaattcgggctggagatctgcttcctgatggccgtgaacgtgatcgggcagcgcatgaactttctggtgaccctgcacggttgctggctggtggccatcctcacccgcaggcaccgccaggccattgcccgcctctggcccaactactgcctcttcctggcgctgttcctgctgtaccagtacctgctgtgcctggggatgcccccggccctgtgcattgattatccctggcgctggagccgggccgtccccatgaactccgcactcatcaagtggctgtacctgcctgatttcttccgggcccccaactccaccaacctcatcagcgactttctcctgctgctgtgcgcctcccagcagtggcaggtgttctcagctgagcgcacagaggagtggcagcgcatggctggcgtcaacaccgaccgcctggagccgctgcggggggagcccaaccccgtgcccaactttatccactgcaggtcctaccttgacatgctgaaggtggccgtcttccgatacctgttctggctggtgctggtggtggtgtttgtcacgggggccacccgcatcagcatcttcgggctgggctacctgctggcctgcttctacctgctgctcttcggcacggccctgctgcagagggacacacgggcccgcctcgtgctgtgggactgcctcattctgtacaacgtcaccgtcatcatctccaagaacatgctgtcgctcctggcctgcgtcttcgtggagcagatgcagaccggcttctgctgggtcatccagctcttcagccttgtatgcaccgtcaagggctactatgaccccaaggagatgatggacagagaccaggactgcctgctgcctgtggaggaggctggcatcatctgggacagcgtctgcttcttcttcctgctgctgcagcgccgcgtcttccttagccattactacctgcacgtcagggccgacctccaggccaccgccctgctagcctccaggggcttcgccctctacaacgctgccaacctcaagagcattgacttccaccgcaggatagaggagaagtccctggcccagctgaaaagacagatggagcgtatccgtgccaagcaggagaagcacaggcagggccgggtggaccgcagtcgcccccaggacaccctgggccccaaggaccccggcctggagccagggcccgacagtccagggggctcctccccgccacggaggcagtggtggcggccctggctggaccacgccacagtcatccactccggggactacttcctgtttgagtccgacagtgaggaagaggaggaggctgttcctgaagacccgaggccgtcggcacagagtgccttccagctggcgtaccaggcatgggtgaccaacgcccaggcggtgctgaggcggcggcagcaggagcaggagcaggcaaggcaggaacaggcaggacagctacccacaggaggtggtcccagccaggaggtggagccagcagagggccccgaggaggcagcggcaggccggagccatgtggtgcagagggtgctgagcacggcgcagttcctgtggatgctggggcaggcgctagtggatgagctgacacgctggctgcaggagttcacccggcaccacggcaccatgagcgacgtgctgcgggcagagcgctacctcctcacacaggagctcctgcagggcggcgaagtgcacaggggcgtgctggatcagctgtacacaagccaggccgaggccacgctgccaggccccaccgaggcccccaatgccccaagcaccgtgtccagtgtgggcttgtggctgctggagtgaagccactcaagcagcatgacatgactgaccattggtgcatgcccccctgagtcacctgtgctatcaacgacgctgcatgtggcatgtgaggagggcatgtcacctgaccccctgggggagctgttgagtgctcgggttgcctcttcttgtacgcacggggactcgattgcgggactgtgccatgccgacgcttgtgtccttgtgacatggcgcctcgctgcaattcccacgaagcttggcctggacgtgcgcaggagcttgtttgtgccggatgggcgccgtggccgggcgctgcggctgctgcgggccgtgtaccagtgtgtggccgcccactcggagctgctctgctacttcatcatcatcctcaaccacatggtcacggcctccgccggctcgctggtgctgcccgtgctcgtcttcctgtgggccatgctgtcgatcccgaggcccagcaagcgcttctggatgacggccatcgtcttcaccgagatcgcggtggtcgtcaagtacctgttccagtttgggttcttcccctggaacagccacgtggtgctgcggcgctacgagaacaagccctacttcccgccccgcatcctgggcctggagaagactgacggctacatcaagtacgacctggtgcagctcatggcccttttcttccaccgctcccagctgctgtgctatggcctctgggaccatgaggaggactcaccatccaaggagcatgacaagagcggcgaggaggagcagggagccgaggaggggccaggggtgcctgcggccaccaccgaagaccacattcaggtggaagcgagggtcggacccacggacgggaccccagaaccccaagtggagctcaggccccgtgatacgaggcgcatcagtctacgttttagaagaaggaagaaggagggcccagcacggaaaggagcggcagccatcgaagctgaggacagggaggaagaagagggggaggaagagaaagaggcccccacggggagagagaagaggccaagccgctctggaggaagagtaagggcggccgggcggcggctgcagggcttctgcctgtccctggcccagggcacatatcggccgctacggcgcttcttccacgacatcctgcacaccaagtaccgcgcagccaccgacgtctatgccctcatgttcctggctgatgttgtcgacttcatcatcatcatttttggcttctgggcctttggggtgagccaggcccgggacccaaacccagtgtacgcagagctcagcagccacccacatcccctgggcttggctccccctgacctgtgctctcctggccacagaagcactcggcggccacagacatcacgtcctccctatcagacgaccaggtacccgaggctttcctggtcatgctgctgatccagttcagtaccatggtggttgaccgcgccctctacctgcgcaagaccgtgctgggcaagctggccttccaggtggcgctggtgctggccatccacctatggatgttcttcatcctgcccgccgtcactgagaggatgttcaaccagaatgtggtggcccagctctggtacttcgtgaagtgcatctacttcgccctgtccgcctaccagatccgctgcggctaccccacccgcatcctcggcaacttcctcaccaagaagtacaatcatctcaacctcttcctcttccaggggttccggctggtgccgttcctggtggagctgcgggcagtgatggactgggtgtggacggacaccacgctgtccctgtccagctggatgtgtgtggaggacatctatgccaacatcttcatcatcaaatgcagccgagagacagagaagaaatacccgcagcccaaagggcagaagaagaagaagatcgtcaagtacggcatgggtggcctcatcatcctcttcctcatcgccatcatctggttcccgctgctcttcatgtcgctggtgcgctccgtggttggggttgtcaaccagcccatcgatgtcaccgtcaccctcaagctgggcggctatgagccgctgttcaccatgagcgcccagcagccgtccatcatccccttcacggcccaggcctatgaggagctgtcccggcagtttgacccccagccgctggccatgcagttcatcagccagtacagccctgaggacatcgtcacggcgcagattgagggcagctccggggcgctgtggcgcatcagtccccccagccgtgcccagatgaagcgggagctctacaacggcacggccgacatcaccctgcgcttcacctggaacttccagagggacctggcgaagggaggcactgtggagtatgccaacgagaagcacatgctggccctggcccccaacagcactgcacggcggcagctggccagcctgctcgagggcacctcggaccagtctgtggtcatccccaatctcttccccaagtacatccgtgcccccaacgggcccgaagccaaccctgtgaagcagctgcagcccaatgaggaggccgactacctcggcgtgcgtatccagctgcggagggagcagggtgcgggggccaccggcttcctcgaatggtgggtcatcgagctgcaggagtgccggaccgactgcaacctgctgcccatggtcattttcagtgacaaggtcagcccaccgagcctcggcttcctggctggctacggcatcatggggctgtacgtgtccatcgtgctggtcatcggcaagttcgtgcgcggattcttcagcgagatctcgcactccattatgttcgaggagctgccgtgcgtggaccgcatcctcaagctctgccaggacatcttcctggtgcgggagactcgggagctggagctggaggaggagttgtacgccaagctcatcttcctctaccgctcaccggagaccatgatcaagtggactcgtgagaaggagtaggagctgctgctggcgcccgagagggaaggagccggcctgctgggcagcgtggccacaaggggcggcactcctcaggccgggggagccactgccccgtccaaggccgccagctgtgatgcatcctcccggcctgcctgagccctgatgctgctgtcagagaaggacactgcgtccccacggcctgcgtggcgctgccgtcccccacgtgtactgtagagttttttttttaattaaaaaatgttttatttatacaaatggacaaaaaaaaaaca

SEQ ID NO: 280003 - DNA, 8904 bp, Homo sapiens
ccatggacctgcgccctgagctgcccaccaccctgggccccgtcagcctgcgccagctggggctggagcacacccgctacccctgtctggaccttggtgccatgttgctctacaccctgaccttctggctcctgctgcgccagtttgtgaaagagaagctgctgaagtgggcagagtctccagctgcgctgacggaggtcaccgtggcagacacagagcctacgcggacgcagacgctgttgcagagcctgggggagctggtgaagggcgtgtacgccaagtactggatctatgtgtgtgctggcatgttcatcgtggtcagcttcgccggccgcctcgtggtctacaagattgtctacatgttcctcttcctgctctgcctcaccctcttccaggtctactacagcctgtggcggaagctgctcaaggccttctggtggctcgtggtggcctacaccatgctggtcctcatcgccgtctacaccttccagttccaggacttccctgcctactggcgcaacctcactggcttcaccgacgagcagctgggggacctgggcctggagcagttcagcgtatccgagctcttctccagcatcctggtgcccggcttcttcctcctggcctgcatcctgcagctgcactacttccacaggcccttcatgcagctcaccgacatggagcacgtgtccctgcctggcacgcgcctcccgcgctgggctcacaggcaggatgcagtgagtgggaccccactgctgcgggaggagcagcaggagcatcagcagcagcagcaggaggaggaggaggaggaggactccagggacgaggggctgggcgtggccactccccaccaggccacgcaggtgcctgaaggggcagccaagtggggcctggtggctgagcgcctgctggagctggcagccggcttctcggacgtcctctcacgcgtgcaggtgttcctgcggcggctgctggagcttcacgttttcaagctggtggccctgtacaccgtctgggtggccctgaaggaggtgtcggtgatgaacctgctgctggtggtgctgtgggccttcgccctgccctacccacgcttccggcccatggcctcctgcctgtccaccgtgtggacctgcgtcatcatcgtgtgtaagatgctgtaccagctcaaggttgtcaacccccaggagtattccagcaactgcaccgagcccttccccaacagcaccaacttgctgcccacggagatcagccagtccctgctgtaccgggggcccgtggaccctgccaactggtttggggtgcggaaagggttccccaacctgggctacatccagaaccacctgcaagtgctgctgctgctggtattcgaggccatcgtgtaccggcgccaggagcactaccgccggcagcaccagctggccccgctgcctgcccaggccgtgtttgccagcggcacccgccagcagctggaccaggatctgctcggctgcctcaagtacttcatcaacttcttcttctacaaattcgggctggagatctgcttcctgatggccgtgaacgtgatcgggcagcgcatgaactttctggtgaccctgcacggttgctggctggtggccatcctcacccgcaggcaccgccaggccattgcccgcctctggcccaactactgcctcttcctggcgctgttcctgctgtaccagtacctgctgtgcctggggatgcccccggccctgtgcattgattatccctggcgctggagccgggccgtccccatgaactccgcactcatcaagtggctgtacctgcctgatttcttccgggcccccaactccaccaacctcatcagcgactttctcctgctgctgtgcgcctcccagcagtggcaggtgttctcagctgagcgcacagaggagtggcagcgcatggctggcgtcaacaccgaccgcctggagccgctgcggggggagcccaaccccgtgcccaactttatccactgcaggtcctaccttgacatgctgaaggtggccgtcttccgatacctgttctggctggtgctggtggtggtgtttgtcacgggggccacccgcatcagcatcttcgggctgggctacctgctggcctgcttctacctgctgctcttcggcacggccctgctgcagagggacacacgggcccgcctcgtgctgtgggactgcctcattctgtacaacgtcaccgtcatcatctccaagaacatgctgtcgctcctggcctgcgtcttcgtggagcagatgcagaccggcttctgctgggtcatccagctcttcagccttgtatgcaccgtcaagggctactatgaccccaaggagatgatggacagagaccaggactgcctgctgcctgtggaggaggctggcatcatctgggacagcgtctgcttcttcttcctgctgctgcagcgccgcgtcttccttagccattactacctgcacgtcagggccgacctccaggccaccgccctgctagcctccaggggcttcgccctctacaacgctgccaacctcaagagcattgacttccaccgcaggatagaggagaagtccctggcccagctgaaaagacagatggagcgtatccgtgccaagcaggagaagcacaggcagggccgggtggaccgcagtcgcccccaggacaccctgggccccaaggaccccggcctggagccagggcccgacagtccagggggctcctccccgccacggaggcagtggtggcggccctggctggaccacgccacagtcatccactccggggactacttcctgtttgagtccgacagtgaggaagaggaggaggctgttcctgaagacccgaggccgtcggcacagagtgccttccagctggcgtaccaggcatgggtgaccaacgcccaggcggtgctgaggcggcggcagcaggagcaggagcaggcaaggcaggaacaggcaggacagctacccacaggaggtggtcccagccaggaggtggagccagcagagggccccgaggaggcagcggcaggccggagccatgtggtgcagagggtgctgagcacggcgcagttcctgtggatgctggggcaggcgctagtggatgagctgacacgctggctgcaggagttcacccggcaccacggcaccatgagcgacgtgctgcgggcagagcgctacctcctcacacaggagctcctgcagggcggcgaagtgcacaggggcgtgctggatcagctgtacacaagccaggccgaggccacgctgccaggccccaccgaggcccccaatgccccaagcaccgtgtccagtgtgggcttgtggctgctggagtgaagccactcaagcagcatgacatgactgaccattggtgcatgcccccctgagtcacctgtgctatcaacgacgctgcatgtggcatgtgaggagggcatgtcacctgaccccctgggggagctgttgagtgctcgggttgcctcttcttgtacgcacggggactcgattgcgggactgtgccatgccgacgcttgtgtccttgtgacatggcgcctcgctgcaattcccacgaagcttggcctggacgtgcgcaggagcttgtttgtgccggatgggcgccgtggccgggcgctgcggctgctgcgggccgtgtaccagtgtgtggccgcccactcggagctgctctgctacttcatcatcatcctcaaccacatggtcacggcctccgccggctcgctggtgctgcccgtgctcgtcttcctgtgggccatgctgtcgatcccgaggcccagcaagcgcttctggatgacggccatcgtcttcaccgagatcgcggtggtcgtcaagtacctgttccagtttgggttcttcccctggaacagccacgtggtgctgcggcgctacgagaacaagccctacttcccgccccgcatcctgggcctggagaagactgacggctacatcaagtacgacctggtgcagctcatggcccttttcttccaccgctcccagctgctgtgctatggcctctgggaccatgaggaggactcaccatccaaggagcatgacaagagcggcgaggaggagcagggagccgaggaggggccaggggtgcctgcggccaccaccgaagaccacattcaggtggaagcgagggtcggacccacggacgggaccccagaaccccaagtggagctcaggccccgtgatacgaggcgcatcagtctacgttttagaagaaggaagaaggagggcccagcacggaaaggagcggcagccatcgaagctgaggacagggaggaagaagagggggaggaagagaaagaggcccccacggggagagagaagaggccaagccgctctggaggaagagtaagggcggccgggcggcggctgcagggcttctgcctgtccctggcccagggcacatatcggccgctacggcgcttcttccacgacatcctgcacaccaagtaccgcgcagccaccgacgtctatgccctcatgttcctggctgatgttgtcgacttcatcatcatcatttttggcttctgggcctttgggaagcactcggcggccacagacatcacgtcctccctatcagacgaccaggtacccgaggctttcctggtcatgctgctgatccagttcagtaccatggtggttgaccgcgccctctacctgcgcaagaccgtgctgggcaagctggccttccaggtggcgctggtgctggccatccacctatggatgttcttcatcctgcccgccgtcactgagaggatgttcaaccagaatgtggtggcccagctctggtacttcgtgaagtgcatctacttcgccctgtccgcctaccagatccgctgcggctaccccacccgcatcctcggcaacttcctcaccaagaagtacaatcatctcaacctcttcctcttccagggggggtgagtgcaggtccgccggggtgggggtcacggcccgggcatgagggagcccacctgacgggaaccctggctgtgggcaggttccggctggtgccgttcctggtggagctgcgggcagtgatggactgggtgtggacggacaccacgctgtccctgtccagctggatgtgtgtggaggacatctatgccaacatcttcatcatcaaatgcagccgagagacagagaaggtgcctgggcccagggcgggggccgggacaagggccagggatatgccctctccctaagacagaggcactgctgccacgagaacccgtggtgctggaggccctcccagggctcggagcccatggggacatgaggcgagcccacccactagctgatcacgaggccagtgatcttggcagctgcgagtgagtgctgggcgcagaagtgggcagcggagttggtcctgttccaggcaggctggcagcagagcagggcctggtgcagggaggaccggacagccactgtttgctgcattcttgtttaatggcctttctcagagagaattcgtgcgtcagaccactcccccacgtaaaaagtacaactcaggggtttctagtggattcacagttgagcatctgccttctcaccacttcaaaaagaaaccccgggccgggcacagcggctcacccctatcatcccagcactgtaagagacccaggagggaggtactgctcaaggccaggagttcaagatctgcacggccacaagcgagaccctgcctcagcaaatgtaaaaataaaacaattagctggcaatggcagctcatgcctatggtcccagcactttgggaggccaaaggaggaggatcagttgaggccaggagttttaagaccagcctgggcaacatagtgagtgagactctctctacaaaaaataaacgttagctgggtgtgatggtgcacacttgtgctcccagctactctggaggctgaggtgggaggatggcttgaggccaggagtacagggctgcattaagcctgatcacaccactgcactccagcttgggcaacagagtgagaccctgtctctaaaaaagcaaaaagaagaaacccagtgcccattggctgtcactcggtttcccctcccctgggccctagtaaccccttgtctaggtcctggttctatgagatttgcctacagtggatatttcatgaaaacaggctcagacagcgtttgtccttttgtaatcagctttcctcgctcagcatggtgtctctgaggtccacccacgtggcagtatggccttcctgtttatgggcaaatgatattctgtggcatggatggaccacaacatgctcatctgttgatgggctgttgcccgtgatgctgccaggcacgccggtgtacacgtctgtgtgcccgtgcccctggtcctgtggctgcacgccagggccggtaagtgctggtggtggtttccatcatgaggagctgctggttttccatagcagctccaccatctaaggttcccaccaccaacacgaggttgcggtttctccacatcctcaacaacctgttactatgtcttttttgttctggccatgctgctgaacgggtagcttgctgtgggctcttctcagttccctgttgaccgacgctgagcgtcttttcatgtgcttggccatttgtgtatcttctctggggaaatgtctattcaaatcctttctccatagtttagttgggcttttgagataggatctcaggctgaagtgcagtggcatgaccttcactcactgtagcctctgcctcccaggttcaagcgattctcccacctcagcctcccgagtagctgggactacaggtgtgcaccaccaggcctggctagtcttttgtatttttggccaggttcgtctcaaactcctgacctcaaagtgctgggatgacaagtgtgagccgccacacccagcagttgggttgttttttattagagttttttctgtttttctgcagatacattggctagaaatgactgaattggaagaattctctgtattctctggttgctagaaccttatcaattaaaatttgcagaaaatttctccaattctatggactgtctcttaaattttcttggtgtctttggaagcacaaagtatttattttggtaatatctggtttactttgtttccttcgccaaatccaggttcatgaagatttgcccgttttcttctaaaagttctatagttttagctctgaagtttcgctctttgatccactttgaggtaaattttggcacatggtatgaggcaggagttgcgtttcattctcctgcctggggcggtgcctgcaccgtgttgaaaaaggttgtccgttcccactgaacggtcacagctcccttgtctaagatcaacgacccctgaacatgagggttccaactggactcttagttctactccactggcctgtgtctgcccaccattactaccgccgtgccatactgaggtcaggctggggcttttctgggctgctgggtgagctggagaatgcggttgtgtgacccgcaggaagggcagagctgagcgtatgacctgtgtcgttcccctccagaaaaatacccgcagcccaaagggcagaagaagaagaagatcgtcaagtacggcatgggtggcctcatcatcctcttcctcatcgccatcatctggttcccgctgctcttcatgtcgctggtgcgctccgtggttggggttgtcaaccagcccatcgatgtcaccgtcaccctcaagctgggcggctatgagccgctgttcaccatgagcgcccagcagccgtccatcatccccttcacggcccaggcctatgaggagctgtcccggcagtttgacccccagccgctggccatgcagttcatcagccagtacagccctgaggacatcgtcacggcgcagattgagggcagctccggggcgctgtggcgcatcagtccccccagccgtgcccagatgaagcgggagctctacaacggcacggccgacatcaccctgcgcttcacctggaacttccagagggacctggcgaagggaggcactgtggagtatgccaacgagaagcacatgctggccctggcccccaacagcactgcacggcggcagctggccagcctgctcgagggcacctcggaccagtctgtggtcatccccaatctcttccccaagtacatccgtgcccccaacgggcccgaagccaaccctgtgaagcagctgcagcccaatgaggaggccgactacctcggcgtgcgtatccagctgcggagggagcagggtgcgggggccaccggcttcctcgaatggtgggtcatcgagctgcaggagtgccggaccgactgcaacctgctgcccatggtcattttcagtgacaaggtcagcccaccgagcctcggcttcctggctggctacggcatcatggggctgtacgtgtccatcgtgctggtcatcggcaagttcgtgcgcggattcttcagcgagatctcgcactccattatgttcgaggagctgccgtgcgtggaccgcatcctcaagctctgccaggacatcttcctggtgcgggagactcgggagctggagctggaggaggagttgtacgccaagctcatcttcctctaccgctcaccggagaccatgatcaagtggactcgtgagaaggagtaggagctgctgctggcgcccgagagggaaggagccggcctgctgggcagcgtggccacaaggggcggcactcctcaggccgggggagccactgccccgtccaaggccgccagctgtgatgcatcctcccggcctgcctgagccctgatgctgctgtcagagaaggacactgcgtccccacggcctgcgtggcgctgccgtcccccacgtgtactgtagagttttttttttaattaaaaaatgttttatttatacaaatggacaaaaaaaaaaca

SEQ ID NO: 280004 - DNA, 7056 bp, Homo sapiens
ccatggacctgcgccctgagctgcccaccaccctgggccccgtcagcctgcgccagctggggctggagcacacccgctacccctgtctggaccttggtgccatgttgctctacaccctgaccttctggctcctgctgcgccagtttgtgaaagagaagctgctgaagtgggcagagtctccagctgcgctgacggaggtcaccgtggcagacacagagcctacgcggacgcagacgctgttgcagagcctgggggagctggtgaagggcgtgtacgccaagtactggatctatgtgtgtgctggcatgttcatcgtggtcagcttcgccggccgcctcgtggtctacaagattgtctacatgttcctcttcctgctctgcctcaccctcttccaggtctactacagcctgtggcggaagctgctcaaggccttctggtggctcgtggtggcctacaccatgctggtcctcatcgccgtctacaccttccagttccaggacttccctgcctactggcgcaacctcactggcttcaccgacgagcagctgggggacctgggcctggagcagttcagcgtatccgagctcttctccagcatcctggtgcccggcttcttcctcctggcctgcatcctgcagctgcactacttccacaggcccttcatgcagctcaccgacatggagcacgtgtccctgcctggcacgcgcctcccgcgctgggctcacaggcaggatgcagtgagtgggaccccactgctgcgggaggagcagcaggagcatcagcagcagcagcaggaggaggaggaggaggaggactccagggacgaggggctgggcgtggccactccccaccaggccacgcaggtgcctgaaggggcagccaagtggggcctggtggctgagcgcctgctggagctggcagccggcttctcggacgtcctctcacgcgtgcaggtgttcctgcggcggctgctggagcttcacgttttcaagctggtggccctgtacaccgtctgggtggccctgaaggaggtgtcggtgatgaacctgctgctggtggtgctgtgggccttcgccctgccctacccacgcttccggcccatggcctcctgcctgtccaccgtgtggacctgcgtcatcatcgtgtgtaagatgctgtaccagctcaaggttgtcaacccccaggagtattccagcaactgcaccgagcccttccccaacagcaccaacttgctgcccacggagatcagccagtccctgctgtaccgggggcccgtggaccctgccaactggtttggggtgcggaaagggttccccaacctgggctacatccagaaccacctgcaagtgctgctgctgctggtattcgaggccatcgtgtaccggcgccaggagcactaccgccggcagcaccagctggccccgctgcctgcccaggccgtgtttgccagcggcacccgccagcagctggaccaggatctgctcggctgcctcaagtacttcatcaacttcttcttctacaaattcgggctggagatctgcttcctgatggccgtgaacgtgatcgggcagcgcatgaactttctggtgaccctgcacggttgctggctggtggccatcctcacccgcaggcaccgccaggccattgcccgcctctggcccaactactgcctcttcctggcgctgttcctgctgtaccagtacctgctgtgcctggggatgcccccggccctgtgcattgattatccctggcgctggagccgggccgtccccatgaactccgcactcatcaagtggctgtacctgcctgatttcttccgggcccccaactccaccaacctcatcagcgactttctcctgctgctgtgcgcctcccagcagtggcaggtgttctcagctgagcgcacagaggagtggcagcgcatggctggcgtcaacaccgaccgcctggagccgctgcggggggagcccaaccccgtgcccaactttatccactgcaggtcctaccttgacatgctgaaggtggccgtcttccgatacctgttctggctggtgctggtggtggtgtttgtcacgggggccacccgcatcagcatcttcgggctgggctacctgctggcctgcttctacctgctgctcttcggcacggccctgctgcagagggacacacgggcccgcctcgtgctgtgggactgcctcattctgtacaacgtcaccgtcatcatctccaagaacatgctgtcgctcctggcctgcgtcttcgtggagcagatgcagaccggcttctgctgggtcatccagctcttcagccttgtatgcaccgtcaagggctactatgaccccaaggagatgatggacagagaccaggactgcctgctgcctgtggaggaggctggcatcatctgggacagcgtctgcttcttcttcctgctgctgcagcgccgcgtcttccttagccattactacctgcacgtcagggccgacctccaggccaccgccctgctagcctccaggggcttcgccctctacaacgctgccaacctcaagagcattgacttccaccgcaggatagaggagaagtccctggcccagctgaaaagacagatggagcgtatccgtgccaagcaggagaagcacaggcagggccgggtggaccgcagtcgcccccaggacaccctgggccccaaggaccccggcctggagccagggcccgacagtccagggggctcctccccgccacggaggcagtggtggcggccctggctggaccacgccacagtcatccactccggggactacttcctgtttgagtccgacagtgaggaagaggaggaggctgttcctgaagacccgaggccgtcggcacagagtgccttccagctggcgtaccaggcatgggtgaccaacgcccaggcggtgctgaggcggcggcagcaggagcaggagcaggcaaggcaggaacaggcaggacagctacccacaggaggtggtcccagccaggaggtggagccagcagagggccccgaggaggcagcggcaggccggagccatgtggtgcagagggtgctgagcacggcgcagttcctgtggatgctggggcaggcgctagtggatgagctgacacgctggctgcaggagttcacccggcaccacggcaccatgagcgacgtgctgcgggcagagcgctacctcctcacacaggagctcctgcagggcggcgaagtgcacaggggcgtgctggatcagctgtacacaagccaggccgaggccacgctgccaggccccaccgaggcccccaatgccccaagcaccgtgtccagtgtgggcttgtggctgctggagtgaagccactcaagcagcatgacatgactgaccattggtgcatgcccccctgagtcacctgtgctatcaacgacgctgcatgtggcatgtgaggagggcatgtcacctgaccccctgggggagctgttgagtgctcgggttgcctcttcttgtacgcacggggactcgattgcgggactgtgccatgccgacgcttgtgtccttgtgacatggcgcctcgctgcaattcccacgaagcttggcctggacgtgcgcaggagcttgtttgtgccggatgggcgccgtggccgggcgctgcggctgctgcgggccgtgtaccagtgtgtggccgcccactcggagctgctctgctacttcatcatcatcctcaaccacatggtcacggcctccgccggctcgctggtgctgcccgtgctcgtcttcctgtgggccatgctgtcgatcccgaggcccagcaagcgcttctggatgacggccatcgtcttcaccgagatcgcggtggtcgtcaagtacctgttccagtttgggttcttcccctggaacagccacgtggtgctgcggcgctacgagaacaagccctacttcccgccccgcatcctgggcctggagaagactgacggctacatcaagtacgacctggtgcagctcatggcccttttcttccaccgctcccagctgctgtgctatggcctctgggaccatgaggaggactcaccatccaaggagcatgacaagagcggcgaggaggagcagggagccgaggaggggccaggggtgcctgcggccaccaccgaagaccacattcaggtggaagcgagggtcggacccacggacgggaccccagaaccccaagtggagctcaggccccgtgatacgaggcgcatcagtctacgttttagaagaaggaagaaggagggcccagcacggaaaggagcggcagccatcgaagctgaggacagggaggaagaagagggggaggaagagaaagaggcccccacggggagagagaagaggccaagccgctctggaggaagagtaagggcggccgggcggcggctgcagggcttctgcctgtccctggcccagggcacatatcggccgctacggcgcttcttccacgacatcctgcacaccaagtaccgcgcagccaccgacgtctatgccctcatgttcctggctgatgttgtcgacttcatcatcatcatttttggcttctgggcctttgggaagcactcggcggccacagacatcacgtcctccctatcagacgaccaggtacccgaggctttcctggtcatgctgctgatccagttcagtaccatggtggttgaccgcgccctctacctgcgcaagaccgtgctgggcaagctggccttccaggtggcgctggtgctggccatccacctatggatgttcttcatcctgcccgccgtcactgagaggatgttcaaccagaatgtggtggcccagctctggtacttcgtgaagtgcatctacttcgccctgtccgcctaccagatccgctgcggctaccccacccgcatcctcggcaacttcctcaccaagaagtacaatcatctcaacctcttcctcttccaggggttccggctggtgccgttcctggtggagctgcgggcagtgatggactgggtgtggacggacaccacgctgtccctgtccagctggatgtgtgtggaggacatctatgccaacatcttcatcatcaaatgcagccgagagacagagaagatacattggctagaaatgactgaattggaagaattctctgtattctctggttgctagaaccttatcaattaaaatttgcagaaaatttctccaattctatggactgtctcttaaattttcttggtgtctttggaagcacaaagtatttattttggtaatatctggtttactttgtttccttcgccaaatccaggttcatgaagatttgcccgttttcttctaaaagttctatagttttagctctgaagtttcgctctttgatccactttgaggtaaattttggcacatggtatgaggcaggagttgcgtttcattctcctgcctggggcggtgcctgcaccgtgttgaaaaaggttgtccgttcccactgaacggtcacagctcccttgtctaagatcaacgacccctgaacatgagggttccaactggactcttagttctactccactggcctgtgtctgcccaccattactaccgccgtgccatactgaggtcaggctggggcttttctgggctgctgggtgagctggagaatgcggttgtgtgacccgcaggaagggcagagctgagcgtatgacctgtgtcgttcccctccagaaaaatacccgcagcccaaagggcagaagaagaagaagatcgtcaagtacggcatgggtggcctcatcatcctcttcctcatcgccatcatctggttcccgctgctcttcatgtcgctggtgcgctccgtggttggggttgtcaaccagcccatcgatgtcaccgtcaccctcaagctgggcggctatgagccgctgttcaccatgagcgcccagcagccgtccatcatccccttcacggcccaggcctatgaggagctgtcccggcagtttgacccccagccgctggccatgcagttcatcagccagtacagccctgaggacatcgtcacggcgcagattgagggcagctccggggcgctgtggcgcatcagtccccccagccgtgcccagatgaagcgggagctctacaacggcacggccgacatcaccctgcgcttcacctggaacttccagagggacctggcgaagggaggcactgtggagtatgccaacgagaagcacatgctggccctggcccccaacagcactgcacggcggcagctggccagcctgctcgagggcacctcggaccagtctgtggtcatccccaatctcttccccaagtacatccgtgcccccaacgggcccgaagccaaccctgtgaagcagctgcagcccaatgaggaggccgactacctcggcgtgcgtatccagctgcggagggagcagggtgcgggggccaccggcttcctcgaatggtgggtcatcgagctgcaggagtgccggaccgactgcaacctgctgcccatggtcattttcagtgacaaggtcagcccaccgagcctcggcttcctggctggctacggcatcatggggctgtacgtgtccatcgtgctggtcatcggcaagttcgtgcgcggattcttcagcgagatctcgcactccattatgttcgaggagctgccgtgcgtggaccgcatcctcaagctctgccaggacatcttcctggtgcgggagactcgggagctggagctggaggaggagttgtacgccaagctcatcttcctctaccgctcaccggagaccatgatcaagtggactcgtgagaaggagtaggagctgctgctggcgcccgagagggaaggagccggcctgctgggcagcgtggccacaaggggcggcactcctcaggccgggggagccactgccccgtccaaggccgccagctgtgatgcatcctcccggcctgcctgagccctgatgctgctgtcagagaaggacactgcgtccccacggcctgcgtggcgctgccgtcccccacgtgtactgtagagttttttttttaattaaaaaatgttttatttatacaaatggacaaaaaaaaaaca

SEQ ID NO: 280005 - DNA, 8947 bp, Homo sapiens
ccatggacctgcgccctgagctgcccaccaccctgggccccgtcagcctgcgccagctggggctggagcacacccgctacccctgtctggaccttggtgccatgttgctctacaccctgaccttctggctcctgctgcgccagtttgtgaaagagaagctgctgaagtgggcagagtctccagctgcgctgacggaggtcaccgtggcagacacagagcctacgcggacgcagacgctgttgcagagcctgggggagctggtgaagggcgtgtacgccaagtactggatctatgtgtgtgctggcatgttcatcgtggtcagcttcgccggccgcctcgtggtctacaagattgtctacatgttcctcttcctgctctgcctcaccctcttccaggtctactacagcctgtggcggaagctgctcaaggccttctggtggctcgtggtggcctacaccatgctggtcctcatcgccgtctacaccttccagttccaggacttccctgcctactggcgcaacctcactggcttcaccgacgagcagctgggggacctgggcctggagcagttcagcgtatccgagctcttctccagcatcctggtgcccggcttcttcctcctggcctgcatcctgcagctgcactacttccacaggcccttcatgcagctcaccgacatggagcacgtgtccctgcctggcacgcgcctcccgcgctgggctcacaggcaggatgcagtgagtgggaccccactgctgcgggaggagcagcaggagcatcagcagcagcagcaggaggaggaggaggaggaggactccagggacgaggggctgggcgtggccactccccaccaggccacgcaggtgcctgaaggggcagccaagtggggcctggtggctgagcgcctgctggagctggcagccggcttctcggacgtcctctcacgcgtgcaggtgttcctgcggcggctgctggagcttcacgttttcaagctggtggccctgtacaccgtctgggtggccctgaaggaggtgtcggtgatgaacctgctgctggtggtgctgtgggccttcgccctgccctacccacgcttccggcccatggcctcctgcctgtccaccgtgtggacctgcgtcatcatcgtgtgtaagatgctgtaccagctcaaggttgtcaacccccaggagtattccagcaactgcaccgagcccttccccaacagcaccaacttgctgcccacggagatcagccagtccctgctgtaccgggggcccgtggaccctgccaactggtttggggtgcggaaagggttccccaacctgggctacatccagaaccacctgcaagtgctgctgctgctggtattcgaggccatcgtgtaccggcgccaggagcactaccgccggcagcaccagctggccccgctgcctgcccaggccgtgtttgccagcggcacccgccagcagctggaccaggatctgctcggctgcctcaagtacttcatcaacttcttcttctacaaattcgggctggagatctgcttcctgatggccgtgaacgtgatcgggcagcgcatgaactttctggtgaccctgcacggttgctggctggtggccatcctcacccgcaggcaccgccaggccattgcccgcctctggcccaactactgcctcttcctggcgctgttcctgctgtaccagtacctgctgtgcctggggatgcccccggccctgtgcattgattatccctggcgctggagccgggccgtccccatgaactccgcactcatcaagtggctgtacctgcctgatttcttccgggcccccaactccaccaacctcatcagcgactttctcctgctgctgtgcgcctcccagcagtggcaggtgttctcagctgagcgcacagaggagtggcagcgcatggctggcgtcaacaccgaccgcctggagccgctgcggggggagcccaaccccgtgcccaactttatccactgcaggtcctaccttgacatgctgaaggtggccgtcttccgatacctgttctggctggtgctggtggtggtgtttgtcacgggggccacccgcatcagcatcttcgggctgggctacctgctggcctgcttctacctgctgctcttcggcacggccctgctgcagagggacacacgggcccgcctcgtgctgtgggactgcctcattctgtacaacgtcaccgtcatcatctccaagaacatgctgtcgctcctggcctgcgtcttcgtggagcagatgcagaccggcttctgctgggtcatccagctcttcagccttgtatgcaccgtcaagggctactatgaccccaaggagatgatggacagagaccaggactgcctgctgcctgtggaggaggctggcatcatctgggacagcgtctgcttcttcttcctgctgctgcagcgccgcgtcttccttagccattactacctgcacgtcagggccgacctccaggccaccgccctgctagcctccaggggcttcgccctctacaacgctgccaacctcaagagcattgacttccaccgcaggatagaggagaagtccctggcccagctgaaaagacagatggagcgtatccgtgccaagcaggagaagcacaggcagggccgggtggaccgcagtcgcccccaggacaccctgggccccaaggaccccggcctggagccagggcccgacagtccagggggctcctccccgccacggaggcagtggtggcggccctggctggaccacgccacagtcatccactccggggactacttcctgtttgagtccgacagtgaggaagaggaggaggctgttcctgaagacccgaggccgtcggcacagagtgccttccagctggcgtaccaggcatgggtgaccaacgcccaggcggtgctgaggcggcggcagcaggagcaggagcaggcaaggcaggaacaggcaggacagctacccacaggaggtggtcccagccaggaggtggagccagcagagggccccgaggaggcagcggcaggccggagccatgtggtgcagagggtgctgagcacggcgcagttcctgtggatgctggggcaggcgctagtggatgagctgacacgctggctgcaggagttcacccggcaccacggcaccatgagcgacgtgctgcgggcagagcgctacctcctcacacaggagctcctgcagggcggcgaagtgcacaggggcgtgctggatcagctgtacacaagccaggccgaggccacgctgccaggccccaccgaggcccccaatgccccaagcaccgtgtccagtgtgggcttgtggctgctggagtgaagccactcaagcagcatgacatgactgaccattggtgcatgcccccctgagtcacctgtgctatcaacgacgctgcatgtggcatgtgaggagggcatgtcacctgaccccctgggggagctgttgagtgctcgggttgcctcttcttgtacgcacggggactcgattgcgggactgtgccatgccgacgcttgtgtccttgtgacatggcgcctcgctgcaattcccacgaagcttggcctggacgtgcgcaggagcttgtttgtgccggatgggcgccgtggccgggcgctgcggctgctgcgggccgtgtaccagtgtgtggccgcccactcggagctgctctgctacttcatcatcatcctcaaccacatggtcacggcctccgccggctcgctggtgctgcccgtgctcgtcttcctgtgggccatgctgtcgatcccgaggcccagcaagcgcttctggatgacggccatcgtcttcaccgagatcgcggtggtcgtcaagtacctgttccagtttgggttcttcccctggaacagccacgtggtgctgcggcgctacgagaacaagccctacttcccgccccgcatcctgggcctggagaagactgacggctacatcaagtacgacctggtgcagctcatggcccttttcttccaccgctcccagctgctgtgctatggcctctgggaccatgaggaggactcaccatccaaggagcatgacaagagcggcgaggaggagcagggagccgaggaggggccaggggtgcctgcggccaccaccgaagaccacattcaggtggaagcgagggtcggacccacggacgggaccccagaaccccaagtggagctcaggccccgtgatacgaggcgcatcagtctacgttttagaagaaggaagaaggagggcccagcacggaaaggagcggcagccatcgaagctgaggacagggaggaagaagagggggaggaagagaaagaggcccccacggggagagagaagaggccaagccgctctggaggaagagtaagggcggccgggcggcggctgcagggcttctgcctgtccctggcccagggcacatatcggccgctacggcgcttcttccacgacatcctgcacaccaagtaccgcgcagccaccgacgtctatgccctcatgttcctggctgatgttgtcgacttcatcatcatcatttttggcttctgggcctttgggaagcactcggcggccacagacatcacgtcctccctatcagacgaccaggtacccgaggctttcctggtcatgctgctgatccagttcagtaccatggtggttgaccgcgccctctacctgcgcaagaccgtgctgggcaagctggccttccaggtggcgctggtgctggccatccacctatggatgttcttcatcctgcccgccgtcactgagaggatgttcaaccagaatgtggtggcccagctctggtacttcgtgaagtgcatctacttcgccctgtccgcctaccagatccgctgcggctaccccacccgcatcctcggcaacttcctcaccaagaagtacaatcatctcaacctcttcctcttccaggggttccggctggtgccgttcctggtggagctgcgggcagtgatggactgggtgtggacggacaccacgctgtccctgtccagctggatgtgtgtggaggacatctatgccaacatcttcatcatcaaatgcagccgagagacagagaaggtgcctgggcccagggcgggggccgggacaagggccagggatatgccctctccctaagacagaggcactgctgccacgagaacccgtggtgctggaggccctcccagggctcggagcccatggggacatgaggcgagcccacccactagctgatcacgaggccagtgatcttggcagctgcgagtgagtgctgggcgcagaagtgggcagcggagttggtcctgttccaggcaggctggcagcagagcagggcctggtgcagggaggaccggacagccactgtttgctgcattcttgtttaatggcctttctcagagagaattcgtgcgtcagaccactcccccacgtaaaaagtacaactcaggggtttctagtggattcacagttgagcatctgccttctcaccacttcaaaaagaaaccccgggccgggcacagcggctcacccctatcatcccagcactgtaagagacccaggagggaggtactgctcaaggccaggagttcaagatctgcacggccacaagcgagaccctgcctcagcaaatgtaaaaataaaacaattagctggcaatggcagctcatgcctatggtcccagcactttgggaggccaaaggaggaggatcagttgaggccaggagttttaagaccagcctgggcaacatagtgagtgagactctctctacaaaaaataaacgttagctgggtgtgatggtgcacacttgtgctcccagctactctggaggctgaggtgggaggatggcttgaggccaggagtacagggctgcattaagcctgatcacaccactgcactccagcttgggcaacagagtgagaccctgtctctaaaaaagcaaaaagaagaaacccagtgcccattggctgtcactcggtttcccctcccctgggccctagtaaccccttgtctaggtcctggttctatgagatttgcctacagtggatatttcatgaaaacaggctcagacagcgtttgtccttttgtaatcagctttcctcgctcagcatggtgtctctgaggtccacccacgtggcagtatggccttcctgtttatgggcaaatgatattctgtggcatggatggaccacaacatgctcatctgttgatgggctgttgcccgtgatgctgccaggcacgccggtgtacacgtctgtgtgcccgtgcccctggtcctgtggctgcacgccagggccggtaagtgctggtggtggtttccatcatgaggagctgctggttttccatagcagctccaccatctaaggttcccaccaccaacacgaggttgcggtttctccacatcctcaacaacctgttactatgtcttttttgttctggccatgctgctgaacgggtagcttgctgtgggctcttctcagttccctgttgaccgacgctgagcgtcttttcatgtgcttggccatttgtgtatcttctctggggaaatgtctattcaaatcctttctccatagtttagttgggcttttgagataggatctcaggctgaagtgcagtggcatgaccttcactcactgtagcctctgcctcccaggttcaagcgattctcccacctcagcctcccgagtagctgggactacaggtgtgcaccaccaggcctggctagtcttttgtatttttggccaggttcgtctcaaactcctgacctcaaagtgctgggatgacaagtgtgagccgccacacccagcagttgggttgttttttattagagttttttctgtttttctgcagatacattggctagaaatgactgaattggaagaattctctgtattctctggttgctagaaccttatcaattaaaatttgcagaaaatttctccaattctatggactgtctcttaaattttcttggtgtctttggaagcacaaagtatttattttggtaatatctggtttactttgtttccttcgccaaatccaggttcatgaagatttgcccgttttcttctaaaagttctatagttttagctctgaagtttcgctctttgatccactttgaggtaaattttggcacatggtatgaggcaggagttgcgtttcattctcctgcctggggcggtgcctgcaccgtgttgaaaaaggttgtccgttcccactgaacggtcacagctcccttgtctaagatcaacgacccctgaacatgagggttccaactggactcttagttctactccactggcctgtgtctgcccaccattactaccgccgtgccatactgaggtcaggctggggcttttctgggctgctgggtgagctggagaatgcggttgtgtgacccgcaggaagggcagagctgagcgtatgacctgtgtcgttcccctccagaaaaatacccgcagcccaaagggcagaagaagaagaagatcgtcaagtacggcatgggtggcctcatcatcctcttcctcatcgccatcatctggttcccgctgctcttcatgtcgctggtgcgctccgtggttggggttgtcaaccagcccatcgatgtcaccgtcaccctcaagctgggcggctatgaggtgagcatgtgtgggtccgcctgtccattcccatcccctgggggttctggccaaggcggtgcaccacccccagccgctcctccacgctcatcttcgtggccccgtgtccccgtgcctgccccagccccgctgttcaccatgagcgcccagcagccgtccatcatccccttcacggcccaggcctatgaggagctgtcccggcagtttgacccccagccgctggccatgcagttcatcagccagtacagccctgaggacatcgtcacggcgcagattgagggcagctccggggcgctgtggcgcatcagtccccccagccgtgcccagatgaagcgggagctctacaacggcacggccgacatcaccctgcgcttcacctggaacttccagagggacctggcgaagggaggcactgtggagtatgccaacgagaagcacatgctggccctggcccccaacagcactgcacggcggcagctggccagcctgctcgagggcacctcggaccagtctgtggtcatccccaatctcttccccaagtacatccgtgcccccaacgggcccgaagccaaccctgtgaagcagctgcagcccaatgaggaggccgactacctcggcgtgcgtatccagctgcggagggagcagggtgcgggggccaccggcttcctcgaatggtgggtcatcgagctgcaggagtgccggaccgactgcaacctgctgcccatggtcattttcagtgacaaggtcagcccaccgagcctcggcttcctggctggctacggcatcatggggctgtacgtgtccatcgtgctggtcatcggcaagttcgtgcgcggattcttcagcgagatctcgcactccattatgttcgaggagctgccgtgcgtggaccgcatcctcaagctctgccaggacatcttcctggtgcgggagactcgggagctggagctggaggaggagttgtacgccaagctcatcttcctctaccgctcaccggagaccatgatcaagtggactcgtgagaaggagtaggagctgctgctggcgcccgagagggaaggagccggcctgctgggcagcgtggccacaaggggcggcactcctcaggccgggggagccactgccccgtccaaggccgccagctgtgatgcatcctcccggcctgcctgagccctgatgctgctgtcagagaaggacactgcgtccccacggcctgcgtggcgctgccgtcccccacgtgtactgtagagttttttttttaattaaaaaatgttttatttatacaaatggacaaaaaaaaaaca

SEQ ID NO: 280006 - DNA, 6498 bp, Homo sapiens
ccatggacctgcgccctgagctgcccaccaccctgggccccgtcagcctgcgccagctggggctggagcacacccgctacccctgtctggaccttggtgccatgttgctctacaccctgaccttctggctcctgctgcgccagtttgtgaaagagaagctgctgaagtgggcagagtctccagctgcgctgacggaggtcaccgtggcagacacagagcctacgcggacgcagacgctgttgcagagcctgggggagctggtgaagggcgtgtacgccaagtactggatctatgtgtgtgctggcatgttcatcgtggtcagcttcgccggccgcctcgtggtctacaagattgtctacatgttcctcttcctgctctgcctcaccctcttccaggtctactacagcctgtggcggaagctgctcaaggccttctggtggctcgtggtggcctacaccatgctggtcctcatcgccgtctacaccttccagttccaggacttccctgcctactggcgcaacctcactggcttcaccgacgagcagctgggggacctgggcctggagcagttcagcgtatccgagctcttctccagcatcctggtgcccggcttcttcctcctggcctgcatcctgcagctgcactacttccacaggcccttcatgcagctcaccgacatggagcacgtgtccctgcctggcacgcgcctcccgcgctgggctcacaggcaggatgcagtgagtgggaccccactgctgcgggaggagcagcaggagcatcagcagcagcagcaggaggaggaggaggaggaggactccagggacgaggggctgggcgtggccactccccaccaggccacgcaggtgcctgaaggggcagccaagtggggcctggtggctgagcgcctgctggagctggcagccggcttctcggacgtcctctcacgcgtgcaggtgttcctgcggcggctgctggagcttcacgttttcaagctggtggccctgtacaccgtctgggtggccctgaaggaggtgtcggtgatgaacctgctgctggtggtgctgtgggccttcgccctgccctacccacgcttccggcccatggcctcctgcctgtccaccgtgtggacctgcgtcatcatcgtgtgtaagatgctgtaccagctcaaggttgtcaacccccaggagtattccagcaactgcaccgagcccttccccaacagcaccaacttgctgcccacggagatcagccagtccctgctgtaccgggggcccgtggaccctgccaactggtttggggtgcggaaagggttccccaacctgggctacatccagaaccacctgcaagtgctgctgctgctggtattcgaggccatcgtgtaccggcgccaggagcactaccgccggcagcaccagctggccccgctgcctgcccaggccgtgtttgccagcggcacccgccagcagctggaccaggatctgctcggctgcctcaagtacttcatcaacttcttcttctacaaattcgggctggagatctgcttcctgatggccgtgaacgtgatcgggcagcgcatgaactttctggtgaccctgcacggttgctggctggtggccatcctcacccgcaggcaccgccaggccattgcccgcctctggcccaactactgcctcttcctggcgctgttcctgctgtaccagtacctgctgtgcctggggatgcccccggccctgtgcattgattatccctggcgctggagccgggccgtccccatgaactccgcactcatcaagtggctgtacctgcctgatttcttccgggcccccaactccaccaacctcatcagcgactttctcctgctgctgtgcgcctcccagcagtggcaggtgttctcagctgagcgcacagaggagtggcagcgcatggctggcgtcaacaccgaccgcctggagccgctgcggggggagcccaaccccgtgcccaactttatccactgcaggtcctaccttgacatgctgaaggtggccgtcttccgatacctgttctggctggtgctggtggtggtgtttgtcacgggggccacccgcatcagcatcttcgggctgggctacctgctggcctgcttctacctgctgctcttcggcacggccctgctgcagagggacacacgggcccgcctcgtgctgtgggactgcctcattctgtacaacgtcaccgtcatcatctccaagaacatgctgtcgctcctggcctgcgtcttcgtggagcagatgcagaccggcttctgctgggtcatccagctcttcagccttgtatgcaccgtcaagggctactatgaccccaaggagatgatggacagagaccaggactgcctgctgcctgtggaggaggctggcatcatctgggacagcgtctgcttcttcttcctgctgctgcagcgccgcgtcttccttagccattactacctgcacgtcagggccgacctccaggccaccgccctgctagcctccaggggcttcgccctctacaacgctgccaacctcaagagcattgacttccaccgcaggatagaggagaagtccctggcccagctgaaaagacagatggagcgtatccgtgccaagcaggagaagcacaggcagggccgggtggaccgcagtcgcccccaggacaccctgggccccaaggaccccggcctggagccagggcccgacagtccagggggctcctccccgccacggaggcagtggtggcggccctggctggaccacgccacagtcatccactccggggactacttcctgtttgagtccgacagtgaggaagaggaggaggctgttcctgaagacccgaggccgtcggcacagagtgccttccagctggcgtaccaggcatgggtgaccaacgcccaggcggtgctgaggcggcggcagcaggagcaggagcaggcaaggcaggaacaggcaggacagctacccacaggaggtggtcccagccaggaggtggagccagcagagggccccgaggaggcagcggcaggccggagccatgtggtgcagagggtgctgagcacggcgcagttcctgtggatgctggggcaggcgctagtggatgagctgacacgctggctgcaggagttcacccggcaccacggcaccatgagcgacgtgctgcgggcagagcgctacctcctcacacaggagctcctgcagggcggcgaagtgcacaggggcgtgctggatcagctgtacacaagccaggccgaggccacgctgccaggccccaccgaggcccccaatgccccaagcaccgtgtccagtgtgggcttgtggctgctggagtgaagccactcaagcagcatgacatgactgaccattggtgcatgcccccctgagtcacctgtgctatcaacgacgctgcatgtggcatgtgaggagggcatgtcacctgaccccctgggggagctgttgagtgctcgggttgcctcttcttgtacgcacggggactcgattgcgggactgtgccatgccgacgcttgtgtccttgtgacatggcgcctcgctgcaattcccacgaagcttggcctggacgtgcgcaggagcttgtttgtgccggatgggcgccgtggccgggcgctgcggctgctgcgggccgtgtaccagtgtgtggccgcccactcggagctgctctgctacttcatcatcatcctcaaccacatggtcacggcctccgccggctcgctggtgctgcccgtgctcgtcttcctgtgggccatgctgtcgatcccgaggcccagcaagcgcttctggatgacggccatcgtcttcaccgagatcgcggtggtcgtcaagtacctgttccagtttgggttcttcccctggaacagccacgtggtgctgcggcgctacgagaacaagccctacttcccgccccgcatcctgggcctggagaagactgacggctacatcaagtacgacctggtgcagctcatggcccttttcttccaccgctcccagctgctgtgctatggcctctgggaccatgaggaggactcaccatccaaggagcatgacaagagcggcgaggaggagcagggagccgaggaggggccaggggtgcctgcggccaccaccgaagaccacattcaggtggaagcgagggtcggacccacggacgggaccccagaaccccaagtggagctcaggccccgtgatacgaggcgcatcagtctacgttttagaagaaggaagaaggagggcccagcacggaaaggagcggcagccatcgaagctgaggacagggaggaagaagagggggaggaagagaaagaggcccccacggggagagagaagaggccaagccgctctggaggaagagtaagggcggccgggcggcggctgcagggcttctgcctgtccctggcccagggcacatatcggccgctacggcgcttcttccacgacatcctgcacaccaagtaccgcgcagccaccgacgtctatgccctcatgttcctggctgatgttgtcgacttcatcatcatcatttttggcttctgggcctttgggaagcactcggcggccacagacatcacgtcctccctatcagacgaccaggtacccgaggctttcctggtcatgctgctgatccagttcagtaccatggtggttgaccgcgccctctacctgcgcaagaccgtgctgggcaagctggccttccaggtggcgctggtgctggccatccacctatggatgttcttcatcctgcccgccgtcactgagaggatgttcaaccagaatgtggtggcccagctctggtacttcgtgaagtgcatctacttcgccctgtccgcctaccagatccgctgcggctaccccacccgcatcctcggcaacttcctcaccaagaagtacaatcatctcaacctcttcctcttccaggggttccggctggtgccgttcctggtggagctgcgggcagtgatggactgggtgtggacggacaccacgctgtccctgtccagctggatgtgtgtggaggacatctatgccaacatcttcatcatcaaatgcagccgagagacagagaaggttcatgaagatttgcccgttttcttctaaaagttctatagttttagctctgaagtttcgctctttgatccactttgagaaatacccgcagcccaaagggcagaagaagaagaagatcgtcaagtacggcatgggtggcctcatcatcctcttcctcatcgccatcatctggttcccgctgctcttcatgtcgctggtgcgctccgtggttggggttgtcaaccagcccatcgatgtcaccgtcaccctcaagctgggcggctatgagccgctgttcaccatgagcgcccagcagccgtccatcatccccttcacggcccaggcctatgaggagctgtcccggcagtttgacccccagccgctggccatgcagttcatcagccagtacagccctgaggacatcgtcacggcgcagattgagggcagctccggggcgctgtggcgcatcagtccccccagccgtgcccagatgaagcgggagctctacaacggcacggccgacatcaccctgcgcttcacctggaacttccagagggacctggcgaagggaggcactgtggagtatgccaacgagaagcacatgctggccctggcccccaacagcactgcacggcggcagctggccagcctgctcgagggcacctcggaccagtctgtggtcatccccaatctcttccccaagtacatccgtgcccccaacgggcccgaagccaaccctgtgaagcagctgcagcccaatgaggaggccgactacctcggcgtgcgtatccagctgcggagggagcagggtgcgggggccaccggcttcctcgaatggtgggtcatcgagctgcaggagtgccggaccgactgcaacctgctgcccatggtcattttcagtgacaagcatcatggggctgtacgtgtccatcgtgctggtcatcggcaagttcgtgcgcggattcttcagcgagatctcgcactccattatgttcgaggagctgccgtgcgtggaccgcatcctcaagctctgccaggacatcttcctggtgcgggagactcgggagctggagctggaggaggagttgtacgccaagctcatcttcctctaccgctcaccggagaccatgatcaagtggactcgtgagaaggagtaggagctgctgctggcgcccgagagggaaggagccggcctgctgggcagcgtggccacaaggggcggcactcctcaggccgggggagccactgccccgtccaaggccgccagctgtgatgcatcctcccggcctgcctgagccctgatgctgctgtcagagaaggacactgcgtccccacggcctgcgtggcgctgccgtcccccacgtgtactgtagagttttttttttaattaaaaaatgttttatttatacaaatggacaaaaaaaaaaca

SEQ ID NO: 280007 - DNA, 1419 bp, Homo sapiens
gcaagcaggtttcgaggtgagaggatcagcaaaggagaggaagagggacaacaaatacccgcagcccaaagggcagaagaagaagaagatcgtcaagtacggcatgggtggcctcatcatcctcttcctcatcgccatcatctggttcccgctgctcttcatgtcgctggtgcgctccgtggttggggttgtcaaccagcccatcgatgtcaccgtcaccctcaagctgggcggctatgagccgctgttcaccatgagcgcccagcagccgtccatcatccccttcacggcccaggcctatgaggagctgtcccggcagtttgacccccagccgctggccatgcagttcatcagccagtacagccctgaggacatcgtcacggcgcagattgagggcagctccggggcgctgtggcgcatcagtccccccagccgtgcccagatgaagcgggagctctacaacggcacggccgacatcaccctgcgcttcacctggaacttccagagggacctggcgaagggaggcactgtggagtatgccaacgagaagcacatgctggccctggcccccaacagcactgcacggcggcagctggccagcctgctcgagggcacctcggaccagtctgtggtcatccccaatctcttccccaagtacatccgtgcccccaacgggcccgaagccaaccctgtgaagcagctgcagcccaatgaggaggccgactacctcggcgtgcgtatccagctgcggagggagcagggtgcgggggccaccggcttcctcgaatggtgggtcatcgagctgcaggagtgccggaccgactgcaacctgctgcccatggtcattttcagtgacaaggtcagcccaccgagcctcggcttcctggctggctacggcatcatggggctgtacgtgtccatcgtgctggtcatcggcaagttcgtgcgcggattcttcagcgagatctcgcactccattatgttcgaggagctgccgtgcgtggaccgcatcctcaagctctgccaggacatcttcctggtgcgggagactcgggagctggagctggaggaggagttgtacgccaagctcatcttcctctaccgctcaccggagaccatgatcaagtggactcgtgagaaggagtaggagctgctgctggcgcccgagagggaaggagccggcctgctgggcagcgtggccacaaggggcggcactcctcaggccgggggagccactgccccgtccaaggccgccagctgtgatgcatcctcccggcctgcctgagccctgatgctgctgtcagagaaggacactgcgtccccacggcctgcgtggcgctgccgtcccccacgtgtactgtagagttttttttttaattaaaaaatgttttatttatacaaatggacaaaaaaaaaaca

SEQ ID NO: 280008 - DNA, 5679 bp, Homo sapiens
ccatggacctgcgccctgagctgcccaccaccctgggccccgtcagcctgcgccagctggggctggagcacacccgctacccctgtctggaccttggtgccatgttgctctacaccctgaccttctggctcctgctgcgccagtttgtgaaagagaagctgctgaagtgggcagagtctccagctgcgctgacggaggtcaccgtggcagacacagagcctacgcggacgcagacgctgttgcagagcctgggggagctggtgaagggcgtgtacgccaagtactggatctatgtgtgtgctggcatgttcatcgtggtcagcttcgccggccgcctcgtggtctacaagattgtctacatgttcctcttcctgctctgcctcaccctcttccaggtctactacagcctgtggcggaagctgctcaaggccttctggtggctcgtggtggcctacaccatgctggtcctcatcgccgtctacaccttccagttccaggacttccctgcctactggcgcaacctcactggcttcaccgacgagcagctgggggacctgggcctggagcagttcagcgtatccgagctcttctccagcatcctggtgcccggcttcttcctcctggcctgcatcctgcagctgcactacttccacaggcccttcatgcagctcaccgacatggagcacgtgtccctgcctggcacgcgcctcccgcgctgggctcacaggcaggatgcagtgagtgggaccccactgctgcgggaggagcagcaggagcatcagcagcagcagcaggaggaggaggaggaggaggactccagggacgaggggctgggcgtggccactccccaccaggccacgcaggtgcctgaaggggcagccaagtggggcctggtggctgagcgcctgctggagctggcagccggcttctcggacgtcctctcacgcgtgcaggtgttcctgcggcggctgctggagcttcacgttttcaagctggtggccctgtacaccgtctgggtggccctgaaggaggtgtcggtgatgaacctgctgctggtggtgctgtgggccttcgccctgccctacccacgcttccggcccatggcctcctgcctgtccaccgtgtggacctgcgtcatcatcgtgtgtaagatgctgtaccagctcaaggttgtcaacccccaggagtattccagcaactgcaccgagcccttccccaacagcaccaacttgctgcccacggagatcagccagtccctgctgtaccgggggcccgtggaccctgccaactggtttggggtgcggaaagggttccccaacctgggctacatccagaaccacctgcaagtgctgctgctgctggtattcgaggccatcgtgtaccggcgccaggagcactaccgccggcagcaccagctggccccgctgcctgcccaggccgtgtttgccagcggcacccgccagcagctggaccaggatctgctcggctgcctcaagtacttcatcaacttcttcttctacaaattcgggctggagatctgcttcctgatggccgtgaacgtgatcgggcagcgcatgaactttctggtgaccctgcacggttgctggctggtggccatcctcacccgcaggcaccgccaggccattgcccgcctctggcccaactactgcctcttcctggcgctgttcctgctgtaccagtacctgctgtgcctggggatgcccccggccctgtgcattgattatccctggcgctggagccgggccgtccccatgaactccgcactcatcaagtggctgtacctgcctgatttcttccgggcccccaactccaccaacctcatcagcgactttctcctgctgctgtgcgcctcccagcagtggcaggtgttctcagctgagcgcacagaggagtggcagcgcatggctggcgtcaacaccgaccgcctggagccgctgcggggggagcccaaccccgtgcccaactttatccactgcaggtcctaccttgacatgctgaaggtggccgtcttccgatacctgttctggctggtgctggtggtggtgtttgtcacgggggccacccgcatcagcatcttcgggctgggctacctgctggcctgcttctacctgctgctcttcggcacggccctgctgcagagggacacacgggcccgcctcgtgctgtgggactgcctcattctgtacaacgtcaccgtcatcatctccaagaacatgctgtcgctcctggcctgcgtcttcgtggagcagatgcagaccggcttctgctgggtcatccagctcttcagccttgtatgcaccgtcaagggctactatgaccccaaggagatgatggacagagaccaggactgcctgctgcctgtggaggaggctggcatcatctgggacagcgtctgcttcttcttcctgctgctgcagcgccgcgtcttccttagccattactacctgcacgtcagggccgacctccaggccaccgccctgctagcctccaggggcttcgccctctacaacgctgccaacctcaagagcattgacttccaccgcaggatagaggagaagtccctggcccagctgaaaagacagatggagcgtatccgtgccaagcaggagaagcacaggcagggccgggtggaccgcagtcgcccccaggacaccctgggccccaaggaccccggcctggagccagggcccgacagtccagggggctcctccccgccacggaggcagtggtggcggccctggctggaccacgccacagtcatccactccggggactacttcctgtttgagtccgacagtgaggaagaggaggaggctgttcctgaagacccgaggccgtcggcacagagtgccttccagctggcgtaccaggcatgggtgaccaacgcccaggcggtgctgaggcggcggcagcaggagcaggagcaggcaaggcaggaacaggcaggacagctacccacaggaggtggtcccagccaggaggtggagccagcagagggccccgaggaggcagcggcaggccggagccatgtggtgcagagggtgctgagcacggcgcagttcctgtggatgctggggcaggcgctagtggatgagctgacacgctggctgcaggagttcacccggcaccacggcaccatgagcgacgtgctgcgggcagagcgctacctcctcacacaggagctcctgcagggcggcgaagtgcacaggggcgtgctggatcagctgtacacaagccaggccgaggccacgctgccaggccccaccgaggcccccaatgccccaagcaccgtgtccagtgtgggcttgtggctgctggagtgaagccactcaagcagcatgacatgactgaccattggtgcatgcccccctgagtcacctgtgctatcaacgacgctgcatgtggcatgtgaggagggcatgtcacctgaccccctgggggagctgttgagtgctcgggttgcctcttcttgtacgcacggggactcgattgcgggactgtgccatgccgacgcttgtgtccttgtgacatggcgcctcgctgcaattcccacgaagcttggcctggacgtgcgcaggagcttgtttgtgccggatgggcgccgtggccgggcgctgcggctgctgcgggccgtgtaccagtgtgtggccgcccactcggagctgctctgctacttcatcatcatcctcaaccacatggtcacggcctccgccggctcgctggtgctgcccgtgctcgtcttcctgtgggccatgctgtcgatcccgaggcccagcaagcgcttctggatgacggccatcgtcttcaccgagatcgcggtggtcgtcaagtacctgttccagtttgggttcttcccctggaacagccacgtggtgctgcggcgctacgagaacaagccctacttcccgccccgcatcctgggcctggagaagactgacggctacatcaagtacgacctggtgcagctcatggcccttttcttccaccgctcccagctgctgtgctatggcctctgggaccatgaggaggactcaccatccaaggagcatgacaagagcggcgaggaggagcagggagccgaggaggggccaggggtgcctgcggccaccaccgaagaccacattcaggtggaagcgagggtcggacccacggacgggaccccagaaccccaagtggagctcaggccccgtgatacgaggcgcatcagtctacgttttagaagaaggaagaaggagggcccagcacggaaaggagcggcagccatcgaagctgaggacagggaggaagaagagggggaggaagagaaagaggcccccacggggagagagaagaggccaagccgctctggaggaagagtaagggcggccgggcggcggctgcagggcttctgcctgtccctggcccagggcacatatcggccgctacggcgcttcttccacgacatcctgcacaccaagtaccgcgcagccaccgacgtctatgccctcatgttcctggctgatgttgtcgacttcatcatcatcatttttggcttctgggcctttgggaagcactcggcggccacagacatcacgtcctccctatcagacgaccaggtacccgaggctttcctggtcatgctgctgatccagttcagtaccatggtggttgaccgcgccctctacctgcgcaagaccgtgctgggcaagctggccttccaggtggcgctggtgctggccatccacctatggatgttcttcatcctgcccgccgtcactgagaggatgttcaaccagaatgtggtggcccagctctggtacttcgtgaagtgcatctacttcgccctgtccgcctaccagatccgctgcggctaccccacccgcatcctcggcaacttcctcaccaagaagtacaatcatctcaacctcttcctcttccaggggttccggctggtgccgttcctggtggagctgcgggcagtgatggactgggtgtggacggacaccacgctgtccctgtccagctggatgtgtgtggaggacatctatgccaacatcttcatcatcaaatgcagccgagagacagagaagaaatacccgcagcccaaagggcagaagaagaagaagatcgtcaagtacggcatgggtggcctcatcatcctcttcctcatcgccatcatctggttcccgctgctcttcatgtcgctggtgcgctccgtggttggggttgtcaaccagcccatcgatgtcaccgtcaccctcaagctgggcggctatgagccgctgttcaccatgagcgcccagcagccgtccatcatccccttcacggcccaggcctatgaggagctgtcccggcagtttgacccccagccgctggccatgcagttcatcagccagtacagccctgaggacatcgtcacggcgcagattgagggcagctccggggcgctgtggcgcatcagtccccccagccgtgcccagatgaagcgggagctctacaacggcacggccgacatcaccctgcgcttcacctggaacttccagagggacctggcgaagggaggcactgtggagtatgccaacgagaagcacatgctggccctggcccccaacagcactgcacggcggcgttggatgcagtcaggggcgttggatgcagtcaggggcgttggatggcgtc

SEQ ID NO: 280009 - DNA, 5589 bp, Homo sapiens
ccatggacctgcgccctgagctgcccaccaccctgggccccgtcagcctgcgccagctggggctggagcacacccgctacccctgtctggaccttggtgccatgttgctctacaccctgaccttctggctcctgctgcgccagtttgtgaaagagaagctgctgaagtgggcagagtctccagctgcgctgacggaggtcaccgtggcagacacagagcctacgcggacgcagacgctgttgcagagcctgggggagctggtgaagggcgtgtacgccaagtactggatctatgtgtgtgctggcatgttcatcgtggtcagcttcgccggccgcctcgtggtctacaagattgtctacatgttcctcttcctgctctgcctcaccctcttccaggtctactacagcctgtggcggaagctgctcaaggccttctggtggctcgtggtggcctacaccatgctggtcctcatcgccgtctacaccttccagttccaggacttccctgcctactggcgcaacctcactggcttcaccgacgagcagctgggggacctgggcctggagcagttcagcgtatccgagctcttctccagcatcctggtgcccggcttcttcctcctggcctgcatcctgcagctgcactacttccacaggcccttcatgcagctcaccgacatggagcacgtgtccctgcctggcacgcgcctcccgcgctgggctcacaggcaggatgcagtgagtgggaccccactgctgcgggaggagcagcaggagcatcagcagcagcagcaggaggaggaggaggaggaggactccagggacgaggggctgggcgtggccactccccaccaggccacgcaggtgcctgaaggggcagccaagtggggcctggtggctgagcgcctgctggagctggcagccggcttctcggacgtcctctcacgcgtgcaggtgttcctgcggcggctgctggagcttcacgttttcaagctggtggccctgtacaccgtctgggtggccctgaaggaggtgtcggtgatgaacctgctgctggtggtgctgtgggccttcgccctgccctacccacgcttccggcccatggcctcctgcctgtccaccgtgtggacctgcgtcatcatcgtgtgtaagatgctgtaccagctcaaggttgtcaacccccaggagtattccagcaactgcaccgagcccttccccaacagcaccaacttgctgcccacggagatcagccagtccctgctgtaccgggggcccgtggaccctgccaactggtttggggtgcggaaagggttccccaacctgggctacatccagaaccacctgcaagtgctgctgctgctggtattcgaggccatcgtgtaccggcgccaggagcactaccgccggcagcaccagctggccccgctgcctgcccaggccgtgtttgccagcggcacccgccagcagctggaccaggatctgctcggctgcctcaagtacttcatcaacttcttcttctacaaattcgggctggagatctgcttcctgatggccgtgaacgtgatcgggcagcgcatgaactttctggtgaccctgcacggttgctggctggtggccatcctcacccgcaggcaccgccaggccattgcccgcctctggcccaactactgcctcttcctggcgctgttcctgctgtaccagtacctgctgtgcctggggatgcccccggccctgtgcattgattatccctggcgctggagccgggccgtccccatgaactccgcactcatcaagtggctgtacctgcctgatttcttccgggcccccaactccaccaacctcatcagcgactttctcctgctgctgtgcgcctcccagcagtggcaggtgttctcagctgagcgcacagaggagtggcagcgcatggctggcgtcaacaccgaccgcctggagccgctgcggggggagcccaaccccgtgcccaactttatccactgcaggtcctaccttgacatgctgaaggtggccgtcttccgatacctgttctggctggtgctggtggtggtgtttgtcacgggggccacccgcatcagcatcttcgggctgggctacctgctggcctgcttctacctgctgctcttcggcacggccctgctgcagagggacacacgggcccgcctcgtgctgtgggactgcctcattctgtacaacgtcaccgtcatcatctccaagaacatgctgtcgctcctggcctgcgtcttcgtggagcagatgcagaccggcttctgctgggtcatccagctcttcagccttgtatgcaccgtcaagggctactatgaccccaaggagatgatggacagagaccaggactgcctgctgcctgtggaggaggctggcatcatctgggacagcgtctgcttcttcttcctgctgctgcagcgccgcgtcttccttagccattactacctgcacgtcagggccgacctccaggccaccgccctgctagcctccaggggcttcgccctctacaacgctgccaacctcaagagcattgacttccaccgcaggatagaggagaagtccctggcccagctgaaaagacagatggagcgtatccgtgccaagcaggagaagcacaggcagggccgggtggaccgcagtcgcccccaggacaccctgggccccaaggaccccggcctggagccagggcccgacagtccagggggctcctccccgccacggaggcagtggtggcggccctggctggaccacgccacagtcatccactccggggactacttcctgtttgagtccgacagtgaggaagaggaggaggctgttcctgaagacccgaggccgtcggcacagagtgccttccagctggcgtaccaggcatgggtgaccaacgcccaggcggtgctgaggcggcggcagcaggagcaggagcaggcaaggcaggaacaggcaggacagctacccacaggaggtggtcccagccaggaggtggagccagcagagggccccgaggaggcagcggcaggccggagccatgtggtgcagagggtgctgagcacggcgcagttcctgtggatgctggggcaggcgctagtggatgagctgacacgctggctgcaggagttcacccggcaccacggcaccatgagcgacgtgctgcgggcagagcgctacctcctcacacaggagctcctgcagggcggcgaagtgcacaggggcgtgctggatcagctgtacacaagccaggccgaggccacgctgccaggccccaccgaggcccccaatgccccaagcaccgtgtccagtgtgggcttgtggctgctggagtgaagccactcaagcagcatgacatgactgaccattggtgcatgcccccctgagtcacctgtgctatcaacgacgctgcatgtggcatgtgaggagggcatgtcacctgaccccctgggggagctgttgagtgctcgggttgcctcttcttgtacgcacggggactcgattgcgggactgtgccatgccgacgcttgtgtccttgtgacatggcgcctcgctgcaattcccacgaagcttggcctggacgtgcgcaggagcttgtttgtgccggatgggcgccgtggccgggcgctgcggctgctgcgggccgtgtaccagtgtgtggccgcccactcggagctgctctgctacttcatcatcatcctcaaccacatggtcacggcctccgccggctcgctggtgctgcccgtgctcgtcttcctgtgggccatgctgtcgatcccgaggcccagcaagcgcttctggatgacggccatcgtcttcaccgagatcgcggtggtcgtcaagtacctgttccagtttgggttcttcccctggaacagccacgtggtgctgcggcgctacgagaacaagccctacttcccgccccgcatcctgggcctggagaagactgacggctacatcaagtacgacctggtgcagctcatggcccttttcttccaccgctcccagctgctgtgctatggcctctgggaccatgaggaggactcaccatccaaggagcatgacaagagcggcgaggaggagcagggagccgaggaggggccaggggtgcctgcggccaccaccgaagaccacattcaggtggaagcgagggtcggacccacggacgggaccccagaaccccaagtggagctcaggccccgtgatacgaggcgcatcagtctacgttttagaagaaggaagaaggagggcccagcacggaaaggagcggcagccatcgaagctgaggacagggaggaagaagagggggaggaagagaaagaggcccccacggggagagagaagaggccaagccgctctggaggaagagtaagggcggccgggcggcggctgcagggcttctgcctgtccctggcccagggcacatatcggccgctacggcgcttcttccacgacatcctgcacaccaagtaccgcgcagccaccgacgtctatgccctcatgttcctggctgatgttgtcgacttcatcatcatcatttttggcttctgggcctttgggaagcactcggcggccacagacatcacgtcctccctatcagacgaccaggtacccgaggctttcctggtcatgctgctgatccagttcagtaccatggtggttgaccgcgccctctacctgcgcaagaccgtgctgggcaagctggccttccaggtggcgctggtgctggccatccacctatggatgttcttcatcctgcccgccgtcactgagaggatgttcaaccagaatgtggtggcccagctctggtacttcgtgaagtgcatctacttcgccctgtccgcctaccagatccgctgcggctaccccacccgcatcctcggcaacttcctcaccaagaagtacaatcatctcaacctcttcctcttccaggggttccggctggtgccgttcctggtggagctgcgggcagtgatggactgggtgtggacggacaccacgctgtccctgtccagctggatgtgtgtggaggacatctatgccaacatcttcatcatcaaatgcagccgagagacagagaagaaatacccgcagcccaaagggcagaagaagaagaagatcgtcaagtacggcatgggtggcctcatcatcctcttcctcatcgccatcatctggttcccgctgctcttcatgtcgctggtgcgctccgtggttggggttgtcaaccagcccatcgatgtcaccgtcaccctcaagctgggcggctatgagcggagaccatgatcaagtggactcgtgagaaggagtaggagctgctgctggcgcccgagagggaaggagccggcctgctgggcagcgtggccacaaggggcggcactcctcaggccgggggagccactgccccgtccaaggccgccagctgtgatgcatcctcccggcctgcctgagccctgatgctgctgtcagagaaggacactgcgtccccacggcctgcgtggcgctgccgtcccccacgtgtactgtagagttttttttttaattaaaaaatgttttatttatacaaatggacaaaaaaaaaaca

SEQ ID NO: 280010 - DNA, 6160 bp, Homo sapiens
ccatggacctgcgccctgagctgcccaccaccctgggccccgtcagcctgcgccagctggggctggagcacacccgctacccctgtctggaccttggtgccatgttgctctacaccctgaccttctggctcctgctgcgccagtttgtgaaagagaagctgctgaagtgggcagagtctccagctgcgctgacggaggtcaccgtggcagacacagagcctacgcggacgcagacgctgttgcagagcctgggggagctggtgaagggcgtgtacgccaagtactggatctatgtgtgtgctggcatgttcatcgtggtcagcttcgccggccgcctcgtggtctacaagattgtctacatgttcctcttcctgctctgcctcaccctcttccaggtctactacagcctgtggcggaagctgctcaaggccttctggtggctcgtggtggcctacaccatgctggtcctcatcgccgtctacaccttccagttccaggacttccctgcctactggcgcaacctcactggcttcaccgacgagcagctgggggacctgggcctggagcagttcagcgtatccgagctcttctccagcatcctggtgcccggcttcttcctcctggcctgcatcctgcagctgcactacttccacaggcccttcatgcagctcaccgacatggagcacgtgtccctgcctggcacgcgcctcccgcgctgggctcacaggcaggatgcagtgagtgggaccccactgctgcgggaggagcagcaggagcatcagcagcagcagcaggaggaggaggaggaggaggactccagggacgaggggctgggcgtggccactccccaccaggccacgcaggtgcctgaaggggcagccaagtggggcctggtggctgagcgcctgctggagctggcagccggcttctcggacgtcctctcacgcgtgcaggtgttcctgcggcggctgctggagcttcacgttttcaagctggtggccctgtacaccgtctgggtggccctgaaggaggtgtcggtgatgaacctgctgctggtggtgctgtgggccttcgccctgccctacccacgcttccggcccatggcctcctgcctgtccaccgtgtggacctgcgtcatcatcgtgtgtaagatgctgtaccagctcaaggttgtcaacccccaggagtattccagcaactgcaccgagcccttccccaacagcaccaacttgctgcccacggagatcagccagtccctgctgtaccgggggcccgtggaccctgccaactggtttggggtgcggaaagggttccccaacctgggctacatccagaaccacctgcaagtgctgctgctgctggtattcgaggccatcgtgtaccggcgccaggagcactaccgccggcagcaccagctggccccgctgcctgcccaggccgtgtttgccagcggcacccgccagcagctggaccaggatctgctcggctgcctcaagtacttcatcaacttcttcttctacaaattcgggctggagatctgcttcctgatggccgtgaacgtgatcgggcagcgcatgaactttctggtgaccctgcacggttgctggctggtggccatcctcacccgcaggcaccgccaggccattgcccgcctctggcccaactactgcctcttcctggcgctgttcctgctgtaccagtacctgctgtgcctggggatgcccccggccctgtgcattgattatccctggcgctggagccgggccgtccccatgaactccgcactcatcaagtggctgtacctgcctgatttcttccgggcccccaactccaccaacctcatcagcgactttctcctgctgctgtgcgcctcccagcagtggcaggtgttctcagctgagcgcacagaggagtggcagcgcatggctggcgtcaacaccgaccgcctggagccgctgcggggggagcccaaccccgtgcccaactttatccactgcaggtcctaccttgacatgctgaaggtggccgtcttccgatacctgttctggctggtgctggtggtggtgtttgtcacgggggccacccgcatcagcatcttcgggctgggctacctgctggcctgcttctacctgctgctcttcggcacggccctgctgcagagggacacacgggcccgcctcgtgctgtgggactgcctcattctgtacaacgtcaccgtcatcatctccaagaacatgctgtcgctcctggcctgcgtcttcgtggagcagatgcagaccggcttctgctgggtcatccagctcttcagccttgtatgcaccgtcaagggctactatgaccccaaggagatgatggacagagaccaggactgcctgctgcctgtggaggaggctggcatcatctgggacagcgtctgcttcttcttcctgctgctgcagcgccgcgtcttccttagccattactacctgcacgtcagggccgacctccaggccaccgccctgctagcctccaggggcttcgccctctacaacgctgccaacctcaagagcattgacttccaccgcaggatagaggagaagtccctggcccagctgaaaagacagatggagcgtatccgtgccaagcaggagaagcacaggcagggccgggtggaccgcagtcgcccccaggacaccctgggccccaaggaccccggcctggagccagggcccgacagtccagggggctcctccccgccacggaggcagtggtggcggccctggctggaccacgccacagtcatccactccggggactacttcctgtttgagtccgacagtgaggaagaggaggaggctgttcctgaagacccgaggccgtcggcacagagtgccttccagctggcgtaccaggcatgggtgaccaacgcccaggcggtgctgaggcggcggcagcaggagcaggagcaggcaaggcaggaacaggcaggacagctacccacaggaggtggtcccagccaggaggtggagccagcagagggccccgaggaggcagcggcaggccggagccatgtggtgcagagggtgctgagcacggcgcagttcctgtggatgctggggcaggcgctagtggatgagctgacacgctggctgcaggagttcacccggcaccacggcaccatgagcgacgtgctgcgggcagagcgctacctcctcacacaggagctcctgcagggcggcgaagtgcacaggggcgtgctggatcagctgtacacaagccaggccgaggccacgctgccaggccccaccgaggcccccaatgccccaagcaccgtgtccagtgtgggcttgtggctgctggagtgaagccactcaagcagcatgacatgactgaccattggtgcatgcccccctgagtcacctgtgctatcaacgacgctgcatgtggcatgtgaggagggcatgtcacctgaccccctgggggagctgttgagtgctcgggttgcctcttcttgtacgcacggggactcgattgcgggactgtgccatgccgacgcttgtgtccttgtgacatggcgcctcgctgcaattcccacgaagcttggcctggacgtgcgcaggagcttgtttgtgccggatgggcgccgtggccgggcgctgcggctgctgcgggccgtgtaccagtgtgtggccgcccactcggagctgctctgctacttcatcatcatcctcaaccacatggtcacggcctccgccggctcgctggtgctgcccgtgctcgtcttcctgtgggccatgctgtcgatcccgaggcccagcaagcgcttctggatgacggccatcgtcttcaccgagatcgcggtggtcgtcaagtacctgttccagtttgggttcttcccctggaacagccacgtggtgctgcggcgctacgagaacaagccctacttcccgccccgcatcctgggcctggagaagactgacggctacatcaagtacgacctggtgcagctcatggcccttttcttccaccgctcccagctgctgtgctatggcctctgggaccatgaggaggactcaccatccaaggagcatgacaagagcggcgaggaggagcagggagccgaggaggggccaggggtgcctgcggccaccaccgaagaccacattcaggtggaagcgagggtcggacccacggacgggaccccagaaccccaagtggagctcaggccccgtgatacgaggcgcatcagtctacgttttagaagaaggaagaaggagggcccagcacggaaaggagcggcagccatcgaagctgaggacagggaggaagaagagggggaggaagagaaagaggcccccacggggagagagaagaggccaagccgctctggaggaagagtaagggcggccgggcggcggctgcagggcttctgcctgtccctggcccagggcacatatcggccgctacggcgcttcttccacgacatcctgcacaccaagtaccgcgcagccaccgacgtctatgccctcatgttcctggctgatgttgtcgacttcatcatcatcatttttggcttctgggcctttgggaagcactcggcggccacagacatcacgtcctccctatcagacgaccaggtacccgaggctttcctggtcatgctgctgatccagttcagtaccatggtggttgaccgcgccctctacctgcgcaagaccgtgctgggcaagctggccttccaggtggcgctggtgctggccatccacctatggatgttcttcatcctgcccgccgtcactgagaggatgttcaaccagaatgtggtggcccagctctggtacttcgtgaagtgcatctacttcgccctgtccgcctaccagatccgctgcggctaccccacccgcatcctcggcaacttcctcaccaagaagtacaatcatctcaacctcttcctcttccaggggttccggctggtgccgttcctggtggagctgcgggcagtgatggactgggtgtggacggacaccacgctgtccctgtccagctggatgtgtgtggaggacatctatgccaacatcttcatcatcaaatgcagccgagagacagagaaggtgcctgggcccagggcgggggccgggacaagggccagggatatgccctctccctaagacagaggcactgctgccacgagaacccgtggtgctggaggccctcccagggctcggagcccatggggacatgaggcgagcccacccactagctgatcacgaggccagtgatcttggcagctgcgagtgagtgctgggcgcagaagtgggcagcggagttggtcctgttccaggcaggctggcagcagagcagggcctggtgcagggaggaccggacagccactgtttgctgcattcttgtttaatggcctttctcagagagaattcgtgcgtcagaccactcccccacgtaaaaagtacaactcaggggtttctagtggattcacagttgagcatctgccttctcaccacttcaaaaagaaaccccgggccgggcacagcggctcacccctatcatcccagcactgtaagagacccaggagggaggtactgctcaaggccaggagttcaagatctgcacggccacaagcgagaccctgcctcagcaaatgtaaaaataaaacaattagctggcaatggcagctcatgcctatggtcccagcactttgggaggccaaaggaggaggatcagttgaggccaggagttttaagaccagcctgggcaacatagtgagtgagactctctctacaaaaaataaacgttagctgggtgtgatggtgcacacttgtgctcccagctactctggaggctgaggtgggaggatggcttgaggccaggagtacagggctgcattaagcctgatcacaccactgcactccagcttgggcaacagagtgagaccctgtctctaaaaaagcaaaaagaagaaacccagtgcccattggctgtcactcggtttcccctcccctgggccctagtaaccccttgtctaggtcctggttctatgagatttgcctacagtggatatttcatgaaaacaggctcagacagcgtttgtccttttgtaatcagctttcctcgctcagcatggtctccatctcagcctggtcaccatggtaccgagctcgattta

SEQ ID NO: 280011 - DNA, 755 bp, Homo sapiens
ggccgactacctcggcgtgcgtatccagctgcggagggagcagggtgcgggggccaccggcttcctcgaatggtgggtcatcgagctgcaggagtgccggaccgactgcaacctgctgcccatggtcattttcagtgacaaggtcagcccaccgagcctcggcttcctggctggctacgggtgagtgagtggctggggggcaccccgcagctcggggggctccgggcggccccaggactcaccagcttcccccgcagcatcatggggctgtacgtgtccatcgtgctggtcatcggcaagttcgtgcgcggattcttcagcgagatctcgcactccattatgttcgaggagctgccgtgcgtggaccgcatcctcaagctctgccaggacatcttcctggtgcgggagactcgggagctggagctggaggaggagttgtacgccaagctcatcttcctctaccgctcaccggagaccatgatcaagtggactcgtgagaaggagtaggagctgctgctggcgcccgagagggaaggagccggcctgctgggcagcgtggccacaaggggcggcactcctcaggccgggggagccactgccccgtccaaggccgccagctgtgatgcatcctcccggcctgcctgagccctgatgctgctgtcagagaaggacactgcgtccccacggcctgcgtggcgctgccgtcccccacgtgtactgtagagttttttttttaattaaaaaatgttttattt

SEQ ID NO: 280012 - DNA, 720 bp, Homo sapiens
ggcacgattacaggcttggttctgtttattgtcgcatcagcccttcagaatgctgtcagcaagactgctcacatttaaaggttgaagctgaagtactcattttacccatagcagaaacttcttacttataaagcaaaatataagttatttaattggaatttctagaaagtattggcaaagatgatgtttcttaaataaaataaatcagaaagaaaaaattacactctgccctgcttcttcctgcccattcatgatagacaatgtttatcttcacagcactcttcaacctcataccagtgggactacgtgttgttgccatccagggagtgaaaacagggttgtatatagccatgaatggagaaggttacctctacccatcagtaagtaagacgccaaagatctcggccattcgttcaatgcatgtaaaataacaatggcagcaacaacaaaaagaaagttctatgtctgttgtttctgccagtttttgccttagtatttgatctttgcgagaatgcttagaagctgtttattattcaccagtgtttagtaatatgagtttatctaaaggaagtgtaatactatgtcttaaatagtgcttttgccatattttaaaaaataacctagtatacacgtgaatctaatcttttgtatttctagttagaaatgcacttatcttagagagtttcttataatgtttttaaaagaaacaatatgaattct

SEQ ID NO: 280013 - DNA, 812 bp, Homo sapiens
ctatgtttgcctttcagatccccagctcaagggtatagtgaccaggttatattgcaggcaaggctactacttgcaaatgcaccccgatggagctctcgatggaaccaaggatgacagcactaattctacactcttcaacctcataccagtgggactacgtgttgttgccatccagggagtgaaaacagggttgtatatagccatgaatggagaaggttacctctacccatcagaactttttacccctgaatgcaagtttaaagaatctgtttttgaaaattattatgtaatctactcatccatgttgtacagacaacaggaatctggtagagcctggtttttgggattaaataaggaagggcaagctatgaaagggaacagagtaaagaaaaccaaaccagcagctcattttctacccaagccattggaagttgccatgtaccgagaaccatctttgcatgatgttggggaaacggtcccgaagcctggggtgacgccaagtaaaagcacaagtgcgtctgcaataatgaatggaggcaaaccagtcaacaagagtaagacaacatagccagatcctcacaggtgttgtgacttattcgtcctgagcacagttgagtgatttatcctcaccagacattcctgctccgtggctgaagagcagcaggaagtaagctaatgcttattctttgctgtctccgaacttctctgttgcaagtggataaatctcaacctgttgcaccccccacaacaagaagacacctggataaccagctaaactcagaccatggaatgccctaccagatatggaatgc

SEQ ID NO: 280014 - DNA, 988 bp, Homo sapiens
atggccgcggccatcgctagcggcttgatccgccagaagcggcaggcgcgggagcagcactgggaccggccgtctgccagcaggaggcggagcagccccagcaagaaccgcgggctctgcaacggcaacctggtggatatcttctccaaagtgcgcatcttcggcctcaagaagcgcaggttgcggcgccaagatccccagctcaagggtatagtgaccaggttatattgcaggcaaggctactacttgcaaatgcaccccgatggagctctcgatggaaccaaggatgacagcactaattctacactcttcaacctcataccagtgggactacgtgttgttgccatccagggagtgaaaacagggttgtatatagccatgaatggagaaggttacctctacccatcagaactttttacccctgaatgcaagtttaaagaatctgtttttgaaaattattatgtaatctactcatccatgttgtacagacaacaggaatctggtagagcctggtttttgggattaaataaggaagggcaagctatgaaagggaacagagtaaagaaaaccaaaccagcagctcattttctacccaagccattggaagttgccatgtaccgagaaccatctttgcatgatgttggggaaacggtcccgaagcctggggtgacgccaagtaaaagcacaagtgcgtctgcaataatgaatggaggcaaaccagtcaacaagagtaagacaacatagccagatcctcacaggtgttgtgacttattcgtcctgagcacagttgagtgatttatcctcaccagacattcctgctccgtggctgaagagcagcaggaagtaagctaatgcttattctttgctgtctccgaacttctctgttgcaagtggataaatctcaacctgttgcaccccccacaacaagaagacacctggataaccagctaaactcagaccatggaatgccctaccagatatggaatgc

SEQ ID NO: 280015 - DNA, 748 bp, Homo sapiens
atggccgcggccatcgctagcggcttgatccgccagaagcggcaggcgcgggagcagcactgggaccggccgtctgccagcaggaggcggagcagccccagcaagaaccgcgggctctgcaacggcaacctggtggatatcttctccaaagtgcgcatcttcggcctcaagaagcgcaggttgcggcgccaagatccccagctcaagggtatagtgaccaggttatattgcaggcaaggctactacttgcaaatgcaccccgatggagctctcgatggaaccaaggatgacagcactaattctacactcttcaacctcataccagtgggactacgtgttgttgccatccagggagtgaaaacagggttgtatatagccatgaatggagaaggttacctctacccatcagtaagtaagacgccaaagatctcggccattcgttcaatgcatgtaaaataacaatggcagcaacaacaaaaagaaagttctatgtctgttgtttctgccagtttttgccttagtatttgatctttgcgagaatgcttagaagctgtttattattcaccagtgtttagtaatatgagtttatctaaaggaagtgtaatactatgtcttaaatagtgcttttgccatattttaaaaaataacctagtatacacgtgaatctaatcttttgtatttctagttagaaatgcacttatcttagagagtttcttataatgtttttaaaagaaacaatatgaattct

SEQ ID NO: 280016 - DNA, 718 bp, Homo sapiens
caacgcctgatgaagcaacgttcccgccacagcatccaccttaaccttccaaatgccactgctgtgaagaggagccatcgcagatcgccatggcgacagagcccttctgacccaggggatccactgctctcaggcactgtccaaccgacacctggtgacagaggagcccgacagcctctggctgaccctctggagacagaagggcacacggctgccattttcgtcgatgcctcatcggggcagtcaggaagtgcacaggctgaatcacagattatcttcaggaacacaactgggtgacatggcaagtgcagtgaacaactcactctccaacatgcgccatcactatgctcaaaaggaacctattctcttctgttctatttactcattgcttcaactcatagaacccaaatggatgtgtgcagtgttcactaatatgaagaccctgaatcagagtcatagggagctgtgagagaattttctgcaacactggtattggctcatagcctgtgtccaataagggagctactggccacatgcagctattgtacacttgaaatgtgactagtggctacagaattagcacaactatgcatataagcataactaagcaataagcataactaagttagccttagaatagggataactccatcaccccaacttatatttctgggattacaggcacgcaccaccacacccagctaattttttttgtatt

SEQ ID NO: 280017 - DNA, 1347 bp, Homo sapiens
tatcggtctttccgctgctgctcccattgctgccaccagagccccctaacttcttgctccgctcaccgcgggaagtcgagtcctcaccaccacgggagcgtttggccttcactggcgagcgctcttttcccttcattgttgcgggtcgtcggaggtcgtctccgcggagctgagtaacccgccgccccgcgctcgtttcacacagcggaaccgcacgccgccatcttggactccgccgcggcacagggtcccgccccgcagtcctcattggccaattgctctctcttctacagtctcattgggaaaattatttgtctatctttacatctccccgcgctccaggaaggcgcccgcccaaccactgttattgggttcccaaccccctagtcggagtacctcattggttacatttgttgtctatcttaacggttcctcgcgccagactgtagctccgcccctcgcactctgcggtcacgtgacccaaagtgttgaggtgttgattggacaaaaagtctgccctgtaacggtacttcttgctcagtgacagcagcaacccacctccttatccctttcattggcttataaacccgtcctttaaaccactatttgggaggtcgggccatcagtttcggcgttttttccagagaggcaggctcacagcgatatcgcgagagacgggaattgctctgtcacgcaagctggagtgcagtggtgccatctcggctcactgtgacctctgcctcctgggctcaagccatcctcccacctcagcccttcaagtagctgggattacaggtcaccatcctctcactcgcctctgacttttcgcacaggagagagctggtcgaatagtacaattccccgatgtgaatggggagaagctggggaaaggaagaatgatcttcaggcagtaagggcccctactccagtatgattggtgtccttataaaaaggagaaattggacacagacaccctaccaagaagaacactatgtgaagatgaaggcagagatcagggtgatgcctctacttgctgagaaactcctacagttgccagcccaccactagaagcaaaggaagaagcacagccctcagaaggaaccaaccctgctaatgccttggtcttggacttgcagcctccagaacagcgagccaatacattcctgtggtttaagccactgactgtggcactttattacagcagcactaggaaactcatacaggaggtgacagtgctcagatgaaacaggaccttccacttccatggcaaagccctcatctttcgtgcccatgcgccatttgatctgcacacaaatcactgagcaggttcctcagctattattatcc

SEQ ID NO: 280018 - DNA, 891 bp, Homo sapiens
tatcggtctttccgctgctgctcccattgctgccaccagagccccctaacttcttgctccgctcaccgcgggaagtcgagtcctcaccaccacgggagcgtttggccttcactggcgagcgctcttttcccttcattgttgcgggtcgtcggaggtcgtctccgcggagctgagtaacccgccgccccgcgctcgtttcacacagcggaaccgcacgccgccatcttggactccgccgcggcacagggtcccgccccgcagtcctcattggccaattgctctctcttctacagtctcattgggaaaattatttgtctatctttacatctccccgcgctccaggaaggcgcccgcccaaccactgttattgggttcccaaccccctagtcggagtacctcattggttacatttgttgtctatcttaacggttcctcgcgccagactgtagctccgcccctcgcactctgcggtcacgtgacccaaagtgttgaggtgttgattggacaaaaagtctgccctgtaacggtacttcttgctcagtgacagcagcaacccacctccttatccctttcattggcttataaacccgtcctttaaaccactatttgggaggtcgggccatcagtttcggcgttttttccagagaggcaggctcacagcgatatcgcgagagacgggaattgctctgtcacgcaagctggagtgcagtggtgccatctcggctcactgtgacctctgcctcctgggctcaagccatcctcccacctcagcccttcaagtagctgggattacaggttgtaaaaaccccatcagggcagtgactgagtgtgtgtcactgtgtgcagcatccccagaacctaataccatgactgcatggaacaagcacccgg

SEQ ID NO: 280019 - DNA, 2278 bp, Homo sapiens
tatcggtctttccgctgctgctcccattgctgccaccagagccccctaacttcttgctccgctcaccgcgggaagtcgagtcctcaccaccacgggagcgtttggccttcactggcgagcgctcttttcccttcattgttgcgggtcgtcggaggtcgtctccgcggagctgagtaacccgccgccccgcgctcgtttcacacagcggaaccgcacgccgccatcttggactccgccgcggcacagggtcccgccccgcagtcctcattggccaattgctctctcttctacagtctcattgggaaaattatttgtctatctttacatctccccgcgctccaggaaggcgcccgcccaaccactgttattgggttcccaaccccctagtcggagtacctcattggttacatttgttgtctatcttaacggttcctcgcgccagactgtagctccgcccctcgcactctgcggtcacgtgacccaaagtgttgaggtgttgattggacaaaaagtctgccctgtaacggtacttcttgctcagtgacagcagcaacccacctccttatccctttcattggcttataaacccgtcctttaaaccactatttgggaggtcgggccatcagtttcggcgttttttccagagaggcaggctcacagcgatatcgcgagagacggtaagctccctctttcgaccccctttttccaactcctccggcggctaaaagaagtttaaatctgattggatgtcggcaaggaagttgataggctgaaataactgtccatcactcgcttaaaggggtaggcctgtataacggaggaggctgactgaaggtgaaagactagaacacgtgcttgctgtgcgacgtcacttagatgtcgcgagagggtgactgtgcgccagccccgcctccccgcgttttcggcgttctccccacaaacatttgttaagttccgtggggtgtttggctgtgcttcggcccttggagttcgaaacttctgagctccccgccgtcgtacctgtgccggccaaggggcggggcaggctttccggctgtcggggccctccagtccctcaggaagccgtcctgggacgcctagcggacaccattttacgtcgctgtggtagctgagtgaacagccggggggagccccgccccccgcgcgcgggagagcgccgcccgcggtcacctgggcccgcggggcagagagttcacggttcctgcagcctcgggtcatgctgacgcccccgggcggtgctaacacgtaacacgcgggacctcgagagctaagaagcagggcgactaagacgcagccctcgcccaggagcccgtctctcccgcgagctacccgttcccgcccaagtactccgggtaaccgaggggagtgaccgtcgctccccgcctcgtggcccgcgggcggagccggaactgtcgggacaccgcggacgtgtctttgggcggcatgttttatgttgcgaatctgtgtggatttttaaattctgtattcccctaaaatagcagtgtttttaatatgtaatgcttctaccctgaaaatcaccaagcgaaatttaggctccatgcagatatgtcacttgtttttccccctgtggcttcttgtatcccttggcactcttattgtgtgttaaaagccagcagcacaggcaccttgcggccgctccagatccacctcgtttggctccttcagtcgttcgccgtacaactttcctttccatagtgcgttactgtggcggacagagcacctgtgagaggtgcaggcgatgccgagcttaggggggtatggcctgtgccccagcactcgccggttgctggagggacgcagcgctgaggtcaccacagcctttagactgtctgcagccctcccaggttcgcgccggggcggaggttatgaggattcttgtattgatccggtcctcaaccctatttcccaagatccaatctatagtagagggtgtgaggtgtttttaaacgtgacatttttcaaggtaacaataatatcccaaaagctgaaacctaaacttaaaaactgtgttaagattagggactgtaacctaaatttagccttggctgagccatccttctttttgtaaataatcgtgaggaatgtgaagctggaggccttctatctcttgattagatcaaagaaactcgaaggaagaagctcaattgtaaagcataaaaatccacaatattgtaatgtgtagacatcttcattgtattaaaatgggaaataaaacttcataaggcataaaataatg

SEQ ID NO: 280020 - DNA, 298 bp, Homo sapiens
caacctagagactgtcactgctctttgacatattctgtcactttgcctccccaggtcaccatcctctcactcgcctctgacttttcgcacaggagagagctggtcgaatagtacaattccccgatgtgaatggggagaagctggggaaaggaagaatgatcttcaggcagtaagggtaagaggagccacttttcccatctgagtaaataccgagagaagatgaatgtgaggctcttggagattagctgtctgctgggagagaaacaccttcattgattaaatacaaaatctgttctgg

SEQ ID NO: 280021 - DNA, 476 bp, Homo sapiens
ccaggctggagtgcagtggtgagatcttggctcactgcaacctctgcctcccgggttcaagcgattctcctgcctcagcctcccgagtagctgaggcgaaaggattgcttgagcccaggaattggaggctgcagtgaggtgtcattatgcgactgcactccagcctgggtgacagagtaagaccttgtctctataagaagaagaagaaggaaggagaaggagaagaaagaggaggaggagagggagaaagcagaagaagaagaagaaggaggaagaggaggaggaggggaagaagaggaggaggaaaagaaagagagaaagaaaggaaggaaggaaggaaggaaggaaggaaggaaggaaggaaggaaggactgaccaccaccaagaagaacaagagcaggaagaggccttacagtagacggtgagggtgctgagaggcgaacggcccttgcccacactgttggtcccctggcacc

SEQ ID NO: 280022 - DNA, 2228 bp, Homo sapiens
acttccctttttccggtccgccggattatgaatgacggccggcgcgagtattttccacataagctggctgtcgtttttctcctggcctctgtggaggcgagtggtctgcgggcagcagctcccagaggcagccttggaattccagctcggactgggcgggaaggcgcaggcggcccaggtcgccgacacgctcacgcaccctccctgcctggccgcgcctctgcgaccaggtgacccaatgaaagaagaaaatgaaagccataaagaaaagtcttacagaagaagaatacctgtacctggacttttctcaccaaacagaaggatgcatctttcctcttcatacatctgtaactttatttctgttatcttactgtgactgtaaaatctttaaaatttgcttagttgtcaccaaagaggtgagtagagatagttcactactaagagatgacctgatccaggatgttgaaatacagattatttcaaggcaggagctcccaccaatagtccaaaattgctgtttgcctgcagtagtagaacgatcagacaatttttgtagagcaggacttgctgttgtattgagacacataatccagaaatcctatgaagcagaccccttaaagaaggaacttttggaacttctgggctttaaaaagacttgcttgaaagcctgtgctgaagttagtcagtggaccaggctatgtgaactcaccatccctttggctattgagaattttctcagagaatcttctgaccagcccccaactatacctgtagaaatactacagctagagaaaaagcttagtgagcctgttagagtgcataatgatgataaactccgcaggcagaagctcaagcaacagaaggctgatggagttgggcctccccttactaagggaaaggcaaagagcaaggtccacacacaggaaacatctgaagggttggattcttcatccaagagtctggaactgaaagtggcattctcaaagctcacagtacaggaagaaccagctactaccaacagagagccttctcacatcagaaaagcaaaagcctccgaccttccacctctggagcatgtgtttgcagaagggctttacttcactctggcagatattgtgctcttgccctgtatccatcatttcttggtaattatcagcaggaaattttctgagaagctggtagaatttccattgctagcctcttggtaccagaggattcaggaagtgccaggagtaaaaacagcagcttctaagtgtgggatccaatttctccatttaccaaagttgttgacaacctcaactgaacagcatccaaacttatgtgaagtcccaggtgtagaagagcaaagcgatcctttatttataggaggaccaagaccaaccatggccaagttaatggaaaagggcattgaagtgatgttttctccccacccttgccctacttggactcttgattggaatgttctccctgcagcagtcagcccaaaggaaggtaaaatgtccagtgatcgagctttgaggaagcagcaacagttgaacaaccttgtctatgtggtaacaaatcaggccaaacctggtgacagaattgtggatttctgcagcggtggggtattttatctctcctttcatcctttttagtctttctaagattatgagacttttctatattacattcaaggtcatgtttttatttggcaagattgtggtttcagaatgaggaaaagctgtggggaccaaagctaacttgtttgtcttactgactttttcagggccatgttggaattgtccttgctcacatgctgccatcatgtcaggtaaagccagaataagagataaaaggaaatattttaaaattatacagttcagctagccaaatttggtttatcccgctcttggagtttctagtcactcacccaagtcaaatatgtggcacaggcattgtcttttctttgaaataaactttcaagactcagaatcttaaggaaaaaaaagtaaagtaagatcataaaacatttatcaatttttaaaagaggtttataggtttaagtaatttttcaaagaagtagctattttattgctaaataaaataattatgattcaactagtttaattttcaatataattttaaatggaaatattgacctctgaaacttgctgagcatattcttttggtatcttgattttgatccattgcatcaaaattataacaatagcaaaattttttaaagc

SEQ ID NO: 280023 - DNA, 1505 bp, Homo sapiens
  misc_feature (1473)..(1473): n is a, c, g, or t
  misc_feature (1495)..(1495): n is a, c, g, or t
acttccctttttccggtccgccggattatgaatgacggccggcgcgagtattttccacataagctggctgtcgtttttctcctggcctctgtggaggcgagtggtctgcgggcagcagctcccagaggcagccttggaattccagctcggactgggcgggaaggcgcaggcggcccaggtcgccgacacgctcacgcaccctccctgcctggccgcgcctctgcgaccaggtgacccaatgaaagaagaaaatgaaagccataaagaaaagtcttacagaagaagaatacctgtacctggacttttctcaccaaacagaaggatgcatctttcctcttcatacatctgtaactttatttctgttatcttactgtgactgtaaaatctttaaaatttgcttagttgtcaccaaagaggtgagtagagatagttcactactaagagatgacctgatccaggatgttgaaatacagattatttcaaggcaggagctcccaccaatagtccaaaattgctgtttgcctgcagtagtagaacgatcagacaatttttgtagagcaggacttgctgttgtattgagacacataatccagaaatcctatgaagcagaccccttaaagaaggaacttttggaacttctgggctttaaaaagacttgcttgaaagcctgtgctgaagttagtcagtggaccaggctatgtgaactcaccatccctttggctattgagaattttctcagagaatcttctgaccagcccccaactatacctgtagaaatactacagctagagaaaaagcttagtgagcctgttagagtgcataatgatgataaactccgcaggcagaagctcaagcaacagaaggctgatggagttgggcctccccttactaagggaaaggcaaagagcaaggtccacacacaggaaacatctgaagggttggattcttcatccaagagtctggaactgaaagtggcattctcaaagctcacagtacaggaagaaccagctactaccaacagagagccttctcacatcagaaaagcaaaagcctccgaccttccacctctggagcatgtgtttgcagaagggctttacttcactctggcagatattgtgctcttgccctgtatccatcatttcttggtaattatcagcaggaaattttctgagaagctggtagaatttccattgctagcctcttggtaccagaggattcaggaagtgccaggagtaaaaacagcagcttctaagtgtgggatccaatttctccatttaccaaagttgttgacaacctcaactgaacagcatccaaacttatgtgaagtcccaggtgtagaagagcaaagcgatcctttatttataggaggaccaagaccaaccatggccaagttaatggaaaagggcattgaagtgatgttttctccccacccttgccctacttggactcttgattggaatgttctccctgcanctcgaaagcgccaagggggggntcctctagag

SEQ ID NO: 280024 - DNA, 1692 bp, Homo sapiens
acttccctttttccggtccgccggattatgaatgacggccggcgcgagtattttccacataagctggctgtcgtttttctcctggcctctgtggaggcgagtggtctgcgggcagcagctcccagaggcagccttggaattccagctcggactgggcgggaaggcgcaggcggcccaggtcgccgacacgctcacgcaccctccctgcctggccgcgcctctgcgaccaggtgacccaatgaaagaagaaaatgaaagccataaagaaaagtcttacagaagaagaatacctgtacctggacttttctcaccaaacagaaggatgcatctttcctcttcatacatctgtaactttatttctgttatcttactgtgactgtaaaatctttaaaatttgcttagttgtcaccaaagaggtgagtagagatagttcactactaagagatgacctgatccaggatgttgaaatacagattatttcaaggcaggagctcccaccaatagtccaaaattgctgtttgcctgcagtagtagaacgatcagacaatttttgtagagcaggacttgctgttgtattgagacacataatccagaaatcctatgaagcagaccccttaaagaaggaacttttggaacttctgggctttaaaaagacttgcttgaaagcctgtgctgaagttagtcagtggaccaggctatgtgaactcaccatccctttggctattgagaattttctcagagaatcttctgaccagcccccaactatacctgtagaaatactacagctagagaaaaagcttagtgagcctgttagagtgcataatgatgataaactccgcaggcagaagctcaagcaacagaaggctgatggagttgggcctccccttactaagggaaaggcaaagagcaaggtccacacacaggaaacatctgaagggttggattcttcatccaagagtctggaactgaaagtggcattctcaaagctcacagtacaggaagaaccagctactaccaacagagagccttctcacatcagaaaagcaaaagcctccgaccttccacctctggagcatgtgtttgcagaagggctttacttcactctggcagatattgtgctcttgccctgtatccatcatttcttggtaattatcagcaggaaattttctgagaagctggtagaatttccattgctagcctcttggtaccagaggattcaggaagtgccaggagtaaaaacagcagcttctaagtgtgggatccaatttctccatttaccaaagttgttgacaacctcaactgaacagcatccaaacttatgtgaagtcccaggtgtagaagagcaaagcgatcctttatttataggaggaccaagaccaaccatggccaagttaatggaaaagggcattgaagtgatgttttctccccacccttgccctacttggactcttgattggaatgttctccctgcagcagtcagcccaaaggaaggtgagagcacacaccttgaactgagaccagcaggattcaaatcctggctccatcatggagtaactatgtgaccaaagcaagctacttcattatttttgtttacatttttcatctgataatgcaataacagtacccaacctcattgagctgttacaaaaaaggattgatataataaataaaatatgcttagcacatcgtaat

SEQ ID NO: 280025 - DNA, 1771 bp, Homo sapiens
acttccctttttccggtccgccggattatgaatgacggccggcgcgagtattttccacataagctggctgtcgtttttctcctggcctctgtggaggcgagtggtctgcgggcagcagctcccagaggcagccttggaattccagctcggactgggcgggaaggcgcaggcggcccaggtcgccgacacgctcacgcaccctccctgcctggccgcgcctctgcgaccaggtgacccaatgaaagaagaaaatgaaagccataaagaaaagtcttacagaagaagaatacctgtacctggacttttctcaccaaacagaaggatgcatctttcctcttcatacatctgtaactttatttctgttatcttactgtgactgtaaaatctttaaaatttgcttagttgtcaccaaagaggtgagtagagatagttcactactaagagatgacctgatccaggatgttgaaatacagattatttcaaggcaggagctcccaccaatagtccaaaattgctgtttgcctgcagtagtagaacgatcagacaatttttgtagagcaggacttgctgttgtattgagacacataatccagaaatcctatgaagcagaccccttaaagaaggaacttttggaacttctgggctttaaaaagacttgcttgaaagcctgtgctgaagttagtcagtggaccaggctatgtgaactcaccatccctttggctattgagaattttctcagagaatcttctgaccagcccccaactatacctgtagaaatactacagctagagaaaaagcttagtgagcctgttagagtgcataatgatgataaactccgcaggcagaagctcaagcaacagaaggctgatggagttgggcctccccttactaagggaaaggcaaagagcaaggtccacacacaggaaacatctgaagggttggattcttcatccaagagtctggaactgaaagtggcattctcaaagctcacagtacaggaagaaccagctactaccaacagagagccttctcacatcagaaaagcaaaagcctccgaccttccacctctggagcatgtgtttgcagaagggctttacttcactctggcagatattgtgctcttgccctgtatccatcatttcttggtaattatcagcaggaaattttctgagaagctggtagaatttccattgctagcctcttggtaccagaggattcaggaagtgccaggagtaaaaacagcagcttctaagtgtgggatccaatttctccatttaccaaagttgttgacaacctcaactgaacagcatccaaacttatgtgaagtcccaggtgtagaagagcaaagcgatcctttatttataggaggaccaagaccaaccatggccaagttaatggaaaagggcattgaagtgatgttttctccccacccttgccctacttggactcttgattggaatgttctccctgcagcagtcagcccaaaggaagggtttgaacagttgaccgcatgtgattggctgaaactcggatgcaatgattggctgagacttggctacttgttataagagtgagagcacacaccttgaactgagaccagcaggattcaaatcctggctccatcatggagtaactatgtgaccaaagcaagctacttcattatttttgtttacatttttcatctgataatgcaataacagtacccaacctcattgagctgttacaaaaaaggattgatataataaataaaatatgcttagcacatcgtaat

SEQ ID NO: 280026 - DNA, 1329 bp, Homo sapiens
  misc_feature (1297)..(1297): n is a, c, g, or t
  misc_feature (1319)..(1319): n is a, c, g, or t
aacagatgattccctgattctccagagagattacacacttcgtttgtggctaaggtgacccaatgaaagaagaaaatgaaagccataaagaaaagtcttacagaagaagaatacctgtacctggacttttctcaccaaacagaaggatgcatctttcctcttcatacatctgtaactttatttctgttatcttactgtgactgtaaaatctttaaaatttgcttagttgtcaccaaagaggtgagtagagatagttcactactaagagatgacctgatccaggatgttgaaatacagattatttcaaggcaggagctcccaccaatagtccaaaattgctgtttgcctgcagtagtagaacgatcagacaatttttgtagagcaggacttgctgttgtattgagacacataatccagaaatcctatgaagcagaccccttaaagaaggaacttttggaacttctgggctttaaaaagacttgcttgaaagcctgtgctgaagttagtcagtggaccaggctatgtgaactcaccatccctttggctattgagaattttctcagagaatcttctgaccagcccccaactatacctgtagaaatactacagctagagaaaaagcttagtgagcctgttagagtgcataatgatgataaactccgcaggcagaagctcaagcaacagaaggctgatggagttgggcctccccttactaagggaaaggcaaagagcaaggtccacacacaggaaacatctgaagggttggattcttcatccaagagtctggaactgaaagtggcattctcaaagctcacagtacaggaagaaccagctactaccaacagagagccttctcacatcagaaaagcaaaagcctccgaccttccacctctggagcatgtgtttgcagaagggctttacttcactctggcagatattgtgctcttgccctgtatccatcatttcttggtaattatcagcaggaaattttctgagaagctggtagaatttccattgctagcctcttggtaccagaggattcaggaagtgccaggagtaaaaacagcagcttctaagtgtgggatccaatttctccatttaccaaagttgttgacaacctcaactgaacagcatccaaacttatgtgaagtcccaggtgtagaagagcaaagcgatcctttatttataggaggaccaagaccaaccatggccaagttaatggaaaagggcattgaagtgatgttttctccccacccttgccctacttggactcttgattggaatgttctccctgcanctcgaaagcgccaagggggggntcctctagag

SEQ ID NO: 280027 - DNA, 250 bp, Homo sapiens
atctccagttccaagtctagatgtaatatattaagaaacagatcaactttggcagtcaagatgaaaatatactgaatcatgaatgtttgcatttggtgatcggggcttcatagagaacatattgagggattcttgtgctggcaccagctgcttaaccatcaaggattctgttatgaaatactattcctggaagaaggccttttgaggaatgaagtatatcctctttgagagtctcgccttgttgcccagg

SEQ ID NO: 280028 - DNA, 412 bp, Homo sapiens
acaagagtcttgctctgtcacccaggctggaatgcaatggtgtgaccttggctcaatgcaacctctgcctcctgggctcaagcaattctcctgcctcagcctcctgagtagctggaattacagagatggggtctagctgtgttgcccaggctgaagtccagtggcttttcacaggcacagtcataccacactgaatcttgaactcctgagatcaagcaatcctcctgcctcagcttccaaagtagctggaattacaagtgctggccactctgcctggttacaattctttttattgctgaataatattccattatgtggatatcctatactttgcttatctattcatcagttgatggacatttgggttgtttctactgtttggctattattaacactgctgtgaacatgtaca

SEQ ID NO: 280029 - DNA, 2765 bp, Homo sapiens
  misc_feature (118)..(118): n is a, c, g, or t
tgctttcccgtttcttaaacattggcgttcccaagtttctccttggtcctcctgtcatttttatctactctcgtagcttcaaataccatctagtttatagtttatttagcatgttgtncaagccaccgtcttgggcccagggctctacctgtagcttttcatccacacttctcaggttgcttcttacacagcgccatagtagttaaaatacggtctggggatagtcgtctcttcatcagtctcccccgacgacctgcgcaggcgtggcttgaggaaacgcccgctgtgggcggagccacccgaaaggctccggtcgggggcgggaacaggatcggcccgcgggctggcgtcgataggctgccgcagagacagggcgggctctgctaagggacgcgcctcgccgtggggcggtgcctgcgcctgagcctctacgagagggaaggaacgctgctccgagctccgcgtcgcgtcgcgtagattcgcgtcgccgtcgacctcagaggcggggccggaagcgctacggtttgacccccgagtccctctgttcccgaaggggcggccgtctttctcccgacccgctccgcctcctctccttcttccccattacccggaggccgaagcccccagccagggcggggcggcgcagcccgagctcccggacccggaagaagcgccatctcccgcctccaccatggagcccaccgcaccgtccctcaccgaggaggacctcactgaagtgaagaaggacgccttagaaaatttacgtgtatacctgtgtgagaaaatcatagctgagagacattttgatcatctacgtgcaaaaaaaatactcagtagagaagacactgaagaaatttcttgtcgaacatcaagtagaaaaagggctggaaaattgttagactacttacaggaaaacccaaaaggtctggacacccttgttgaatctattcggcgagaaaaaacacagaacttcctgatacagaagattacagatgaagtgctgaaacttagaaatataaaactagaacatctgaaaggactaaaatgtagcagttgtgaaccttttccagatggagccacgaacaacctctccagatcaaattcagatgagagtaatttctctgaaaaactgagggcatccactgtcatgtaccatccagaaggagaatccagcacgacgccctttttttctactaattcttctctgaatttgcctgttctagaagtaggcagaactgaaaataccatcttctcttcaactacacttcccagacctggggacccaggggctcctcctttgccaccagatctacagttagaagaagaaggaacttgtgcaaactctagtgagatgtttcttcccttaagatcacgtactgtttcacgacaatgacactttattgccttttaatttttaatgatgacaaaaaatgttttaaagaatatgactttttataaaatggctgtaatcatttgtttacatttgatgcatgtcttttaaaatgcaatgtaagcatactttgtaaataggatttttagaattaaaaaagcatacttctaggatagctaactgtaaatcatgttgatcatgtactttttagtaatttctttttttcctttttaaggtctttcagtacttttttaaatattttctattttaagactgattttaatagggaatatatctctatttgagaatagacccttactaggaagaacgttttttcctcagtgcatttgtgctagaaattttcaagagtctaatagtctttgccagtcattcagcagcaaattttcagcattaagctgttcctgttcagtaataaaaccggtcactgatgggaaaactgccaatatagaaaaataaaaatctcttttccactccattgtcgtataggcatgtaaacagcctctttttgatactggaggaacacttgatggagtgtgagccacctaagatctcggtttgccaaaattcatttctaattaaccttactaattatactactttgttaggattttcacattcttggcttaatcattttcattcctaaagaaaaatatcttggcctaaacctcagttattacatgtaatttgatgaggtattttttccttttttctttttttttttttttgagacagtcttgctctatcgcccaggctggagtgcagtggcgcattctaggctcactgcaacttctgcctcccatgcttacgtgatcctctcacctcagcctctcaagtaatatagctgagactacaagtgtgtgccaccatgcctcactaatttttgtattatttttgtagagacggtgttttgccatgttggccaggctggtcttgaactcctggactcaagcaacctacccagcgtggcctcccaaagtgctgggattacagacacgagccacctcacctagcctgatgagatttttaaaaaatattttctctgtacttttcattctcttttaatgaggaccaatgtacagttgaaataactggaacaaattatttttggtgtgtgtgacaattctgtttttaatgctatttgaacaagtgggccattagccagatttgtctttttgttgtaaaacaaaatttgactaattttacatgtttataaatcttatgctctcactgtttgtttttatttaaattacaattttatctgtttcctgacattgtctcctatatatttctattattaattgcaaaaacatagaaatggaaattttgctatcaacaataaaatttttttaaagta

SEQ ID NO: 280030 - DNA, 407 bp, Homo sapiens
caggtgaaagaaagaaaacccaccttctatgctgggattacagacacgagccacctcacctagcctgatgagatttttaaaaaatattttctctgtacttttcattctcttttaatgaggaccaatgtacagttgaaataactggaacaaattatttttggtgtgtgtgacaattctgtttttaatgctatttgaacaagtgggccattagccagatttgtctttttgttgtaaaacaaaatttgactaattttacatgtttataaatcttatgctctcactgtttgtttttatttaaattacaattttatctgtttcctgacattgtctcctatatatttctattattaattgcaaaaacatagaaatggaaattttgctatcaacaataaaatttttttaaagta

SEQ ID NO: 280031 - DNA, 536 bp, Homo sapiens
tgcacacgccgagtacccagacctgatggcaagtctgatggacgaagttgttgccacgccgagggaccatacctagcctgatgagatttttaaaaaatattttctctgtacttttcattctcttttaatgaggaccaatgtacagttgaaataactggaacaaattatttttggtgtgtgtgacaattctgtttttaatgctatttgaacaagtgggccattagccagatttgtctttttgttgtaaaacaaaatttgactaattttacatgtttataaatcttatgctctcactgtttgtttttatttaaattacaattttatctgtttcctgacattgtctcctatatatttctattattaattgcaaaaacatagaaatggaaattttgctatcaacaataaaatttttttaaagtagtgagtgctattttggagttccaaattttcagtaggaagtatctaaaactttttttaatacgtgccattatctatagaaaacattacttcaggttgtgagattgagttgcatttct

SEQ ID NO: 280032 - DNA, 2812 bp, Homo sapiens
tttttttttcaaaaatttgtttagtattgtagttaggctgtttgtgtgtatgcatgtgtatgtgtgtatgagtgcgtttgtgtgtgaccaaaacagtaactggcaaacgtaacaacaggaaattgtagggcagggtctgggaaaaggggaggaacccaaggtactgacaagcccagaccggactcccccgaagtgagcaggcagcaaaggctgagagtgccagctgcctgggcactgacggaccccacccacggaaacgatgccttatgaggaagctaacccgggccacttaccgacgacctgcgcaggcgtggcttgaggaaacgcccgctgtgggcggagccacccgaaaggctccggtcgggggcgggaacaggatcggcccgcgggctggcgtcgataggctgccgcagagacagggcgggctctgctaagggacgcgcctcgccgtggggcggtgcctgcgcctgagcctctacgagagggaaggaacgctgctccgagctccgcgtcgcgtcgcgtagattcgcgtcgccgtcgacctcagaggcggggccggaagcgctacggtttgacccccgagtccctctgttcccgaaggggcggccgtctttctcccgacccgctccgcctcctctccttcttccccattacccggaggccgaagcccccagccagggcggggcggcgcagcccgagctcccggacccggaagaagcgccatctcccgcctccaccatggagcccaccgcaccgtccctcaccgaggaggacctcactgaagtgaagaaggacgccttagaaaatttacgtgtatacctgtgtgagaaaatcatagctgagagacattttgatcatctacgtgcaaaaaaaatactcagtagagaagacactgaagaaatttcttgtcgaacatcaagtagaaaaagggctggaaaattgttagactacttacaggaaaacccaaaaggtctggacacccttgttgaatctattcggcgagaaaaaacacagaacttcctgatacagaagattacagatgaagtgctgaaacttagaaatataaaactagaacatctgaaaggactaaaatgtagcagttgtgaaccttttccagatggagccacgaacaacctctccagatcaaattcagatgagagtaatttctctgaaaaactgagggcatccactgtcatgtaccatccagaaggagaatccagcacgacgccctttttttctactaattcttctctgaatttgcctgttctagaagtaggcagaactgaaaataccatcttctcttcaactacacttcccagacctggggacccaggggctcctcctttgccaccagatctacagttagaagaagaaggaacttgtgcaaactctagtgagatgtttcttcccttaagatcacgtactgtttcacgacaatgacactttattgccttttaatttttaatgatgacaaaaaatgttttaaagaatatgactttttataaaatggctgtaatcatttgtttacatttgatgcatgtcttttaaaatgcaatgtaagcatactttgtaaataggatttttagaattaaaaaagcatacttctaggatagctaactgtaaatcatgttgatcatgtactttttagtaatttctttttttcctttttaaggtctttcagtacttttttaaatattttctattttaagactgattttaatagggaatatatctctatttgagaatagacccttactaggaagaacgttttttcctcagtgcatttgtgctagaaattttcaagagtctaatagtctttgccagtcattcagcagcaaattttcagcattaagctgttcctgttcagtaataaaaccggtcactgatgggaaaactgccaatatagaaaaataaaaatctcttttccactccattgtcgtataggcatgtaaacagcctctttttgatactggaggaacacttgatggagtgtgagccacctaagatctcggtttgccaaaattcatttctaattaaccttactaattatactactttgttaggattttcacattcttggcttaatcattttcattcctaaagaaaaatatcttggcctaaacctcagttattacatgtaatttgatgaggtattttttccttttttctttttttttttttttgagacagtcttgctctatcgcccaggctggagtgcagtggcgcattctaggctcactgcaacttctgcctcccatgcttacgtgatcctctcacctcagcctctcaagtaatatagctgagactacaagtgtgtgccaccatgcctcactaatttttgtattatttttgtagagacggtgttttgccatgttggccaggctggtcttgaactcctggactcaagcaacctacccagcgtggcctcccaaagtgctgggattacagacacgagccacctcacctagcctgatgagatttttaaaaaatattttctctgtacttttcattctcttttaatgaggaccaatgtacagttgaaataactggaacaaattatttttggtgtgtgtgacaattctgtttttaatgctatttgaacaagtgggccattagccagatttgtctttttgttgtaaaacaaaatttgactaattttacatgtttataaatcttatgctctcactgtttgtttttatttaaattacaattttatctgtttcctgacattgtctcctatatatttctattattaattgcaaaaacatagaaatggaaattttgctatcaacaataaaatttttttaaagta

SEQ ID NO: 280033 - DNA, 1893 bp, Homo sapiens
tttttttttcaaaaatttgtttagtattgtagttaggctgtttgtgtgtatgcatgtgtatgtgtgtatgagtgcgtttgtgtgtgaccaaaacagtaactggcaaacgtaacaacaggaaattgtagggcagggtctgggaaaaggggaggaacccaaggtactgacaagcccagaccggactcccccgaagtgagcaggcagcaaaggctgagagtgccagctgcctgggcactgacggaccccacccacggaaacgatgccttatgaggaagctaacccgggccacttaccgacgacctgcgcaggcgtggcttgaggaaacgcccgctgtgggcggagccacccgaaaggctccggtcgggggcgggaacaggatcggcccgcgggctggcgtcgataggctgccgcagagacagggcgggctctgctaagggacgcgcctcgccgtggggcggtgcctgcgcctgagcctctacgagagggaaggaacgctgctccgagctccgcgtcgcgtcgcgtagattcgcgtcgccgtcgacctcagaggcggggccggaagcgctacggtttgacccccgagtccctctgttcccgaaggggcggccgtctttctcccgacccgctccgcctcctctccttcttccccattacccggaggccgaagcccccagccagggcggggcggcgcagcccgagctcccggacccggaagaagcgccatctcccgcctccaccatggagcccaccgcaccgtccctcaccgaggaggacctcactgaagtgaagaaggacgccttagaaaatttacgtgtatacctgtgtgagaaaatcatagctgagagacattttgatcatctacgtgcaaaaaaaatactcagtagagaagacactgaagaaatttcttgtcgaacatcaagtagaaaaagggctggaaaattgttagactacttacaggaaaacccaaaaggtctggacacccttgttgaatctattcggcgagaaaaaacacagaacttcctgatacagaagattacagatgaagtgctgaaacttagaaatataaaactagaacatctgaaaggactaaaatgtagcagttgtgaaccttttccagatggagccacgaacaacctctccagatcaaattcagatgagagtaatttctctgaaaaactgagggcatccactgtcatgtaccatccagaaggagaatccagcacgacgccctttttttctactaattcttctctgaatttgcctgttctagaagtaggcagaactgaaaataccatcttctcttcaactacacttcccagacctggggacccaggggctcctcctttgccaccagatctacagttagaagaagaaggaacttgtgcaaactctagtgagatgtttcttcccttaagatcacgtactgtttcacgacaatgacactttattgccttttaatttttaatgatgacaaaaaatgttttaaagaatatgactttttataaaatggctgtaatcatttgtttacatttgatgcatgtcttttaaaatgcaatgtaagcatactttgtaaataggatttttagaattaaaaaagcatacttctaggatagctaactgtaaatcatgttgatcatgtactttttagtaatttctttttttcctttttaaggtctttcagtacttttttaaatattttctattttaagactgattttaatagggaatatatctctatttgagaatagacccttactaggaagaacgttttttcctcagtgcatttgtgctagaaattttcaaaatcctgtctgtcctatcaacacgacccaagtttgattcatagcatcatacttcctttgtacaaaccatgtttgtagtacatataatgtt

SEQ ID NO: 280034 - DNA, 450 bp, Homo sapiens
cccgctcggcgtaacgcactacagcccagaactcctggactcaagcaacctacccagcgtggcctcccaaagtgctgggattacagacacgagccacctcacctagcctgatgagatttttaaaaaatattttctctgtacttttcattctcttttaatgaggaccaatgtacagttgaaataactggaacaaattatttttggtgtgtgtgacaattctgtttttaatgctatttgaacaagtgggccattagccagatttgtctttttgttgtaaaacaaaatttgactaattttacatgtttataaatcttatgctctcactgtttgtttttatttaaattacaattttatctgtttcctgacattgtctcctatatatttctattattaattgcaaaaacatagaaatggaaattttgctatcaacaataaaatttttttaaagta

SEQ ID NO: 280035 - DNA, 453 bp, Homo sapiens
gccttagaaaatttacgtgtatacctgtgtgagaaaatcatagctgagagacattttgatcatctacgtgcaaaaaaaatactcagtagagaagacactgaagaaatttcttgtcgaacatcaagtagaaaaagggctggaaaattgttagactacttacaggaaaacccaaaaggtctggacacccttgttgaatctattcggcgagaaaaaacacagaacttcctgatacagaagattacagatgaagtgctgaaacttagaaatataaaactagaacatctgaaaggtaagatatcttaattatctaagagctaatttaaatgtaataatgcttttaaaaaatgcagagcaggccaggtgcctgcactttaggaggccaaggcaggaggattgcttgaggtcaggagttttgagaccagcctgggcaacatagcgagactttgtctctac

SEQ ID NO: 280036 - DNA, 2881 bp, Homo sapiens
  misc_feature (118)..(118): n is a, c, g, or t
tgctttcccgtttcttaaacattggcgttcccaagtttctccttggtcctcctgtcatttttatctactctcgtagcttcaaataccatctagtttatagtttatttagcatgttgtncaagccaccgtcttgggcccagggctctacctgtagcttttcatccacacttctcaggttgcttcttacacagcgccatagtagttaaaatacggtctggggatagtcgtctcttcatcagtctcccccgacgacctgcgcaggcgtggcttgaggaaacgcccgctgtgggcggagccacccgaaaggctccggtcgggggcgggaacaggatcggcccgcgggctggcgtcgataggctgccgcagagacagggcgggctctgctaagggacgcgcctcgccgtggggcggtgcctgcgcctgagcctctacgagagggaaggaacgctgctccgagctccgcgtcgcgtcgcgtagattcgcgtcgccgtcgacctcagaggcggggccggaagcgctacggtttgacccccgagtccctctgttcccgaaggggcggccgtctttctcccgacccgctccgcctcctctccttcttccccattacccggaggccgaagcccccagccagggcggggcggcgcagcccgagctcccggacccggaagaagcgccatctcccgcctccaccatggagcccaccgcaccgtccctcaccgaggaggacctcactgaagtgaagaaggacgccttagaaaatttacgtgtatacctgtgtgagaaaatcatagctgagagacattttgatcatctacgtgcaaaaaaaatactcagtagagaagacactgaagaaatttcttgtcgaacatcaagtagaaaaagggctggaaaattgttagactacttacaggaaaacccaaaaggtctggacacccttgttgaatctattcggcgagaaaaaacacagaacttcctgatacagaagattacagatgaagtgctgaaacttagaaatataaaactagaacatctgaaaggactaaaatgtagcagttgtgaaccttttccagatggagccacgaacaacctctccagatcaaattcagatgagagtaatttctctgaaaaactgagggcatccactgtcatgtaccatccagaaggagaatccagcacgacgccctttttttctactaattcttctctgaatttgcctgttctagaagtaggcagaactgaaaataccatcttctcttcaactacacttcccagacctggggacccaggggctcctcctttgccaccagatctacagttagaagaagaaggaacttgtgcaaactctagtgagatgtttcttcccttaagatcacgtactgtttcacgacaatgacactttattgccttttaatttttaatgatgacaaaaaatgttttaaagaatatgactttttataaaatggctgtaatcatttgtttacatttgatgcatgtcttttaaaatgcaatgtaagcatactttgtaaataggatttttagaattaaaaaagcatacttctaggatagctaactgtaaatcatgttgatcatgtactttttagtaatttctttttttcctttttaaggtctttcagtacttttttaaatattttctattttaagactgattttaatagggaatatatctctatttgagaatagacccttactaggaagaacgttttttcctcagtgcatttgtgctagaaattttcaagagtctaatagtctttgccagtcattcagcagcaaattttcagcattaagctgttcctgttcagtaataaaaccggtcactgatgggaaaactgccaatatagaaaaataaaaatctcttttccactccattgtcgtataggcatgtaaacagcctctttttgatactggaggaacacttgatggagtgtgagccacctaagatctcggtttgccaaaattcatttctaattaaccttactaattatactactttgttaggattttcacattcttggcttaatcattttcattcctaaagaaaaatatcttggcctaaacctcagttattacatgtaatttgatgaggtattttttccttttttctttttttttttttttgagacagtcttgctctatcgcccaggctggagtgcagtggcgcattctaggctcactgcaacttctgcctcccatgcttacgtgatcctctcacctcagcctctcaagtaatatagctgagactacaagtgtgtgccaccatgcctcactaatttttgtattatttttgtagagacggtgttttgccatgttggccaggctggtcttgaactcctggactcaagcaacctacccagcgtggcctcccaaagtgctgggattacagacacgagccacctcacctagcctgatgagatttttaaaaaatattttctctgtacttttcattctcttttaatgaggaccaatgtacagttgaaataactggaacaaattatttttggtgtgtgtgacaattctgtttttaatgctatttgaacaagtgggccattagccagatttgtctttttgttgtaaaacaaaatttgactaattttacatgtttataaatcttatgctctcactgtttgtttttatttaaattacaattttatctgtttcctgacattgtctcctatatatttctattattaattgcaaaaacatagaaatggaaattttgctatcaacaataaaatttttttaaagtagtgagtgctattttggagttccaaattttcagtaggaagtatctaaaactttttttaatacgtgccattatctatagaaaacattacttcaggttgtgagattgagttgcatttct

SEQ ID NO: 280037 - DNA, 435 bp, Homo sapiens
aagcccccagccagggcggggcggcgcagcccgagctcccggacccggaagaagcgccatctcccgcctccaccatggagcccaccgcaccgtccctcaccgaggaggacctcactgaagtgaagaaggacgtgagtaacgcagctgtgcccagggcgggcgggggcgggctgcagcccagcgggagacgaaagcggaagcctggagtccgaggacaaggaggatcctccaggtcggaggagcggaaagtcctagcacaggaggactgtggcgagccctgcatccgagggaccttggtggcagtgatcctccagtgatctgtcaatccaggttttacatcgctaaacgcagagcttgggctttgttgccaagtggtgttttgattcttgcccactcctcacccatctcctcatgctttccccccaactgggttct

SEQ ID NO: 280038 - DNA, 551 bp, Homo sapiens
tgcccccgcggggtctgtgtccccgggaggagttggctgcgtttggagatccctcggcctgagagcaccagattctcaaaacagtaagtcctaccacttgttctatcgtaaaacttattttgggcaagtcactcaagccttcgataggtaagatagtacctgaaagcattccagctcaactctgccccaagagggagccaccccatggaaggacggagctgagcaacatgccactcaaaggaaaagcacttagaaccactctaatgcagactttggagccacatgtgggtttgaatctcaactctacctgagtgaccctgggcaagtcacttcacttccctgagactcaagtttcatcaagatgggaacaatgagcatctgcctcacaggcttgtcgtgaggattaagtgagaaggtgcagctgcaaagacatcaagctggacccatcgaggatttcggattcagccatcatggggctgctgccggggaagccactgcccctcctttctcctcagcactggggttataaaaaaatacctacaaaccaaaaa

SEQ ID NO: 280039 - DNA, 439 bp, Homo sapiens
tgcccccgcggggtctgtgtccccgggaggagttggctgcgtttggagatccctcggcctggtattcgtcgcgtctccctgcttgttgctctccacgtttagccccatccgacttctggaagcccagggagagcaccagattctcaaaacaatgcagactttggagccacatgtgggtttgaatctcaactctacctgagtgaccctgggcaagtcacttcacttccctgagactcaagtttcatcaagatgggaacaatgagcatctgcctcacaggcttgtcgtgaggattaagtgagaaggtgcagctgcaaagacatcaagctggacccatcgaggatttcggattcagccatcatggggctgctgccggggaagccactgcccctcctttctcctcagcactggggttataaaaaaatacctacaaaccaaaaa

SEQ ID NO: 280040 - DNA, 442 bp, Homo sapiens
cccatctggtctggaggtcagaggggagtgagacactctggtttgaaaggccttcctttccactttggggaaaacaggcagggagagaggtgagggtgccatgccaaaaaacacccccaaatccagatgcagactttggagccacatgtgggtttgaatctcaactctacctgagtgaccctgggcaagtcacttcacttccctgagactcaagtttcatcaagatgggaacaatgagcatctgcctcacaggcttgtcgtgaggattaagtgagaaggtgcgtgtaatattagcgatgactggatgatacaaaattaagaacaaggctgggcacgattgctcacgcctgtaatcccagcactttgggaggctgaggcaggtggatcacctgaggtcagaagttccagatcagcctgaccaatatggtgaaaccccatctct

SEQ ID NO: 280041 - DNA, 347 bp, Homo sapiens
gagtgaactggattggattagccgctggtcttgtccttaaataatacatcccagtcttcaaaccctacaaggaaagtaaagacaattattaggagaaactctgtgagaatactagacattccacaccaatatttaaaatacattcctgtccagccgccccgtccaggagggaggtgtgcccaacagctcattgagaacgggccaagatgacaatggcggctttgtggaatagaagggcgggaaaggtggggaaaagattgagaaatcggatggttgccgtgtctgtgtagaaagaagtagacacgggagacttttcattttgttctgtactaagaaaaattcttctg

SEQ ID NO: 280042 - DNA, 286 bp, Homo sapiens
tattccccagcaaagatgtgaaacctaaacgcctaaccttttctgcctggtggactgccctctactggactatttgaggtattcagccagcaggtcaatgtgactaaaaaggcagatttggataacagattataagaacaatgtagaagaaatcaaatgtagataaagaaaaagccttactttatgagaatcatgaagatgactttgaaatgtaatttattccttggttcttcaatcattgtataatttattaatatctttctatgatcaagatgttagataacag

SEQ ID NO: 280043 - DNA, 939 bp, Homo sapiens
tattccccagcaaagatgtgaaacctaaacgcctaaccttttctgcctggtggactgccctctactggactatttgaggtattcagccagcaggtcaatgtgactaaaaaggtaaacatagagataaatgtaaacattaaaaaaaaaggaaccctttagtatattaacttttaccatgaaaacaatttcagtcattttgagaactgacaatgaagatgtttatacagtcttagtctccttttcaaccttggaggcagatctgcagcaataatagtaacaagtaggagcaatgggtgtactatcatgaccatcttttatgatgactggtgcattaatacaaatcacatttttctgagtccattcatgctatggatgttttcttatgcataaacatagagtagacacatactaaatagatcacatctgttaagtctcttgccacaagcatcaaaacttttcagagctgtctcttccgtgaaaatccatttcatgtagtagcaagttgattttctttgtggttcatccccacgcctgagacttgcagtaatgtaaaaccagtttaccatcactgccaaaacactcatagagagttccaacttcttggtctggggaaggagcaaaggactgattcacataaataaacaactgttctgaggccacaagtttaagaaactttttgatgaagtcaatgagtccttggatggttcgtgttcgctctactgcccacttctttgttttcataataggagtgtctcccacagcctttagcaaaatgtcaacttttttttcttggtgtcgccagcaggttcctctgttcccggggaaactgcagcggaagacgggggctccggggtggttgtttctggggagacatccgtaagtccttcccctccagcagcaattgaagtaggaagctgcaacacagactgcggctcctcc

SEQ ID NO: 280044 - DNA, 348 bp, Homo sapiens
catagagagttccaacttcttggtctggggaaggagcaaaggactgattcacataaataaactacaagaaaggaaggaaaaacagagatgtttaatggtatcctgattaatctgcatttttctgcattccaatcagctagctattttgtattgttttcacaattgaagaaagcttctctgaactcctaacttttctaaatagtcaatttaaagagatcattacgaagatctcatttttcctccagaggaataaaaataacacaattccagttcctagaacagtggttcctaactttgtataactaagaaacttttaaatattttttacaaatagcttttgaagagctg

SEQ ID NO: 280045 - DNA, 551 bp, Homo sapiens
attttgaaaccacgtacctcagtataaacagccatagggaaagtgtttcaagacatttatcattctaatacttagcatgcacaagatctgctcatttattatactgtagccagtgtaagttgtaagttattatagattatgcatttctacctatattgtagacagtgcatactatggagtatgcattttgtctttgaggtttttgtaagcattattggttactattgtcagcaaaggggttatattaataaaaaggtaggaaaccagatatggcgatttagcattgagctactagatttccccacatgcataaagcaatttaattgcaagatagtagagctgtcatagctttaatcttttgtgagatggcctctgctttggttccaggttctgtgtaaaatgaaagatgtacttttgtttttgatgaaaaaaagcagaaatgatcattcatttagtgctaaccaactagtttagtaatccagtgaagctagatgtcaaaaaattttattttatatttgtcttgtcaaatactgaattaccgtataacttta

SEQ ID NO: 280046 - DNA, 2116 bp, Homo sapiens
agcccttccctcccaggcctgcttggaggtcgggcctcagctcccgaagaacattgagaatggcccccaagtctggccaggaggttgaagaaaccgaggaagaggctctcctgtcccccacagagcaagagtcggtcagtggtcacctgggacctccagcaggcgcacctgcagcccccgagactcccacgtgcctgccagacaccacgccccaccccacaccggtggtctgctctgccgacccgcagttggctcttgagtccctggaccctcgcacactgcggctgctgtggagacagcgagaactggagatccaggccttgcggtgggccatccagaatggcgaggacgcccggctctgccacatcctggaagaggtggcggggcttccgcccaagaggagctcccacagtcaggagaaactcctgcagaaccaggtccagaagctgatccaggagttgaaggaacagaaggagcgagcccagtgggagaaggagcacctggaggagcggctgctgcagaccacccgcacgctccaggagatggaggccgagctgcagaacttgcagaagtcctgcctcctgcagctggcccgctcctcgtgggtgggccgcatgctacgatcccagactggcagtgtggaggtagtgacggcagagactctgatggacccaagcgacctctctgaaaacattcaggcccccaccggggagggctttcggctggaggacgtggattggaacagcgttgcccgccggtatcccaacctcttcaccaacatggagcccagctcaaagcagcagccccggccctggccacagctggacacagggagcccagagtcctctggaaagcattccgagcggcatcacaagaccgtggagtggggctccctgccctgtctgaacaccagcagctcagggggcgctgactccgactccagcagctgccggccgggcctgccttccttcgtgcaggtgatagggcacccgccccgggaccaccgcgcttcctccgagcaagcgctggtgcaggccgggagctacagcagggactcagaagatctccagaaaacccactcacccaggcacggcgagccggtcctgtcgccccagccctgcacagacccggaccactggagcccggaactcctgcagagcccgacaggcctgaagatcgtggctgtgagctgccgggagaagttcgtccgcatcttcaacccgtcgcaggagagcacggccgacctgagcggcatggtgctgaagcagctggtgcgcggcttcccggagcgcctgtaccgcttcccgccgggcacgctgctggccccgcggcaccacgtcacggtctggggcgaggcgacccgcagcgccaagaagccgctgcgcgcgtcctcgagccgggagcccgttcccctcctctccatccgcggctgcgcgacgctgctcctgagccccaagggcgaggtcctcagtgagcaccggatcccacgccgcgagactccggccccgagggtcttcgccgacggcaccgacttgtccatcgaccgcttcccgctccctgaggccgggcccggcgccgacacccgcaagccgccgcgcccacctcgacccctgcgcaaaggccgggtgcgggagccccgggtcagtcgccggagaccagggacgcggggcctgctgcccccagtgagctcggggaagctcttccacgcgcgggaggggcctgcgcggcccgagaaccccgagatccccgcgccgcagcacctgcccgccatcccgggtgaccccaccctgccgtcgcctcccgcagaggccgggctgggcctggaggactgtcggctccagaaagaacaccgagttcgggtgtgccggaagagcgtggaccgtagctgccccctggtggccctgtcggtgcagaacacggcggagagcagattcggcttccgcttcctcagctgcctgccggtcaccgcggacacctgccgcggcgcctaggggcggaggagtggggccgggaccgcgagggagggcgcgggcgggcgccggggctgggcgggctgtgtccgctgcatcatttattgaaccaacgtggcctacaaagtaaaccgcatttctgtaca

SEQ ID NO: 280047 - DNA, 2567 bp, Homo sapiens
agcccttccctcccaggcctgcttggaggtcgggcctcagctcccgaagaacattgagaatggcccccaagtctggccaggaggttgaagaaaccgaggaagaggctctcctgtcccccacagagcaagagtcggtcagtggtcacctgggacctccagcaggcgcacctgcagcccccgagactcccacgtgcctgccagacaccacgccccaccccacaccggtggtctgctctgccgacccgcagttggctcttgagtccctggaccctcgcacactgcggctgctgtggagacagcgagaactggagatccaggccttgcggtgggccatccagaatggcgaggacgcccggctctgccacatcctggaagaggtggcggggcttccgcccaagaggagctcccacagtcaggagaaactcctgcagaaccaggtccagaagctgatccaggagttgaaggaacagaaggagcgagcccagtgggagaaggagcacctggaggagcggctgctgcagaccacccgcacgctccaggagatggaggccgagctgcagaacttgcagaagtcctgcctcctgcagctggcccgctcctcgtgggtgggccgcatgctacgatcccagactggcagtgtggaggtagtgacggcagagactctgatggacccaagcgacctctctgaaaacattcaggcccccaccggggagggctttcggctggaggacgtggattggaacagcgttgcccgccggtatcccaacctcttcaccaacatggagcccagctcaaagcagcagccccggccctggccacagctggacacagggagcccagagtcctctggaaagcattccgagcggcatcacaagaccgtggagtggggctccctgccctgtctgaacaccagcagctcagggggcgctgactccgactccagcagctgccggccgggcctgccttccttcgtgcaggtgatagggcacccgccccgggaccaccgcgcttcctccgagcaagcgctggtgcaggccgggagctacagcagggactcagaagatctccagaaaacccactcacccaggcacggcgagccggtcctgtcgccccagccctgcacagacccggaccactggagcccggaactcctgcagagcccgacaggcctgaagatcgtggctgtgagctgccgggagaagttcgtccgcatcttcaacccgtcgcaggagagcacggccgacctgagcggcatggtgctgaagcagctggtgcgcggcttcccggagcgcctgtaccgcttcccgccgggcacgctgctggccccgcggcaccacgtcacggtctggggcgaggcgacccgcagcgccaagaagccgctgcgcgcgtcctcgagccgggagcccgttcccctcctctccatccgcggctgcgcgacgctgctcctgagccccaagggcgaggtcctcagtgagcaccggatcccacgccgcgagactccggccccgagggtcttcgccgacggcaccgacttgtccatcgaccgcttcccgctccctgaggccgggcccggcgccgacacccgcaagccgccgcgcccacctcgacccctgcgcaaaggccgggtgcgggagccccgggtcagtcgccggagaccagggacgcggggcctgctgcccccagtgagctcggggaagctcttccacgcgcgggaggggcctgcgcggcccgagaaccccgagatccccgcgccgcagcacctgcccgccatcccgggtgaccccaccctgccgtcgcctcccgcagaggccgggctgggcctggaggactgtcggctccagaaagaacaccgagttcgggtgtgccggaagagcgtggaccgtagctgccccctggtggccctgtcggtgcagaacacggcggagagcagattcggcttccgcttcctcagctgcctgccggtcaccgcggacacctgccgcggcgcctaggggcggaggagtggggccgggaccgcgagggagggcgcgggcgggcgccggggctgggcgggctgtgtccgctgcatcatttattgaaccaacgtggcctacaaagtaaaccgcatttctgtacacctgagagctggaaatgttggtttgggttccggggcgtcctgcgccaagaggagggaacgggccgccctatcgcagtgcgggaaccctacagatcccccggagacgggaggcctggaccgcacccccggcggcctcaggcgagcagctgggaccttgggccactgcggcctaggaggtggctcttaccctggggccggcaagggagtggtggactcgcagctccagcccctgcccctcggccatgcccaattctagcaggagaggcctctcacaggcctgctcgggtgaccaccccccacccccgtgcccgcgggaaagcctggccctaaggaagggctggggagccggaccctccctccccaggccaacccagttgggggcctaaactgggttccagcctctgctgcctccctggctggtcccagtcccccactcccctccaccaagagg

SEQ ID NO: 280048 - DNA, 1010 bp, Homo sapiens
agctgtgcgggtggaccggccgcatctcctcacagcgtctcctctcttcccagcccgacaggcctgaagatcgtggctgtgagctgccgggagaagttcgtccgcatcttcaacccgtcgcaggagagcacggccgacctgagcggcatggtgctgaagcagctggtgcgcggcttcccggagcgcctgtaccgcttcccgccgggcacgctgctggccccgcggcaccacgtcacggtctggggcgaggcgacccgcagcgccaagaagccgctgcgcgcgtcctcgagccgggagcccgttcccctcctctccatccgcggctgcgcgacgctgctcctgagccccaagggcgaggtcctcagtgagcaccggatcccacgccgcgagactccggccccgagggtcttcgccgacggcaccgacttgtccatcgaccgcttcccgctccctgaggccgggcccggcgccgacacccgcaagccgccgcgcccacctcgacccctgcgcaaaggccgggtgcgggagccccgggtcagtcgccggagaccagggacgcggggcctgctgcccccagtgagctcggggaagctcttccacgcgcgggaggggcctgcgcggcccgagaaccccgagatccccgcgccgcagcacctgcccgccatcccgggtgaccccaccctgccgtcgcctcccgcagaggccgggctgggcctggaggactgtcggctccagaaagaacaccgagttcgggtgtgccggaagagcgtggaccgtagctgccccctggtggccctgtcggtgcagaacacggcggagagcagattcggcttccgcttcctcagctgcctgccggtcaccgcggacacctgccgcggcgcctaggggcggaggagtggggccgggaccgcgagggagggcgcgggcgggcgccggggctgggcgggctgtgtccgctgcatcatttattgaaccaacgtggcctacaaagtaaaccgcatttctgtaca

SEQ ID NO: 280049 - DNA, 1030 bp, Homo sapiens
cggaggggggcgccgagccgcagtccccgcccccacctcccgcctaccgcgaaaaacgcggaaatgcggtggctgcggcccgcgggcaggcgtcgggagcaagagtcggtcagtggtcacctgggacctccagcaggcgcacctgcagcccccgagactcccacgtgcctgccagacaccacgccccaccccacaccggtggtctgctctgccgacccgcagttggctcttgagtccctggaccctcgcacactgcggctgctgtggagacagcgagaactggagatccaggccttgcggtgggccatccagaatggcgaggacgcccggctctgccacatcctggaagaggtggcggggcttccgcccaagaggagctcccacagtcaggagaaactcctgcagaaccaggtccagaagctgatccaggagttgaaggaacagaaggagcgagcccagtgggagaaggagcacctggaggagcggctgctgcagaccacccgcacgctccaggagatggaggccgagctgcagaacttgcagaagtcctgcctcctgcagctggcccgctcctcgtgggtgggccgcatgctacgatcccagactggcagtgtggaggtagtgacggcagagactctgatggacccaagcgacctctctgaaaacattcaggcccccaccggggagggctttcggctggaggacgtggattggaacagcgttgcccgccggtatcccaacctcttcaccaacatggagcccagctcaaagcagtgtgccggaagagcgtggaccgtagctgccccctggtggccctgtcggtgcagaacacggcggagagcagattcggcttccgcttcctcagctgcctgccggtcaccgcggacacctgccgcggcgcctaggggcggaggagtggggccgggaccgcgagggagggcgcgggcgggcgccggggctgggcgggctgtgtccgctgcatcatttattgaaccaacgtggcctacaaagtaaaccgcatttctgtaca

SEQ ID NO: 280050 - DNA, 493 bp, Homo sapiens
atgcgcgttctctgatctgtagaatgcgttggggttgaggcagccatcactgtcctgccatgaactgagcctgggtactgggaggcaagaggggctccctgctgcactgccttgtgaggctggacgggggcagggctggggtctggagctggagtggccatcaagcagagcgtggtccacaggcagccccggccctggccacagctggacacagggagcccagagtcctctggaaagcattccgagcggcatcacaagaccgtggagtggggctccctgccctgtctgaacaccagcagctcagggggcgctgactccgactccagcagctgccggccgggcctgccttccttcgtgcaggtgatagggcacccgccccgggaccaccgcgcttcctccgagcaagcgctggtgcaggccgggagctacagcagggactcagaaggtgcagtggggcgggtctcccctggttacccttcacccaccctccacc

SEQ ID NO: 280051 - DNA, 330 bp, Homo sapiens
tctctcccctcccctcccctcccgtccccgccccgccccgcgcgcctctcagcccccgcgccccccaggtgtgccggaagagcgtggaccgtagctgccccctggtggccctgtcggtgcagaacacggcggagagcagattcggcttccgcttcctcagctgcctgccggtcaccgcggacacctgccgcggcgcctaggggcggaggagtggggccgggaccgcgagggagggcgcgggcgggcgccggggctgggcgggctgtgtccgctgcatcatttattgaaccaacgtggcctacaaagtaaaccgcatttctgtacacctga

SEQ ID NO: 280052 - DNA, 2090 bp, Homo sapiens
cggaggggggcgccgagccgcagtccccgcccccacctcccgcctaccgcgaaaaacgcggaaatgcggtggctgcggcccgcgggcaggcgtcgggagcaagagtcggtcagtggtcacctgggacctccagcaggcgcacctgcagcccccgagactcccacgtgcctgccagacaccacgccccaccccacaccggtggtctgctctgccgacccgcagttggctcttgagtccctggaccctcgcacactgcggctgctgtggagacagcgagaactggagatccaggccttgcggtgggccatccagaatggcgaggacgcccggctctgccacatcctggaagaggtggcggggcttccgcccaagaggagctcccacagtcaggagaaactcctgcagaaccaggtccagaagctgatccaggagttgaaggaacagaaggagcgagcccagtgggagaaggagcacctggaggagcggctgctgcagaccacccgcacgctccaggagatggaggccgagctgcagaacttgcagaagtcctgcctcctgcagctggcccgctcctcgtgggtgggccgcatgctacgatcccagactggcagtgtggaggtagtgacggcagagactctgatggacccaagcgacctctctgaaaacattcaggcccccaccggggagggctttcggctggaggacgtggattggaacagcgttgcccgccggtatcccaacctcttcaccaacatggagcccagctcaaagcagcagccccggccctggccacagctggacacagggagcccagagtcctctggaaagcattccgagcggcatcacaagaccgtggagtggggctccctgccctgtctgaacaccagcagctcagggggcgctgactccgactccagcagctgccggccgggcctgccttccttcgtgcaggtgatagggcacccgccccgggaccaccgcgcttcctccgagcaagcgctggtgcaggccgggagctacagcagggactcagaagatctccagaaaacccactcacccaggcacggcgagccggtcctgtcgccccagccctgcacagacccggaccactggagcccggaactcctgcagagcccgacaggcctgaagatcgtggctgtgagctgccgggagaagttcgtccgcatcttcaacccgtcgcaggagagcacggccgacctgagcggcatggtgctgaagcagctggtgcgcggcttcccggagcgcctgtaccgcttcccgccgggcacgctgctggccccgcggcaccacgtcacggtctggggcgaggcgacccgcagcgccaagaagccgctgcgcgcgtcctcgagccgggagcccgttcccctcctctccatccgcggctgcgcgacgctgctcctgagccccaagggcgaggtcctcagtgagcaccggatcccacgccgcgagactccggccccgagggtcttcgccgacggcaccgacttgtccatcgaccgcttcccgctccctgaggccgggcccggcgccgacacccgcaagccgccgcgcccacctcgacccctgcgcaaaggccgggtgcgggagccccgggtcagtcgccggagaccagggacgcggggcctgctgcccccagtgagctcggggaagctcttccacgcgcgggaggggcctgcgcggcccgagaaccccgagatccccgcgccgcagcacctgcccgccatcccgggtgaccccaccctgccgtcgcctcccgcagaggccgggctgggcctggaggactgtcggctccagaaagaacaccgagttcgggtgtgccggaagagcgtggaccgtagctgccccctggtggccctgtcggtgcagaacacggcggagagcagattcggcttccgcttcctcagctgcctgccggtcaccgcggacacctgccgcggcgcctaggggcggaggagtggggccgggaccgcgagggagggcgcgggcgggcgccggggctgggcgggctgtgtccgctgcatcatttattgaaccaacgtggcctacaaagtaaaccgcatttctgtaca

SEQ ID NO: 280053 - DNA, 2586 bp, Homo sapiens
agcccttccctcccaggcctgcttggaggtcgggcctcagctcccgaagaacattgagaatggcccccaagtctggccaggaggttgaagaaaccgaggaagaggctctcctgtcccccacagagcaagagtcggtcagtggtcacctgggacctccagcaggcgcacctgcagcccccgagactcccacgtgcctgccagacaccacgccccaccccacaccggtggtctgctctgccgacccgcagttggctcttgagtccctggaccctcgcacactgcggctgctgtggagacagcgagaactggagatccaggccttgcggtgggccatccagaatggcgaggacgcccggctctgccacatcctggaagaggtggcggggcttccgcccaagaggagctcccacagtcaggagaaactcctgcagaaccaggtccagaagctgatccaggagttgaaggaacagaaggagcgagcccagtgggagaaggagcacctggaggagcggctgctgcagaccacccgcacgctccaggagatggaggccgagctgcagaacttgcagaagtcctgcctcctgcagctggcccgctcctcgtgggtgggccgcatgctacgatcccagactggcagtgtggaggtagtgacggcagagactctgatggacccaagcgacctctctgaaaacattcaggcccccaccggggagggctttcggctggaggacgtggattggaacagcgttgcccgccggtatcccaacctcttcaccaacatggagcccagctcaaagcagcagccccggccctggccacagctggacacagggagcccagagtcctctggaaagcattccgagcggcatcacaagaccgtggagtggggctccctgccctgtctgaacaccagcagctcagggggcgctgactccgactccagcagctgccggccgggcctgccttccttcgtgcaggtgatagggcacccgccccgggaccaccgcgcttcctccgagcaagcgctggtgcaggccgggagctacagcagggactcagaagatctccagaaaacccactcacccaggcacggcgagccggtcctgtcgccccagccctgcacagacccggaccactggagcccggaactcctgcagagcccgacaggcctgaagatcgtggctgtgagctgccgggagaagttcgtccgcatcttcaacccgtcgcaggagagcacggccgacctgagcggcatggtgctgaagcagctggtgcgcggcttcccggagcgcctgtaccgcttcccgccgggcacgctgctggccccgcggcaccacgtcacggtctggggcgaggcgacccgcagcgccaagaagccgctgcgcgcgtcctcgagccgggagcccgttcccctcctctccatccgcggctgcgcgacgctgctcctgagccccaagggcgaggtcctcagtgagcaccggatcccacgccgcgagactccggccccgagggtcttcgccgacggcaccgacttgtccatcgaccgcttcccgctccctgaggccgggcccggcgccgacacccgcaagccgccgcgcccacctcgacccctgcgcaaaggccgggtgcgggagccccgggtcagtcgccggagaccagggacgcggggcctgctgcccccagtgagctcggggaagctcttccacgcgcgggaggggcctgcgcggcccgagaaccccgagatccccgcgccgcagcacctgcccgccatcccgggtgaccccaccctgccgtcgcctcccgcagaggccgggctgggcctggaggactgtcggctccagaaagaacaccgagttcgggtgtgccggaagagcgtggaccgtagctgccccctggtggccctgtcggtgcagaacacggcggagagcagattcggcttccgcttcctcagctgcctgccggtcaccgcggacacctgccgcggcgcctaggggcggaggagtggggccgggaccgcgagggagggcgcgggcgggcgccggggctgggcgggctgtgtccgctgcatcatttattgaaccaacgtggcctacaaagtaaaccgcatttctgtacaaaaaaaaaaaaaaaaaaaaaaaaaaaaaaaaaaaaagaaaataaaaaaaaaaaaaaaaaaagggggggagggaaaagataattcaagcgggggaaaagagagggataacacatttatttgaaaaaggacgagtgcccactatatgagacgagttatatattaataacaagaagcaagagtggcggaagtttttaaaaaaggaggtaagaacagtgaaaaaaatattggctacctgaggagaatcatagtggaaagagacacccaatagatgggggaggaggaagaaataaagtggggagaaaactaaccaaagaagaagatataaaaaggcagtaaaaagggaagaaattataaagcatattagagaggggtataaagtgtggtaaaaataaacaacgtgaaaagttagataagagagagaaatattgtaataaagaagagaagtttcagtaggaaaaatttttcccagg

SEQ ID NO: 280054 - DNA, 341 bp, Homo sapiens
ctggcttccggtcccctcttgcaggtagtgacggcagagactctgatggacccaagcgacctctctgaaaacattcaggcccccaccggggaggtgagctaggcctcccacgtgtgtggtctggtatctggagccctgcgggaggggaggaccatgtgcctcttgcttcctggccagggctttcggctggaggacgtggattggaacagcgttgcccgccggtatcccaacctcttcaccaacatggagcccagctcaaagcaaaaagtaactgcacagagcagggactccccaggggccagaagggagggctcaccttggcaagtgaagacgcaggacac

SEQ ID NO: 280055 - DNA, 1861 bp, Homo sapiens
gcgcccttccctctagagacgctgagagaacgggagctagtagcgcccccacccaacgccacctcggagactccggctccttctctctcaacttcgaacaatacaaagtgtgctaggagaagacaagatggcgcccagcaggaggagcggagaaaggcaggggtgtaaatctggcttccaaactggaagcgtcaacaaaggcgtgggaggtctaaccgcgcaggcgtgcagcttcggcaagctttacaattccaacagcgcgtccaaaacgtggtccctgactgagacttattttacgccactagagtgagggtgggtagcgtcagaaagagcggggcacggggcgggccagcttcgccgcgggaaaagaacgggaggcggagtgtccgcagcgcgcacgcgcaacgaaagtcaatggcggtctggagagactggcggaagctagctttgcaatatggcggccgaggcggacggaccgcttaaacggctgctcgtgccgattcttttacctgagaaatgctacgaccaacttttcgttcagtgggacttgcttcacgtcccctgcctcaagattctcctcagcaaaggcctggggctgggcattgtggctggctcacttctagtaaagctgccccaggtgtttaaaatcctgggagccaagagtgctgaagggttgagtctccagtctgtaatgctggagctagtggcattgactgggaccatggtctacagcatcactaacaacttcccattcagctcttggggtgaagccttattcctgatgctccagacgatcaccatctgcttcctggtcatgcactacagaggacagactgtgaaaggtgtcgctttcctcgcttgctacggcctggtcctgctggtgcttctctcacctctgacgcccttgactgtagtcaccctgctccaggcctccaatgtgcctgctgtggtggtggggaggcttctccaggcagccaccaactaccacaacgggcacacaggccagctctcagccatcacagtcttcctgctgtttgggggctccctggcccgaatcttcacttccattcaggaaaccggagatcccctgatggctgggacctttgtggtctcctctctctgcaacggcctcatcgccgcccagctgctcttctactggaatgcaaagcctccccacaagcagaaaaaggcgcagtagagccagctactggagtcattccgtttccactcattcacccaacctcagggttctccccatctgagccagcctgctggtgtgacttactcatcctccattcctctgcacttgcagactttctgagccagggttttcttttagtggaaacaaatggttgatggatccagatccttagaaaaggagaggatgggggtagagtctcccaagccaaaattttgacatttgagtgctttcgtaagccctgtacatgtactattaattcagtcattcagccaagcctcctcctctagcagcaatttccagctgtttaacactatcctgggcaaatgttttaccctgtcctccagcctccctgcttcccttctggccctggaagactgagtctggacggcagagtggagggactgggaggctgtggctgcctccctccctcagcccggctgggactgtctcccggaccccagtgctggggtgggggaagggggacggagaatgactcaggcagggccccagggtggggtgaggaggttcctgctctggcaggtctaggcggaagggagtggagatggggctggttcctgctgcagtgaggggaacagatgggacaataaagactggagactcagttgaataatacaaaactgtttaatactaccaaaaata

SEQ ID NO: 280056 - DNA, 2239 bp, Homo sapiens
  misc_feature (1004)..(1004): n is a, c, g, or t
  misc_feature (1254)..(1254): n is a, c, g, or t
gcgcccttccctctagagacgctgagagaacgggagctagtagcgcccccacccaacgccacctcggagactccggctccttctctctcaacttcgaacaatacaaagtgtgctaggagaagacaagatggcgcccagcaggaggagcggagaaaggcaggggtgtaaatctggcttccaaactggaagcgtcaacaaaggcgtgggaggtctaaccgcgcaggcgtgcagcttcggcaagctttacaattccaacagcgcgtccaaaacgtggtccctgactgagacttattttacgccactagagtgagggtgggtagcgtcagaaagagcggggcacggggcgggccagcttcgccgcgggaaaagaacgggaggcggagtgtccgcagcgcgcacgcgcaacgaaagtcaatggcggtctggagagactggcggaagctagctttgcaatatggcggccgaggcggacggaccgcttaaacggctgctcgtgccgattcttttacctgagaaatgctacgaccaacttttcgttcagtgggacttgcttcacgtcccctgcctcaagattctcctcagcaaaggcctggggctgggcattgtggctggctcacttctagtaaagctgccccaggtgtttaaaatcctgggagccaagagtgtgctggattaaaaaaggaggatgaggcccgtcccgtgaggtctgcgtccatgagggttagaggtgggttaggggcatgggggcaccagcaaggggagggttgtatggagtgggagagccagggggcaggtagtgggtataggtgggcagcagttccccctggagcctagggtcactctgagggagggagcacggtgagggggcttccagtttgcagtgggaagagctgcagagagaaacaagaggttagagggcacttccctgggttggaggtgagtctggccagttctgggcagacagggtagagcgtgccacccacccagccctggctacccagccngctgggcgcagcaggcatggaagccgaccccgggatggagagcccgcggccctgttggggcacgctcgggagcgggcttgcgtgctgcacggctgttttcctcttggggagtcaggccaggaaagggcagaatgagctcggcctctccttgccctgggggctgggagaggaagctgggtcacacacaggccagaagcaggggggaaacggggcatctaactaggacacagtcgcatccaggggtcagtcncctgaccctacagggcccaccaccttcagactgagatggaaacgccctctgggagaaccctgatccgccccaccctacacaggccccggaggtactgggcctgcgcccgccacaccttggccgcgagtggcctctgcttgggtgggctcccgtcctccggcatccgcccccaccaaggctccagaagaggggcgcatgggcctccgtcttcggcccgcttcccaggcactcacccatagctgccaggcaggtaggctgtcgagtagctggggggtctgtacccaaagcctctgctcggttgggtggtcgcgtaccccggcccccagagcgggccgccgctggccaggttgcctcttccctgtccgcagcgggaagtccggcgcccgagctcttggccttgcgccgaggccggtacttgtagtcggggtagtcgcgcaggtgtcgggcgcggagccgcttggcctcctccacgaaggccgcttctcgtcctcgtccagcagcttccactgcgcgcccaggcgcttggagatctcggagttgtgcatcttggggttctgctgcgccatctggcggcgctgagcggagctccacaccatgaacgcgttcatcggccgcttcaccttctccaggggcagccatcccggaccaccaccccaacccctttcctggtgcctgttgctcctcaaatcccagaactgcccctggggcaagaaaggccgaggagggagaccatttttgtttcctgagtcattcccagaagtaagaccatctttgggacaagagacaatgaagagaagtcagatgtggaggaacagaaaacaagagccaggggccagggcaggtcagtcctagagaaacaaatggaccaaactggggacaaagaaggcacaggagccagacagccatttggatttttttattctctttttaaatactgtacagtgaaaaataaatacgccttctcatccaccagacaaggttggtc

SEQ ID NO: 280057 - DNA, 334 bp, Homo sapiens
cagcaaacttgggggaggggagaagcaacaaggcacaagcccccctcctctgaaccaggagggagaacctgggcctggggagtttaggaatgtcaggaattcccagaagtaagaccatctttgggacaagagacaatgaagagaagtcagatgtggaggaacagaaaacaagagccaggggccagggcaggtcagtcctagagaaacaaatggaccaaactggggacaaagaaggcacaggagccagacagccatttggatttttttattctctttttaaatactgtacagtgaaaaataaatacgccttctcatccaccagacaaggttggtc

SEQ ID NO: 280058 - DNA, 431 bp, Homo sapiens
cctggagccagaacagaacaccaccaagaaggccggaccccgggctccagaggctgctgtgagggaaccctgctccccactctgcccaacggcccagcccaagccccaggcctcaggtaatcggattaagcacaagcccccctcctctgaaccaggagggagaacctgggcctggggagtttaggaatgtcaggaattcccagaagtaagaccatctttgggacaagagacaatgaagagaagtcagatgtggaggaacagaaaacaagagccaggggccagggcaggtcagtcctagagaaacaaatggaccaaactggggacaaagaaggcacaggagccagacagccatttggatttttttattctctttttaaatactgtacagtgaaaaataaatacgccttctcatccaccagacaaggttggtc

SEQ ID NO: 280059 - DNA, 1871 bp, Homo sapiens
gcgcccttccctctagagacgctgagagaacgggagctagtagcgcccccacccaacgccacctcggagactccggctccttctctctcaacttcgaacaatacaaagtgtgctaggagaagacaagatggcgcccagcaggaggagcggagaaaggcaggggtgtaaatctggcttccaaactggaagcgtcaacaaaggcgtgggaggtctaaccgcgcaggcgtgcagcttcggcaagctttacaattccaacagcgcgtccaaaacgtggtccctgactgagacttattttacgccactagagtgagggtgggtagcgtcagaaagagcggggcacggggcgggccagcttcgccgcgggaaaagaacgggaggcggagtgtccgcagcgcgcacgcgcaacgaaagtcaatggcggtctggagagactggcggaagctagctttgcaatatggcggccgaggcggacggaccgcttaaacggctgctcgtgccgattcttttacctgagaaatgctacgaccaacttttcgttcagtgggacttgcttcacgtcccctgcctcaagattctcctcagcaaaggcctggggctgggcattgtggctggctcacttctagtaaagctgccccaggtgtttaaaatcctgggagccaagagtgctgaagggttgagtctccagtctgtaatgctggagctagtggcattgactgggaccatggtctacagcatcactaacaacttcccattcagctcttggggtgaagccttattcctgatgctccagacgatcaccatctgcttcctggtcatgcactacagaggacagactgtgaaaggtgtcgctttcctcgcttgctacggcctggtcctgctggtgcttctctcacctctgacgcccttgactgtagtcaccctgctccaggcctccaatgtgcctgctgtggtggtggggaggcttctccaggcagccaccaactaccacaacgggcacacaggccagctctcagccatcacagtcttcctgctgtttgggggctccctggcccgaatcttcacttccattcaggaaaccggagatcccctgatggctgggacctttgtggtctcctctctctgcaacggcctcatcgccgcccagctgctcttctactggaatgcaaagcctccccacaagcagaaaaaggcgcagtagagccagctactggagtcattccgtttccactcattcacccaacctcagggttctccccatctgagccagcctgctggtgtgacttactcatcctccattcctctgcacttgcagactttctgagccagggttttcttttagtggaaacaaatggttgatggatccagatccttagaaaaggagaggatgggggtagagtctcccaagccaaaattttgacatttgagtgctttcgtaagccctgtacatgtactattaattcagtcattcagccaagcctcctcctctagcagcaatttccagctgtttaacactatcctgggcaaatgttttaccctgtcctccagcctccctgcttcccttctggccctggaagactgagtctggacggcagagtggagggactgggaggctgtggctgcctccctccctcagcccggctgggactgtctcccggaccccagtgctggggtgggggaagggggacggagaatgactcaggcagggccccagggtggggtgaggaggttcctgctctggcaggtctaggcggaagggagtggagatggggctggttcctgctgcagtgaggggaacagatgggacaataaagactggataccgcgctcagtgatatcattgtcatttgcgtttgtcactggtttgcgtttgg

SEQ ID NO: 280060 - DNA, 1284 bp, Homo sapiens
gactaggtacgaggaccggtgcttagctggctcacttctagttaactaaagctgccccaggtgtttaaaatcctgggagccaagagtgctgaagggttgagtctccagtctgtaatgctggagctagtggcattgactgggaccatggtctacagcatcactaacaacttcccattcagctcttggggtgaagccttattcctgatgctccagacgatcaccatctgcttcctggtcatgcactacagaggacagactgtgaaaggtgtcgctttcctcgcttgctacggcctggtcctgctggtgcttctctcacctctgacgcccttgactgtagtcaccctgctccaggcctccaatgtgcctgctgtggtggtggggaggcttctccaggcagccaccaactaccacaacgggcacacaggccagctctcagccatcacagtcttcctgctgtttgggggctccctggcccgaatcttcacttccattcaggaaaccggagatcccctgatggctgggacctttgtggtctcctctctctgcaacggcctcatcgccgcccagctgctcttctactggaatgcaaagcctccccacaagcagaaaaaggcgcagtagagccagctactggagtcattccgtttccactcattcacccaacctcagggttctccccatctgagccagcctgctggtgtgacttactcatcctccattcctctgcacttgcagactttctgagccagggttttcttttagtggaaacaaatggttgatggatccagatccttagaaaaggagaggatgggggtagagtctcccaagccaaaattttgacatttgagtgctttcgtaagccctgtacatgtactattaattcagtcattcagccaagcctcctcctctagcagcaatttccagctgtttaacactatcctgggcaaatgttttaccctgtcctccagcctccctgcttcccttctggccctggaagactgagtctggacggcagagtggagggactgggaggctgtggctgcctccctccctcagcccggctgggactgtctcccggaccccagtgctggggtgggggaagggggacggagaatgactcaggcagggccccagggtggggtgaggaggttcctgctctggcaggtctaggcggaagggagtggagatggggctggttcctgctgcagtgaggggaacagatgggacaataaagactggagactcagttgaataatacaaaactgtttaatactaccaaaaata

SEQ ID NO: 280061 - DNA, 1662 bp, Homo sapiens
gcgcccttccctctagagacgctgagagaacgggagctagtagcgcccccacccaacgccacctcggagactccggctccttctctctcaacttcgaacaatacaaagtgtgctaggagaagacaagatggcgcccagcaggaggagcggagaaaggcaggggtgtaaatctggcttccaaactggaagcgtcaacaaaggcgtgggaggtctaaccgcgcaggcgtgcagcttcggcaagctttacaattccaacagcgcgtccaaaacgtggtccctgactgagacttattttacgccactagagtgagggtgggtagcgtcagaaagagcggggcacggggcgggccagcttcgccgcgggaaaagaacgggaggcggagtgtccgcagcgcgcacgcgcaacgaaagtcaatggcggtctggagagactggcggaagctagctttgcaatatggcggccgaggcggacggaccgcttaaacggctgctcgtgccgattcttttacctgagaaatgctacgaccaacttttcgttcagtgggacttgcttcacgctcttggggtgaagccttattcctgatgctccagacgatcaccatctgcttcctggtcatgcactacagaggacagactgtgaaaggtgtcgctttcctcgcttgctacggcctggtcctgctggtgcttctctcacctctgacgcccttgactgtagtcaccctgctccaggcctccaatgtgcctgctgtggtggtggggaggcttctccaggcagccaccaactaccacaacgggcacacaggccagctctcagccatcacagtcttcctgctgtttgggggctccctggcccgaatcttcacttccattcaggaaaccggagatcccctgatggctgggacctttgtggtctcctctctctgcaacggcctcatcgccgcccagctgctcttctactggaatgcaaagcctccccacaagcagaaaaaggcgcagtagagccagctactggagtcattccgtttccactcattcacccaacctcagggttctccccatctgagccagcctgctggtgtgacttactcatcctccattcctctgcacttgcagactttctgagccagggttttcttttagtggaaacaaatggttgatggatccagatccttagaaaaggagaggatgggggtagagtctcccaagccaaaattttgacatttgagtgctttcgtaagccctgtacatgtactattaattcagtcattcagccaagcctcctcctctagcagcaatttccagctgtttaacactatcctgggcaaatgttttaccctgtcctccagcctccctgcttcccttctggccctggaagactgagtctggacggcagagtggagggactgggaggctgtggctgcctccctccctcagcccggctgggactgtctcccggaccccagtgctggggtgggggaagggggacggagaatgactcaggcagggccccagggtggggtgaggaggttcctgctctggcaggtctaggcggaagggagtggagatggggctggttcctgctgcagtgaggggaacagatgggacaataaagactggagactcagttgaataatacaaaactgtttaatactaccaaaaata

SEQ ID NO: 280062 - DNA, 1728 bp, Homo sapiens
gcgcccttccctctagagacgctgagagaacgggagctagtagcgcccccacccaacgccacctcggagactccggctccttctctctcaacttcgaacaatacaaagtgtgctaggagaagacaagatggcgcccagcaggaggagcggagaaaggcaggggtgtaaatctggcttccaaactggaagcgtcaacaaaggcgtgggaggtctaaccgcgcaggcgtgcagcttcggcaagctttacaattccaacagcgcgtccaaaacgtggtccctgactgagacttattttacgccactagagtgagggtgggtagcgtcagaaagagcggggcacggggcgggccagcttcgccgcgggaaaagaacgggaggcggagtgtccgcagcgcgcacgcgcaacgaaagtcaatggcggtctggagagactggcggaagctagctttgcaatatggcggccgaggcggacggaccgcttaaacggctgctcgtgccgattcttttacctgagaaatgctacgaccaacttttcgttcagtgggacttgcttcacgtcccctgcctcaagattctcctcagcaaaggcctggggctgggcattgtggctggctcacttctagctcttggggtgaagccttattcctgatgctccagacgatcaccatctgcttcctggtcatgcactacagaggacagactgtgaaaggtgtcgctttcctcgcttgctacggcctggtcctgctggtgcttctctcacctctgacgcccttgactgtagtcaccctgctccaggcctccaatgtgcctgctgtggtggtggggaggcttctccaggcagccaccaactaccacaacgggcacacaggccagctctcagccatcacagtcttcctgctgtttgggggctccctggcccgaatcttcacttccattcaggaaaccggagatcccctgatggctgggacctttgtggtctcctctctctgcaacggcctcatcgccgcccagctgctcttctactggaatgcaaagcctccccacaagcagaaaaaggcgcagtagagccagctactggagtcattccgtttccactcattcacccaacctcagggttctccccatctgagccagcctgctggtgtgacttactcatcctccattcctctgcacttgcagactttctgagccagggttttcttttagtggaaacaaatggttgatggatccagatccttagaaaaggagaggatgggggtagagtctcccaagccaaaattttgacatttgagtgctttcgtaagccctgtacatgtactattaattcagtcattcagccaagcctcctcctctagcagcaatttccagctgtttaacactatcctgggcaaatgttttaccctgtcctccagcctccctgcttcccttctggccctggaagactgagtctggacggcagagtggagggactgggaggctgtggctgcctccctccctcagcccggctgggactgtctcccggaccccagtgctggggtgggggaagggggacggagaatgactcaggcagggccccagggtggggtgaggaggttcctgctctggcaggtctaggcggaagggagtggagatggggctggttcctgctgcagtgaggggaacagatgggacaataaagactggagactcagttgaataatacaaaactgtttaatactaccaaaaata

SEQ ID NO: 280063 - DNA, 2159 bp, Homo sapiens
gcgcccttccctctagagacgctgagagaacgggagctagtagcgcccccacccaacgccacctcggagactccggctccttctctctcaacttcgaacaatacaaagtgtgctaggagaagacaagatggcgcccagcaggaggagcggagaaaggcaggggtgtaaatctggcttccaaactggaagcgtcaacaaaggcgtgggaggtctaaccgcgcaggcgtgcagcttcggcaagctttacaattccaacagcgcgtccaaaacgtggtccctgactgagacttattttacgccactagagtgagggtgggtagcgtcagaaagagcggggcacggggcgggccagcttcgccgcgggaaaagaacgggaggcggagtgtccgcagcgcgcacgcgcaacgaaagtcaatggcggtctggagagactggcggaagctagctttgcaatatggcggccgaggcggacggaccgcttaaacggctgctcgtgccgattcttttacctgagaaatgctacgaccaacttttcgttcagtgggacttgcttcacgtcccctgcctcaagattctcctcagcaaaggcctggggctgggcattgtggctggctcacttctagtaaagctgccccaggtgtttaaaatcctgggagccaagagtgctgaagggttgagtctccagtctgtaatgctggagctagtggcattgactgggaccatggtctacagcatcactaacaacttcccattcaggcccgcctttcttcctcccaactcttgactctgcagctcttggggtgaagccttattcctgatgctccagacgatcaccatctgcttcctggtcatgcactacagaggacagactgtgaaaggtgctggggacttacccaagagcaggctgtgtggttcctgggaaccctgctgggaactcaggtctgggaaagccaaatgatgtggagagattgacaaggactcctgtctccccacccctaggtgtcgctttcctcgcttgctacggcctggtcctgctggtgcttctctcacctctgacgcccttgactgtagtcaccctgctccaggcctccaatgtgcctgctgtggtggtggggagggtgggtaccaggagcaagggacaagatgtggtgggggcagggtcggggggaagagtagaagatcaaagtgtgggggtgttgtacttgggggagcatgggaagagctcaggtgacagagccaaaggtctcaactcctcccctcttctccaggcagccaccaactaccacaacgggcacacaggccagctctcagccatcacagtcttcctgctgtttgggggctccctggcccgaatcttcacttccattcaggaaaccggagatcccctgatggctgggacctttgtggtctcctctctctgcaacggcctcatcgccgcccagctgctcttctactggaatgcaaagcctccccacaagcagaaaaaggcgcagtagagccagctactggagtcattccgtttccactcattcacccaacctcagggttctccccatctgagccagcctgctggtgtgacttactcatcctccattcctctgcacttgcagactttctgagccagggttttcttttagtggaaacaaatggttgatggatccagatccttagaaaaggagaggatgggggtagagtctcccaagccaaaattttgacatttgagtgctttcgtaagccctgtacatgtactattaattcagtcattcagccaagcctcctcctctagcagcaatttccagctgtttaacactatcctgggcaaatgttttaccctgtcctccagcctccctgcttcccttctggccctggaagactgagtctggacggcagagtggagggactgggaggctgtggctgcctccctccctcagcccggctgggactgtctcccggaccccagtgctggggtgggggaagggggacggagaatgactcaggcagggccccagggtggggtgaggaggttcctgctctggcaggtctaggcggaagggagtggagatggggctggttcctgctgcagtgaggggaacagatgggacaataaagactggagactcagttgaataatacaaaactgtttaatactaccaaaaata

SEQ ID NO: 280064 - DNA, 1742 bp, Homo sapiens
gcgcccttccctctagagacgctgagagaacgggagctagtagcgcccccacccaacgccacctcggagactccggctccttctctctcaacttcgaacaatacaaagtgtgctaggagaagacaagatggcgcccagcaggaggagcggagaaaggcaggggtgtaaatctggcttccaaactggaagcgtcaacaaaggcgtgggaggtctaaccgcgcaggcgtgcagcttcggcaagctttacaattccaacagcgcgtccaaaacgtggtccctgactgagacttattttacgccactagagtgagggtgggtagcgtcagaaagagcggggcacggggcgggccagcttcgccgcgggaaaagaacgggaggcggagtgtccgcagcgcgcacgcgcaacgaaagtcaatggcggtctggagagactggcggaagctagctttgcaatatggcggccgaggcggacggaccgcttaaacggctgctcgtgccgattcttttacctgagaaatgctacgaccaacttttcgttcagtgggacttgcttcacgtcccctgcctcaagattctcctcagcaaaggcctggggctgggcattgtggctggctcacttctagtaaagctgccccaggtgtttaaaatcctgggagccaagagtgctgaagggttgagtctccagtctgtaatgctggagctagtggcattgactgggaccatggtctacagcatcactaacaacttcccattcagctcttggggtgaagccttattcctgatgctccagacgatcaccatctgcttcctggtcatgcactacagaggacagactgtgaaagcttctccaggcagccaccaactaccacaacgggcacacaggccagctctcagccatcacagtcttcctgctgtttgggggctccctggcccgaatcttcacttccattcaggaaaccggagatcccctgatggctgggacctttgtggtctcctctctctgcaacggcctcatcgccgcccagctgctcttctactggaatgcaaagcctccccacaagcagaaaaaggcgcagtagagccagctactggagtcattccgtttccactcattcacccaacctcagggttctccccatctgagccagcctgctggtgtgacttactcatcctccattcctctgcacttgcagactttctgagccagggttttcttttagtggaaacaaatggttgatggatccagatccttagaaaaggagaggatgggggtagagtctcccaagccaaaattttgacatttgagtgctttcgtaagccctgtacatgtactattaattcagtcattcagccaagcctcctcctctagcagcaatttccagctgtttaacactatcctgggcaaatgttttaccctgtcctccagcctccctgcttcccttctggccctggaagactgagtctggacggcagagtggagggactgggaggctgtggctgcctccctccctcagcccggctgggactgtctcccggaccccagtgctggggtgggggaagggggacggagaatgactcaggcagggccccagggtggggtgaggaggttcctgctctggcaggtctaggcggaagggagtggagatggggctggttcctgctgcagtgaggggaacagatgggacaataaagactggagactcagttgaataatacaaaactgtttaatactaccaaaaata

SEQ ID NO: 280065 - DNA, 2403 bp, Homo sapiens
  misc_feature (1004)..(1004): n is a, c, g, or t
  misc_feature (1254)..(1254): n is a, c, g, or t
gcgcccttccctctagagacgctgagagaacgggagctagtagcgcccccacccaacgccacctcggagactccggctccttctctctcaacttcgaacaatacaaagtgtgctaggagaagacaagatggcgcccagcaggaggagcggagaaaggcaggggtgtaaatctggcttccaaactggaagcgtcaacaaaggcgtgggaggtctaaccgcgcaggcgtgcagcttcggcaagctttacaattccaacagcgcgtccaaaacgtggtccctgactgagacttattttacgccactagagtgagggtgggtagcgtcagaaagagcggggcacggggcgggccagcttcgccgcgggaaaagaacgggaggcggagtgtccgcagcgcgcacgcgcaacgaaagtcaatggcggtctggagagactggcggaagctagctttgcaatatggcggccgaggcggacggaccgcttaaacggctgctcgtgccgattcttttacctgagaaatgctacgaccaacttttcgttcagtgggacttgcttcacgtcccctgcctcaagattctcctcagcaaaggcctggggctgggcattgtggctggctcacttctagtaaagctgccccaggtgtttaaaatcctgggagccaagagtgtgctggattaaaaaaggaggatgaggcccgtcccgtgaggtctgcgtccatgagggttagaggtgggttaggggcatgggggcaccagcaaggggagggttgtatggagtgggagagccagggggcaggtagtgggtataggtgggcagcagttccccctggagcctagggtcactctgagggagggagcacggtgagggggcttccagtttgcagtgggaagagctgcagagagaaacaagaggttagagggcacttccctgggttggaggtgagtctggccagttctgggcagacagggtagagcgtgccacccacccagccctggctacccagccngctgggcgcagcaggcatggaagccgaccccgggatggagagcccgcggccctgttggggcacgctcgggagcgggcttgcgtgctgcacggctgttttcctcttggggagtcaggccaggaaagggcagaatgagctcggcctctccttgccctgggggctgggagaggaagctgggtcacacacaggccagaagcaggggggaaacggggcatctaactaggacacagtcgcatccaggggtcagtcncctgaccctacagggcccaccaccttcagactgagatggaaacgccctctgggagaaccctgatccgccccaccctacacaggccccggaggtactgggcctgcgcccgccacaccttggccgcgagtggcctctgcttgggtgggctcccgtcctccggcatccgcccccaccaaggctccagaagaggggcgcatgggcctccgtcttcggcccgcttcccaggcactcacccatagctgccaggcaggtaggctgtcgagtagctggggggtctgtacccaaagcctctgctcggttgggtggtcgcgtaccccggcccccagagcgggccgccgctggccaggttgcctcttccctgtccgcagcgggaagtccggcgcccgagctcttggccttgcgccgaggccggtacttgtagtcggggtagtcgcgcaggtgtcgggcgcggagccgcttggcctcctccacgaaggccgcttctcgtcctcgtccagcagcttccactgcgcgcccaggcgcttggagatctcggagttgtgcatcttggggttctgctgcgccatctggcggcgctgagcggagctccacaccatgaacgcgttcatcggccgcttcaccttctccaggggcagcgtcccgggggccgcggggctcccagcgccctcccgctcctggggtcccgaagatgaggaggcagcagccgtggcagccggaggctccaggctccaggcctggtcctgtgaggagcctggtagcgccatgggttgggagaagccttaagagggcgtcctgaatgccctcccctcaacgtgaagcgtcgatcctgaaaatggaaaggtcttcccagtctggagtcgttgccgaggaacttgggtccttaaaaagtgtattttatccccaagcccagagcttaaaccggagcctttgcttccaacctgttcggcacactttggggagagtcgaatgcaaaatccgctgtctggtgccccggcactgaagaggtgttctgaggcctactgactgggggacccccggtccctctccccgacccgcagctgcgatcagaccgaccttccgtggagggggtaaaccataaacccctttgtggtctccggagttccgacagctgccaggcgcggataggcc

SEQ ID NO: 280066 - DNA, 931 bp, Homo sapiens
gcgcccttccctctagagacgctgagagaacgggagctagtagcgcccccacccaacgccacctcggagactccggctccttctctctcaacttcgaacaatacaaagtgtgctaggagaagacaagatggcgcccagcaggaggagcggagaaaggcaggggtgtaaatctggcttccaaactggaagcgtcaacaaaggcgtgggaggtctaaccgcgcaggcgtgcagcttcggcaagctttacaattccaacagcgcgtccaaaacgtggtccctgactgagacttattttacgccactagagtgagggtgggtagcgtcagaaagagcggggcacggggcgggccagcttcgccgcgggaaaagaacgggaggcggagtgtccgcagcgcgcacgcgcaacgaaagtcaatggcggtctggagagactggcggaagctagctttgcaatatggcggccgaggcggacggaccgcttaaacggctgctcgtgccgattcttttacctgagaaatgctacgaccaacttttcgttcagtgggacttgcttcacgtcccctgcctcaagattctcctcagcaaaggcctggggctgggcattgtggctggctcacttctagtaaagctgccccaggtgtttaaaatcctgggagccaagagtgctgaagggttgagtctccagtctgtaatgctggagctagtggcattgactgggaccatggtctacagcatcactaacaacttcccattcagctcttggggtgaagccttattcctgatgctccagacgatcaccatctgcttcctggtctaggcggaagggagtggagatggggctggttcctgctgcagtgaggggaacagatgggacaataaagactggagactcagttgaataatacaaaactgtttaatactaccaaaaata

SEQ ID NO: 280067 - DNA, 1458 bp, Homo sapiens
  misc_feature (5)..(6): n is a, c, g, or t
  misc_feature (11)..(11): n is a, c, g, or t
  misc_feature (34)..(35): n is a, c, g, or t
ccctnngcccnaaagtgaacccccccgagcctgnnggccactggagcttgcttatgggggggggcggacggaccgcttaaacggctgctcgtgccgattcttttacctgagaaatgctacgaccaacttttcgttcagtgggacttgcttcacgtcccctgcctcaagattctcctcagcaaaggcctggggctgggcattgtggctggctcacttctagtaaagctgccccaggtgtttaaaatcctgggagccaagagtgctgaagggttgagtctccagtctgtaatgctggagctagtggcattgactgggaccatggtctacagcatcactaacaacttcccattcagctcttggggtgaagccttattcctgatgctccagacgatcaccatctgcttcctggtcatgcactacagaggacagactgtgaaaggtgtcgctttcctcgcttgctacggcctggtcctgctggtgcttctctcacctctgacgcccttgactgtagtcaccctgctccaggcctccaatgtgcctgctgtggtggtggggaggcttctccaggcagccaccaactaccacaacgggcacacaggccagctctcagccatcacagtcttcctgctgtttgggggctccctggcccgaatcttcacttccattcaggaaaccggagatcccctgatggctgggacctttgtggtctcctctctctgcaacggcctcatcgccgcccagctgctcttctactggaatgcaaagcctccccacaagcagaaaaaggcgcagtagagccagctactggagtcattccgtttccactcattcacccaacctcagggttctccccatctgagccagcctgctggtgtgacttactcatcctccattcctctgcacttgcagactttctgagccagggttttcttttagtggaaacaaatggttgatggatccagatccttagaaaaggagaggatgggggtagagtctcccaagccaaaattttgacatttgagtgctttcgtaagccctgtacatgtactattaattcagtcattcagccaagcctcctcctctagcagcaatttccagctgtttaacactatcctgggcaaatgttttaccctgtcctccagcctccctgcttcccttctggccctggaagactgagtctggacggcagagtggagggactgggaggctgtggctgcctccctccctcagcccggctgggactgtctcccggaccccagtgctggggtgggggaagggggacggagaatgactcaggcagggccccagggtggggtgaggaggttcctgctctggcaggtctaggcggaagggagtggagatggggctggttcctgctgcagtgaggggaacagatgggacaataaagactggagactcagttgaataatacaaaactgtttaatactaccaaaaata

SEQ ID NO: 280068 - DNA, 1897 bp, Homo sapiens
gcgcccttccctctagagacgctgagagaacgggagctagtagcgcccccacccaacgccacctcggagactccggctccttctctctcaacttcgaacaatacaaagtgtgctaggagaagacaagatggcgcccagcaggaggagcggagaaaggcaggggtgtaaatctggcttccaaactggaagcgtcaacaaaggcgtgggaggtctaaccgcgcaggcgtgcagcttcggcaagctttacaattccaacagcgcgtccaaaacgtggtccctgactgagacttattttacgccactagagtgagggtgggtagcgtcagaaagagcggggcacggggcgggccagcttcgccgcgggaaaagaacgggaggcggagtgtccgcagcgcgcacgcgcaacgaaagtcaatggcggtctggagagactggcggaagctagctttgcaatatggcggccgaggcggacggaccgcttaaacggctgctcgtgccgattcttttacctgagaaatgctacgaccaacttttcgttcagtgggacttgcttcacgtcccctgcctcaagattctcctcagcaaaggcctggggctgggcattgtggctggctcacttctagtaaagctgccccaggtgtttaaaatcctgggagccaagagtgctgaagggttgagtctccagtctgtaatgctggagctagtggcattgactgggaccatggtctacagcatcactaacaacttcccattcaggcccgcctttcttcctcccaactcttgactctgcagctcttggggtgaagccttattcctgatgctccagacgatcaccatctgcttcctggtcatgcactacagaggacagactgtgaaaggtgtcgctttcctcgcttgctacggcctggtcctgctggtgcttctctcacctctgacgcccttgactgtagtcaccctgctccaggcctccaatgtgcctgctgtggtggtggggaggcttctccaggcagccaccaactaccacaacgggcacacaggccagctctcagccatcacagtcttcctgctgtttgggggctccctggcccgaatcttcacttccattcaggaaaccggagatcccctgatggctgggacctttgtggtctcctctctctgcaacggcctcatcgccgcccagctgctcttctactggaatgcaaagcctccccacaagcagaaaaaggcgcagtagagccagctactggagtcattccgtttccactcattcacccaacctcagggttctccccatctgagccagcctgctggtgtgacttactcatcctccattcctctgcacttgcagactttctgagccagggttttcttttagtggaaacaaatggttgatggatccagatccttagaaaaggagaggatgggggtagagtctcccaagccaaaattttgacatttgagtgctttcgtaagccctgtacatgtactattaattcagtcattcagccaagcctcctcctctagcagcaatttccagctgtttaacactatcctgggcaaatgttttaccctgtcctccagcctccctgcttcccttctggccctggaagactgagtctggacggcagagtggagggactgggaggctgtggctgcctccctccctcagcccggctgggactgtctcccggaccccagtgctggggtgggggaagggggacggagaatgactcaggcagggccccagggtggggtgaggaggttcctgctctggcaggtctaggcggaagggagtggagatggggctggttcctgctgcagtgaggggaacagatgggacaataaagactggagactcagttgaataatacaaaactgtttaatactaccaaaaata

SEQ ID NO: 280069 - DNA, 2002 bp, Homo sapiens
gcgcccttccctctagagacgctgagagaacgggagctagtagcgcccccacccaacgccacctcggagactccggctccttctctctcaacttcgaacaatacaaagtgtgctaggagaagacaagatggcgcccagcaggaggagcggagaaaggcaggggtgtaaatctggcttccaaactggaagcgtcaacaaaggcgtgggaggtctaaccgcgcaggcgtgcagcttcggcaagctttacaattccaacagcgcgtccaaaacgtggtccctgactgagacttattttacgccactagagtgagggtgggtagcgtcagaaagagcggggcacggggcgggccagcttcgccgcgggaaaagaacgggaggcggagtgtccgcagcgcgcacgcgcaacgaaagtcaatggcggtctggagagactggcggaagctagctttgcaatatggcggccgaggcggacggaccgcttaaacggctgctcgtgccgattcttttacctgagaaatgctacgaccaacttttcgttcagtgggacttgcttcacgtcccctgcctcaagattctcctcagcaaaggcctggggctgggcattgtggctggctcacttctagtaaagctgccccaggtgtttaaaatcctgggagccaagagtgctgaagggttgagtctccagtctgtaatgctggagctagtggcattgactgggaccatggtctacagcatcactaacaacttcccattcagctcttggggtgaagccttattcctgatgctccagacgatcaccatctgcttcctggtcatgcactacagaggacagactgtgaaaggtgtcgctttcctcgcttgctacggcctggtcctgctggtgcttctctcacctctgacgcccttgactgtagtcaccctgctccaggcctccaatgtgcctgctgtggtggtggggagggtgggtaccaggagcaagggacaagatgtggtgggggcagggtcggggggaagagtagaagatcaaagtgtgggggtgttgtacttgggggagcatgggaagagctcaggtgacagagccaaaggtctcaactcctcccctcttctccaggcagccaccaactaccacaacgggcacacaggccagctctcagccatcacagtcttcctgctgtttgggggctccctggcccgaatcttcacttccattcaggaaaccggagatcccctgatggctgggacctttgtggtctcctctctctgcaacggcctcatcgccgcccagctgctcttctactggaatgcaaagcctccccacaagcagaaaaaggcgcagtagagccagctactggagtcattccgtttccactcattcacccaacctcagggttctccccatctgagccagcctgctggtgtgacttactcatcctccattcctctgcacttgcagactttctgagccagggttttcttttagtggaaacaaatggttgatggatccagatccttagaaaaggagaggatgggggtagagtctcccaagccaaaattttgacatttgagtgctttcgtaagccctgtacatgtactattaattcagtcattcagccaagcctcctcctctagcagcaatttccagctgtttaacactatcctgggcaaatgttttaccctgtcctccagcctccctgcttcccttctggccctggaagactgagtctggacggcagagtggagggactgggaggctgtggctgcctccctccctcagcccggctgggactgtctcccggaccccagtgctggggtgggggaagggggacggagaatgactcaggcagggccccagggtggggtgaggaggttcctgctctggcaggtctaggcggaagggagtggagatggggctggttcctgctgcagtgaggggaacagatgggacaataaagactggagactcagttgaataatacaaaactgtttaatactaccaaaaata

SEQ ID NO: 280070 - DNA, 1803 bp, Homo sapiens
gcgcccttccctctagagacgctgagagaacgggagctagtagcgcccccacccaacgccacctcggagactccggctccttctctctcaacttcgaacaatacaaagtgtgctaggagaagacaagatggcgcccagcaggaggagcggagaaaggcaggggtgtaaatctggcttccaaactggaagcgtcaacaaaggcgtgggaggtctaaccgcgcaggcgtgcagcttcggcaagctttacaattccaacagcgcgtccaaaacgtggtccctgactgagacttattttacgccactagagtgagggtgggtagcgtcagaaagagcggggcacggggcgggccagcttcgccgcgggaaaagaacgggaggcggagtgtccgcagcgcgcacgcgcaacgaaagtcaatggcggtctggagagactggcggaagctagctttgcaatatggcggccgaggcggacggaccgcttaaacggctgctcgtgccgattcttttacctgagaaatgctacgaccaacttttcgttcagtgggacttgcttcacgtcccctgcctcaagattctcctcagcaaaggcctggggctgggcattgtggctggctcacttctagtaaagctgccccaggtgtttaaaatcctgggagccaagagtgctgaagggttgagtctccagtctgtaatgctggagctagtggcattgactgggaccatggtctacagcatcactaacaacttcccattcagctcttggggtgaagccttattcctgatgctccagacgatcaccatctgcttcctggtcatgcactacagaggacagactgtgaaaggtgctggggacttacccaagagcaggctgtgtggttcctgggaaccctgctgggaactcagcttctccaggcagccaccaactaccacaacgggcacacaggccagctctcagccatcacagtcttcctgctgtttgggggctccctggcccgaatcttcacttccattcaggaaaccggagatcccctgatggctgggacctttgtggtctcctctctctgcaacggcctcatcgccgcccagctgctcttctactggaatgcaaagcctccccacaagcagaaaaaggcgcagtagagccagctactggagtcattccgtttccactcattcacccaacctcagggttctccccatctgagccagcctgctggtgtgacttactcatcctccattcctctgcacttgcagactttctgagccagggttttcttttagtggaaacaaatggttgatggatccagatccttagaaaaggagaggatgggggtagagtctcccaagccaaaattttgacatttgagtgctttcgtaagccctgtacatgtactattaattcagtcattcagccaagcctcctcctctagcagcaatttccagctgtttaacactatcctgggcaaatgttttaccctgtcctccagcctccctgcttcccttctggccctggaagactgagtctggacggcagagtggagggactgggaggctgtggctgcctccctccctcagcccggctgggactgtctcccggaccccagtgctggggtgggggaagggggacggagaatgactcaggcagggccccagggtggggtgaggaggttcctgctctggcaggtctaggcggaagggagtggagatggggctggttcctgctgcagtgaggggaacagatgggacaataaagactggagactcagttgaataatacaaaactgtttaatactaccaaaaata

SEQ ID NO: 280071 - DNA, 1047 bp, Homo sapiens
gcgcccttccctctagagacgctgagagaacgggagctagtagcgcccccacccaacgccacctcggagactccggctccttctctctcaacttcgaacaatacaaagtgtgctaggagaagacaagatggcgcccagcaggaggagcggagaaaggcaggggtgtaaatctggcttccaaactggaagcgtcaacaaaggcgtgggaggtctaaccgcgcaggcgtgcagcttcggcaagctttacaattccaacagcgcgtccaaaacgtggtccctgactgagacttattttacgccactagagtgagggtgggtagcgtcagaaagagcggggcacggggcgggccagcttcgccgcgggaaaagaacgggaggcggagtgtccgcagcgcgcacgcgcaacgaaagtcaatggcggtctggagagactggcggaagctagctttgcaatatggcggccgaggcggacggaccgcttaaacggctgctcgtgccgattcttttacctgagaaatgctacgaccaacttttcgttcagtgggacttgcttcacgtcccctgcctcaagattctcctcagcaaaggcctggggctgggcattgtggctggctcacttctagtaaagctgccccaggtgtttaaaatcctgggagccaagagtgctgaagggttgagtctccagtctgtaatgctggagctagtggcattgactgggaccatggtctacagcatcactaacaacttcccattcaggtgaggggcccacccttccaccccaagggtaatacccacaactctaatggggattaaggtgaaggaggttacaaggcagcaaagtggccgggcccagtggcttgcacctgtaaccccagcactttgggaggccgaggcgggtggatcacctgaggtcaggagttcgaactggccaacatggtgaaaccccgtctctactaaaaatacaaaattagctgggtgtggtgatgggcacctgtaatcccagctacttgggaggctgaggcaggagaatcacttgaacctgggagg

SEQ ID NO: 280072 - DNA, 1954 bp, Homo sapiens
gagacgaagtctctgtcgcccaggctggagtgcagtggtggaatcatggctcactgcaacctctgcctcctaggttcaagcgattctcctgcctcagcctcccaagtagctgggattacaggtgcctgccaccacgcccggctgttttttgtatttttagtagagacagggtttcaccatattggccaggctcctgacctcaggtgatccgcctgccttggcctcccagggtgctaggattacatgcatgagccaccgtgcctggcctcagacatcaataatttttaaagattcttttggtgattccaaagtatatcaaaatttgggggatcatagatagaaagactgaaattaagagagtcaagcttaattaaaaatcatggttgacgactgatagtccaaaagacagagtcacaaatcgtgtaaatatttgcaactaagagtcaagaggcatttatttgcagatagaggtgtctggctaaatgttggtctgcttagcaacacagatgaagagtcctataacagttccatatttaatgacagaaactgtagcattagccagtctgtgtgttttaatgaaagttaaccctaggcctaagaaaacctgattttggattccaaagggagtttgaaatcctagcttatttaaagggttttatctcattgcttcccttggtccctgtgaattacagcccttattttttgtgttttctgcaaaactcaagggtcatttattgctgcttagctctgacttttcctttctttaagtgcctctagaagaatgaatgtttgggtcataaatcaattaaaaaattaaaaaattggtttatgaccaacaaaaaagggatgctgaaattactatcaccagattgatatttggttggttagatgggggttttgttcaactttctaaatagtcttggtaaacttgataaggatcatatcatatgatactgaatggtaaggtcagatctggcaggaagtaaaatgaagatcaaagcttgtgtcactattctattaatcatacactgctttctttaactggagtaaagtaaacattgggttttccttctttagagcataccagaaattcctgatgacctgaagcaactttataaaactgtgtgggaaatctctcagaaaactgttctcaagatggcagctgagagaggtgctttcattgatcaaagccaatctttgaacatccacattgctgagcctaactatggcaaactcactagtatgcacttctacggctggaagcagggtttgaagactgggatgtattatttaaggacaagaccagcggctaatccaatccagttcactctaaataaggagaagctaaaagataaagaaaaggtatcaaaagaggaagaagagaaggagaggaacacagcagccatggtgtgctctttggagaatagagatgaatgtctgatgtgtggatcctgaggaaagacttggaagagaccagcatgtcttcagtagccaaactacttcttgagcatagataggtatagtgggtttgcttgaggtggtaaggctttgctggaccctgttgcaggcaaaaggagtaattgatttaaagtactgttaatgatgataatgattttttttttaaactcatatattgggattttcaccaaaataatgcttttgaaaaaaagaaaaaaaaaacggatatattgagaatcaaagtagaagttttaggaatgcaaaataagtcatcttgcatacagggagtggttaagtaaggtttcatcacccctttagcactgcttttctgaagacttcagttttgttaaggagatttagttttactgctttgactggtgggtctctagaagcaaaactgagtgataactcatgagaagtactgataggacctttatctggatatggtcctataggttattctgaaataaagataaacatttctaagtgaaaaaat

SEQ ID NO: 280073 - DNA, 1068 bp, Homo sapiens
cagcttccactgctcagatcctggggaataatgagtccattgaaccttacaccagcaacatctatactcgcagagtcttgtcaggagaatttcagattgtaaatcctcacttattgaaagatcttaccgagcggggcctatggcatgaagagatgaaaaaccagattattgcatgcaatggctctattcagagcataccagaaattcctgatgacctgaagcaactttataaaactgtgtgggaaatctctcagaaaactgttctcaagatggcagctgagagaggtgctttcattgatcaaagccaatctttgaacatccacattgctgagcctaactatggcaaactcactagtatgcacttctacggctggaagcagggtttgaagactgggatgtattatttaaggacaagaccagcggctaatccaatccagttcactctaaataaggagaagctaaaagataaagaaaaggtatcaaaagaggaagaagagaaggagaggaacacagcagccatggtgtgctctttggagaatagagatgaatgtctgatgtgtggatcctgaggaaagacttggaagagaccagcatgtcttcagtagccaaactacttcttgagcatagataggtatagtgggtttgcttgaggtggtaaggctttgctggaccctgttgcaggcaaaaggagtaattgatttaaagtactgttaatgatgataatgattttttttttaaactcatatattgggattttcaccaaaataatgcttttgaaaaaaagaaaaaaaaaacggatatattgagaatcaaagtagaagttttaggaatgcaaaataagtcatcttgcatacagggagtggttaagtaaggtttcatcacccctttagcactgcttttctgaagacttcagttttgttaaggagatttagttttactgctttgactggtgggtctctagaagcaaaactgagtgataactcatgagaagtactgataggacctttatctggatatggtcctataggttattctgaaataaagataaacatttctaagtgaaaaaat

SEQ ID NO: 280074 - DNA, 800 bp, Homo sapiens
aggagagctggtttcagacttcgagaaggacacgggcagcagacagtggtcagtcctttcttggctctgctgacactcgagcccacattccgtcacctgctcagaatcatgcaggtctccactgctgcccttgctgtcctcctctgcaccatggctctctgcaaccagttctctgcatcacttgctgctgacacgccgaccgcctgctgcttcagctacacctcccggcagattccacagaatttcatagctgactactttgagacgagcagccagtgctccaagcccggtgtcatcttcctaaccaagcgaagccggcaggtctgtgctgaccccagtgaggagtgggtccagaaatatgtcagcgacctggagctgagtgcctgaggggtccagaagcttcgaggcccagcgacctcggtgggcccagtggggaggagcaggagcctgagccttgggaacatgcgtgtgacctccacagctacctcttctatggactggttgttgccaaacagccacactgtgggactcttcttaacttaaattttaatttatttatactatttagtttttgtaatttattttcgatttcacagtgtgtttgtgattgtttgctctgagagttcccctgtcccctcccccttccctcacaccgcgtctggtgacaaccgagtggctgtcatcggcctgtgtaggcagtcatggcaccaaagccaccagactgacaaatgtgtatcggatgcttttgttcagggctgtgatcggcctggggaaataataaagatgctcttttaaaaggt

SEQ ID NO: 280075 - DNA, 986 bp, Homo sapiens
aggagagctggtttcagacttcgagaaggacacgggcagcagacagtggtcagtcctttcttggctctgctgacactcgagcccacattccgtcacctgctcagaatcatgcaggtctccactgctgcccttgctgtcctcctctgcaccatggctctctgcaaccagttctctgcatcacgagtctgagtttcgttgtgggtatcaccactctctggccatggttagaccacatcaatcttttcttgtggcctaaaagcccccaagagaaaagagaacttcttaaagggctgccaaacatcttggtctttctctttaagacttttatttttatctctagaaggggtcttagccccctagtctccagttgctgctgacacgccgaccgcctgctgcttcagctacacctcccggcagattccacagaatttcatagctgactactttgagacgagcagccagtgctccaagcccggtgtcatcttcctaaccaagcgaagccggcaggtctgtgctgaccccagtgaggagtgggtccagaaatatgtcagcgacctggagctgagtgcctgaggggtccagaagcttcgaggcccagcgacctcggtgggcccagtggggaggagcaggagcctgagccttgggaacatgcgtgtgacctccacagctacctcttctatggactggttgttgccaaacagccacactgtgggactcttcttaacttaaattttaatttatttatactatttagtttttgtaatttattttcgatttcacagtgtgtttgtgattgtttgctctgagagttcccctgtcccctcccccttccctcacaccgcgtctggtgacaaccgagtggctgtcatcggcctgtgtaggcagtcatggcaccaaagccaccagactgacaaatgtgtatcggatgcttttgttcagggctgtgatcggcctggggaaataataaagatgctcttttaaaaggt

SEQ ID NO: 280076 - DNA, 1907 bp, Homo sapiens
aggagagctggtttcagacttcgagaaggacacgggcagcagacagtggtcagtcctttcttggctctgctgacactcgagcccacattccgtcacctgctcagaatcatgcaggtctccactgctgcccttgctgtcctcctctgcaccatggctctctgcaaccagttctctgcatcacgagtctgagtttcgttgtgggtatcaccactctctggccatggttagaccacatcaatcttttcttgtggcctaaaagcccccaagagaaaagagaacttcttaaagggctgccaaacatcttggtctttctctttaagacttttatttttatctctagaaggggtcttagccccctagtctccaggtatgagaatctaggcaggggcaggggagttacagtcccttttacagatagaaaaacagggttcgaaacgaatcagttagcaagaggcagaatccagggctgcttacttcccagtggggtatgttgttcactctccagctcactctaggtctcccaggagctctgtcccttggatgtcttatgagagatgtccaaggtttctcttgggttggggtatgacttcttgaaccagacaaaattccctgaagagaactgagataagagaacagtccgttcaggtatctggatcacacagagaaacagagaacccactatgaagagtcaaggagaaagaaggatacagacagaaacaaagagacatttctcagcaaaaatgcccaaatgccttccagtcacttggtctgagcaagcctgccttcctcaactgctcggggatcagaagctgcctggccttttcttctgagctgtgactcgggctcattctcttcctttctccacagttgctgctgacacgccgaccgcctgctgcttcagctacacctcccggcagattccacagaatttcatagctgactactttgagacgagcagccagtgctccaagcccggtgtcatgtaagtgccagtcttcctgctcacctctatggaggtagggagggtcagggttggggcagagacaggccagaaggctatcctggaaaggcccagccttcaggagcctatcggggatacaggacgcagggctccgaggtgtgacctgacttggagctggagtgaggcatgtgttacagagtcaggaagggctgccccagcccagaggaaagggacaggaagaaggaggcagcgggacactctgagggcccccttgcctggagtcactgagagaagctctctagacggagataggcagggggcccctgaaagaggagcaagccctgagctgcccaggacagagagcagaatggtggggccatggtgggcccaggattcccctgctggattccccagtgcttaactcttcctcccttctccacagcttcctaaccaagcgaagccggcaggtctgtgctgaccccagtgaggagtgggtccagaaatatgtcagcgacctggagctgagtgcctgaggggtccagaagcttcgaggcccagcgacctcggtgggcccagtggggaggagcaggagcctgagccttgggaacatgcgtgtgacctccacagctacctcttctatggactggttgttgccaaacagccacactgtgggactcttcttaacttaaattttaatttatttatactatttagtttttgtaatttattttcgatttcacagtgtgtttgtgattgtttgctctgagagttcccctgtcccctcccccttccctcacaccgcgtctggtgacaaccgagtggctgtcatcggcctgtgtaggcagtcatggcaccaaagccaccagactgacaaatgtgtatcggatgcttttgttcagggctgtgatcggcctggggaaataataaagatgctcttttaaaaggt

SEQ ID NO: 280077 - DNA, 1165 bp, Homo sapiens
aggagagctggtttcagacttcgagaaggacacgggcagcagacagtggtcagtcctttcttggctctgctgacactcgagcccacattccgtcacctgctcagaatcatgcaggtctccactgctgcccttgctgtcctcctctgcaccctgcttcagctacacctcccggcagattccacagaatttcatagctgactactttgagacgagcagccagtgctccaagcccggtgtcatgtaagtgccagtcttcctgctcacctctatggaggtagggagggtcagggttggggcagagacaggccagaaggctatcctggaaaggcccagccttcaggagcctatcggggatacaggacgcagggctccgaggtgtgacctgacttggagctggagtgaggcatgtgttacagagtcaggaagggctgccccagcccagaggaaagggacaggaagaaggaggcagcgggacactctgagggcccccttgcctggagtcactgagagaagctctctagacggagataggcagggggcccctgaaagaggagcaagccctgagctgcccaggacagagagcagaatggtggggccatggtgggcccaggattcccctgctggattccccagtgcttaactcttcctcccttctccacagcttcctaaccaagcgaagccggcaggtctgtgctgaccccagtgaggagtgggtccagaaatatgtcagcgacctggagctgagtgcctgaggggtccagaagcttcgaggcccagcgacctcggtgggcccagtggggaggagcaggagcctgagccttgggaacatgcgtgtgacctccacagctacctcttctatggactggttgttgccaaacagccacactgtgggactcttcttaacttaaattttaatttatttatactatttagtttttgtaatttattttcgatttcacagtgtgtttgtgattgtttgctctgagagttcccctgtcccctcccccttccctcacaccgcgtctggtgacaaccgagtggctgtcatcggcctgtgtaggcagtcatggcaccaaagccaccagactgacaaatgtgtatcggatgcttttgttcagggctgtgatcggcctggggaaataataaagatgctcttttaaaaggt

SEQ ID NO: 280078 - DNA, 346 bp, Homo sapiens
aggagagctggtttcagacttcgagaaggacacgggcagcagacagtggtcagtcctttcttggctctgctgacactcgagcccacattccgtcacctgctcagaatcatgcaggtctccactgctgcccttgctgtcctcctctgcaccatggctctctgcaaccagttctctgcatcacctcccccttccctcacaccgcgtctggtgacaaccgagtggctgtcatcggcctgtgtaggcagtcatggcaccaaagccaccagactgacaaatgtgtatcggatgcttttgttcagggctgtgatcggcctggggaaataataaagatgctcttttaaaaggt

SEQ ID NO: 280079 - DNA, 1486 bp, Homo sapiens
aggagagctggtttcagacttcgagaaggacacgggcagcagacagtggtcagtcctttcttggctctgctgacactcgagcccacattccgtcacctgctcagaatcatgcaggtctccactgctgcccttgctgtcctcctctgcaccatggctctctgcaaccagttctctgcatcacgagtctgagtttcgttgtgggtatcaccactctctggccatggttagaccacatcaatcttttcttgtggcctaaaagcccccaagagaaaagagaacttcttaaagggctgccaaacatcttggtctttctctttaagacttttatttttatctctagaaggggtcttagccccctagtctccaggtatgagaatctaggcaggggcaggggagttacagtcccttttacagatagaaaaacagggttcgaaacgaatcagttagcaagaggcagaatccagggctgcttacttcccagtggggtatgttgttcactctccagctcactctaggtctcccaggagctctgtcccttggatgtcttatgagagatgtccaaggtttctcttgggttggggtatgacttcttgaaccagacaaaattccctgaagagaactgagataagagaacagtccgttcaggtatctggatcacacagagaaacagagaacccactatgaagagtcaaggagaaagaaggatacagacagaaacaaagagacatttctcagcaaaaatgcccaaatgccttccagtcacttggtctgagcaagcctgccttcctcaactgctcggggatcagaagctgcctggccttttcttctgagctgtgactcgggctcattctcttcctttctccacagttgctgctgacacgccgaccgcctgctgcttcagctacacctcccggcagattccacagaatttcatagctgactactttgagacgagcagccagtgctccaagcccggtgtcatcttcctaaccaagcgaagccggcaggtctgtgctgaccccagtgaggagtgggtccagaaatatgtcagcgacctggagctgagtgcctgaggggtccagaagcttcgaggcccagcgacctcggtgggcccagtggggaggagcaggagcctgagccttgggaacatgcgtgtgacctccacagctacctcttctatggactggttgttgccaaacagccacactgtgggactcttcttaacttaaattttaatttatttatactatttagtttttgtaatttattttcgatttcacagtgtgtttgtgattgtttgctctgagagttcccctgtcccctcccccttccctcacaccgcgtctggtgacaaccgagtggctgtcatcggcctgtgtaggcagtcatggcaccaaagccaccagactgacaaatgtgtatcggatgcttttgttcagggctgtgatcggcctggggaaataataaagatgctcttttaaaaggt

SEQ ID NO: 280080 - DNA, 769 bp, Homo sapiens
aggagagctggtttcagacttcgagaaggacacgggcagcagacagtggtcagtcctttcttggctctgctgacactcgagcccacattccgtcacctgctcagaatcatgcaggtctccactgctgcccttgctgtcctcctctgcaccttgctgctgacacgccgaccgcctgctgcttcagctacacctcccggcagattccacagaatttcatagctgactactttgagacgagcagccagtgctccaagcccggtgtcatcttcctaaccaagcgaagccggcaggtctgtgctgaccccagtgaggagtgggtccagaaatatgtcagcgacctggagctgagtgcctgaggggtccagaagcttcgaggcccagcgacctcggtgggcccagtggggaggagcaggagcctgagccttgggaacatgcgtgtgacctccacagctacctcttctatggactggttgttgccaaacagccacactgtgggactcttcttaacttaaattttaatttatttatactatttagtttttgtaatttattttcgatttcacagtgtgtttgtgattgtttgctctgagagttcccctgtcccctcccccttccctcacaccgcgtctggtgacaaccgagtggctgtcatcggcctgtgtaggcagtcatggcaccaaagccaccagactgacaaatgtgtatcggatgcttttgttcagggctgtgatcggcctggggaaataataaagatgctcttttaaaaggt

SEQ ID NO: 280081 - DNA, 1179 bp, Homo sapiens
aggagagctggtttcagacttcgagaaggacacgggcagcagacagtggtcagtcctttcttggctctgctgacactcgagcccacattccgtcacctgctcagaatcatgcaggtctccactgctgcccttgctgtcctcctctgcaccatggctctctgcaaccagttctctgcatcacgagtctgagtttcgttgtgggtatcaccactctctggccatggttagaccacatcaatcttttcttgtggcctaaaagcccccaagagaaaagagaacttcttaaagggctgccaaacatcttggtctttctctttaagacttttatttttatctctagaaggggtcttagccccctagtctccaggtatgagaatctaggcaggggcaggggagttacagtcccttttacagatagaaaaacagggttcgaaacgaatcagttagcaagaggcagaatccagggctgcttacttcccagtggggtatgttgttcactctccagctcactctaggtctcccaggagctctgtcccttggatgtcttatgagagatgtccaaggtttctcttgggttggggtatgacttcttgaaccagacaaaattccctgaagagaactgagataagagaacagtccgttcaggtatctggatcacacagagaaacagagaacccactatgaagagtcaaggagaaagaaggatacagacagaaacaaagagacatttctcagcaaaaatgcccaaatgccttccagtcacttggtctgagcaagcctgccttcctcaactgctcggggatcagaagctgcctggccttttcttctgagccttgggaacatgcgtgtgacctccacagctacctcttctatggactggttgttgccaaacagccacactgtgggactcttcttaacttaaattttaatttatttatactatttagtttttgtaatttattttcgatttcacagtgtgtttgtgattgtttgctctgagagttcccctgtcccctcccccttccctcacaccgcgtctggtgacaaccgagtggctgtcatcggcctgtgtaggcagtcatggcaccaaagccaccagactgacaaatgtgtatcggatgcttttgttcagggctgtgatcggcctggggaaataataaagatgctcttttaaaaggt

SEQ ID NO: 280082 - DNA, 2417 bp, Homo sapiens
  misc_feature (1120)..(1120): n is a, c, g, or t
  misc_feature (1809)..(1809): n is a, c, g, or t
  misc_feature (2416)..(2416): n is a, c, g, or t
agtttcaaaatattctgacaggacacagacagccctggctgaaaggagcacagagagaatacttcgagctcatgctgagagaaaaaggcgagtttgtcttttcttacctgagactgggcctgaagggagagtttcagttcttcattgacggttgctttcaagatgtacctgggaattacaccaagtgtgacctgtaacaattcaagcaaaaatgaattttccctgattctagagaagaatcccctggtggagtttgtggaagagctccctgctgggcgatcttctctgtgctactgcaacttgctctgtgggattatcagaggtgccttggaaatggttcatttggcggctgatgttacattcttgcaagacagactaaaaggtgacagtgtgacagaaataggaataacatttctaaaaaagcgagacgagaaaaaatatagagggaaaaaatgaagactagcacggaaaatgccacggggcggctagctgagttaatgttagctaaacatgtatagacatagaaattttgaattgcttcatagcatgagctttgaaaggtttataaatcagccagaaatttgaaatgcagggcatgaaggcttaaaggtttttttttccttttgcttataaatcacgcattttcaatctcatgtccacaaaatttcatatgcaaatagctccttacaagatagcaggcaggaattccacatcttacactatccatcctcagagaagctgttcattccattcacgtatggtaatgggaaaaaaaagcagcacaaatacaaacagttgtgtatttgtctctttgctgaaaaaaaaagaatgaaatgatatagcatagagtttcctatatatagacagtagtttctagatactgtatattgcattccttaaataaataattccatatttctaaaaaaatatgatttgatttttctcatgtattagcttggcttatagctttagccttctgacgctacccttgatttgtaatcaccaagtcaagctatttattcaatgataattttgaaacatttataaataacatttaattttaatttatttagttttaatatagctggcatcaaccaaattccttccttttctcatgaantattgcttgatggtcaggccaggaaacttctaaaataaaggataaataatattctttgaaattactttcttaccccaaagcttattaattcagaatttctactatcattttcatcctctaaaaaatcttccaaaggatgttttctttgtgaccagaacacatttaaaattcaagtgtaccgaattaaatacacagtaatcttcaccagaccactggcacacaagggcggcctacaaggcagcccagaatctactgggctctgcagagagcccaaattgcaagtacaagttataattagtgtgataccaccctacggaattggagaaaatatttgtaaactatgtatctgacacccttgtgctattaataaccagaatatataaggagttcaaccaactccataggaaaaaattaataatccaattaaagatgggcaaaagatctgaatagacatttctcaaaagaagacatacacatacaaatggcaaacaggtatatgaaaaggtgctcaacatcattggtcatcagagaaatgcaaatcaaaactataatgagatattatctcaccctagttaaaaatggcttttatccaaaacaggcaatagtgaatgcttgcaaagatgtggagaagagggaactctggtacactgttggtgggaatgtaaattagtataaccactatggagaanggtttggaggttcctcaaaaaacaaaaaatagaatgatcatatgatccagcaatcccactgctggatatatacccaaaataaaggaaatcagtatatcaaagagatatctgcactcccatgtttactgcagaactactgacgatagctaagatttggaagaaatctaagtgtccttcaatagattaatgaaataaagaaaatatggtacatatacacaatggagtactattcagccataaagaagaatgagatcctgtcatttgcaaaacatggatggaactagaggtcattatgttcaatgaaatatgtcaggacagaaagacagactttgcatgttctcatttatttgtaggagctaaaaattaaaacagtggactcatggagatatggagtaaaatgatggatatcagaggctgggaagggtagtttcaagaggagtggagatggttaatgggtacaaaaatatagttagatagaatgaataagatctgggtcgggcatggtggcacaagcctgtaatctctgcactttgggatgccaaagtgggaggattgcttgagctcaggagtttgagaccagcttgggtaacatagacccctgtctctnc

SEQ ID NO: 280083 - DNA, 379 bp, Homo sapiens
ccatctgccaccctacactctcaatccctaagtaaaacggattctctggggagacgcagcacatcgcctggctctgcagcccccaccacattgtagcgtacacccgtggaggagtttggggtcacacacttaccggcatggtggctgcctggctgagcccggggacagcatgtactcatccgaagaggggacccatgaccgtggtgtgcacagtacaagagctcgcttgggatctctgataaaggaagtccaccatgcagggttgagctgaaccacagaagcccagcctgggagcagggctccaggacctcccaaggatcagaaacctcaatgataaatttccgactggatgatacacactacacctgttcttcagcga

SEQ ID NO: 280084 - DNA, 735 bp, Homo sapiens
  misc_feature (697)..(697): n is a, c, g, or t
  misc_feature (701)..(701): n is a, c, g, or t
  misc_feature (728)..(729): n is a, c, g, or t
  misc_feature (735)..(735): n is a, c, g, or t
tgccttttccctttccaataagagaggaccattgttgggggagccagaagaccgagagagtagccagtgacagagctccacgtgtctgtgaattggctcatctcctccagcaagaaagatggaatctgagctcagaagagtatgcatgctcaggaaaccagccagcaatcctcccagacggtatcaagaaactgaaatttaccagatccccacatctggaaagtgagaagccagacccctcacccatcatgattccccaggtgaccacctgctgcctgttggccaactcctttccctgccccttctgtgtttatgaagccccagtatctgcttcataaacaccagatgtgcatgtggggggcatctgtctcccacctgagcagaggctcccagtgcccactggggtgagtgagctgcaacgtcttctcagggaggtgaacaaggtgaaatgctgtaacactgactgttggaatctgggagaaagactgaaagaggcagtggtttcccctgtgtctgaatgagtgctcaattattccttgtggcagcatcccgcggatgatcagttgttgcttgcgggctttgttatttcaagtcaataaaacccagatgccgcccggcaaccggcggtgggagcttccagcctttttgttccccttttaagtgaaggggtttaatttccgaagctttggcgtaaatnaatngggtcattaagctggttttccttgtgnngaaaan

SEQ ID NO: 280085 - DNA, 401 bp, Homo sapiens
gctgccttttagagtctcagggaccatctttggaataagatggaaaaatcctccttgaagctgaagaactgtcttctgagcaactggcacaaggaatacgtagaggcacattctacatgggcgactgaatataacacaggaaaaggtctcgtccaaattctgactgataacatctgacaatttctcggatttcctgatttgttcttgtgcacaaaatctcaatcaatacacgttcctgagttcctgctccctacatgaaatgaagggaagattatacaaagaaaaatgaaatttctgcaagtaattaaatcttcgtcaaatatttctttgttctgtagaactaaaaactatatattcagatggatgatgtgaaataaagaattgctttaattaccactgta

SEQ ID NO: 280086 - DNA, 584 bp, Homo sapiens
cggggagtgcggcgcggggacgggcgctgggcggccgcggagctccgggtgccgccgcgtccccagcgccccggccggcccctctgggcggcctgcgggggcggcgcagttgcgaaactgagtgcctgtgtagatcatcctagaatacctgtgtggtgctgtccttcctcaagactacctcattctcactggctcggagactcctgcctgctgaggagagtggtagaggcacagaagatgatgaggctgttgaactgtggaggcatagattagagtgacgtggtcacaagccaaggaacacctgaagccaccaacagcttgaaaaacaaggaaagctttctctcctgcaaccattggagggaccctggcccagctggcactttgatttcagcccagtgaaagtgattttgagcttctgacccccagaactatgagaggaaaatttttgttgtttttatgctcccccagtttgtggtaatttgctactgcatctccaggaaactactgcactttgtactgaaacaaatgtaaaaatagattgtaaatataaaataaaccaaccataagagaaaacactttacaaa

SEQ ID NO: 280087 - DNA, 478 bp, Homo sapiens
gaggacacagctagaaggcaccatcactatcagcgaaccagaaagcaggctctcacccgacgctgagtctgacggtgacttgaccttggactttccagcttccagaaaagagagtggtagaggcacagaagatgatgaggctgttgaactgtggaggcatagattagagtgacgtggtcacaagccaaggaacacctgaagccaccaacagcttgaaaaacaaggaaagctttctctcctgcaaccattggagggaccctggcccagctggcactttgatttcagcccagtgaaagtgattttgagcttctgacccccagaactatgagaggaaaatttttgttgtttttatgctcccccagtttgtggtaatttgctactgcatctccaggaaactactgcactttgtactgaaacaaatgtaaaaatagattgtaaatataaaataaaccaaccataagagaaaacactttacaaa

SEQ ID NO: 280088 - DNA, 5765 bp, Homo sapiens
gaggacacagctagaaggcaccatcactatcagcgaaccagaaagcaggctctcacccgacgctgagtctgacggtgacttgaccttggactttccagcttccagaaaactgactacacagacttagtcttctccactccgtgttcctgcagctagagacatgacctaacaccctgatgaccactctcagggaccttgagtgactggccggtgcaccatggaacttaaagtatgggtggatggagttcagaggattgtttgtggagtcactgaagtcacaacttgccaggaggttgtcatagccttagctcaagcaataggtcgaactggaaggtacacccttatagagaaatggagagatactgaaagacacttagcacctcatgaaaatcctatcatatccttaaacaaatgggggcagtatgctagtgatgtgcagctcattctacgacgaactgggccgtctctcagtgagcgacccacttcagacagtgtggctcgaattcctgaaagaactttatacaggcagagtctgccccccttagctaaactgaggcctcagattgacaaatcaatcaaaaggagggaaccgaaaaggaaatcactgacatttacaggaggtgccaaaggattaatggacatttttggaaaaggtaaagaaactgagtttaagcaaaaggtgctgaataactgcaaaacaacagcagatgagttgaagaagctaatccgtctgcagacagagaagcttcaatccattgagaaacagctggaatctaatgaaatagaaataagattttgggagcaaaagtataattccaaccttgaagaggaaattgtccgtctagagcaaaagatcaaaagaaacgatgtagaaattgaggaggaagaattctgggaaaatgaattacagattgaacaggaaaatgaaaaacagctgaaggatcaacttcaagaaataagacagaaaataacagaatgtgaaaacaaattaaaggactatttggcacagatccggactatggaaagtggtcttgaagcagaaaaattgcaacgggaagttcaagaggcacaggtcaatgaggaagaggttaaaggaaagatcggtaaggtcaaaggggagattgacattcaaggccagcagagtctgaggttggaaaatggcatcaaagctgtggaaagatctcttggacaagccaccaaacgcttacaggacaaagaacaggaactggagcagttgactaaggagttgcggcaagtcaatctccagcagttcatccagcagacagggacaaaagttaccgttttgccagcggagcccattgaaatagaggcctcacatgcagacattgaaagggaggcaccattccagtctgggtccctgaagcgacctggttcatctcggcagctccccagtaatctccgcattctgcagaatcctatctcatctggttttaatcctgaaggcatatatgtatgacattatctgtctttagggaggagacccaacagaggtaccaaggacagtaaacttcctttttgatttgtgccaatgatgaacagaggatctattccacaagacgctgtatgttttttctctcctaaattgcataccacttggagccataccctgtgcactgatgctaaagaacaaagaaactgtgttttcacacatcaacagtgttgatatttttgtccagcagctataatgcaaagccttcgtttttatttgtagcattttgagagctttaggaaagtattatatagtgtgtatacataaataagccgtgacttaagtaagagtgaagagaaatttgtgactggcttagtttaatttatttcatgtaatcaatgtgtgaatgttgatgttttaatatttttattgacttatcctgtgactgacttacgttacatattgtgtgattatgaccgtgtgcatgttgccagactccatccatgcattgctgatttacactacacaagtgtcctagggtgctccaccatcgaagctaactccacaggaagccacttgcatttgttttgtgaaactgtcctagccattgcttaattaggtgaaataattcagggttttttaaatctggaatttagtcgttcctttacaatatttccaaatatacgtgtggccacagagcataacagatatttttcataagctaaattgtatgtataaaacatttgcagtgtttcagacactgttgaacaaaaatgtaattggtaagtatgtatccaaacaggcatggggtttcctgatacattatgtgttttgtttctgccctgtcttatcatttacactcatggatcttcagaattaatctaacatggaagttatagatacctgaaagctgggttggtctacttcaggaacattgctttaagtgatgtattttaaaataacccgcttcatatgtatgatctgttggtgtacacaccatgggtaaggtattgcttgcacataatttgctctgcatattatggaccattgtggtttcttccagtcacttagatggaaaggaggttaaacctaggtactttttagcaaggatataaagtcaaattcagcatatgtttttatttttaggcttgacttttacaagacattaatctccatttgtacatatgttattttatttgtaaaaccaaatatgactcaacacctttttgatgagtagtgacttaactaagatttacaagtaatatttagacagattcagtcagacaccacttagccatttttacattccctctggttagatttggtacagtataattaagactttaatctgaaatttaaagtagttttaattctgaagaagttacatcctctgtattatttacatgcaacaaaataaaagtggattaatatagtaatgccatggtaacaatagagctatgtcttatgcatgaaggcaactttggatgttttaacacatttgactgactttggtttagtgaatgctgacaatgctgctctacttaggtttcctatgaaatttttaagaatggctatgagactgtatagaagcttctagagaactgaaagtcataatgcagagttgccttttctagtgcagctaagtggcggacctcaactgaagatatgagtttctttgggttcttggagttatcaaattgatcttgccattatgttactttgcaaataactgaagtaaatgattcttacctaaataaccacaacctgtacacatttgctcacaatttatagtagttattttctatctacctatatttaaaattaggatgattaaaaaataatttatagattttgtgacagtaatgatttacatatgcccaatatatgccttatttttaaataagtcattctgtataaagtcattttgttgttgttcagagaaatcaagatcttattcacaaagaaaaacattttataaattgatcgcattttctttaagtcaaaatgttaaactggaggcagtattaaactttgcaattaggagtttcagagatgccttggcataccacgaaaaacactgtcaatatccaactcattataaattgttatcagaattaacctaataactttaagtaaggacaagcagcatcctagcaacttgtagtagtcttgggttcccagcagagtatcacagttaacctctctgacaacttcatcagaatttccaagctgccaaataatcttcatagacctaattacagatttaaaaaaatttcctaggcgacgaaagtatagaaatgtgaatatgatgaatacattgagaagctgtactttttaattagttatattacttctggaagcacatatctaaggaatattttctaagactcagagggaaaaaaactcgttttcataggatcatctgaagatactttagtatatttgtgatcatttttatctattgcaaatacaaatgaattagataagtgccacatcctggatacatttcggaggggtagtgggcaatggtatacaaaaataccaaatataaaattttcatctgggggaatgttcaggttctaaatactaaattagatttcaatgttttgtgtttttttaaaaaaaatcatattgcaacttgttttattgtgattttctacaagtattaaatacatttaaagatctttttatcttaccaagaaataatttggaatagcattggtatatttgaccttttgagtgtctgtcatcctcagagaatggcccatagtgtgttgcctgtggacatagtgtccatagtccctttcttgtccttctgagatattttggtttgataacattttgttttttgtcttgatgcacagggacttttttataatatgagacttcagttggtattaataggagttacctatttaattctcccagtcatcaatgaggtaatcatcaattcctatagttcaaattagtcataaacaagagctacagcaagactgatagagtaaaaactatataaatacagtaaaaaaaaatagaatttatggtgtgaaatatgaagtatagcaatatataacaagaacatgtaagcacttgcttccacagcataaatgtaatttacatctgcattaaaggataattttctctgtgaataagagcaaaatggtcttcagagaaacagactgttcatttgaagccatttctgtaaacatcttccaagatagaactgtaatggattgaggaaataacacagaaaagacaaaaacttttgatttcaggcatgcaaagtgcgtgggcagatggacagttcccattgtgcattgcctttgataaattgggccttaatttatataacgatgctgtgttcacatccctctcctacctaaagttgtctttattggtttatattgtgttaaaattagcttataattattacttttgtattgtgttcagttttttaagttgcatgtttatactatttgctacagtatttttaagtttggggtgaaggccatcagctgtatcaaaaagacaaaacaatcactatttattcagtattgctgctttacatctccagaataagctttcgatgccaggacagtgactgcctgaaagctgcaggagctcttttcaatgcattttatatatttttagaaaccaaataaatgcagaaaactatttagtatactaattatattaaaccagcagaaatataaaggcaataaagtatatacatatatatggggggaggggaaagattaaaaaatagatttacagccagacatggtgatagccctaaatgtatttctcaatatgtttttctttattgaccctaggaggatttgagttgctgcagctttaaacagaaaattgccatgttcactaattgtgagcacataaatatgcttttagtactgctttgcttatgtacaaataaatctgtaatatgtattatatgtaattatccttttctttgactttcattttaaatgtatattttctgatcattatgagctgtaaaacaaagaatcaatattggatattctcccaaataataaattttcaggattcattggggcaaaaaaaaacaagaagaacaacaaaaatttgttgggcggcctaggcccaaaaaagttttaaacaccattcgtggtggcgcggggcccaggtaggtaagtaacctggccaaagcgggcccaaggaaacgggacagacacaggctgggtccaccaaaaaaacgcgggggaacggacggctggaaaaccaaggagtcgaggcaacggactacaagggccaaggacagtatcgcacgcccggg

SEQ ID NO: 280089 - DNA, 5590 bp, Homo sapiens
cggggagtgcggcgcggggacgggcgctgggcggccgcggagctccgggtgccgccgcgtccccagcgccccggccggcccctctgggcggcctgcgggggcggcgcagttgcgaaactgagtgcctgtgtagatcatcctagaatacctgtgtggtgctgtccttcctcaagactacctcattctcactggctcggagactcctgcctgctgagctagagacatgacctaacaccctgatgaccactctcagggaccttgagtgactggccggtgcaccatggaacttaaagtatgggtggatggagttcagaggattgtttgtggagtcactgaagtcacaacttgccaggaggttgtcatagccttagctcaagcaataggtcgaactggaaggtacacccttatagagaaatggagagatactgaaagacacttagcacctcatgaaaatcctatcatatccttaaacaaatgggggcagtatgctagtgatgtgcagctcattctacgacgaactgggccgtctctcagtgagcgacccacttcagacagtgtggctcgaattcctgaaagaactttatacaggcagagtctgccccccttagctaaactgaggcctcagattgacaaatcaatcaaaaggagggaaccgaaaaggaaatcactgacatttacaggaggtgccaaaggattaatggacatttttggaaaaggtaaagaaactgagtttaagcaaaaggtgctgaataactgcaaaacaacagcagatgagttgaagaagctaatccgtctgcagacagagaagcttcaatccattgagaaacagctggaatctaatgaaatagaaataagattttgggagcaaaagtataattccaaccttgaagaggaaattgtccgtctagagcaaaagatcaaaagaaacgatgtagaaattgaggaggaagaattctgggaaaatgaattacagattgaacaggaaaatgaaaaacagctgaaggatcaacttcaagaaataagacagaaaataacagaatgtgaaaacaaattaaaggactatttggcacagatccggactatggaaagtggtcttgaagcagaaaaattgcaacgggaagttcaagaggcacaggtcaatgaggaagaggttaaaggaaagatcggtaaggtcaaaggggagattgacattcaaggccagcagagtctgaggttggaaaatggcatcaaagctgtggaaagatctcttggacaagccaccaaacgcttacaggacaaagaacaggaactggagcagttgactaaggagttgcggcaagtcaatctccagcagttcatccagcagacagggacaaaagttaccgttttgccagcggagcccattgaaatagaggcctcacatgcagacattgaaagggaggcaccattccagtctgggtccctgaagcgacctggttcatctcggcagctccccagtaatctccgcattctgcagaatcctatctcatctggttttaatcctgaaggcatatatgtatgacattatctgtctttagggaggagacccaacagaggtaccaaggacagtaaacttcctttttgatttgtgccaatgatgaacagaggatctattccacaagacgctgtatgttttttctctcctaaattgcataccacttggagccataccctgtgcactgatgctaaagaacaaagaaactgtgttttcacacatcaacagtgttgatatttttgtccagcagctataatgcaaagccttcgtttttatttgtagcattttgagagctttaggaaagtattatatagtgtgtatacataaataagccgtgacttaagtaagagtgaagagaaatttgtgactggcttagtttaatttatttcatgtaatcaatgtgtgaatgttgatgttttaatatttttattgacttatcctgtgactgacttacgttacatattgtgtgattatgaccgtgtgcatgttgccagactccatccatgcattgctgatttacactacacaagtgtcctagggtgctccaccatcgaagctaactccacaggaagccacttgcatttgttttgtgaaactgtcctagccattgcttaattaggtgaaataattcagggttttttaaatctggaatttagtcgttcctttacaatatttccaaatatacgtgtggccacagagcataacagatatttttcataagctaaattgtatgtataaaacatttgcagtgtttcagacactgttgaacaaaaatgtaattggtaagtatgtatccaaacaggcatggggtttcctgatacattatgtgttttgtttctgccctgtcttatcatttacactcatggatcttcagaattaatctaacatggaagttatagatacctgaaagctgggttggtctacttcaggaacattgctttaagtgatgtattttaaaataacccgcttcatatgtatgatctgttggtgtacacaccatgggtaaggtattgcttgcacataatttgctctgcatattatggaccattgtggtttcttccagtcacttagatggaaaggaggttaaacctaggtactttttagcaaggatataaagtcaaattcagcatatgtttttatttttaggcttgacttttacaagacattaatctccatttgtacatatgttattttatttgtaaaaccaaatatgactcaacacctttttgatgagtagtgacttaactaagatttacaagtaatatttagacagattcagtcagacaccacttagccatttttacattccctctggttagatttggtacagtataattaagactttaatctgaaatttaaagtagttttaattctgaagaagttacatcctctgtattatttacatgcaacaaaataaaagtggattaatatagtaatgccatggtaacaatagagctatgtcttatgcatgaaggcaactttggatgttttaacacatttgactgactttggtttagtgaatgctgacaatgctgctctacttaggtttcctatgaaatttttaagaatggctatgagactgtatagaagcttctagagaactgaaagtcataatgcagagttgccttttctagtgcagctaagtggcggacctcaactgaagatatgagtttctttgggttcttggagttatcaaattgatcttgccattatgttactttgcaaataactgaagtaaatgattcttacctaaataaccacaacctgtacacatttgctcacaatttatagtagttattttctatctacctatatttaaaattaggatgattaaaaaataatttatagattttgtgacagtaatgatttacatatgcccaatatatgccttatttttaaataagtcattctgtataaagtcattttgttgttgttcagagaaatcaagatcttattcacaaagaaaaacattttataaattgatcgcattttctttaagtcaaaatgttaaactggaggcagtattaaactttgcaattaggagtttcagagatgccttggcataccacgaaaaacactgtcaatatccaactcattataaattgttatcagaattaacctaataactttaagtaaggacaagcagcatcctagcaacttgtagtagtcttgggttcccagcagagtatcacagttaacctctctgacaacttcatcagaatttccaagctgccaaataatcttcatagacctaattacagatttaaaaaaatttcctaggcgacgaaagtatagaaatgtgaatatgatgaatacattgagaagctgtactttttaattagttatattacttctggaagcacatatctaaggaatattttctaagactcagagggaaaaaaactcgttttcataggatcatctgaagatactttagtatatttgtgatcatttttatctattgcaaatacaaatgaattagataagtgccacatcctggatacatttcggaggggtagtgggcaatggtatacaaaaataccaaatataaaattttcatctgggggaatgttcaggttctaaatactaaattagatttcaatgttttgtgtttttttaaaaaaaatcatattgcaacttgttttattgtgattttctacaagtattaaatacatttaaagatctttttatcttaccaagaaataatttggaatagcattggtatatttgaccttttgagtgtctgtcatcctcagagaatggcccatagtgtgttgcctgtggacatagtgtccatagtccctttcttgtccttctgagatattttggtttgataacattttgttttttgtcttgatgcacagggacttttttataatatgagacttcagttggtattaataggagttacctatttaattctcccagtcatcaatgaggtaatcatcaattcctatagttcaaattagtcataaacaagagctacagcaagactgatagagtaaaaactatataaatacagtaaaaaaaaatagaatttatggtgtgaaatatgaagtatagcaatatataacaagaacatgtaagcacttgcttccacagcataaatgtaatttacatctgcattaaaggataattttctctgtgaataagagcaaaatggtcttcagagaaacagactgttcatttgaagccatttctgtaaacatcttccaagatagaactgtaatggattgaggaaataacacagaaaagacaaaaacttttgatttcaggcatgcaaagtgcgtgggcagatggacagttcccattgtgcattgcctttgataaattgggccttaatttatataacgatgctgtgttcacatccctctcctacctaaagttgtctttattggtttatattgtgttaaaattagcttataattattacttttgtattgtgttcagttttttaagttgcatgtttatactatttgctacagtatttttaagtttggggtgaaggccatcagctgtatcaaaaagacaaaacaatcactatttattcagtattgctgctttacatctccagaataagctttcgatgccaggacagtgactgcctgaaagctgcaggagctcttttcaatgcattttatatatttttagaaaccaaataaatgcagaaaactatttagtatactaattatattaaaccagcagaaatataaaggcaataaagtatatacatatatatggggggaggggaaagattaaaaaatagatttacagccagacatggtgatagccctaaatgtatttctcaatatgtttttctttattgaccctaggaggatttgagttgctgcagctttaaacagaaaattgccatgttcactaattgtgagcacataaatatgcttttagtactgctttgcttatgtacaaataaatctgtaatatgtattatatgtaattatccttttctttgactttcattttaaatgtatattttctgatcattatgagctgtaaaacaaagaatcaatattggatattctcccaaataataaattttcaggattcattggggca

SEQ ID NO: 280090 - DNA, 5539 bp, Homo sapiens
cggggagtgcggcgcggggacgggcgctgggcggccgcggagctccgggtgccgccgcgtccccagcgccccggccggcccctctgggcggcctgcgggggcggcgcagttgcgaaactgactgactacacagacttagtcttctccactccgtgttcctgcagctagagacatgacctaacaccctgatgaccactctcagggaccttgagtgactggccggtgcaccatggaacttaaagtatgggtggatggagttcagaggattgtttgtggagtcactgaagtcacaacttgccaggaggttgtcatagccttagctcaagcaataggtcgaactggaaggtacacccttatagagaaatggagagatactgaaagacacttagcacctcatgaaaatcctatcatatccttaaacaaatgggggcagtatgctagtgatgtgcagctcattctacgacgaactgggccgtctctcagtgagcgacccacttcagacagtgtggctcgaattcctgaaagaactttatacaggcagagtctgccccccttagctaaactgaggcctcagattgacaaatcaatcaaaaggagggaaccgaaaaggaaatcactgacatttacaggaggtgccaaaggattaatggacatttttggaaaaggtaaagaaactgagtttaagcaaaaggtgctgaataactgcaaaacaacagcagatgagttgaagaagctaatccgtctgcagacagagaagcttcaatccattgagaaacagctggaatctaatgaaatagaaataagattttgggagcaaaagtataattccaaccttgaagaggaaattgtccgtctagagcaaaagatcaaaagaaacgatgtagaaattgaggaggaagaattctgggaaaatgaattacagattgaacaggaaaatgaaaaacagctgaaggatcaacttcaagaaataagacagaaaataacagaatgtgaaaacaaattaaaggactatttggcacagatccggactatggaaagtggtcttgaagcagaaaaattgcaacgggaagttcaagaggcacaggtcaatgaggaagaggttaaaggaaagatcggtaaggtcaaaggggagattgacattcaaggccagcagagtctgaggttggaaaatggcatcaaagctgtggaaagatctcttggacaagccaccaaacgcttacaggacaaagaacaggaactggagcagttgactaaggagttgcggcaagtcaatctccagcagttcatccagcagacagggacaaaagttaccgttttgccagcggagcccattgaaatagaggcctcacatgcagacattgaaagggaggcaccattccagtctgggtccctgaagcgacctggttcatctcggcagctccccagtaatctccgcattctgcagaatcctatctcatctggttttaatcctgaaggcatatatgtatgacattatctgtctttagggaggagacccaacagaggtaccaaggacagtaaacttcctttttgatttgtgccaatgatgaacagaggatctattccacaagacgctgtatgttttttctctcctaaattgcataccacttggagccataccctgtgcactgatgctaaagaacaaagaaactgtgttttcacacatcaacagtgttgatatttttgtccagcagctataatgcaaagccttcgtttttatttgtagcattttgagagctttaggaaagtattatatagtgtgtatacataaataagccgtgacttaagtaagagtgaagagaaatttgtgactggcttagtttaatttatttcatgtaatcaatgtgtgaatgttgatgttttaatatttttattgacttatcctgtgactgacttacgttacatattgtgtgattatgaccgtgtgcatgttgccagactccatccatgcattgctgatttacactacacaagtgtcctagggtgctccaccatcgaagctaactccacaggaagccacttgcatttgttttgtgaaactgtcctagccattgcttaattaggtgaaataattcagggttttttaaatctggaatttagtcgttcctttacaatatttccaaatatacgtgtggccacagagcataacagatatttttcataagctaaattgtatgtataaaacatttgcagtgtttcagacactgttgaacaaaaatgtaattggtaagtatgtatccaaacaggcatggggtttcctgatacattatgtgttttgtttctgccctgtcttatcatttacactcatggatcttcagaattaatctaacatggaagttatagatacctgaaagctgggttggtctacttcaggaacattgctttaagtgatgtattttaaaataacccgcttcatatgtatgatctgttggtgtacacaccatgggtaaggtattgcttgcacataatttgctctgcatattatggaccattgtggtttcttccagtcacttagatggaaaggaggttaaacctaggtactttttagcaaggatataaagtcaaattcagcatatgtttttatttttaggcttgacttttacaagacattaatctccatttgtacatatgttattttatttgtaaaaccaaatatgactcaacacctttttgatgagtagtgacttaactaagatttacaagtaatatttagacagattcagtcagacaccacttagccatttttacattccctctggttagatttggtacagtataattaagactttaatctgaaatttaaagtagttttaattctgaagaagttacatcctctgtattatttacatgcaacaaaataaaagtggattaatatagtaatgccatggtaacaatagagctatgtcttatgcatgaaggcaactttggatgttttaacacatttgactgactttggtttagtgaatgctgacaatgctgctctacttaggtttcctatgaaatttttaagaatggctatgagactgtatagaagcttctagagaactgaaagtcataatgcagagttgccttttctagtgcagctaagtggcggacctcaactgaagatatgagtttctttgggttcttggagttatcaaattgatcttgccattatgttactttgcaaataactgaagtaaatgattcttacctaaataaccacaacctgtacacatttgctcacaatttatagtagttattttctatctacctatatttaaaattaggatgattaaaaaataatttatagattttgtgacagtaatgatttacatatgcccaatatatgccttatttttaaataagtcattctgtataaagtcattttgttgttgttcagagaaatcaagatcttattcacaaagaaaaacattttataaattgatcgcattttctttaagtcaaaatgttaaactggaggcagtattaaactttgcaattaggagtttcagagatgccttggcataccacgaaaaacactgtcaatatccaactcattataaattgttatcagaattaacctaataactttaagtaaggacaagcagcatcctagcaacttgtagtagtcttgggttcccagcagagtatcacagttaacctctctgacaacttcatcagaatttccaagctgccaaataatcttcatagacctaattacagatttaaaaaaatttcctaggcgacgaaagtatagaaatgtgaatatgatgaatacattgagaagctgtactttttaattagttatattacttctggaagcacatatctaaggaatattttctaagactcagagggaaaaaaactcgttttcataggatcatctgaagatactttagtatatttgtgatcatttttatctattgcaaatacaaatgaattagataagtgccacatcctggatacatttcggaggggtagtgggcaatggtatacaaaaataccaaatataaaattttcatctgggggaatgttcaggttctaaatactaaattagatttcaatgttttgtgtttttttaaaaaaaatcatattgcaacttgttttattgtgattttctacaagtattaaatacatttaaagatctttttatcttaccaagaaataatttggaatagcattggtatatttgaccttttgagtgtctgtcatcctcagagaatggcccatagtgtgttgcctgtggacatagtgtccatagtccctttcttgtccttctgagatattttggtttgataacattttgttttttgtcttgatgcacagggacttttttataatatgagacttcagttggtattaataggagttacctatttaattctcccagtcatcaatgaggtaatcatcaattcctatagttcaaattagtcataaacaagagctacagcaagactgatagagtaaaaactatataaatacagtaaaaaaaaatagaatttatggtgtgaaatatgaagtatagcaatatataacaagaacatgtaagcacttgcttccacagcataaatgtaatttacatctgcattaaaggataattttctctgtgaataagagcaaaatggtcttcagagaaacagactgttcatttgaagccatttctgtaaacatcttccaagatagaactgtaatggattgaggaaataacacagaaaagacaaaaacttttgatttcaggcatgcaaagtgcgtgggcagatggacagttcccattgtgcattgcctttgataaattgggccttaatttatataacgatgctgtgttcacatccctctcctacctaaagttgtctttattggtttatattgtgttaaaattagcttataattattacttttgtattgtgttcagttttttaagttgcatgtttatactatttgctacagtatttttaagtttggggtgaaggccatcagctgtatcaaaaagacaaaacaatcactatttattcagtattgctgctttacatctccagaataagctttcgatgccaggacagtgactgcctgaaagctgcaggagctcttttcaatgcattttatatatttttagaaaccaaataaatgcagaaaactatttagtatactaattatattaaaccagcagaaatataaaggcaataaagtatatacatatatatggggggaggggaaagattaaaaaatagatttacagccagacatggtgatagccctaaatgtatttctcaatatgtttttctttattgaccctaggaggatttgagttgctgcagctttaaacagaaaattgccatgttcactaattgtgagcacataaatatgcttttagtactgctttgcttatgtacaaataaatctgtaatatgtattatatgtaattatccttttctttgactttcattttaaatgtatattttctgatcattatgagctgtaaaacaaagaatcaatattggatattctcccaaataataaattttcaggattcattggggca

SEQ ID NO: 280091 - DNA, 5496 bp, Homo sapiens
cggggagtgcggcgcggggacgggcgctgggcggccgcggagctccgggtgccgccgcgtccccagcgccccggccggcccctctgggcggcctgcgggggcggcgcagttgcgaaactgactagagacatgacctaacaccctgatgaccactctcagggaccttgagtgactggccggtgcaccatggaacttaaagtatgggtggatggagttcagaggattgtttgtggagtcactgaagtcacaacttgccaggaggttgtcatagccttagctcaagcaataggtcgaactggaaggtacacccttatagagaaatggagagatactgaaagacacttagcacctcatgaaaatcctatcatatccttaaacaaatgggggcagtatgctagtgatgtgcagctcattctacgacgaactgggccgtctctcagtgagcgacccacttcagacagtgtggctcgaattcctgaaagaactttatacaggcagagtctgccccccttagctaaactgaggcctcagattgacaaatcaatcaaaaggagggaaccgaaaaggaaatcactgacatttacaggaggtgccaaaggattaatggacatttttggaaaaggtaaagaaactgagtttaagcaaaaggtgctgaataactgcaaaacaacagcagatgagttgaagaagctaatccgtctgcagacagagaagcttcaatccattgagaaacagctggaatctaatgaaatagaaataagattttgggagcaaaagtataattccaaccttgaagaggaaattgtccgtctagagcaaaagatcaaaagaaacgatgtagaaattgaggaggaagaattctgggaaaatgaattacagattgaacaggaaaatgaaaaacagctgaaggatcaacttcaagaaataagacagaaaataacagaatgtgaaaacaaattaaaggactatttggcacagatccggactatggaaagtggtcttgaagcagaaaaattgcaacgggaagttcaagaggcacaggtcaatgaggaagaggttaaaggaaagatcggtaaggtcaaaggggagattgacattcaaggccagcagagtctgaggttggaaaatggcatcaaagctgtggaaagatctcttggacaagccaccaaacgcttacaggacaaagaacaggaactggagcagttgactaaggagttgcggcaagtcaatctccagcagttcatccagcagacagggacaaaagttaccgttttgccagcggagcccattgaaatagaggcctcacatgcagacattgaaagggaggcaccattccagtctgggtccctgaagcgacctggttcatctcggcagctccccagtaatctccgcattctgcagaatcctatctcatctggttttaatcctgaaggcatatatgtatgacattatctgtctttagggaggagacccaacagaggtaccaaggacagtaaacttcctttttgatttgtgccaatgatgaacagaggatctattccacaagacgctgtatgttttttctctcctaaattgcataccacttggagccataccctgtgcactgatgctaaagaacaaagaaactgtgttttcacacatcaacagtgttgatatttttgtccagcagctataatgcaaagccttcgtttttatttgtagcattttgagagctttaggaaagtattatatagtgtgtatacataaataagccgtgacttaagtaagagtgaagagaaatttgtgactggcttagtttaatttatttcatgtaatcaatgtgtgaatgttgatgttttaatatttttattgacttatcctgtgactgacttacgttacatattgtgtgattatgaccgtgtgcatgttgccagactccatccatgcattgctgatttacactacacaagtgtcctagggtgctccaccatcgaagctaactccacaggaagccacttgcatttgttttgtgaaactgtcctagccattgcttaattaggtgaaataattcagggttttttaaatctggaatttagtcgttcctttacaatatttccaaatatacgtgtggccacagagcataacagatatttttcataagctaaattgtatgtataaaacatttgcagtgtttcagacactgttgaacaaaaatgtaattggtaagtatgtatccaaacaggcatggggtttcctgatacattatgtgttttgtttctgccctgtcttatcatttacactcatggatcttcagaattaatctaacatggaagttatagatacctgaaagctgggttggtctacttcaggaacattgctttaagtgatgtattttaaaataacccgcttcatatgtatgatctgttggtgtacacaccatgggtaaggtattgcttgcacataatttgctctgcatattatggaccattgtggtttcttccagtcacttagatggaaaggaggttaaacctaggtactttttagcaaggatataaagtcaaattcagcatatgtttttatttttaggcttgacttttacaagacattaatctccatttgtacatatgttattttatttgtaaaaccaaatatgactcaacacctttttgatgagtagtgacttaactaagatttacaagtaatatttagacagattcagtcagacaccacttagccatttttacattccctctggttagatttggtacagtataattaagactttaatctgaaatttaaagtagttttaattctgaagaagttacatcctctgtattatttacatgcaacaaaataaaagtggattaatatagtaatgccatggtaacaatagagctatgtcttatgcatgaaggcaactttggatgttttaacacatttgactgactttggtttagtgaatgctgacaatgctgctctacttaggtttcctatgaaatttttaagaatggctatgagactgtatagaagcttctagagaactgaaagtcataatgcagagttgccttttctagtgcagctaagtggcggacctcaactgaagatatgagtttctttgggttcttggagttatcaaattgatcttgccattatgttactttgcaaataactgaagtaaatgattcttacctaaataaccacaacctgtacacatttgctcacaatttatagtagttattttctatctacctatatttaaaattaggatgattaaaaaataatttatagattttgtgacagtaatgatttacatatgcccaatatatgccttatttttaaataagtcattctgtataaagtcattttgttgttgttcagagaaatcaagatcttattcacaaagaaaaacattttataaattgatcgcattttctttaagtcaaaatgttaaactggaggcagtattaaactttgcaattaggagtttcagagatgccttggcataccacgaaaaacactgtcaatatccaactcattataaattgttatcagaattaacctaataactttaagtaaggacaagcagcatcctagcaacttgtagtagtcttgggttcccagcagagtatcacagttaacctctctgacaacttcatcagaatttccaagctgccaaataatcttcatagacctaattacagatttaaaaaaatttcctaggcgacgaaagtatagaaatgtgaatatgatgaatacattgagaagctgtactttttaattagttatattacttctggaagcacatatctaaggaatattttctaagactcagagggaaaaaaactcgttttcataggatcatctgaagatactttagtatatttgtgatcatttttatctattgcaaatacaaatgaattagataagtgccacatcctggatacatttcggaggggtagtgggcaatggtatacaaaaataccaaatataaaattttcatctgggggaatgttcaggttctaaatactaaattagatttcaatgttttgtgtttttttaaaaaaaatcatattgcaacttgttttattgtgattttctacaagtattaaatacatttaaagatctttttatcttaccaagaaataatttggaatagcattggtatatttgaccttttgagtgtctgtcatcctcagagaatggcccatagtgtgttgcctgtggacatagtgtccatagtccctttcttgtccttctgagatattttggtttgataacattttgttttttgtcttgatgcacagggacttttttataatatgagacttcagttggtattaataggagttacctatttaattctcccagtcatcaatgaggtaatcatcaattcctatagttcaaattagtcataaacaagagctacagcaagactgatagagtaaaaactatataaatacagtaaaaaaaaatagaatttatggtgtgaaatatgaagtatagcaatatataacaagaacatgtaagcacttgcttccacagcataaatgtaatttacatctgcattaaaggataattttctctgtgaataagagcaaaatggtcttcagagaaacagactgttcatttgaagccatttctgtaaacatcttccaagatagaactgtaatggattgaggaaataacacagaaaagacaaaaacttttgatttcaggcatgcaaagtgcgtgggcagatggacagttcccattgtgcattgcctttgataaattgggccttaatttatataacgatgctgtgttcacatccctctcctacctaaagttgtctttattggtttatattgtgttaaaattagcttataattattacttttgtattgtgttcagttttttaagttgcatgtttatactatttgctacagtatttttaagtttggggtgaaggccatcagctgtatcaaaaagacaaaacaatcactatttattcagtattgctgctttacatctccagaataagctttcgatgccaggacagtgactgcctgaaagctgcaggagctcttttcaatgcattttatatatttttagaaaccaaataaatgcagaaaactatttagtatactaattatattaaaccagcagaaatataaaggcaataaagtatatacatatatatggggggaggggaaagattaaaaaatagatttacagccagacatggtgatagccctaaatgtatttctcaatatgtttttctttattgaccctaggaggatttgagttgctgcagctttaaacagaaaattgccatgttcactaattgtgagcacataaatatgcttttagtactgctttgcttatgtacaaataaatctgtaatatgtattatatgtaattatccttttctttgactttcattttaaatgtatattttctgatcattatgagctgtaaaacaaagaatcaatattggatattctcccaaataataaattttcaggattcattggggca

SEQ ID NO: 280092 - DNA, 2839 bp, Homo sapiens
gaggacacagctagaaggcaccatcactatcagcgaaccagaaagcaggctctcacccgacgctgagtctgacggtgacttgaccttggactttccagcttccagaaaactgactacacagacttagtcttctccactccgtgttcctgcagctagagacatgacctaacaccctgatgaccactctcagggaccttgagtgactggccggtgcaccatggaacttaaagtatgggtggatggagttcagaggattgtttgtggagtcactgaagtcacaacttgccaggaggttgtcatagccttagctcaagcaataggtcgaactggaaggtacacccttatagagaaatggagagatactgaaagacacttagcacctcatgaaaatcctatcatatccttaaacaaatgggggcagtatgctagtgatgtgcagctcattctacgacgaactgggccgtctctcagtgagcgacccacttcagacagtgtggctcgaattcctgaaagaactttatacaggcagagtctgccccccttagctaaactgaggcctcagattgacaaatcaatcaaaaggagggaaccgaaaaggaaatcactgacatttacaggaggtgccaaaggattaatggacatttttggaaaaggtaaagaaactgagtttaagcaaaaggtgctgaataactgcaaaacaacagcagatgagttgaagaagctaatccgtctgcagacagagaagcttcaatccattgagaaacagctggaatctaatgaaatagaaataagattttgggagcaaaagtataattccaaccttgaagaggaaattgtccgtctagagcaaaagatcaaaagaaacgatgtagaaattgaggaggaagaattctgggaaaatgaattacagattgaacaggaaaatgaaaaacagctgaaggatcaacttcaagaaataagacagaaaataacagaatgtgaaaacaaattaaaggactatttggcacagatccggactatggaaagtggtcttgaagcagaaaaattgcaacgggaagttcaagaggcacaggtcaatgaggaagaggttaaaggaaagatcggtaaggtcaaaggggagattgacattcaaggccagcagagtctgaggttggaaaatggcatcaaagctgtggaaagatctcttggacaagccaccaaacgcttacaggacaaagaacaggaactggagcagttgactaaggagttgcggcaagtcaatctccagcagttcatccagcagacagggacaaaagttaccgttttgccagcggagcccattgaaatagaggcctcacatgcagacattgaaagggaggcaccattccagtctgggtccctgaagcgacctggttcatctcggcagctccccagtaatctccgcattctgcagaatcctatctcatctggttttaatcctgaaggcatatatgtatgacattatctgtctttagggaggagacccaacagaggtaccaaggacagtaaacttcctttttgatttgtgccaatgatgaacagaggatctattccacaagacgctgtatgttttttctctcctaaattgcataccacttggagccataccctgtgcactgatgctaaagaacaaagaaactgtgttttcacacatcaacagtgttgatatttttgtccagcagctataatgcaaagccttcgtttttatttgtagcattttgagagctttaggaaagtattatatagtgtgtatacataaataagccgtgacttaagtaagagtgaagagaaatttgtgactggcttagtttaatttatttcatgtaatcaatgtgtgaatgttgatgttttaatatttttattgacttatcctgtgactgacttacgttacatattgtgtgattatgaccgtgtgcatgttgccagactccatccatgcattgctgatttacactacacaagtgtcctagggtgctccaccatcgaagctaactccacaggaagccacttgcatttgttttgtgaaactgtcctagccattgcttaattaggtgaaataattcagggttttttaaatctggaatttagtcgttcctttacaatatttccaaatatacgtgtggccacagagcataacagatatttttcataagctaaattgtatgtataaaacatttgcagtgtttcagacactgttgaacaaaaatgtaattggtaagtatgtatccaaacaggcatggggtttcctgatacattatgtgttttgtttctgccctgtcttatcatttacactcatggatcttcagaattaatctaacatggaagttatagatacctgaaagctgggttggtctacttcaggaacattgctttaagtgatgtattttaaaataacccgcttcatatgtatgatctgttggtgtacacaccatgggtaaggtattgcttgcacataatttgctctgcatattatggaccattgtggtttcttccagtcacttagatggaaaggaggttaaacctaggtactttttagcaaggatataaagtcaaattcagcatatgtttttatttttaggcttgacttttacaagacattaatctccatttgtacatatgttattttatttgtaaaaccaaatatgactcaacacctttttgatgagtagtgacttaactaagatttacaagtaatatttagacagattccaggtcaggaacacccaacttttaaggccccaaattttttttttaaccattccccctcctggtgggttttaaaggaaattttggtacaggtataatttaaaggacttttatc

SEQ ID NO: 280093 - DNA, 5527 bp, Homo sapiens
gaggacacagctagaaggcaccatcactatcagcgaaccagaaagcaggctctcacccgacgctgagtctgacggtgacttgaccttggactttccagcttccagaaaactgactacacagacttagtcttctccactccgtgttcctgcagctagagacatgacctaacaccctgatgaccactctcagggaccttgagtgactggccggtgcaccatggaacttaaagtatgggtggatggagttcagaggattgtttgtggagtcactgaagtcacaacttgccaggaggttgtcatagccttagctcaagcaataggtcgaactggaaggtacacccttatagagaaatggagagatactgaaagacacttagcacctcatgaaaatcctatcatatccttaaacaaatgggggcagtatgctagtgatgtgcagctcattctacgacgaactgggccgtctctcagtgagcgacccacttcagacagtgtggctcgaattcctgaaagaactttatacaggcagagtctgccccccttagctaaactgaggcctcagattgacaaatcaatcaaaaggagggaaccgaaaaggaaatcactgacatttacaggaggtgccaaaggattaatggacatttttggaaaaggtaaagaaactgagtttaagcaaaaggtgctgaataactgcaaaacaacagcagatgagttgaagaagctaatccgtctgcagacagagaagcttcaatccattgagaaacagctggaatctaatgaaatagaaataagattttgggagcaaaagtataattccaaccttgaagaggaaattgtccgtctagagcaaaagatcaaaagaaacgatgtagaaattgaggaggaagaattctgggaaaatgaattacagattgaacaggaaaatgaaaaacagctgaaggatcaacttcaagaaataagacagaaaataacagaatgtgaaaacaaattaaaggactatttggcacagatccggactatggaaagtggtcttgaagcagaaaaattgcaacgggaagttcaagaggcacaggtcaatgaggaagaggttaaaggaaagatcggtaaggtcaaaggggagattgacattcaaggccagcagagtctgaggttggaaaatggcatcaaagctgtggaaagatctcttggacaagccaccaaacgcttacaggacaaagaacaggaactggagcagttgactaaggagttgcggcaagtcaatctccagcagttcatccagcagacagggacaaaagttaccgttttgccagcggagcccattgaaatagaggcctcacatgcagacattgaaagggaggcaccattccagtctgggtccctgaagcgacctggttcatctcggcagctccccagtaatctccgcattctgcagaatcctatctcatctggttttaatcctgaaggcatatatgtatgacattatctgtctttagggaggagacccaacagaggtaccaaggacagtaaacttcctttttgatttgtgccaatgatgaacagaggatctattccacaagacgctgtatgttttttctctcctaaattgcataccacttggagccataccctgtgcactgatgctaaagaacaaagaaactgtgttttcacacatcaacagtgttgatatttttgtccagcagctataatgcaaagccttcgtttttatttgtagcattttgagagctttaggaaagtattatatagtgtgtatacataaataagccgtgacttaagtaagagtgaagagaaatttgtgactggcttagtttaatttatttcatgtaatcaatgtgtgaatgttgatgttttaatatttttattgacttatcctgtgactgacttacgttacatattgtgtgattatgaccgtgtgcatgttgccagactccatccatgcattgctgatttacactacacaagtgtcctagggtgctccaccatcgaagctaactccacaggaagccacttgcatttgttttgtgaaactgtcctagccattgcttaattaggtgaaataattcagggttttttaaatctggaatttagtcgttcctttacaatatttccaaatatacgtgtggccacagagcataacagatatttttcataagctaaattgtatgtataaaacatttgcagtgtttcagacactgttgaacaaaaatgtaattggtaagtatgtatccaaacaggcatggggtttcctgatacattatgtgttttgtttctgccctgtcttatcatttacactcatggatcttcagaattaatctaacatggaagttatagatacctgaaagctgggttggtctacttcaggaacattgctttaagtgatgtattttaaaataacccgcttcatatgtatgatctgttggtgtacacaccatgggtaaggtattgcttgcacataatttgctctgcatattatggaccattgtggtttcttccagtcacttagatggaaaggaggttaaacctaggtactttttagcaaggatataaagtcaaattcagcatatgtttttatttttaggcttgacttttacaagacattaatctccatttgtacatatgttattttatttgtaaaaccaaatatgactcaacacctttttgatgagtagtgacttaactaagatttacaagtaatatttagacagattcagtcagacaccacttagccatttttacattccctctggttagatttggtacagtataattaagactttaatctgaaatttaaagtagttttaattctgaagaagttacatcctctgtattatttacatgcaacaaaataaaagtggattaatatagtaatgccatggtaacaatagagctatgtcttatgcatgaaggcaactttggatgttttaacacatttgactgactttggtttagtgaatgctgacaatgctgctctacttaggtttcctatgaaatttttaagaatggctatgagactgtatagaagcttctagagaactgaaagtcataatgcagagttgccttttctagtgcagctaagtggcggacctcaactgaagatatgagtttctttgggttcttggagttatcaaattgatcttgccattatgttactttgcaaataactgaagtaaatgattcttacctaaataaccacaacctgtacacatttgctcacaatttatagtagttattttctatctacctatatttaaaattaggatgattaaaaaataatttatagattttgtgacagtaatgatttacatatgcccaatatatgccttatttttaaataagtcattctgtataaagtcattttgttgttgttcagagaaatcaagatcttattcacaaagaaaaacattttataaattgatcgcattttctttaagtcaaaatgttaaactggaggcagtattaaactttgcaattaggagtttcagagatgccttggcataccacgaaaaacactgtcaatatccaactcattataaattgttatcagaattaacctaataactttaagtaaggacaagcagcatcctagcaacttgtagtagtcttgggttcccagcagagtatcacagttaacctctctgacaacttcatcagaatttccaagctgccaaataatcttcatagacctaattacagatttaaaaaaatttcctaggcgacgaaagtatagaaatgtgaatatgatgaatacattgagaagctgtactttttaattagttatattacttctggaagcacatatctaaggaatattttctaagactcagagggaaaaaaactcgttttcataggatcatctgaagatactttagtatatttgtgatcatttttatctattgcaaatacaaatgaattagataagtgccacatcctggatacatttcggaggggtagtgggcaatggtatacaaaaataccaaatataaaattttcatctgggggaatgttcaggttctaaatactaaattagatttcaatgttttgtgtttttttaaaaaaaatcatattgcaacttgttttattgtgattttctacaagtattaaatacatttaaagatctttttatcttaccaagaaataatttggaatagcattggtatatttgaccttttgagtgtctgtcatcctcagagaatggcccatagtgtgttgcctgtggacatagtgtccatagtccctttcttgtccttctgagatattttggtttgataacattttgttttttgtcttgatgcacagggacttttttataatatgagacttcagttggtattaataggagttacctatttaattctcccagtcatcaatgaggtaatcatcaattcctatagttcaaattagtcataaacaagagctacagcaagactgatagagtaaaaactatataaatacagtaaaaaaaaatagaatttatggtgtgaaatatgaagtatagcaatatataacaagaacatgtaagcacttgcttccacagcataaatgtaatttacatctgcattaaaggataattttctctgtgaataagagcaaaatggtcttcagagaaacagactgttcatttgaagccatttctgtaaacatcttccaagatagaactgtaatggattgaggaaataacacagaaaagacaaaaacttttgatttcaggcatgcaaagtgcgtgggcagatggacagttcccattgtgcattgcctttgataaattgggccttaatttatataacgatgctgtgttcacatccctctcctacctaaagttgtctttattggtttatattgtgttaaaattagcttataattattacttttgtattgtgttcagttttttaagttgcatgtttatactatttgctacagtatttttaagtttggggtgaaggccatcagctgtatcaaaaagacaaaacaatcactatttattcagtattgctgctttacatctccagaataagctttcgatgccaggacagtgactgcctgaaagctgcaggagctcttttcaatgcattttatatatttttagaaaccaaataaatgcagaaaactatttagtatactaattatattaaaccagcagaaatataaaggcaataaagtatatacatatatatggggggaggggaaagattaaaaaatagatttacagccagacatggtgatagccctaaatgtatttctcaatatgtttttctttattgaccctaggaggatttgagttgctgcagctttaaacagaaaattgccatgttcactaattgtgagcacataaatatgcttttagtactgctttgcttatgtacaaataaatctgtaatatgtattatatgtaattatccttttctttgactttcattttaaatgtatattttctgatcattatgagctgtaaaacaaagaatcaatattggatattctcccaaataataaattttcaggattcattggggca

SEQ ID NO: 280094 - DNA, 5633 bp, Homo sapiens
cggggagtgcggcgcggggacgggcgctgggcggccgcggagctccgggtgccgccgcgtccccagcgccccggccggcccctctgggcggcctgcgggggcggcgcagttgcgaaactgagtgcctgtgtagatcatcctagaatacctgtgtggtgctgtccttcctcaagactacctcattctcactggctcggagactcctgcctgctgagctgactacacagacttagtcttctccactccgtgttcctgcagctagagacatgacctaacaccctgatgaccactctcagggaccttgagtgactggccggtgcaccatggaacttaaagtatgggtggatggagttcagaggattgtttgtggagtcactgaagtcacaacttgccaggaggttgtcatagccttagctcaagcaataggtcgaactggaaggtacacccttatagagaaatggagagatactgaaagacacttagcacctcatgaaaatcctatcatatccttaaacaaatgggggcagtatgctagtgatgtgcagctcattctacgacgaactgggccgtctctcagtgagcgacccacttcagacagtgtggctcgaattcctgaaagaactttatacaggcagagtctgccccccttagctaaactgaggcctcagattgacaaatcaatcaaaaggagggaaccgaaaaggaaatcactgacatttacaggaggtgccaaaggattaatggacatttttggaaaaggtaaagaaactgagtttaagcaaaaggtgctgaataactgcaaaacaacagcagatgagttgaagaagctaatccgtctgcagacagagaagcttcaatccattgagaaacagctggaatctaatgaaatagaaataagattttgggagcaaaagtataattccaaccttgaagaggaaattgtccgtctagagcaaaagatcaaaagaaacgatgtagaaattgaggaggaagaattctgggaaaatgaattacagattgaacaggaaaatgaaaaacagctgaaggatcaacttcaagaaataagacagaaaataacagaatgtgaaaacaaattaaaggactatttggcacagatccggactatggaaagtggtcttgaagcagaaaaattgcaacgggaagttcaagaggcacaggtcaatgaggaagaggttaaaggaaagatcggtaaggtcaaaggggagattgacattcaaggccagcagagtctgaggttggaaaatggcatcaaagctgtggaaagatctcttggacaagccaccaaacgcttacaggacaaagaacaggaactggagcagttgactaaggagttgcggcaagtcaatctccagcagttcatccagcagacagggacaaaagttaccgttttgccagcggagcccattgaaatagaggcctcacatgcagacattgaaagggaggcaccattccagtctgggtccctgaagcgacctggttcatctcggcagctccccagtaatctccgcattctgcagaatcctatctcatctggttttaatcctgaaggcatatatgtatgacattatctgtctttagggaggagacccaacagaggtaccaaggacagtaaacttcctttttgatttgtgccaatgatgaacagaggatctattccacaagacgctgtatgttttttctctcctaaattgcataccacttggagccataccctgtgcactgatgctaaagaacaaagaaactgtgttttcacacatcaacagtgttgatatttttgtccagcagctataatgcaaagccttcgtttttatttgtagcattttgagagctttaggaaagtattatatagtgtgtatacataaataagccgtgacttaagtaagagtgaagagaaatttgtgactggcttagtttaatttatttcatgtaatcaatgtgtgaatgttgatgttttaatatttttattgacttatcctgtgactgacttacgttacatattgtgtgattatgaccgtgtgcatgttgccagactccatccatgcattgctgatttacactacacaagtgtcctagggtgctccaccatcgaagctaactccacaggaagccacttgcatttgttttgtgaaactgtcctagccattgcttaattaggtgaaataattcagggttttttaaatctggaatttagtcgttcctttacaatatttccaaatatacgtgtggccacagagcataacagatatttttcataagctaaattgtatgtataaaacatttgcagtgtttcagacactgttgaacaaaaatgtaattggtaagtatgtatccaaacaggcatggggtttcctgatacattatgtgttttgtttctgccctgtcttatcatttacactcatggatcttcagaattaatctaacatggaagttatagatacctgaaagctgggttggtctacttcaggaacattgctttaagtgatgtattttaaaataacccgcttcatatgtatgatctgttggtgtacacaccatgggtaaggtattgcttgcacataatttgctctgcatattatggaccattgtggtttcttccagtcacttagatggaaaggaggttaaacctaggtactttttagcaaggatataaagtcaaattcagcatatgtttttatttttaggcttgacttttacaagacattaatctccatttgtacatatgttattttatttgtaaaaccaaatatgactcaacacctttttgatgagtagtgacttaactaagatttacaagtaatatttagacagattcagtcagacaccacttagccatttttacattccctctggttagatttggtacagtataattaagactttaatctgaaatttaaagtagttttaattctgaagaagttacatcctctgtattatttacatgcaacaaaataaaagtggattaatatagtaatgccatggtaacaatagagctatgtcttatgcatgaaggcaactttggatgttttaacacatttgactgactttggtttagtgaatgctgacaatgctgctctacttaggtttcctatgaaatttttaagaatggctatgagactgtatagaagcttctagagaactgaaagtcataatgcagagttgccttttctagtgcagctaagtggcggacctcaactgaagatatgagtttctttgggttcttggagttatcaaattgatcttgccattatgttactttgcaaataactgaagtaaatgattcttacctaaataaccacaacctgtacacatttgctcacaatttatagtagttattttctatctacctatatttaaaattaggatgattaaaaaataatttatagattttgtgacagtaatgatttacatatgcccaatatatgccttatttttaaataagtcattctgtataaagtcattttgttgttgttcagagaaatcaagatcttattcacaaagaaaaacattttataaattgatcgcattttctttaagtcaaaatgttaaactggaggcagtattaaactttgcaattaggagtttcagagatgccttggcataccacgaaaaacactgtcaatatccaactcattataaattgttatcagaattaacctaataactttaagtaaggacaagcagcatcctagcaacttgtagtagtcttgggttcccagcagagtatcacagttaacctctctgacaacttcatcagaatttccaagctgccaaataatcttcatagacctaattacagatttaaaaaaatttcctaggcgacgaaagtatagaaatgtgaatatgatgaatacattgagaagctgtactttttaattagttatattacttctggaagcacatatctaaggaatattttctaagactcagagggaaaaaaactcgttttcataggatcatctgaagatactttagtatatttgtgatcatttttatctattgcaaatacaaatgaattagataagtgccacatcctggatacatttcggaggggtagtgggcaatggtatacaaaaataccaaatataaaattttcatctgggggaatgttcaggttctaaatactaaattagatttcaatgttttgtgtttttttaaaaaaaatcatattgcaacttgttttattgtgattttctacaagtattaaatacatttaaagatctttttatcttaccaagaaataatttggaatagcattggtatatttgaccttttgagtgtctgtcatcctcagagaatggcccatagtgtgttgcctgtggacatagtgtccatagtccctttcttgtccttctgagatattttggtttgataacattttgttttttgtcttgatgcacagggacttttttataatatgagacttcagttggtattaataggagttacctatttaattctcccagtcatcaatgaggtaatcatcaattcctatagttcaaattagtcataaacaagagctacagcaagactgatagagtaaaaactatataaatacagtaaaaaaaaatagaatttatggtgtgaaatatgaagtatagcaatatataacaagaacatgtaagcacttgcttccacagcataaatgtaatttacatctgcattaaaggataattttctctgtgaataagagcaaaatggtcttcagagaaacagactgttcatttgaagccatttctgtaaacatcttccaagatagaactgtaatggattgaggaaataacacagaaaagacaaaaacttttgatttcaggcatgcaaagtgcgtgggcagatggacagttcccattgtgcattgcctttgataaattgggccttaatttatataacgatgctgtgttcacatccctctcctacctaaagttgtctttattggtttatattgtgttaaaattagcttataattattacttttgtattgtgttcagttttttaagttgcatgtttatactatttgctacagtatttttaagtttggggtgaaggccatcagctgtatcaaaaagacaaaacaatcactatttattcagtattgctgctttacatctccagaataagctttcgatgccaggacagtgactgcctgaaagctgcaggagctcttttcaatgcattttatatatttttagaaaccaaataaatgcagaaaactatttagtatactaattatattaaaccagcagaaatataaaggcaataaagtatatacatatatatggggggaggggaaagattaaaaaatagatttacagccagacatggtgatagccctaaatgtatttctcaatatgtttttctttattgaccctaggaggatttgagttgctgcagctttaaacagaaaattgccatgttcactaattgtgagcacataaatatgcttttagtactgctttgcttatgtacaaataaatctgtaatatgtattatatgtaattatccttttctttgactttcattttaaatgtatattttctgatcattatgagctgtaaaacaaagaatcaatattggatattctcccaaataataaattttcaggattcattggggca

SEQ ID NO: 280095 - DNA, 6073 bp, Homo sapiens
tgttgaatcggagtggtgaaagtaggcatccttgtcttgttccagtttttggaggaaatgctttcaattttcctcatttagtatgatgttagctgtgggtttatagtacatgatgtttattattttagcacattgtattattgaagattcaaaaacatatacatgacacacatataaataacctatacataaatgtaactcattcatctagagttaatttttatatatggtgacatggatccagtttcattcatctacattcagctaattaatttcccagcaccatatattgaagagggtgtcctttcctcatgtatggtatgttccttctgtgcctagtttgttgagtgtttttatcatgaagggatgttgaattttatcaaatgctgtttctgtgtctattgagatgatcatatggtttttatccttgattttgtttaggtgatgtatcacatttattgatttgcatatgttgaaccatccttgcatgcctgatataaaacccatttgatcataatggattatctttttgatgtgctgttgagttcagtgggctcgtgttttgttgaagatttttgcatctgtgttcatcatgaatattgcagacctttgtctctgtaattcccaattctggcagtgggagaagtaaggtaagctgactacacagacttagtcttctccactccgtgttcctgcagctagagacatgacctaacaccctgatgaccactctcagggaccttgagtgactggccggtgcaccatggaacttaaagtatgggtggatggagttcagaggattgtttgtggagtcactgaagtcacaacttgccaggaggttgtcatagccttagctcaagcaataggtcgaactggaaggtacacccttatagagaaatggagagatactgaaagacacttagcacctcatgaaaatcctatcatatccttaaacaaatgggggcagtatgctagtgatgtgcagctcattctacgacgaactgggccgtctctcagtgagcgacccacttcagacagtgtggctcgaattcctgaaagaactttatacaggcagagtctgccccccttagctaaactgaggcctcagattgacaaatcaatcaaaaggagggaaccgaaaaggaaatcactgacatttacaggaggtgccaaaggattaatggacatttttggaaaaggtaaagaaactgagtttaagcaaaaggtgctgaataactgcaaaacaacagcagatgagttgaagaagctaatccgtctgcagacagagaagcttcaatccattgagaaacagctggaatctaatgaaatagaaataagattttgggagcaaaagtataattccaaccttgaagaggaaattgtccgtctagagcaaaagatcaaaagaaacgatgtagaaattgaggaggaagaattctgggaaaatgaattacagattgaacaggaaaatgaaaaacagctgaaggatcaacttcaagaaataagacagaaaataacagaatgtgaaaacaaattaaaggactatttggcacagatccggactatggaaagtggtcttgaagcagaaaaattgcaacgggaagttcaagaggcacaggtcaatgaggaagaggttaaaggaaagatcggtaaggtcaaaggggagattgacattcaaggccagcagagtctgaggttggaaaatggcatcaaagctgtggaaagatctcttggacaagccaccaaacgcttacaggacaaagaacaggaactggagcagttgactaaggagttgcggcaagtcaatctccagcagttcatccagcagacagggacaaaagttaccgttttgccagcggagcccattgaaatagaggcctcacatgcagacattgaaagggaggcaccattccagtctgggtccctgaagcgacctggttcatctcggcagctccccagtaatctccgcattctgcagaatcctatctcatctggttttaatcctgaaggcatatatgtatgacattatctgtctttagggaggagacccaacagaggtaccaaggacagtaaacttcctttttgatttgtgccaatgatgaacagaggatctattccacaagacgctgtatgttttttctctcctaaattgcataccacttggagccataccctgtgcactgatgctaaagaacaaagaaactgtgttttcacacatcaacagtgttgatatttttgtccagcagctataatgcaaagccttcgtttttatttgtagcattttgagagctttaggaaagtattatatagtgtgtatacataaataagccgtgacttaagtaagagtgaagagaaatttgtgactggcttagtttaatttatttcatgtaatcaatgtgtgaatgttgatgttttaatatttttattgacttatcctgtgactgacttacgttacatattgtgtgattatgaccgtgtgcatgttgccagactccatccatgcattgctgatttacactacacaagtgtcctagggtgctccaccatcgaagctaactccacaggaagccacttgcatttgttttgtgaaactgtcctagccattgcttaattaggtgaaataattcagggttttttaaatctggaatttagtcgttcctttacaatatttccaaatatacgtgtggccacagagcataacagatatttttcataagctaaattgtatgtataaaacatttgcagtgtttcagacactgttgaacaaaaatgtaattggtaagtatgtatccaaacaggcatggggtttcctgatacattatgtgttttgtttctgccctgtcttatcatttacactcatggatcttcagaattaatctaacatggaagttatagatacctgaaagctgggttggtctacttcaggaacattgctttaagtgatgtattttaaaataacccgcttcatatgtatgatctgttggtgtacacaccatgggtaaggtattgcttgcacataatttgctctgcatattatggaccattgtggtttcttccagtcacttagatggaaaggaggttaaacctaggtactttttagcaaggatataaagtcaaattcagcatatgtttttatttttaggcttgacttttacaagacattaatctccatttgtacatatgttattttatttgtaaaaccaaatatgactcaacacctttttgatgagtagtgacttaactaagatttacaagtaatatttagacagattcagtcagacaccacttagccatttttacattccctctggttagatttggtacagtataattaagactttaatctgaaatttaaagtagttttaattctgaagaagttacatcctctgtattatttacatgcaacaaaataaaagtggattaatatagtaatgccatggtaacaatagagctatgtcttatgcatgaaggcaactttggatgttttaacacatttgactgactttggtttagtgaatgctgacaatgctgctctacttaggtttcctatgaaatttttaagaatggctatgagactgtatagaagcttctagagaactgaaagtcataatgcagagttgccttttctagtgcagctaagtggcggacctcaactgaagatatgagtttctttgggttcttggagttatcaaattgatcttgccattatgttactttgcaaataactgaagtaaatgattcttacctaaataaccacaacctgtacacatttgctcacaatttatagtagttattttctatctacctatatttaaaattaggatgattaaaaaataatttatagattttgtgacagtaatgatttacatatgcccaatatatgccttatttttaaataagtcattctgtataaagtcattttgttgttgttcagagaaatcaagatcttattcacaaagaaaaacattttataaattgatcgcattttctttaagtcaaaatgttaaactggaggcagtattaaactttgcaattaggagtttcagagatgccttggcataccacgaaaaacactgtcaatatccaactcattataaattgttatcagaattaacctaataactttaagtaaggacaagcagcatcctagcaacttgtagtagtcttgggttcccagcagagtatcacagttaacctctctgacaacttcatcagaatttccaagctgccaaataatcttcatagacctaattacagatttaaaaaaatttcctaggcgacgaaagtatagaaatgtgaatatgatgaatacattgagaagctgtactttttaattagttatattacttctggaagcacatatctaaggaatattttctaagactcagagggaaaaaaactcgttttcataggatcatctgaagatactttagtatatttgtgatcatttttatctattgcaaatacaaatgaattagataagtgccacatcctggatacatttcggaggggtagtgggcaatggtatacaaaaataccaaatataaaattttcatctgggggaatgttcaggttctaaatactaaattagatttcaatgttttgtgtttttttaaaaaaaatcatattgcaacttgttttattgtgattttctacaagtattaaatacatttaaagatctttttatcttaccaagaaataatttggaatagcattggtatatttgaccttttgagtgtctgtcatcctcagagaatggcccatagtgtgttgcctgtggacatagtgtccatagtccctttcttgtccttctgagatattttggtttgataacattttgttttttgtcttgatgcacagggacttttttataatatgagacttcagttggtattaataggagttacctatttaattctcccagtcatcaatgaggtaatcatcaattcctatagttcaaattagtcataaacaagagctacagcaagactgatagagtaaaaactatataaatacagtaaaaaaaaatagaatttatggtgtgaaatatgaagtatagcaatatataacaagaacatgtaagcacttgcttccacagcataaatgtaatttacatctgcattaaaggataattttctctgtgaataagagcaaaatggtcttcagagaaacagactgttcatttgaagccatttctgtaaacatcttccaagatagaactgtaatggattgaggaaataacacagaaaagacaaaaacttttgatttcaggcatgcaaagtgcgtgggcagatggacagttcccattgtgcattgcctttgataaattgggccttaatttatataacgatgctgtgttcacatccctctcctacctaaagttgtctttattggtttatattgtgttaaaattagcttataattattacttttgtattgtgttcagttttttaagttgcatgtttatactatttgctacagtatttttaagtttggggtgaaggccatcagctgtatcaaaaagacaaaacaatcactatttattcagtattgctgctttacatctccagaataagctttcgatgccaggacagtgactgcctgaaagctgcaggagctcttttcaatgcattttatatatttttagaaaccaaataaatgcagaaaactatttagtatactaattatattaaaccagcagaaatataaaggcaataaagtatatacatatatatggggggaggggaaagattaaaaaatagatttacagccagacatggtgatagccctaaatgtatttctcaatatgtttttctttattgaccctaggaggatttgagttgctgcagctttaaacagaaaattgccatgttcactaattgtgagcacataaatatgcttttagtactgctttgcttatgtacaaataaatctgtaatatgtattatatgtaattatccttttctttgactttcattttaaatgtatattttctgatcattatgagctgtaaaacaaagaatcaatattggatattctcccaaataataaattttcaggattcattggggca

SEQ ID NO: 280096 - DNA, 3000 bp, Homo sapiens
gaggacacagctagaaggcaccatcactatcagcgaaccagaaagcaggctctcacccgacgctgagtctgacggtgacttgaccttggactttccagcttccagaaaactgactacacagacttagtcttctccactccgtgttcctgcagctagagacatgacctaacaccctgatgaccactctcagggaccttgagtgactggccggtgcaccatggaacttaaagtatgggtggatggagttcagaggattgtttgtggagtcactgaagtcacaacttgccaggaggttgtcatagccttagctcaagcaataggtcgaactggaaggtacacccttatagagaaatggagagatactgaaagacacttagcacctcatgaaaatcctatcatatccttaaacaaatgggggcagtatgctagtgatgtgcagctcattctacgacgaactgggccgtctctcagtgagcgacccacttcagacagtgtggctcgaattcctgaaagaactttatacaggcagagtctgccccccttagctaaactgaggcctcagattgacaaatcaatcaaaaggagggaaccgaaaaggaaatcactgacatttacaggaggtgccaaaggattaatggacatttttggaaaaggtaaagaaactgagtttaagcaaaaggtgctgaataactgcaaaacaacagcagatgagttgaagaagctaatccgtctgcagacagagaagcttcaatccattgagaaacagctggaatctaatgaaatagaaataagattttgggagcaaaagtataattccaaccttgaagaggaaattgtccgtctagagcaaaagatcaaaagaaacgatgtagaaattgaggaggaagaattctgggaaaatgaattacagattgaacaggaaaatgaaaaacagctgaaggatcaacttcaagaaataagacagaaaataacagaatgtgaaaacaaattaaaggactatttggcacagatccggactatggaaagtggtcttgaagcagaaaaattgcaacgggaagttcaagaggcacaggtcaatgaggaagaggttaaaggaaagatcggtaaggtcaaaggggagattgacattcaaggccagcagagtctgaggttggaaaatggcatcaaagctgtggaaagatctcttggacaagccaccaaacgcttacaggacaaagaacaggaactggagcagttgactaaggagttgcggcaagtcaatctccagcagttcatccagcagacagggacaaaagttaccgttttgccagcggagcccattgaaatagaggcctcacatgcagacattgaaagggaggcaccattccagtctgggtccctgaagcgacctggttcatctcggcagctccccagtaatctccgcattctgcagaatcctatctcatctggttttaatcctgaaggcatatatgtatgacattatctgtctttagggaggagacccaacagaggtaccaaggacagtaaacttcctttttgatttgtgccaatgatgaacagaggatctattccacaagacgctgtatgttttttctctcctaaattgcataccacttggagccataccctgtgcactgatgctaaagaacaaagaaactgtgttttcacacatcaacagtgttgatatttttgtccagcagctataatgcaaagccttcgtttttatttgtagcattttgagagctttaggaaagtattatatagtgtgtatacataaataagccgtgacttaagtaagagtgaagagaaatttgtgactggcttagtttaatttatttcatgtaatcaatgtgtgaatgttgatgttttaatatttttattgacttatcctgtgactgacttacgttacatattgtgtgattatgaccgtgtgcatgttgccagactccatccatgcattgctgatttacactacacaagtgtcctagggtgctccaccatcgaagctaactccacaggaagccacttgcatttgttttgtgaaactgtcctagccattgcttaattaggtgaaataattcagggttttttaaatctggaatttagtcgttcctttacaatatttccaaatatacgtgtggccacagagcataacagatatttttcataagctaaattgtatgtataaaacatttgcagtgtttcagacactgttgaacaaaaatgtaattggtaagtatgtatccaaacaggcatggggtttcctgatacattatgtgttttgtttctgccctgtcttatcatttacactcatggatcttcagaattaatctaacatggaagttatagatacctgaaagctgggttggtctacttcaggaacattgctttaagtgatgtattttaaaataacccgcttcatatgtatgatctgttggtgtacacaccatgggtaaggtattgcttgcacataatttgctctgcatattatggaccattgtggtttcttccagtcacttagatggaaaggaggttaaacctaggtactttttagcaaggatataaagtcaaattcagcatatgtttttatttttaggcttgacttttacaagacattaatctccatttgtacatatgttattttatttgtaaaaccaaatatgactcaacacctttttgatgagtagtgacttaactaagatttacaagtaatatttagacagattcagtcagacaccacttagccatttttacattccctctggttagatttggtacagtataattaagactttaatctgaaatttaaagtagttttaattctgaagaagttacatcctctgtattatttacatgcaacaaaataaaagtggattaatatagtaatgccatggtaacaatagagcagcattgtcagcattcactaaaccaaagtcagtcaaatgtgttaaaacatccaaagttgccttcatgcataagacatagctctattggtcgacg

SEQ ID NO: 280097 - DNA, 1137 bp, Homo sapiens
ctggcggccgccatggcccccacgacgctgctctagggtcctccggggcgggcggggcagccgggcatggctctaaggggacgcgccccggggcccccggagggaggggggtccttagcgccgaacccccatgcgtgagtgggggacccggcggggggcgtcgagggtccgggcgtggggtagggcctcaggagcggcgggtcatgcaacggtggcgacaacggggcttcttcctcctccaccttctccacgtcccgcggggcaggggcgccggcagcgcctcatgccgcggagggctgctgcggagacgcggcccgactcccgaccagaccctcggacgcccggcccggcccgcactttaaagctctccgcacgacgtcacgggcagccagcccgacgtccgccagcgccgctccttagcgggctcctcaccgcgcacgcgcagtgctgccggccaccgcggctccgcgcgctacgggcatgcgcgtgcgtgcaggccgggtcggcagaggcgccggcgcaagcgcagacaggaaccgcttgccgtccgccgcccctcccccactctctgaggggcttcaagggaacgctctcaaatagcaacctgtcttcacgccgcgccgcctccaggaccgaagggctccctctacaggggtgcgctcatattgccaacagtgtcgccgtgccgcgtcacggcatcgtccgaacgcccgcagacgcctcaaccccagggcgcattcaccagggaaccgccacaacgtaggccgctccgttacctccccctttggcgcttccacttctttaattgggccgtgggccacgcgccgggcaggccctgactggagtttccggaagtcggttggtaatcatgcgtgtcaatcaggcagtctccttagctactgtgtccgtcacttaattagcggctgggcgagcagcgaggacccctaaaggagaaatgggtggttaaataagtgcctgaatggagactccacctgagtaaagcccttagaacgcctaaggaaacttctgaaacccgcgaaaacttctcagactgcgggacctgcagcacccggccccagttctgaacccagataggaacgtccggcagaagccagacgcgcgttgtcggggtacaag

SEQ ID NO: 280098 - DNA, 827 bp, Homo sapiens
ctggtgcacccactcggggatctcgtccacgtcgcccggcgggtagaggcgctcctggccgggcccgcgcttctgcagctgggcgccgtaagtgtagccttcgccgaagaagtacttgttgcgcagtggggcccggtccaccgtgtgctcgttgtacaggcccttctcagcgcgggacaccacctcgtcaatgcgggcctcgatcttggcgcactcgtcctggctgaagaggcgcatctggcggatgccgctcttcaccttgcgcgcctcctcctccttctgcagctgctgctcctcatagtcgctgcgctcggggtccgagtcctcctgatacttgcgcttggccccggacacagggtaaggttcggcggcagcggcggctgcggctgcggcggctacggcggctgcggcagcggcggcggcctcccggctgcccgccttatagttgtcccgggacgtcatggacttgagcttctcacgcaggtccttagcgccgaacccccatgcgtgagtgggggacccggcggggggcgtcgagggtccgggcgtggggtagggcctcaggagcggcgggtcatgcaacggtggcgacaacggggcttcttcctcctccaccttctccacgtcccgcggggcaggggcgccggcagcgcctcatgccgcggagggctgctgcggagacgcggcccgactcccgaccagaccctcggacgcccggcccggcccgcactttaaagctctccgcacgacgtcacgggcagccgggcatggctctaaggggacgcgccccggggcccccggagggaggggggtccttagcgccgaac

SEQ ID NO: 280099 - DNA, 1089 bp, Homo sapiens
aatatattagatttggtttttattgtagagcacacatatcagggcgaagtgctgcacacacaactacaaatcatttttgggaaaaaagctgtaaaaaaaataaaactgcaactgctttaattatgcagtcccgacttgagaaatccacgctggcaaaggagttctggcccctgagagggttcttcctcctccaccttctccacgtcccgcggggcaggggcgccggcagcgcctcatgccgcggagggctgctgcggagacgcggcccgactcccgaccagaccctcggacgcccggcccggcccgcactttaaagctctccgcacgacgtcacgggcagccagcccgacgtccgccagcgccgctccttagcgggctcctcaccgcgcacgcgcagtgctgccggccaccgcggctccgcgcgctacgggcatgcgcgtgcgtgcaggccgggtcggcagaggcgccggcgcaagcgcagacaggaaccgcttgccgtccgccgcccctcccccactctctgaggggcttcaagggaacgctctcaaatagcaacctgtcttcacgccgcgccgcctccaggaccgaagggctccctctacaggggtgcgctcatattgccaacagtgtcgccgtgccgcgtcacggcatcgtccgaacgcccgcagacgcctcaaccccagggcgcattcaccagggaaccgccacaacgtaggccgctccgttacctccccctttggcgcttccacttctttaattgggccgtgggccacgcgccgggcaggccctgactggagtttccggaagtcggttggtaatcatgcgtgtcaatcaggcagtctccttagctactgtgtccgtcacttaattagcggctgggcgagcagcgaggacccctaaaggagaaatgggtggttaaataagtgcctgaatggagactccacctgagtaaagcccttagaacgcctaaggaaacttctgaaacccgcgaaaacttctcagactgcgggacctgcagcacccggccccagttctgaacccagataggaacgtccggcagaagccagacgcgcgttgtcggggtacaag

SEQ ID NO: 280100 - DNA, 1642 bp, Homo sapiens
ctggcggccgccatggcccccacgacgctgctctagggtcctccggggcgggcggggcagccgggcatggctctaaggggacgcgccccggggcccccggagggaggggggtccttagcgccgaacccccatgcgtgagtgggggacccggcggggggcgtcgagggtccgggcgtggggtagggcctcaggagcggcgggtcatgcaacggtggcgacaacggggcttcttcctcctccaccttctccacgtcccgcggggcaggggcgccggcagcgcctcatgccgcggagggctgctgcggagacgcggcccgactcccgaccagaccctcggacgcccggcccggcccgcactttaaagctctccgcacgacgtcacgggcagccagcccgacgtccgccagcgccgctccttagcgggctcctgttcgacagtcagccgcatcttcttttggcctcgccagccgagccacatcgctcagacaccatgggaaggtgaaggtggagtcaacggatttggtcgtattggccctggtcaccagggctgacttttaacttggtaaagtggatattgttgccatcaatgacccttcattgacctagtaagttcaattgatcacatcgaatcatgcactgcaatgctgagacggaagcttgcatcaatgaataccatcacatctcaagacagatcctcaaatcaagtggcgatcgtggcctgagtacgtcgtgagtccactgcgtccttcaccaccatggagaaggctgggctcatttgcagggggagccaaaaggtcatcatctctgccccctctgctgtagccccctagttcgtcatgggtgtgaaccatgagaagtatgacaacagcctcaagatcatcagcaatgcctcctgcaccaccaactgcttagcaccctggccaaggtcatccatgacaactttggtatcgtgaaggactcatgaccacagtccatgccatcactgccacccagaagactgtggatggccctccgggaaactgtggcgtgatggcgcggggctctccagaactacatccctgcctctactggtcgctgccaaggctgtgggcaaggtcatccctgagctgaacgggaagctcactggcatggccttccgtgtccccactgccaacgtgtcagtggtggacctgacctgccgtctagaaaaacctgccaaatatgatgacatcaagaaggtggtgaagcaggcgtcggagggccccctcaagggcatcctgggctacactgagcaccaggtggtctcctctgacttcaacagctgacacccactcctccacctttgacgctggggctggcattgccctcaacgaccactttgtcaagctcatttcctggtatgacaacgaatttggctacagcaacagggtggtggacctcatggcccacatggcctccaaggagtaagacccctggaccaccagccccagcaagagcacaagaggaagagagagaccctcactgctggggagtccctgccacactcagtcccccacctgaatctcccctcctcacagttgccatgtagaccccttgaagaggggaggggcctagggagccgcaccttatcatgtaccatcaataaagtaccctgtgctcaacc

SEQ ID NO: 280101 - DNA, 856 bp, Homo sapiens
ctggtgcacccactcggggatctcgtccacgtcgcccggcgggtagaggcgctcctggccgggcccgcgcttctgcagctgggcgccgtaagtgtagccttcgccgaagaagtacttgttgcgcagtggggcccggtccaccgtgtgctcgttgtacaggcccttctcagcgcgggacaccacctcgtcaatgcgggcctcgatcttggcgcactcgtcctggctgaagaggcgcatctggcggatgccgctcttcaccttgcgcgcctcctcctccttctgcagctgctgctcctcatagtcgctgcgctcggggtccgagtcctcctgatacttgcgcttggccccggacacaggatggagtttcgctctgtcgccaggctggagtgcaatggcgcgatctcggctcactgcaacctccgcctcccaggtttaagcgattctcctgcctcagcctcccgagtagctgagactacaggcatgcaccaccacgcccagctaatttttgtatttttagtagagacggggtttcaccatgttggctaggatggtctccatctcttgacctcatgatctgcccacctcggcctcccaaagtgctgggattacaggcatgagccaccgcgcccggccacgtgtaaattctttagatttaaaaaatatgaatccaatcaataaatggtaacagtttctaactgtctgttgccatggttaccgcctggctcccacagtgcacaatgggcagtgacccaggcttagtgctcccaattggagcagggtaggggaaggcatcagggaattgcggaaatcaatctgtgaatgtggttctcagacgaaagccattgttggaatcccc

SEQ ID NO: 280102 - DNA, 492 bp, Homo sapiens
atagctcgctgcagccttgaactccggtgtttaagtagtcttcctgcctcagcctctcaaatcactgggaccataggcgtgagccactgctttcttcaaaatttgacccagaatccaatcaagggtgacagtgatcatcagacctacaaaatgaaggaatcttaagaaagatggcttaacccagtcagaagggacaagcataattttcttccatggctatttaaagccaactgggagccgggatgggaaactactaaagtttgatgcaccagactttggcctgatgcgctctcagcaaaatgtacagaggagatggccacttggtctttgggagcccctggctctctctttttaatgacactagctgctcttagcgcccactacaggaaatgaagcaatggaagaagcgcacctcatgtgaaagcatttggattttgctaggctattttctgagtagtatttgtcccgtggaaaaatacagaagaggaaatg

SEQ ID NO: 280103 - DNA, 282 bp, Homo sapiens
tagagaggaaagtaaagcgtttttttttccttgatacaagtatgaagcaggtgggacaacaggtttaagtatcagctttttctccagtgttagctagagtccaagatgagcccctgcctcaggaagcctagaaggagccacttttcatatagaaagtgtcacagggagggaagttggtaaaggtgataagggtgtgaggtcagttcctggtggtcccagtaggagctcagttctgacaatggcatgttgcccctccctcttcctcctctgctcttcagatga

SEQ ID NO: 280104 - DNA, 481 bp, Homo sapiens
tcccctttgtctgttggtccggcccagatcccagaccacctcctcgtccactcactgaccgccttctcccccggccagggcacctacatctactttgactacgagaagtggggccagcggaagaaggaaggcttcacctttgagtaccgctacctggaggaccgggacctccagtgacaccggcccctccctctacccacccccttcccccgcatgctgatccccctgcccaggtgagggccctgccctggaagactggagggaggccccaagccacggggcatccccctctcccaggaagcagggagggggccgggaggttttcctctcagccccaccctgggggcccgggggcgagggctgccccctcctcccctccccagtgagggacattttttggtaaacctattttcattttggaaaatatttatgaataaatagttttatatgacggctggcagcagcggcctctcctgtaaaa

SEQ ID NO: 280105 - DNA, 1556 bp, Homo sapiens
caggcccctgagcctctgagctccttgaagtccatggcggaacgggcagccatcagctctggcattgaggaccctgtgccaacgctgcacctgaccgagcgagacatcatcctgagcagtacatcagcacctccggcctcagcccagccgcccctgcagctgtcagaggtgaacataccgctgtcgctgggtgtctgtccactgggccctgtgccctcaccaaggagcagctctatcagcaggccatggaagaggccgcctggcaccacatgcctcacccctctgactctgagcgtattcggcagtaccttccccggaacccctgtccgacgcccccctaccaccaccagatgccacccccacactcggacactgtggaattctaccagcgcctgtcgaccgagacactcttcttcatcttctactatctggagggcactaaggcacagtatctggcagccaaggccctaaagaagcagtcatggcgattccacaccaagtacatgatgtggttccagaggcacgaggagcccaagaccatcactgacgagtttgagcaggtgagggccccgccctctcttcccgctgctagggttggggtagagtccccaggctccaggcagcccctgctggcctctgctcccttgcctccacctttcagctggcgcagtccctcagcctgaccaagtactcctccctctggctgtctgctcagcctggaacaccgccctctcatcctccacttggccagctcctaggcctcctgtaggtctcagcccaaatgtcccttcctcaaagaaaccttcctggagccacccagcccagtgcctcccctttgcagtgctgggcacactcgcttggggtgtgggattttcccagtatgtgtccctgcaccaggctgtgggctctgctgccgagggaccttgatggcccccacttcacctccaggtcccagcactcagcagggcaggggctcagtgcggaaactattttttttgaatgggcttctcaagttctaatactgggaaattcctgctgcttgcaaacactctggaaccaacctacctgggtttcagcccagtccagctgggcgactctaggcaagtcactcgaacctctgtgtctcaattaacttatctgtaaaaatggggggaagaccacctacctaatgcagttgttatgaagattaaatgagttaataacatgtaagtacttaatggtgactgctacatagtcagtgtcatggattttttttttcaaattactttcagttggtgtgttctacagtgatgtttttttccaccaaatacttccctgatgccgagccccttcatggggatgaagtagtacaaggtccttgtcctcagagaactcagtcccctctcctgggttctcccagggttgccatctttgaagcacttaaggacattcatttagaacctaggtcctctcccattgtgtcctcagatgttaaccacagacttcctgtcctttcctggtttggcccaaaaccatcctccaagttagtacatttcagggcatccagtcattcagaa

SEQ ID NO: 280106 - DNA, 963 bp, Homo sapiens
caggcccctgagcctctgagctccttgaagtccatggcggaacgggcagccatcagctctggcattgaggaccctgtgccaacgctgcacctgaccgagcgagacatcatcctgagcagtacatcagcacctccggcctcagcccagccgcccctgcagctgtcagaggtgaacataccgctgtcgctgggtgtctgtccactgggccctgtgccctcaccaaggagcagctctatcagcaggccatggaagaggccgcctggcaccacatgcctcacccctctgactctgagcgtattcggcagtaccttccccggaacccctgtccgacgcccccctaccaccaccagatgccacccccacactcggacactgtggaattctaccagcgcctgtcgaccgagacactcttcttcatcttctactatctggagggcactaaggcacagtatctggcagccaaggccctaaagaagcagtcatggcgattccacaccaagtacatgatgtggttccagaggcacgaggagcccaagaccatcactgacgagtttgagcagggcacctacatctactttgactacgagaagtggggccagcggaagaaggaaggcttcacctttgagtaccgctacctggaggaccgggacctccagtgacaccggcccctccctctacccacccccttcccccgcatgctgatccccctgcccaggtgagggccctgccctggaagactggagggaggccccaagccacggggcatccccctctcccaggaagcagggagggggccgggaggttttcctctcagccccaccctgggggcccgggggcgagggctgccccctcctcccctccccagtgagggacattttttggtaaacctattttcattttggaaaatatttatgaataaatagttttatatgacggctggcagcagcggcctctcctgtaaaa

SEQ ID NO: 280107 - DNA, 387 bp, Homo sapiens
gggtagattgtggggagtgggtcgttggccctccacggcccccaaacagggcaggtgagagcatctggggcctgtgtcaggctgcacttgctcctgcagcccaagtgctcaggccaggcctcttgtttcctccccaggcccctgagcctctgagctccttgaagtccatggcggaacgggcagccatcagctctggcattgaggaccctgtgccaacgctgcacctgaccgagcgaggtgagggacccaggatggtggggaagcagcgggccaaagaggaggggctgcccctgacccatcctcaccactgagggggccggacccccaccctccccacagacatcatcctgagcagtacatcagcacctccggcctcagcccagccgc

SEQ ID NO: 280108 - DNA, 383 bp, Homo sapiens
ggacccaggtgagtggtctcacaggcatgggaggcccaggttgggcctgggtgttcacctccttgagacctccagaggacttctgtttgagggagacgttactgatccagctggtcctcatgttccttactgacttcacaggtgagcattgtgttttggaaggaacatgcagggattgttgcctgcccgcctttctgtctttttttcttttcttttctttcttcttcttcttcttttttttttttttttttaaaggaaattggcagcacttttcttggagcaaggctcagtcttagggaagtcacaagctactacccagggagcaggccaacagaagatactctcctctattctaagattcctccagtacatactttagattc

SEQ ID NO: 280109 - DNA, 249 bp, Homo sapiens
ctttcttcctctacacacatctgctctgacagctttcctccaggcgtctcatcacagcaatactgaaagggactgtggcaagccagttttgggacccgtcctccaggaaaaagaagtgggaggtgagtctcaacagtgaatgactggaaacaagagcttataaaactgcttttgggtgtgttcccagtggacagaagaaaacaagaataagaatctttaaaaatcatgattaaaggtctttcgtgtaac

SEQ ID NO: 280110 - DNA, 1014 bp, Homo sapiens
gtctccgcggaaggcaggcgccggggagtggggcgcgggcgaccgtgtgcagccgcggcgcatctccgccttccgctcctcctcgcagcgccctcgtccgcttccaagcccagcacagacttcggtttctccgcctccatcccctttacgagaagaggagatcaaaaaatattgccctttaggtgctcgtgatggtcctgtgggttcgttcagttgccagaaaagaatggtaacatgaacagcggagcgtgagagcgtcaccgggggaagggacgagattgatgggcagagcgctcacttctcagaggatcgcattccgaggaccgcgcgaggaagggacgtcgcggcgccaccacttcctggctggactccgctgacatctgtagcctcctttccaccaggttcccggggctcccagccgctgcctgcagaggagcgtgtagacagcgcgcgagggtccggcacttcgtggacctccatccgaaccggagttctgcccggatcccgagtccctggatcccggtggagcccgccggcaagctggctccggagggagttgaacttgagttcagatggccaactccctctgaatcctgcagattggtgctgagcacgcaacaaaagtttgtagcttctcagtttctggtgcttcgcaggggagaggaaaggaatttgacattaaacacaagaagcagtcagggagccatctcctttaacttttcttctctgttaccatttgcaatgaagaggaaacagaagagatttctgcagatgactttgttgttcacggtggctttaattttcctgcctaacgttggtctctggtctctgtacaaggataagcacctggtgaagtcagcggagcccggggagcagcaggtaagtgccacccagagaaagatcacagaaggatggtaaggcagtgatcctcgcgcggggactcgagaaagccggtgtgggatcgccttgggttttcccccaagtcttgacagagctgattattacaagactcta

SEQ ID NO: 280111 - DNA, 951 bp, Homo sapiens
  misc_feature (944)..(944): n is a, c, g, or t
gtctccgcggaaggcaggcgccggggagtggggcgcgggcgaccgtgtgcagccgcggcgcatctccgccttccgctcctcctcgcagcgccctcgtccgcttccaagcccagcacagacttcggtttctccgcctccatcccctttacgagaagaggagatcaaaaaatattgccctttaggtgctcgtgatggtcctgtgggttcgttcagttgccagaaaagaatggtaacatgaacagcggagcgtgagagcgtcaccgggggaagggacgagattgatgggcagagcgctcacttctcagaggatcgcattccgaggaccgcgcgaggaagggacgtcgcggcgccaccacttcctggctggactccgctgacatctgtagcctcctttccaccaggttcccggggctcccagccgctgcctgcagaggagcgtgtagacagcgcgcgagggtccggcacttcgtggacctccatccgaaccggagttctgcccggatcccgagtccctggatcccggtggagcccgccggcaagctggctccggagggagttgaacttgagttcagatggccaactccctctgaatcctgcagattggtgctgagcacgcaacaaaagtttgtagcttctcagtttctggtgcttcgcaggggagaggaaaggaatttgacattaaacacaagaagcagtcagggagccatctcctttaacttttcttctctgttaccatttgcaatgaagaggaaacagaagagatttctgcagatgactttgttgttcacggtggctttaattttcctgcctaacgttggtctctggtctctgtacaaggataagcacctggtgaagtcagcggagcccggggagcagcagacattttccactgggcctgggagatgggcaatctattcatggacagatggtttgagaagaaaggnttgcatg

SEQ ID NO: 280112 - DNA, 1239 bp, Homo sapiens
gtctccgcggaaggcaggcgccggggagtggggcgcgggcgaccgtgtgcagccgcggcgcatctccgccttccgctcctcctcgcagcgccctcgtccgcttccaagcccagcacagacttcggtttctccgcctccatcccctttacgagaagaggagatcaaaaaatattgccctttaggtgctcgtgatggtcctgtgggttcgttcagttgccagaaaagaatggtaacatgaacagcggagcgtgagagcgtcaccgggggaagggacgagattgatgggcagagcgctcacttctcagaggatcgcattccgaggaccgcgcgaggaagggacgtcgcggcgccaccacttcctggctggactccgctgacatctgtagcctcctttccaccaggttcccggggctcccagccgctgcctgcagaggagcgtgtagacagcgcgcgagggtccggcacttcgtggacctccatccgaaccggagttctgcccggatcccgagtccctggatcccggtggagcccgccggcaagctggctccggagggagttgaacttgagttcagatggccaactccctctgaatcctgcagattggtgctgagcacgcaacaaaagtttgtagcttctcagtttctggtgcttcgcaggggagaggaaaggaatttgacattaaacacaagaagcagtcagggagccatctcctttaacttttcttctctgttaccatttgcaatgaagaggaaacagaagagatttctgcagatgactttgttgttcacggtggctttaattttcctgcctaacgttggtctctggtctctgtacaaggataagcacctggtgaagtcagcggagcccggggagcagcaggaattcaactttggtttgaagtatattctgttttgtcattccagtgaaaaaaagaagatggacactttggatgtgaaactttttttgttcttatttacatcattcaacccttgatgtaaaacaggattttaataactttagtagtcaatatgctattatgtaaaatctccactccatgctggtaaaacaggaaaggcaaaattattttttcttgaaatttgctaattcaattaacaataaccatctgaagtatttgctggtatagctaacataaagcgctaattaattttattaatgagattcttacaactttcacattgactctataattttgacccttaatgagaaaattgtttgtct

SEQ ID NO: 280113 - DNA, 282 bp, Homo sapiens
cggaagaaatggggacccggcaggcggtgacggaggcggcacgcgcggagatggatactgggccagccacgaaagcctccgccccctcgaagcgggctccctcgccgccaactctagtgaagaagcagcccttctccccggcgcccgctggtttgcagaggcctgctatgaagagcttgtgcaagtaaagcgtttgctgagcggaaacaggctgcgggtggctgcggcaggcatggagccgacgcggatcttttgcaaacatctttattaatctcatataaa

SEQ ID NO: 280114 - DNA, 1690 bp, Homo sapiens
  misc_feature (798)..(798): n is a, c, g, or t
ctctatccccagcagaggcagcggagaagacaaggccgggaggcaccgggctaggctgcgcaccaggcccaggcctgtccctcgggaccgcgcgtgccgcctgaatccgctcccccgtcgggcccggtccagctggcgcggcggccaccctcacctggatgacctcgttgacctcccggatacattccaccatgtgttgtagaatctgctcggccgtgagcacctcgtagcggtaatcctcctcctgctcatgccccggcccgccaccaccaccgccgccgccgccgccgccgccaccgccgggccccagagcgctgccgccgccaccgcccgtctccccgcacagcagtccgtcccgctccccgccgacgcccagcccgggctccaccagctccacctcgcccagatccagggtatcatcgtccggctcgtcgtcgtcttcgtcctcctcctcctcggcgccgctgtcctcctcactgcactcctcgtcctcgtcgaactcgtagttgtagccctcgtccgagtccatggcgcgacgcgcgggggcccggcggacgctggccgaggcggggagagggcggggacgccgaggccccggctctcgctccggctccggctgatgtccggacgcaggcctggctccggccccgcgagccgcggctcctccccaggagcggcggttggcgtttgacggctggtggcggcggggagggcgcggaggagggagggagggagcgagggggccgcttgctgcccgcctcagtcagacgcggctccgctccggcctccgagagaaancagtccccaacgccacctccacggccgctgctatcgctactgagccaacaaaggggcgtgcgtcaccgcgtcgcgctgcgtcgtcgcgtcactcctctttgcgtcactgcgccccgccccaccgcccctgcgtggagcccggggagaccccacggcccggccttcctgggcctgggacccgaggggagccgagcgggaattgctttcctggttcgatccgctgccgctgtgagggccgagcggaaacccgtagaccttttatgtgaagagattgcggcctcctggtcaccagtcaccgagagagggacccctggaccgcctacgtggtggtgtctgccgcaggccatagggatccagcccacttaggcagtcccttggggacgcggccttccctccggagcggaaaggcgcttcccgcccgccctgcggtaatcccggaagccctcagccgttaagctaaaatttctgttgctttggctactgatggaaacctgttgtaagtggaacctctaaactgtatgacaggtgaacccactttaggtagctgtgtgattctgtccacttgtacagacgtgcagtggtttttaagtctcctataatgacgtcattttaaagaggcatttcctccaccccgctgacaagagcgcctcttgagggccctaaacaatgtaaacagcgatgattttcatgaattgagcactgtgtaagggctttacatatattctgtctcatcttcacggagccatagtacccattttatacctgaggaacctgaagctcagaaaggaaaagggacctggccaagaccacataacccttgccctattttaaccgctggatgccccaaaacatgaatcataaaaatgctttgtaatgtagatatattatgtac

SEQ ID NO: 280115 - DNA, 1682 bp, Homo sapiens
  misc_feature (798)..(798): n is a, c, g, or t
ctctatccccagcagaggcagcggagaagacaaggccgggaggcaccgggctaggctgcgcaccaggcccaggcctgtccctcgggaccgcgcgtgccgcctgaatccgctcccccgtcgggcccggtccagctggcgcggcggccaccctcacctggatgacctcgttgacctcccggatacattccaccatgtgttgtagaatctgctcggccgtgagcacctcgtagcggtaatcctcctcctgctcatgccccggcccgccaccaccaccgccgccgccgccgccgccgccaccgccgggccccagagcgctgccgccgccaccgcccgtctccccgcacagcagtccgtcccgctccccgccgacgcccagcccgggctccaccagctccacctcgcccagatccagggtatcatcgtccggctcgtcgtcgtcttcgtcctcctcctcctcggcgccgctgtcctcctcactgcactcctcgtcctcgtcgaactcgtagttgtagccctcgtccgagtccatggcgcgacgcgcgggggcccggcggacgctggccgaggcggggagagggcggggacgccgaggccccggctctcgctccggctccggctgatgtccggacgcaggcctggctccggccccgcgagccgcggctcctccccaggagcggcggttggcgtttgacggctggtggcggcggggagggcgcggaggagggagggagggagcgagggggccgcttgctgcccgcctcagtcagacgcggctccgctccggcctccgagagaaancagtccccaacgccacctccacggccgctgctatcgctactgagccaacaaaggggcgtgcgtcaccgcgtcgcgctgcgtcgtcgcgtcactcctctttgcgtcactgcgccccgccccaccgcccctgcgtggagcccggggagaccccacggcccggccttcctgggcctgggacccgaggggagccgagcgggaattgctttcctggttcgatccgctgccgctgtgagggccgagcggaaacccgtagaccttttatgtgaagagattgcggcctcctggtcaccagtcaccgagagagggacccctggaccgcctacgtggtggtgtctgccgcaggccatagggatccagcccacttaggcagtcccttggggacgcggccttccctccggagcggaaaggcgcttcccgcccgccctgcggtaatcccggaagccctcagccgttaagctaaaatttctgttgctttggctactgatggaaacctgttgtctgcagatcaaagtttggctgatcttggctgggcttgtctatgtttggctgggctaggctggactccaatcttcaggtcaggtttacatctgcttcacatgtcttcatcattctagaacaagttgcctgcctgagatacattcttcccacagtgggggacagaagtacaagagagacaaaggcccagaaacagcctgaagagcctctgaactaaggccacttgaagcaaggaggcacaagtaattctgccataacgaaactcacctgattggaagaggggcgtgaagaaagggttttctaaggcaggatcaaaatgagagattccatctcagaccttggcccttcatctttagcaggtgatactgtagtcaccggaccaaccccca

SEQ ID NO: 280116 - DNA, 1549 bp, Homo sapiens
  misc_feature (798)..(798): n is a, c, g, or t
ctctatccccagcagaggcagcggagaagacaaggccgggaggcaccgggctaggctgcgcaccaggcccaggcctgtccctcgggaccgcgcgtgccgcctgaatccgctcccccgtcgggcccggtccagctggcgcggcggccaccctcacctggatgacctcgttgacctcccggatacattccaccatgtgttgtagaatctgctcggccgtgagcacctcgtagcggtaatcctcctcctgctcatgccccggcccgccaccaccaccgccgccgccgccgccgccgccaccgccgggccccagagcgctgccgccgccaccgcccgtctccccgcacagcagtccgtcccgctccccgccgacgcccagcccgggctccaccagctccacctcgcccagatccagggtatcatcgtccggctcgtcgtcgtcttcgtcctcctcctcctcggcgccgctgtcctcctcactgcactcctcgtcctcgtcgaactcgtagttgtagccctcgtccgagtccatggcgcgacgcgcgggggcccggcggacgctggccgaggcggggagagggcggggacgccgaggccccggctctcgctccggctccggctgatgtccggacgcaggcctggctccggccccgcgagccgcggctcctccccaggagcggcggttggcgtttgacggctggtggcggcggggagggcgcggaggagggagggagggagcgagggggccgcttgctgcccgcctcagtcagacgcggctccgctccggcctccgagagaaancagtccccaacgccacctccacggccgctgctatcgctactgagccaacaaaggggcgtgcgtcaccgcgtcgcgctgcgtcgtcgcgtcactcctctttgcgtcactgcgccccgccccaccgcccctgcgtggagcccggggagaccccacggcccggccttcctgggcctgggacccgaggggagccgagcgggaattgctttcctggttcgatccgctgccgctgtgagggccgagcggaaacccgtagaccttttatgtgaagagattgcggcctcctggtcaccagtcaccgagagagggacccctggaccgcctacgtggtggtgtctgccgcaggccatagggatccagcccacttaggcagtcccttggggacgcggccttccctccggagcggaaaggcgcttcccgcccgccctgcggtaatcccggaagccctcagccgttaagctaaaatttctgttgctttggctactgatggaaacctgttgtgttcatgaggtcttcatggttgtgcgaggcataagaaagagagggtatgatatgcctgtttagcatggccctcccaatctagagtttgtctagggcttaggctcgttttacctaccacatcaacagtggtcaggcatcatttcatgcttcatggcgtcatggtatcaagggtgcgggccacctactttgcaccccaagggtgctattcggtttggctatgaatgaattaaggtctccaacagtgggcgaaaaa

SEQ ID NO: 280117 - DNA, 2248 bp, Homo sapiens
ccacccccggccccgaagctccgccacccgccgccatgagtagctttggagctggcaaaaccaaagaagttatcttcagtgtggaggatggctccgtgaaaatgttcctgaggggccgccctgtgcccatgatgatcccagacgagctggcacccacctacagcctggacacacgctcggagctgccttcttgccggctcaagctggagtgggtctatggctaccgtggccgagactgccgggccaacctttatttgctgcccaccggggagatagtgtactttgtggcctccgtagccgtgctatacagcgtggaggagcagaggcagcgacactacctgggacacaacgatgacatcaaatgcttggccatccacccagatatggtcaccatcgccacgggacaggtggcgggaaccactaaggaagggaagccgctgccgccccacgtgcgcatctgggactcagtttccctctccaccttacacgtgctgggcttgggggtgtttgacagagccgtgtgctgtgtgggcttctccaaatctaatggaggcaacctgctgtgtgcagtggatgaatccaatgatcacatgctctcggtgtgggactgggccaaggagaccaaggtggtggatgtcaagtgctccaatgaggctgtattggtggccaccttccaccccacggaccccactgtgcttatcacctgcgggaaatctcacatctacttctggaccttggaggggggcagcttgagcaagcggcaaggcctctttgagaaacatgagaaaccgaagtatgtgctgtgtgtgacctttttggaaggtggcgacgtggtcacgggggactctggggggaacctctatgtttggggcaaaggtgggaaccgtatcacacaggcggtgctgggcgcccacgacggcggcgtgtttgggctctgcgccctgcgggacgggacgctggtgtctggagggggccgtgatcggcgggtggtcctctggggttctgactacagcaagctgcaggaagtggaggtccctgaggactttggccctgtgcgcaccgtggcagagggccacggagacacactgtacgtggggaccacccgcaattccatcctgcagggctccgtgcacacaggcttctcactgctggtccagggccatgtggaagagctgtggggcctggccacacaccccagtcgggcccagtttgtgacctgcgggcaggataagctggtgcatctatggagctcagattcccaccagcccctgtggagcaggatcatcgaggaccctgcccgctcagccggcttccaccccagtggctctgtcctggctgtgggtacagtgactggcagatggctgctgctggacacggagacccatgacctggtggctatccacacagacggcaatgaacagatctcagtggtcagcttctccccagacggggcgtacctggccgtgggctcccacgacaacttggtgtacgtgtacacggtggaccagggcggccgcaaggtcagccgcctgggcaagtgctcgggccattccagttttatcacccacctggattgggcccaggacagcagctgctttgtcaccaactccggggactatgagattctgtactgggacccggctacctgtaagcagatcaccagtgcggatgctgtgaggaacatggaatgggccacagctacttgtgtcctagggtttggggtgtttgggatctggtctgagggggcggacggcactgatatcaacgctgtggcccgctctcatgatgggaagttgctggcttcagctgatgactttggcaaagttcacctgtttagctacccctgctgtcagcctcgagccctcagccacaagtacggtggacacagcagccatgtgacaaatgtggccttcttgtgggatgacagcatggccctgaccacagggggcaaggacaccagtgtgctacagtggcgggtggtctgatgcggccagggaagagtcaggtgtcagggcaggaattctattttcgggagatgtctattgccgagtagagtaatatatacccagagtatgtctatagcagagggggttatgggggcgggagggtagactgacatacagaagtctctatttatccgggtgggaagagggagtcacatcgctttggggatccattggtgtttggtttggggtgttttttaagttttttcttttatatcatccagaaataaagacacgtacactaa

SEQ ID NO: 280118 - DNA, 2859 bp, Homo sapiens
ggcgcagccaatcctggccctaggattgtgttggggggcttggcaggcggtgtcccgacccccctttctgggcatcctggggatgaccccagcgccgggcccggcgccggccgcctgatgccaggcgagctgagctggggatgctggaacgaagggcgttgctatggcaacgggaggcagggcctggttggggggaccgggcccgggctgggaccgggggggccggcggtggctgtggtggggcgatggcggagcgcggccggccttctgcggcctgtacgacacgtcctcgctgctgcgatactgcaacgatgacaatttgtcgggcacgagcggtatggaagtggacgaccgcgtgtcggcgctggagcagcggctgcagttacaggaagacgagctggcggtcctaaaggcggcgctggcggatgctctgcgtcgcctgcgggcatgcgaagaacagggagcggcgctacgcgcgcggggcacccccaagggccgggcgcctccgcgcttaggcaccactgcctcggtgtgtcagctcttgaaaggccttcccaccaggacgccccttaatggctcgggacccccgcggcgcgtgggtggctatgccacgtccccatcctctcccaagaaggaggcgacctccgggcgcagcagtgtccgccgctacttgtcaccagagcgcctcgcctcggtgcgccgtgaggacccccgcagccggaccacatcctccagcagcaactgtagcgccaaaaaggaaggcaaaaccaaagaagttatcttcagtgtggaggatggctccgtgaaaatgttcctgaggggccgccctgtgcccatgatgatcccagacgagctggcacccacctacagcctggacacacgctcggagctgccttcttgccggctcaagctggagtgggtctatggctaccgtggccgagactgccgggccaacctttatttgctgcccaccggggagatagtgtactttgtggcctccgtagccgtgctatacagcgtggaggagcagaggcagcgacactacctgggacacaacgatgacatcaaatgcttggccatccacccagatatggtcaccatcgccacgggacaggtggcgggaaccactaaggaagggaagccgctgccgccccacgtgcgcatctgggactcagtttccctctccaccttacacgtgctgggcttgggggtgtttgacagagccgtgtgctgtgtgggcttctccaaatcttgctccaatgaggctgtattggtggccaccttccaccccacggaccccactgtgcttatcacctgcgggaaatctcacatctacttctggaccttggaggggggcagcttgagcaagcggcaaggcctctttgagaaacatgagaaaccgaagtatgtgctgtgtgtgacctttttggaaggtggcgacgtggtcacgggggactctggggggaacctctatgtttggggcaaaggtgggaaccgtatcacacaggcggtgctgggcgcccacgacggcggcgtgtttgggctctgcgccctgcgggacgggacgctggtgtctggagggggccgtgatcggcgggtggtcctctggggttctgactacagcaagctgcaggaagtggaggtccctgaggactttggccctgtgcgcaccgtggcagagggccacggagacacactgtacgtggggaccacccgcaattccatcctgcagggctccgtgcacacaggcttctcactgctggtccagggccatgtggaagagctgtggggcctggccacacaccccagtcgggcccagtttgtgacctgcgggcaggataagctggtgcatctatggagctcagattcccaccagcccctgtggagcaggatcatcgaggaccctgcccgctcagccggcttccaccccagtggctctgtcctggctgtgggtacagtgactggcagatggctgctgctggacacggagacccatgacctggtggctatccacacagacggcaatgaacagatctcagtggtcagcttctccccagacggggcgtacctggccgtgggctcccacgacaacttggtgtacgtgtacacggtggaccagggcggccgcaaggtcagccgcctgggcaagtgctcgggccattccagttttatcacccacctggattgggcccaggacagcagctgctttgtcaccaactccggggactatgagattctgtactgggacccggctacctgtaagcagatcaccagtgcggatgctgtgaggaacatggaatgggccacagctacttgtgtcctagggtttggggtgtttgggatctggtctgagggggcggacggcactgatatcaacgctgtggcccgctctcatgatgggaagttgctggcttcagctgatgactttggcaaagttcacctgtttagctacccctgctgtcagcctcgagccctcagccacaagtacggtggacacagcagccatgtgacaaatgtggccttcttgtgggatgacagcatggccctgaccacagggggcaaggacaccagtgtgctacagtggcgggtggtctgatgcggccagggaagagtcaggtgtcagggcaggaattctattttcgggagatgtctattgccgagtagagtaatatatacccagagtatgtctatagcagagggggttatgggggcgggagggtagactgacatacagaagtctctatttatccgggtgggaagagggagtcacatcgctttggggatccattggtgtttggtttggggtgttttttaagttttttcttttatatcatccagaaataaagacacgtacactaa

SEQ ID NO: 280119 - DNA, 2820 bp, Homo sapiens
ggcgcagccaatcctggccctaggattgtgttggggggcttggcaggcggtgtcccgacccccctttctgggcatcctggggatgaccccagcgccgggcccggcgccggccgcctgatgccaggcgagctgagctggggatgctggaacgaagggcgttgctatggcaacgggaggcagggcctggttggggggaccgggcccgggctgggaccgggggggccggcggtggctgtggtggggcgatggcggagcgcggccggccttctgcggcctgtacgacacgtcctcgctgctgcgatactgcaacgatgacaatttgtcgggcacgagcggtatggaagtggacgaccgcgtgtcggcgctggagcagcggctgcagttacaggaagacgagctggcggtcctaaaggcggcgctggcggatgctctgcgtcgcctgcgggcatgcgaagaacagggagcggcgctacgcgcgcggggcacccccaagggccgggcgcctccgcgcttaggcaccactgcctcggtgtgtcagctcttgaaaggccttcccaccaggacgccccttaatggctcgggacccccgcggcgcgtgggtggctatgccacgtccccatcctctcccaagaaggaggcgacctccgggcgcagcagtgtccgccgctacttgtcaccagagcgcctcgcctcggtgcgccgtgaggacccccgcagccggaccacatcctccagcagcaactgtagcgccaaaaaggaaggcaaaaccaaagaagttatcttcagtgtggaggatggctccgtgaaaatgttcctgaggggccgccctgtgcccatgatgatcccagacgagctggcacccacctacagcctggacacacgctcggagctgccttcttgccggctcaagctggagtgggtctatggctaccgtggccgagactgccgggccaacctttatttgctgcccaccggggagatagtgtactttgtggcctccgtagccgtgctatacagcgtggaggagcagaggcagcgacactacctgggacacaacgatgacatcaaatgcttggccatccacccagatatggtcaccatcgccacgggacaggtggcgggaaccactaaggaagggaagccgctgccgccccacgtgcgcatctgggactcagtttccctctccaccttacacgtgctgggcttgggggtgtttgacagagccgtgtgctgtgtgggcttctccaaatctaatggaggcaacctgctgtgtgcagtggatgaatccaatgatcacatgctctcggtgtgggactgggccaaggagaccaaggtggtggatgtcaagaaacatgagaaaccgaagtatgtgctgtgtgtgacctttttggaaggtggcgacgtggtcacgggggactctggggggaacctctatgtttggggcaaaggtgggaaccgtatcacacaggcggtgctgggcgcccacgacggcggcgtgtttgggctctgcgccctgcgggacgggacgctggtgtctggagggggccgtgatcggcgggtggtcctctggggttctgactacagcaagctgcaggaagtggaggtccctgaggactttggccctgtgcgcaccgtggcagagggccacggagacacactgtacgtggggaccacccgcaattccatcctgcagggctccgtgcacacaggcttctcactgctggtccagggccatgtggaagagctgtggggcctggccacacaccccagtcgggcccagtttgtgacctgcgggcaggataagctggtgcatctatggagctcagattcccaccagcccctgtggagcaggatcatcgaggaccctgcccgctcagccggcttccaccccagtggctctgtcctggctgtgggtacagtgactggcagatggctgctgctggacacggagacccatgacctggtggctatccacacagacggcaatgaacagatctcagtggtcagcttctccccagacggggcgtacctggccgtgggctcccacgacaacttggtgtacgtgtacacggtggaccagggcggccgcaaggtcagccgcctgggcaagtgctcgggccattccagttttatcacccacctggattgggcccaggacagcagctgctttgtcaccaactccggggactatgagattctgtactgggacccggctacctgtaagcagatcaccagtgcggatgctgtgaggaacatggaatgggccacagctacttgtgtcctagggtttggggtgtttgggatctggtctgagggggcggacggcactgatatcaacgctgtggcccgctctcatgatgggaagttgctggcttcagctgatgactttggcaaagttcacctgtttagctacccctgctgtcagcctcgagccctcagccacaagtacggtggacacagcagccatgtgacaaatgtggccttcttgtgggatgacagcatggccctgaccacagggggcaaggacaccagtgtgctacagtggcgggtggtctgatgcggccagggaagagtcaggtgtcagggcaggaattctattttcgggagatgtctattgccgagtagagtaatatatacccagagtatgtctatagcagagggggttatgggggcgggagggtagactgacatacagaagtctctatttatccgggtgggaagagggagtcacatcgctttggggatccattggtgtttggtttggggtgttttttaagttttttcttttatatcatccagaaataaagacacgtacactaa

SEQ ID NO: 280120 - DNA, 2796 bp, Homo sapiens
agtgtgggactggaaagggacggccagaggactttgcttctaggatacctcccaaatcctctggccctggccctcccatgcattagcaccatcccttctccctagacaaatgggtgtgataccagaaggaccactgtgggtgtcgggctcagatgacaatttgtcgggcacgagcggtatggaagtggacgaccgcgtgtcggcgctggagcagcggctgcagttacaggaagacgagctggcggtcctaaaggcggcgctggcggatgctctgcgtcgcctgcgggcatgcgaagaacagggagcggcgctacgcgcgcggggcacccccaagggccgggcgcctccgcgcttaggcaccactgcctcggtgtgtcagctcttgaaaggccttcccaccaggacgccccttaatggctcgggacccccgcggcgcgtgggtggctatgccacgtccccatcctctcccaagaaggaggcgacctccgggcgcagcagtgtccgccgctacttgtcaccagagcgcctcgcctcggtgcgccgtgaggacccccgcagccggaccacatcctccagcagcaactgtagcgccaaaaaggaaggcaaaaccaaagaagttatcttcagtgtggaggatggctccgtgaaaatgttcctgaggggccgccctgtgcccatgatgatcccagacgagctggcacccacctacagcctggacacacgctcggagctgccttcttgccggctcaagctggagtgggtctatggctaccgtggccgagactgccgggccaacctttatttgctgcccaccggggagatagtgtactttgtggcctccgtagccgtgctatacagcgtggaggagcagaggcagcgacactacctgggacacaacgatgacatcaaatgcttggccatccacccagatatggtcaccatcgccacgggacaggtggcgggaaccactaaggaagggaagccgctgccgccccacgtgcgcatctgggactcagtttccctctccaccttacacgtgctgggcttgggggtgtttgacagagccgtgtgctgtgtgggcttctccaaatctaatggaggcaacctgctgtgtgcagtggatgaatccaatgatcacatgctctcggtgtgggactgggccaaggagaccaaggtggtggatgtcaagtgctccaatgaggctgtattggtggccaccttccaccccacggaccccactgtgcttatcacctgcgggaaatctcacatctacttctggaccttggaggggggcagcttgagcaagcggcaaggcctctttgagaaacatgagaaaccgaagtatgtgctgtgtgtgacctttttggaaggtggcgacgtggtcacgggggactctggggggaacctctatgtttggggcaaaggtgggaaccgtatcacacaggcggtgctgggcgcccacgacggcggcgtgtttgggctctgcgccctgcgggacgggacgctggtgtctggagggggccgtgatcggcgggtggtcctctggggttctgactacagcaagctgcaggaagtggaggtccctgaggactttggccctgtgcgcaccgtggcagagggccacggagacacactgtacgtggggaccacccgcaattccatcctgcagggctccgtgcacacaggcttctcactgctggtccagggccatgtggaagagctgtggggcctggccacacaccccagtcgggcccagtttgtgacctgcgggcaggataagctggtgcatctatggagctcagattcccaccagcccctgtggagcaggatcatcgaggaccctgcccgctcagccggcttccaccccagtggctctgtcctggctgtgggtacagtgactggcagatggctgctgctggacacggagacccatgacctggtggctatccacacagacggcaatgaacagatctcagtggtcagcttctccccagacggggcgtacctggccgtgggctcccacgacaacttggtgtacgtgtacacggtggaccagggcggccgcaaggtcagccgcctgggcaagtgctcgggccattccagttttatcacccacctggattgggcccaggacagcagctgctttgtcaccaactccggggactatgagattctgtactgggacccggctacctgtaagcagatcaccagtgcggatgctgtgaggaacatggaatgggccacagctacttgtgtcctagggtttggggtgtttgggatctggtctgagggggcggacggcactgatatcaacgctgtggcccgctctcatgatgggaagttgctggcttcagctgatgactttggcaaagttcacctgtttagctacccctgctgtcagcctcgagccctcagccacaagtacggtggacacagcagccatgtgacaaatgtggccttcttgtgggatgacagcatggccctgaccacagggggcaaggacaccagtgtgctacagtggcgggtggtctgatgcggccagggaagagtcaggtgtcagggcaggaattctattttcgggagatgtctattgccgagtagagtaatatatacccagagtatgtctatagcagagggggttatgggggcgggagggtagactgacatacagaagtctctatttatccgggtgggaagagggagtcacatcgctttggggatccattggtgtttggtttggggtgttttttaagttttttcttttatatcatccagaaataaagacacgtacactaa

SEQ ID NO: 280121 - DNA, 2310 bp, Homo sapiens
ccacccccggccccgaagctccgccacccgccgccatgagtagctttggagctgggtgagaccctttcgcagaccaccccccatctcctctccgcgctcccggggcttagatctcagcaaaaccaaagaagttatcttcagtgtggaggatggctccgtgaaaatgttcctgaggggccgccctgtgcccatgatgatcccagacgagctggcacccacctacagcctggacacacgctcggagctgccttcttgccggctcaagctggagtgggtctatggctaccgtggccgagactgccgggccaacctttatttgctgcccaccggggagatagtgtactttgtggcctccgtagccgtgctatacagcgtggaggagcagaggcagcgacactacctgggacacaacgatgacatcaaatgcttggccatccacccagatatggtcaccatcgccacgggacaggtggcgggaaccactaaggaagggaagccgctgccgccccacgtgcgcatctgggactcagtttccctctccaccttacacgtgctgggcttgggggtgtttgacagagccgtgtgctgtgtgggcttctccaaatctaatggaggcaacctgctgtgtgcagtggatgaatccaatgatcacatgctctcggtgtgggactgggccaaggagaccaaggtggtggatgtcaagtgctccaatgaggctgtattggtggccaccttccaccccacggaccccactgtgcttatcacctgcgggaaatctcacatctacttctggaccttggaggggggcagcttgagcaagcggcaaggcctctttgagaaacatgagaaaccgaagtatgtgctgtgtgtgacctttttggaaggtggcgacgtggtcacgggggactctggggggaacctctatgtttggggcaaaggtgggaaccgtatcacacaggcggtgctgggcgcccacgacggcggcgtgtttgggctctgcgccctgcgggacgggacgctggtgtctggagggggccgtgatcggcgggtggtcctctggggttctgactacagcaagctgcaggaagtggaggtccctgaggactttggccctgtgcgcaccgtggcagagggccacggagacacactgtacgtggggaccacccgcaattccatcctgcagggctccgtgcacacaggcttctcactgctggtccagggccatgtggaagagctgtggggcctggccacacaccccagtcgggcccagtttgtgacctgcgggcaggataagctggtgcatctatggagctcagattcccaccagcccctgtggagcaggatcatcgaggaccctgcccgctcagccggcttccaccccagtggctctgtcctggctgtgggtacagtgactggcagatggctgctgctggacacggagacccatgacctggtggctatccacacagacggcaatgaacagatctcagtggtcagcttctccccagacggggcgtacctggccgtgggctcccacgacaacttggtgtacgtgtacacggtggaccagggcggccgcaaggtcagccgcctgggcaagtgctcgggccattccagttttatcacccacctggattgggcccaggacagcagctgctttgtcaccaactccggggactatgagattctgtactgggacccggctacctgtaagcagatcaccagtgcggatgctgtgaggaacatggaatgggccacagctacttgtgtcctagggtttggggtgtttgggatctggtctgagggggcggacggcactgatatcaacgctgtggcccgctctcatgatgggaagttgctggcttcagctgatgactttggcaaagttcacctgtttagctacccctgctgtcagcctcgagccctcagccacaagtacggtggacacagcagccatgtgacaaatgtggccttcttgtgggatgacagcatggccctgaccacagggggcaaggacaccagtgtgctacagtggcgggtggtctgatgcggccagggaagagtcaggtgtcagggcaggaattctattttcgggagatgtctattgccgagtagagtaatatatacccagagtatgtctatagcagagggggttatgggggcgggagggtagactgacatacagaagtctctatttatccgggtgggaagagggagtcacatcgctttggggatccattggtgtttggtttggggtgttttttaagttttttcttttatatcatccagaaataaagacacgtacactaa

SEQ ID NO: 280122 - DNA, 2565 bp, Homo sapiens
ggcgcagccaatcctggccctaggattgtgttggggggcttggcaggcggtgtcccgacccccctttctgggcatcctggggatgaccccagcgccgggcccggcgccggccgcctgatgccaggcgagctgagctggggatgctggaacgaagggcgttgctatggcaacgggaggcagggcctggttggggggaccgggcccgggctgggaccgggggggccggcggtggctgtggtggggcgatggcggagcgcggccggccttctgcggcctgtacgacacgtcctcgctgctgcgatactgcaacgatgacaatttgtcgggcacgagcggtatggaagtggacgaccgcgtgtcggcgctggagcagcggctgcagttacaggaagacgagctggcggtcctaaaggcggcgctggcggatgctctgcgtcgcctgcgggcatgcgaagaacagggagcggcgctacgcgcgcggggcacccccaagggccgggcgcctccgcgcttaggcaccactgcctcggtgtgtcagctcttgaaaggccttcccaccaggacgccccttaatggctcgggacccccgcggcgcgtgggtggctatgccacgtccccatcctctcccaagaaggaggcgacctccgggcgcagcagtgtccgccgctacttgtcaccagagcgcctcgcctcggtgcgccgtgaggacccccgcagccggaccacatcctccagcagcaactgtagcgccaaaaaggaaggcaaaaccaaagaagttatcttcagtgtggaggatggctccgtgaaaatgttcctgaggggccgccctgtgcccatgatgatcccagacgagctggcacccacctacagcctggacacacgctcggagctgccttcttgccggctcaagctggagtgggtctatggctaccgtggccgagactgccgggccaacctttatttgctgcccaccggggagatagtgtactttgtggcctccgtagccgtgctatacagcgtggaggagcagaggcagcgacactacctgggacacaacgatgacatcaaatgcttggccatccacccagatatggtcaccatcgccacgggacaggtggcgggaaccactaaggaagggaagccgctgccgccccacgtgcgcatctgggactcagtttccctctccaccttacacgtgctgggcttgggggtgtttgacagagccgtgtgctgtgtgggcttctccaaatctaatggaggcaacctgctgtgtgcagtggatgaatccaatgatcacatgctctcggtgtgggactgggccaaggagaccaaggtggtggatgtcaaggtccctgaggactttggccctgtgcgcaccgtggcagagggccacggagacacactgtacgtggggaccacccgcaattccatcctgcagggctccgtgcacacaggcttctcactgctggtccagggccatgtggaagagctgtggggcctggccacacaccccagtcgggcccagtttgtgacctgcgggcaggataagctggtgcatctatggagctcagattcccaccagcccctgtggagcaggatcatcgaggaccctgcccgctcagccggcttccaccccagtggctctgtcctggctgtgggtacagtgactggcagatggctgctgctggacacggagacccatgacctggtggctatccacacagacggcaatgaacagatctcagtggtcagcttctccccagacggggcgtacctggccgtgggctcccacgacaacttggtgtacgtgtacacggtggaccagggcggccgcaaggtcagccgcctgggcaagtgctcgggccattccagttttatcacccacctggattgggcccaggacagcagctgctttgtcaccaactccggggactatgagattctgtactgggacccggctacctgtaagcagatcaccagtgcggatgctgtgaggaacatggaatgggccacagctacttgtgtcctagggtttggggtgtttgggatctggtctgagggggcggacggcactgatatcaacgctgtggcccgctctcatgatgggaagttgctggcttcagctgatgactttggcaaagttcacctgtttagctacccctgctgtcagcctcgagccctcagccacaagtacggtggacacagcagccatgtgacaaatgtggccttcttgtgggatgacagcatggccctgaccacagggggcaaggacaccagtgtgctacagtggcgggtggtctgatgcggccagggaagagtcaggtgtcagggcaggaattctattttcgggagatgtctattgccgagtagagtaatatatacccagagtatgtctatagcagagggggttatgggggcgggagggtagactgacatacagaagtctctatttatccgggtgggaagagggagtcacatcgctttggggatccattggtgtttggtttggggtgttttttaagttttttcttttatatcatccagaaataaagacacgtacactaa

SEQ ID NO: 280123 - DNA, 1934 bp, Homo sapiens
ggcgcttcgttgttattagtggccactagtcatacaatcttcaagtgtggcttggccatccacccagatatggtcaccatcgccacgggacaggtggcgggaaccactaaggaagggaagccgctgccgccccacgtgcgcatctgggactcagtttccctctccaccttacacgtgctgggcttgggggtgtttgacagagccgtgtgctgtgtgggcttctccaaatctaatggaggcaacctgctgtgtgcagtggatgaatccaatgatcacatgctctcggtgtgggactgggccaaggagaccaaggtggtggatgtcaagtgctccaatgaggctgtattggtggccaccttccaccccacggaccccactgtgcttatcacctgcgggaaatctcacatctacttctggaccttggaggggggcagcttgagcaagcggcaaggcctctttgagaaacatgagaaaccgaagtatgtgctgtgtgtgacctttttggaaggtggcgacgtggtcacgggggactctggggggaacctctatgtttggggcaaaggtgggaaccgtatcacacaggcggtgctgggcgcccacgacggcggcgtgtttgggctctgcgccctgcgggacgggacgctggtgtctggagggggccgtgatcggcgggtggtcctctggggttctgactacagcaagctgcaggaagtggaggtccctgaggactttggccctgtgcgcaccgtggcagagggccacggagacacactgtacgtggggaccacccgcaattccatcctgcagggctccgtgcacacaggcttctcactgctggtccagggccatgtggaagagctgtggggcctggccacacaccccagtcgggcccagtttgtgacctgcgggcaggataagctggtgcatctatggagctcagattcccaccagcccctgtggagcaggatcatcgaggaccctgcccgctcagccggcttccaccccagtggctctgtcctggctgtgggtacagtgactggcagatggctgctgctggacacggagacccatgacctggtggctatccacacagacggcaatgaacagatctcagtggtcagcttctccccagacggggcgtacctggccgtgggctcccacgacaacttggtgtacgtgtacacggtggaccagggcggccgcaaggtcagccgcctgggcaagtgctcgggccattccagttttatcacccacctggattgggcccaggacagcagctgctttgtcaccaactccggggactatgagattctgtactgggacccggctacctgtaagcagatcaccagtgcggatgctgtgaggaacatggaatgggccacagctacttgtgtcctagggtttggggtgtttgggatctggtctgagggggcggacggcactgatatcaacgctgtggcccgctctcatgatgggaagttgctggcttcagctgatgactttggcaaagttcacctgtttagctacccctgctgtcagcctcgagccctcagccacaagtacggtggacacagcagccatgtgacaaatgtggccttcttgtgggatgacagcatggccctgaccacagggggcaaggacaccagtgtgctacagtggcgggtggtctgatgcggccagggaagagtcaggtgtcagggcaggaattctattttcgggagatgtctattgccgagtagagtaatatatacccagagtatgtctatagcagagggggttatgggggcgggagggtagactgacatacagaagtctctatttatccgggtgggaagagggagtcacatcgctttggggatccattggtgtttggtttggggtgttttttaagttttttcttttatatcatccagaaataaagacacgtacactaa

SEQ ID NO: 280124 - DNA, 2688 bp, Homo sapiens
ggcgcagccaatcctggccctaggattgtgttggggggcttggcaggcggtgtcccgacccccctttctgggcatcctggggatgaccccagcgccgggcccggcgccggccgcctgatgccaggcgagctgagctggggatgctggaacgaagggcgttgctatggcaacgggaggcagggcctggttggggggaccgggcccgggctgggaccgggggggccggcggtggctgtggtggggcgatggcggagcgcggccggccttctgcggcctgtacgacacgtcctcgctgctgcgatactgcaacgatgacaatttgtcgggcacgagcggtatggaagtggacgaccgcgtgtcggcgctggagcagcggctgcagttacaggaagacgagctggcggtcctaaaggcggcgctggcggatgctctgcgtcgcctgcgggcatgcgaagaacagggagcggcgctacgcgcgcggggcacccccaagggccgggcgcctccgcgcttaggcaccactgcctcggtgtgtcagctcttgaaaggccttcccaccaggacgccccttaatggctcgggacccccgcggcgcgtgggtggctatgccacgtccccatcctctcccaagaaggaggcgacctccgggcgcagcagtgtccgccgctacttgtcaccagagcgcctcgcctcggtgcgccgtgaggacccccgcagccggaccacatcctccagcagcaactgtagcgccaaaaaggaaggcaaaaccaaagaagttatcttcagtgtggaggatggctccgtgaaaatgttcctgaggggccgccctgtgcccatgatgatcccagacgagctggcacccacctacagcctggacacacgctcggagctgccttcttgccggctcaagctggagtgggtctatggctaccgtggccgagactgccgggccaacctttatttgctgcccaccggggagatagtgtactttgtggcctccgtagccgtgctatacagcgtggaggagcagaggcagcgacactacctgggacacaacgatgacatcaaatgcttggccatccacccagatatggtcaccatcgccacgggacaggtggcgggaaccactaaggaagggaagccgctgccgccccacgtgcgcatctgggactcagtttccctctccaccttacacgtgctgggcttgggggtgtttgacagagccgtgtgctgtgtgggcttctccaaatctaatggaggcaacctgctgtgtgcagtggatgaatccaatgatcacatgctctcggtgtgggactgggccaaggagaccaaggtggtggatgtcaagaaacatgagaaaccgaagtatgtgctgtgtgtgacctttttggaaggtggcgacgtggtcacgggggactctggggggaacctctatgtttggggcaaaggtgggaaccgtatcacacaggcggtgctgggcgcccacgacggcggcgtgtttgggctctgcgccctgcgggacgggacgctggtgtctggagggggccgtgatcggcgggtggtcctctggggttctgactacagcaagctgcaggaagtggaggtccctgaggactttggccctgtgcgcaccgtggcagagggccacggagacacactgtacgtggggaccacccgcaattccatcctgcagggctccgtgcacacaggcttctcactgctggtccaggaccctgcccgctcagccggcttccaccccagtggctctgtcctggctgtgggtacagtgactggcagatggctgctgctggacacggagacccatgacctggtggctatccacacagacggcaatgaacagatctcagtggtcagcttctccccagacggggcgtacctggccgtgggctcccacgacaacttggtgtacgtgtacacggtggaccagggcggccgcaaggtcagccgcctgggcaagtgctcgggccattccagttttatcacccacctggattgggcccaggacagcagctgctttgtcaccaactccggggactatgagattctgtactgggacccggctacctgtaagcagatcaccagtgcggatgctgtgaggaacatggaatgggccacagctacttgtgtcctagggtttggggtgtttgggatctggtctgagggggcggacggcactgatatcaacgctgtggcccgctctcatgatgggaagttgctggcttcagctgatgactttggcaaagttcacctgtttagctacccctgctgtcagcctcgagccctcagccacaagtacggtggacacagcagccatgtgacaaatgtggccttcttgtgggatgacagcatggccctgaccacagggggcaaggacaccagtgtgctacagtggcgggtggtctgatgcggccagggaagagtcaggtgtcagggcaggaattctattttcgggagatgtctattgccgagtagagtaatatatacccagagtatgtctatagcagagggggttatgggggcgggagggtagactgacatacagaagtctctatttatccgggtgggaagagggagtcacatcgctttggggatccattggtgtttggtttggggtgttttttaagttttttcttttatatcatccagaaataaagacacgtacactaa

SEQ ID NO: 280125 - DNA, 3166 bp, Homo sapiens
ggcgcagccaatcctggccctaggattgtgttggggggcttggcaggcggtgtcccgacccccctttctgggcatcctggggatgaccccagcgccgggcccggcgccggccgcctgatgccaggcgagctgagctggggatgctggaacgaagggcgttgctatggcaacgggaggcagggcctggttggggggaccgggcccgggctgggaccgggggggccggcggtggctgtggtggggcgatggcggagcgcggccggccttctgcggcctgtacgacacgtcctcgctgctgcgatactgcaacgatgacaatttgtcgggcacgagcggtatggaagtggacgaccgcgtgtcggcgctggagcagcggctgcagttacaggaagacgagctggcggtcctaaaggcggcgctggcggatgctctgcgtcgcctgcgggcatgcgaagaacagggagcggcgctacgcgcgcggggcacccccaagggccgggcgcctccgcgcttaggcaccactgcctcggtgtgtcagctcttgaaaggccttcccaccaggacgccccttaatggctcgggacccccgcggcgcgtgggtggctatgccacgtccccatcctctcccaagaaggaggcgacctccgggcgcagcagtgtccgccgctacttgtcaccagagcgcctcgcctcggtgcgccgtgaggacccccgcagccggaccacatcctccagcagcaactgtagcgccaaaaaggaaggcaaaaccaaagaagttatcttcagtgtggaggatggctccgtgaaaatgttcctgaggggccgccctgtgcccatgatgatcccagacgagctggcacccacctacagcctggacacacgctcggagctgccttcttgccggctcaagctggagtgggtctatggctaccgtggccgagactgccgggccaacctttatttgctgcccaccggggagatagtgtactttgtggcctccgtagccgtgctatacagcgtggaggagcagaggcagcgacactacctgggacacaacgatgacatcaaatgcttggccatccacccagatatggtcaccatcgccacgggacaggtggcgggaaccactaaggaagggaagccgctgccgccccacgtgcgcatctgggactcagtttccctctccaccttacacgtgctgggcttgggggtgtttgacagagccgtgtgctgtgtgggcttctccaaatctaatggaggcaacctgctgtgtgcagtggatgaatccaatgatcacatgctctcggtgtgggactgggccaaggagaccaaggtggtggatgtcaagtgctccaatgaggctgtattggtggccaccttccaccccacggaccccactgtgcttatcacctgcgggaaatctcacatctacttctggaccttggaggggggcagcttgagcaagcggcaaggcctctttgagaaacatgagaaaccgaagtatgtgctgtgtgtgacctttttggaaggtggcgacgtggtcacgggggactctggggggaacctctatgtttggggcaaaggtgggaaccgtatcacacaggcggtgctgggcgcccacgacggcggcgtgtttgggctctgcgccctgcgggacgggacgctggtgtctggagggggccgtgatcggcgggtggtcctctggggttctgactacagcaagctgcaggaagtggaggtccctgaggactttggccctgtgcgcaccgtggcagagggccacggagacacactgtacgtggggaccacccgcaattccatcctgcagggctccgtgcacacaggcttctcactgctggtccagggccatgtggaagagctgtggggcctggccacacaccccagtcgggcccagtttgtgacctgcgggcaggataagctggtgcatctatggagctcagattcccaccagcccctgtggagcaggatcatcgaggaccctgcccgctcagccggcttccaccccagtggctctgtcctggctgtgggtacagtgactggcagatggctgctgctggacacggagacccatgacctggtggctatccacacagacggcaatgaacagatctcagtggtcagcttctccccagacggggcgtacctggccgtgggctcccacgacaacttggtgtacgtgtacacggtggaccagggcggccgcaaggtcagccgcctgggcaagtgctcgggccattccagttttatcacccacctggattgggcccaggacagcagctgctttgtcaccaactccggggactatgagattctgtacttagagatggggtttcaccatcttggccaggctggtctcgaactcctgacctcaggtgatccagccagatgctgtggctcatgctgcctcctgggattacagacgtgagccaccatgcccggccagatgcgggtttaaaagtagatgctcctgcttacgctgcgggctgtgaagaccccagcatgtgatgccttctcagccagtcctgacaggggacccggctacctgtaagcagatcaccagtgcggatgctgtgaggaacatggaatgggccacagctacttgtgtcctagggtttggggtgtttgggatctggtctgagggggcggacggcactgatatcaacgctgtggcccgctctcatgatgggaagttgctggcttcagctgatgactttggcaaagttcacctgtttagctacccctgctgtcagcctcgagccctcagccacaagtacggtggacacagcagccatgtgacaaatgtggccttcttgtgggatgacagcatggccctgaccacagggggcaaggacaccagtgtgctacagtggcgggtggtctgatgcggccagggaagagtcaggtgtcagggcaggaattctattttcgggagatgtctattgccgagtagagtaatatatacccagagtatgtctatagcagagggggttatgggggcgggagggtagactgacatacagaagtctctatttatccgggtgggaagagggagtcacatcgctttggggatccattggtgtttggtttggggtgttttttaagttttttcttttatatcatccagaaataaagacacgtacactaa

SEQ ID NO: 280126 - DNA, 1662 bp, Homo sapiens
aggctaggtagcgggctgggtgtgaatcggccgaggtcgcccgggacaggtggcgggaaccactaaggaagggaagccgctgccgccccacgtgcgcatctgggactcagtttccctctccaccttacacgtgctgggcttgggggtgtttgacagagccgtgtgctgtgtgggcttctccaaatcttgctccaatgaggctgtattggtggccaccttccaccccacggaccccactgtgcttatcacctgcgggaaatctcacatctacttctggaccttggaggggggcagcttgagcaagcggcaaggcctctttgagaaacatgagaaaccgaagtatgtgctgtgtgtgacctttttggaaggtggcgacgtggtcacgggggactctggggggaacctctatgtttggggcaaaggtgggaaccgtatcacacaggcggtgctgggcgcccacgacggcggcgtgtttgggctctgcgccctgcgggacgggacgctggtgtctggagggggccgtgatcggcgggtggtcctctggggttctgactacagcaagctgcaggaagtggaggtccctgaggactttggccctgtgcgcaccgtggcagagggccacggagacacactgtacgtggggaccacccgcaattccatcctgcagggctccgtgcacacaggcttctcactgctggtccaggaccctgcccgctcagccggcttccaccccagtggctctgtcctggctgtgggtacagtgactggcagatggctgctgctggacacggagacccatgacctggtggctatccacacagacggcaatgaacagatctcagtggtcagcttctccccagacggggcgtacctggccgtgggctcccacgacaacttggtgtacgtgtacacggtggaccagggcggccgcaaggtcagccgcctgggcaagtgctcgggccattccagttttatcacccacctggattgggcccaggacagcagctgctttgtcaccaactccggggactatgagattctgtactgggacccggctacctgtaagcagatcaccagtgcggatgctgtgaggaacatggaatgggccacagctacttgtgtcctagggtttggggtgtttgggatctggtctgagggggcggacggcactgatatcaacgctgtggcccgctctcatgatgggaagttgctggcttcagctgatgactttggcaaagttcacctgtttagctacccctgctgtcagcctcgagccctcagccacaagtacggtggacacagcagccatgtgacaaatgtggccttcttgtgggatgacagcatggccctgaccacagggggcaaggacaccagtgtgctacagtggcgggtggtctgatgcggccagggaagagtcaggtgtcagggcaggaattctattttcgggagatgtctattgccgagtagagtaatatatacccagagtatgtctatagcagagggggttatgggggcgggagggtagactgacatacagaagtctctatttatccgggtgggaagagggagtcacatcgctttggggatccattggtgtttggtttggggtgttttttaagttttttcttttatatcatccagaaataaagacacgtacactaa

SEQ ID NO: 280127 - DNA, 1057 bp, Homo sapiens
gctggagggcaatggcacgatctcggctcactgcaacctccgcctcccgggttcaagtgattcttctgcctcagcctcccgagtagctgggattacaggaccctgcccgctcagccggcttccaccccagtggctctgtcctggctgtgggtacagtgactggcagatggctgctgctggacacggagacccatgacctggtggctatccacacagacggcaatgaacagatctcagtggtcagcttctccccagacggggcgtacctggccgtgggctcccacgacaacttggtgtacgtgtacacggtggaccagggcggccgcaaggtcagccgcctgggcaagtgctcgggccattccagttttatcacccacctggattgggcccaggacagcagctgctttgtcaccaactccggggactatgagattctgtactgggacccggctacctgtaagcagatcaccagtgcggatgctgtgaggaacatggaatgggccacagctacttgtgtcctagggtttggggtgtttgggatctggtctgagggggcggacggcactgatatcaacgctgtggcccgctctcatgatgggaagttgctggcttcagctgatgactttggcaaagttcacctgtttagctacccctgctgtcagcctcgagccctcagccacaagtacggtggacacagcagccatgtgacaaatgtggccttcttgtgggatgacagcatggccctgaccacagggggcaaggacaccagtgtgctacagtggcgggtggtctgatgcggccagggaagagtcaggtgtcagggcaggaattctattttcgggagatgtctattgccgagtagagtaatatatacccagagtatgtctatagcagagggggttatgggggcgggagggtagactgacatacagaagtctctatttatccgggtgggaagagggagtcacatcgctttggggatccattggtgtttggtttggggtgttttttaagttttttcttttatatcatccagaaataaagacacgtacactaa

SEQ ID NO: 280128 - DNA, 724 bp, Homo sapiens
gcggccgcctactactactaaattcgcggccgcgtcgaccccacctggattgggcccaggacagcagctgctttgtcaccaactccggggactatgagattctgtactgggacccggctacctgtaagcagatcaccagtgcggatgctgtgaggaacatggaatgggccacagctacttgtgtcctagggtttggggtgtttgggatctggtctgagggggcggacggcactgatatcaacgctgtggcccgctctcatgatgggaagttgctggcttcagctgatgactttggcaaagttcacctgtttagctacccctgctgtcagcctcgagccctcagccacaagtacggtggacacagcagccatgtgacaaatgtggccttcttgtgggatgacagcatggccctgaccacagggggcaaggacaccagtgtgctacagtggcgggtggtctgatgcggccagggaagagtcaggtgtcagggcaggaattctattttcgggagatgtctattgccgagtagagtaatatatacccagagtatgtctatagcagagggggttatgggggcgggagggtagactgacatacagaagtctctatttatccgggtgggaagagggagtcacatcgctttggggatccattggtgtttggtttggggtgttttttaagttttttcttttatatcatccagaaataaagacacgtacactaa

SEQ ID NO: 280129 - DNA, 1463 bp, Homo sapiens
ggcgcagccaatcctggccctaggattgtgttggggggcttggcaggcggtgtcccgacccccctttctgggcatcctggggatgaccccagcgccgggcccggcgccggccgcctgatgccaggcgagctgagctggggatgctggaacgaagggcgttgctatggcaacgggaggcagggcctggttggggggaccgggcccgggctgggaccgggggggccggcggtggctgtggtggggcgatggcggagcgcggccggccttctgcggcctgtacgacacgtcctcgctgctgcgatactgcaacgatgacaatttgtcgggcacgagcggtatggaagtggacgaccgcgtgtcggcgctggagcagcggctgcagttacaggaagacgagctggcggtcctaaaggcggcgctggcggatgctctgcgtcgcctgcgggcatgcgaagaacagggagcggcgctacgcgcgcggggcacccccaagggccgggcgcctccgcgcttaggcaccactgcctcggtgtgtcagctcttgaaaggccttcccaccaggacgccccttaatggctcgggacccccgcggcgcgtgggtggctatgccacgtccccatcctctcccaagaaggaggcgacctccgggcgcagcagtgtccgccgctacttgtcaccagagcgcctcgcctcggtgcgccgtgaggacccccgcagccggaccacatcctccagcagcaactgtagcgccaaaaaggaaggcaaaaccaaagaagttatcttcagtgtggaggatggctccgtgaaaatgttcctgaggggccgccctgtgcccatgatgatcccagacgagctggcacccacctacagcctggacacacgctcggagctgccttcttgccggctcaagctggagtgggtctatggctaccgtggccgagactgccgggccaacctttatttgctgcccaccggggagatagtgtactttgtggcctccgtagccgtgctatacagcgtggaggagcagaggcagcgacactacctgggacacaacgatgacatcaaatgcttggccatccacccagatatggtcaccatcgccacgggacaggtggcgggaaccactaaggaagggaagccgctgccgccccacgtgcgcatctgggactcagtttccctctccaccttacacgtgctgggcttgggggtgtttgacagagccgtgtgctgtgtgggcttctccaaatctaatggaggcaacctgctgtgtgcagtggatgaatccaatgatcacatgctctcggtgtgggactgggccaaggagaccaaggtggtggatgtcaagtgctccaatgaggctgtattggtggccaccttccaccccacggaccccactgtgcttatcagtcgacgcgggcgggaatttagttgaagtaggcgacccgggaatttcggaccgg

SEQ ID NO: 280130 - DNA, 417 bp, Homo sapiens
taaatttgttttgtttaagagacagggtctccctatattgcctatgctggcctcaaactcctggactcaagcgatcctcccacctactgtgcccagcctgaaggttttaaaacaggcctgtgtggtgaatgccttggtgggcatggggggaggatgggccctgactccccttgcctctgtccccctcctctctcctcctctttagaatggaggcaacctgctgtgtgcagtggatgaatccaatgatcacatgctctcggtgtgggactgggccaaggagaccaaggtggtggatgtcaaggtgaggtgacttttctcatcccctcctgctgggtgccactgtgggactttcccaatctcagtggttaggagtctgcaatcagatagacccgtgtttaagccctggctttactcctt

SEQ ID NO: 280131 - DNA, 558 bp, Homo sapiens
cacggtcctgggtgacagatgacctctgggaggctacctgcttcagtgacgctctgacaccttcctttcctcccccaccttagaaacatgagaaaccgaagtatgtgctgtgtgtgacctttttggaaggtggcgacgtggtcacgggggactctggggggaacctctatgtttggggcaaaggtcagtgtcaccccatctgtttggttcccaatccagtcttctgaaacactcctggctctgcctcccttcgtggaattctgcttgtgtgaaatgagtgtaaatggatgtccgattccaacaccctcgtcaaggttcagctcaagtatccctatctccaggaaatctttattgactcccccctgccttgccctctggaaatcccttgttagggatcaagtccagattatcaatgaatgggttagctcagttgtgtttagatgatgaatggatggatgggtggatggaaggaaggacggatgggtagatgaatggatacatggacaagtgctttgtcccagcgtgtggatcaatgaataagtgaatgaaggaatgaat

SEQ ID NO: 280132 - DNA, 1968 bp, Homo sapiens
ccacccccggccccgaagctccgccacccgccgccatgagtagctttggagctggcaaaaccaaagaagttatcttcagtgtggcttggccatccacccagatatggtcaccatcgccacgggacaggtggcgggaaccactaaggaagggaagccgctgccgccccacgtgcgcatctgggactcagtttccctctccaccttacacgtgctgggcttgggggtgtttgacagagccgtgtgctgtgtgggcttctccaaatctaatggaggcaacctgctgtgtgcagtggatgaatccaatgatcacatgctctcggtgtgggactgggccaaggagaccaaggtggtggatgtcaagtgctccaatgaggctgtattggtggccaccttccaccccacggaccccactgtgcttatcacctgcgggaaatctcacatctacttctggaccttggaggggggcagcttgagcaagcggcaaggcctctttgagaaacatgagaaaccgaagtatgtgctgtgtgtgacctttttggaaggtggcgacgtggtcacgggggactctggggggaacctctatgtttggggcaaaggtgggaaccgtatcacacaggcggtgctgggcgcccacgacggcggcgtgtttgggctctgcgccctgcgggacgggacgctggtgtctggagggggccgtgatcggcgggtggtcctctggggttctgactacagcaagctgcaggaagtggaggtccctgaggactttggccctgtgcgcaccgtggcagagggccacggagacacactgtacgtggggaccacccgcaattccatcctgcagggctccgtgcacacaggcttctcactgctggtccagggccatgtggaagagctgtggggcctggccacacaccccagtcgggcccagtttgtgacctgcgggcaggataagctggtgcatctatggagctcagattcccaccagcccctgtggagcaggatcatcgaggaccctgcccgctcagccggcttccaccccagtggctctgtcctggctgtgggtacagtgactggcagatggctgctgctggacacggagacccatgacctggtggctatccacacagacggcaatgaacagatctcagtggtcagcttctccccagacggggcgtacctggccgtgggctcccacgacaacttggtgtacgtgtacacggtggaccagggcggccgcaaggtcagccgcctgggcaagtgctcgggccattccagttttatcacccacctggattgggcccaggacagcagctgctttgtcaccaactccggggactatgagattctgtactgggacccggctacctgtaagcagatcaccagtgcggatgctgtgaggaacatggaatgggccacagctacttgtgtcctagggtttggggtgtttgggatctggtctgagggggcggacggcactgatatcaacgctgtggcccgctctcatgatgggaagttgctggcttcagctgatgactttggcaaagttcacctgtttagctacccctgctgtcagcctcgagccctcagccacaagtacggtggacacagcagccatgtgacaaatgtggccttcttgtgggatgacagcatggccctgaccacagggggcaaggacaccagtgtgctacagtggcgggtggtctgatgcggccagggaagagtcaggtgtcagggcaggaattctattttcgggagatgtctattgccgagtagagtaatatatacccagagtatgtctatagcagagggggttatgggggcgggagggtagactgacatacagaagtctctatttatccgggtgggaagagggagtcacatcgctttggggatccattggtgtttggtttggggtgttttttaagttttttcttttatatcatccagaaataaagacacgtacactaa

SEQ ID NO: 280133 - DNA, 2955 bp, Homo sapiens
ggcgcagccaatcctggccctaggattgtgttggggggcttggcaggcggtgtcccgacccccctttctgggcatcctggggatgaccccagcgccgggcccggcgccggccgcctgatgccaggcgagctgagctggggatgctggaacgaagggcgttgctatggcaacgggaggcagggcctggttggggggaccgggcccgggctgggaccgggggggccggcggtggctgtggtggggcgatggcggagcgcggccggccttctgcggcctgtacgacacgtcctcgctgctgcgatactgcaacgatgacaatttgtcgggcacgagcggtatggaagtggacgaccgcgtgtcggcgctggagcagcggctgcagttacaggaagacgagctggcggtcctaaaggcggcgctggcggatgctctgcgtcgcctgcgggcatgcgaagaacagggagcggcgctacgcgcgcggggcacccccaagggccgggcgcctccgcgcttaggcaccactgcctcggtgtgtcagctcttgaaaggccttcccaccaggacgccccttaatggctcgggacccccgcggcgcgtgggtggctatgccacgtccccatcctctcccaagaaggaggcgacctccgggcgcagcagtgtccgccgctacttgtcaccagagcgcctcgcctcggtgcgccgtgaggacccccgcagccggaccacatcctccagcagcaactgtagcgccaaaaaggaaggcaaaaccaaagaagttatcttcagtgtggaggatggctccgtgaaaatgttcctgaggggccgccctgtgcccatgatgatcccagacgagctggcacccacctacagcctggacacacgctcggagctgccttcttgccggctcaagctggagtgggtctatggctaccgtggccgagactgccgggccaacctttatttgctgcccaccggggagatagtgtactttgtggcctccgtagccgtgctatacagcgtggaggagcagaggcagcgacactacctgggacacaacgatgacatcaaatgcttggccatccacccagatatggtcaccatcgccacgggacaggtggcgggaaccactaaggaagggaagccgctgccgccccacgtgcgcatctgggactcagtttccctctccaccttacacgtgctgggcttgggggtgtttgacagagccgtgtgctgtgtgggcttctccaaatctaatggaggcaacctgctgtgtgcagtggatgaatccaatgatcacatgctctcggtgtgggactgggccaaggagaccaaggtggtggatgtcaagtgctccaatgaggctgtattggtggccaccttccaccccacggaccccactgtgcttatcacctgcgggaaatctcacatctacttctggaccttggaggggggcagcttgagcaagcggcaaggcctctttgagaaacatgagaaaccgaagtatgtgctgtgtgtgacctttttggaaggtggcgacgtggtcacgggggactctggggggaacctctatgtttggggcaaaggtgggaaccgtatcacacaggcggtgctgggcgcccacgacggcggcgtgtttgggctctgcgccctgcgggacgggacgctggtgtctggagggggccgtgatcggcgggtggtcctctggggttctgactacagcaagctgcaggaagtggaggtccctgaggactttggccctgtgcgcaccgtggcagagggccacggagacacactgtacgtggggaccacccgcaattccatcctgcagggctccgtgcacacaggcttctcactgctggtccagggccatgtggaagagctgtggggcctggccacacaccccagtcgggcccagtttgtgacctgcgggcaggataagctggtgcatctatggagctcagattcccaccagcccctgtggagcaggatcatcgaggaccctgcccgctcagccggcttccaccccagtggctctgtcctggctgtgggtacagtgactggcagatggctgctgctggacacggagacccatgacctggtggctatccacacagacggcaatgaacagatctcagtggtcagcttctccccagacggggcgtacctggccgtgggctcccacgacaacttggtgtacgtgtacacggtggaccagggcggccgcaaggtcagccgcctgggcaagtgctcgggccattccagttttatcacccacctggattgggcccaggacagcagctgctttgtcaccaactccggggactatgagattctgtactgggacccggctacctgtaagcagatcaccagtgcggatgctgtgaggaacatggaatgggccacagctacttgtgtcctagggtttggggtgtttgggatctggtctgagggggcggacggcactgatatcaacgctgtggcccgctctcatgatgggaagttgctggcttcagctgatgactttggcaaagttcacctgtttagctacccctgctgtcagcctcgagccctcagccacaagtacggtggacacagcagccatgtgacaaatgtggccttcttgtgggatgacagcatggccctgaccacagggggcaaggacaccagtgtgctacagtggcgggtggtctgatgcggccagggaagagtcaggtgtcagggcaggaattctattttcgggagatgtctattgccgagtagagtaatatatacccagagtatgtctatagcagagggggttatgggggcgggagggtagactgacatacagaagtctctatttatccgggtgggaagagggagtcacatcgctttggggatccattggtgtttggtttggggtgttttttaagttttttcttttatatcatccagaaataaagacacgtacactaa

SEQ ID NO: 280134 - DNA, 3053 bp, Homo sapiens
ggcgcagccaatcctggccctaggattgtgttggggggcttggcaggcggtgtcccgacccccctttctgggcatcctggggatgaccccagcgccgggcccggcgccggccgcctgatgccaggcgagctgagctggggatgctggaacgaagggcgttgctatggcaacgggaggcagggcctggttggggggaccgggcccgggctgggaccgggggggccggcggtggctgtggtggggcgatggcggagcgcggccggccttctgcggcctgtacgacacgtcctcgctgctgcgatactgcaacgatgacaatttgtcgggcacgagcggtatggaagtggacgaccgcgtgtcggcgctggagcagcggctgcagttacaggaagacgagctggcggtcctaaaggcggcgctggcggatgctctgcgtcgcctgcgggcatgcgaagaacagggagcggcgctacgcgcgcggggcacccccaagggccgggcgcctccgcgcttaggcaccactgcctcggtgtgtcagctcttgaaaggccttcccaccaggacgccccttaatggctcgggacccccgcggcgcgtgggtggctatgccacgtccccatcctctcccaagaaggaggcgacctccgggcgcagcagtgtccgccgctacttgtcaccagagcgcctcgcctcggtgcgccgtgaggacccccgcagccggaccacatcctccagcagcaactgtagcgccaaaaaggaaggcaaaaccaaagaagttatcttcagtgtggaggatggctccgtgaaaatgttcctgaggggccgccctgtgcccatgatgatcccagacgagctggcacccacctacagcctggacacacgctcggagctgccttcttgccggctcaagctggagtgggtctatggctaccgtggccgagactgccgggccaacctttatttgctgcccaccggggagatagtgtactttgtggcctccgtagccgtgctatacagcgtggaggagcagaggcagcgacactacctgggacacaacgatgacatcaaatgcttggccatccacccagatatggtcaccatcgccacgggacaggtggcgggaaccactaaggaagggaagccgctgccgccccacgtgcgcatctgggactcagtttccctctccaccttacacgtgctgggcttgggggtgtttgacagagccgtgtgctgtgtgggcttctccaaatctaatggaggcaacctgctgtgtgcagtggatgaatccaatgatcacatgctctcggtgtgggactgggccaaggagaccaaggtggtggatgtcaaggctggagtgcaatggcataatcttggctcactgcaacctccacctcccaggttccagcgattctcctgactcagcctcctgagtagctgagactacagtgctccaatgaggctgtattggtggccaccttccaccccacggaccccactgtgcttatcacctgcgggaaatctcacatctacttctggaccttggaggggggcagcttgagcaagcggcaaggcctctttgagaaacatgagaaaccgaagtatgtgctgtgtgtgacctttttggaaggtggcgacgtggtcacgggggactctggggggaacctctatgtttggggcaaaggtgggaaccgtatcacacaggcggtgctgggcgcccacgacggcggcgtgtttgggctctgcgccctgcgggacgggacgctggtgtctggagggggccgtgatcggcgggtggtcctctggggttctgactacagcaagctgcaggaagtggaggtccctgaggactttggccctgtgcgcaccgtggcagagggccacggagacacactgtacgtggggaccacccgcaattccatcctgcagggctccgtgcacacaggcttctcactgctggtccagggccatgtggaagagctgtggggcctggccacacaccccagtcgggcccagtttgtgacctgcgggcaggataagctggtgcatctatggagctcagattcccaccagcccctgtggagcaggatcatcgaggaccctgcccgctcagccggcttccaccccagtggctctgtcctggctgtgggtacagtgactggcagatggctgctgctggacacggagacccatgacctggtggctatccacacagacggcaatgaacagatctcagtggtcagcttctccccagacggggcgtacctggccgtgggctcccacgacaacttggtgtacgtgtacacggtggaccagggcggccgcaaggtcagccgcctgggcaagtgctcgggccattccagttttatcacccacctggattgggcccaggacagcagctgctttgtcaccaactccggggactatgagattctgtactgggacccggctacctgtaagcagatcaccagtgcggatgctgtgaggaacatggaatgggccacagctacttgtgtcctagggtttggggtgtttgggatctggtctgagggggcggacggcactgatatcaacgctgtggcccgctctcatgatgggaagttgctggcttcagctgatgactttggcaaagttcacctgtttagctacccctgctgtcagcctcgagccctcagccacaagtacggtggacacagcagccatgtgacaaatgtggccttcttgtgggatgacagcatggccctgaccacagggggcaaggacaccagtgtgctacagtggcgggtggtctgatgcggccagggaagagtcaggtgtcagggcaggaattctattttcgggagatgtctattgccgagtagagtaatatatacccagagtatgtctatagcagagggggttatgggggcgggagggtagactgacatacagaagtctctatttatccgggtgggaagagggagtcacatcgctttggggatccattggtgtttggtttggggtgttttttaagttttttcttttatatcatccagaaataaagacacgtacactaa

SEQ ID NO: 280135 - DNA, 2675 bp, Homo sapiens
aagctggtactggtctggagttttagggatcatgacaatttgtcgggcacgagcggtatggaagtggacgaccgcgtgtcggcgctggagcagcggctgcagttacaggaagacgagctggcggtcctaaaggcggcgctggcggatgctctgcgtcgcctgcgggcatgcgaagaacagggagcggcgctacgcgcgcggggcacccccaagggccgggcgcctccgcgcttaggcaccactgcctcggtgtgtcagctcttgaaaggccttcccaccaggacgccccttaatggctcgggacccccgcggcgcgtgggtggctatgccacgtccccatcctctcccaagaaggaggcgacctccgggcgcagcagtgtccgccgctacttgtcaccagagcgcctcgcctcggtgcgccgtgaggacccccgcagccggaccacatcctccagcagcaactgtagcgccaaaaaggaaggcaaaaccaaagaagttatcttcagtgtggaggatggctccgtgaaaatgttcctgaggggccgccctgtgcccatgatgatcccagacgagctggcacccacctacagcctggacacacgctcggagctgccttcttgccggctcaagctggagtgggtctatggctaccgtggccgagactgccgggccaacctttatttgctgcccaccggggagatagtgtactttgtggcctccgtagccgtgctatacagcgtggaggagcagaggcagcgacactacctgggacacaacgatgacatcaaatgcttggccatccacccagatatggtcaccatcgccacgggacaggtggcgggaaccactaaggaagggaagccgctgccgccccacgtgcgcatctgggactcagtttccctctccaccttacacgtgctgggcttgggggtgtttgacagagccgtgtgctgtgtgggcttctccaaatctaatggaggcaacctgctgtgtgcagtggatgaatccaatgatcacatgctctcggtgtgggactgggccaaggagaccaaggtggtggatgtcaagtgctccaatgaggctgtattggtggccaccttccaccccacggaccccactgtgcttatcacctgcgggaaatctcacatctacttctggaccttggaggggggcagcttgagcaagcggcaaggcctctttgagaaacatgagaaaccgaagtatgtgctgtgtgtgacctttttggaaggtggcgacgtggtcacgggggactctggggggaacctctatgtttggggcaaaggtgggaaccgtatcacacaggcggtgctgggcgcccacgacggcggcgtgtttgggctctgcgccctgcgggacgggacgctggtgtctggagggggccgtgatcggcgggtggtcctctggggttctgactacagcaagctgcaggaagtggaggtccctgaggactttggccctgtgcgcaccgtggcagagggccacggagacacactgtacgtggggaccacccgcaattccatcctgcagggctccgtgcacacaggcttctcactgctggtccagggccatgtggaagagctgtggggcctggccacacaccccagtcgggcccagtttgtgacctgcgggcaggataagctggtgcatctatggagctcagattcccaccagcccctgtggagcaggatcatcgaggaccctgcccgctcagccggcttccaccccagtggctctgtcctggctgtgggtacagtgactggcagatggctgctgctggacacggagacccatgacctggtggctatccacacagacggcaatgaacagatctcagtggtcagcttctccccagacggggcgtacctggccgtgggctcccacgacaacttggtgtacgtgtacacggtggaccagggcggccgcaaggtcagccgcctgggcaagtgctcgggccattccagttttatcacccacctggattgggcccaggacagcagctgctttgtcaccaactccggggactatgagattctgtactgggacccggctacctgtaagcagatcaccagtgcggatgctgtgaggaacatggaatgggccacagctacttgtgtcctagggtttggggtgtttgggatctggtctgagggggcggacggcactgatatcaacgctgtggcccgctctcatgatgggaagttgctggcttcagctgatgactttggcaaagttcacctgtttagctacccctgctgtcagcctcgagccctcagccacaagtacggtggacacagcagccatgtgacaaatgtggccttcttgtgggatgacagcatggccctgaccacagggggcaaggacaccagtgtgctacagtggcgggtggtctgatgcggccagggaagagtcaggtgtcagggcaggaattctattttcgggagatgtctattgccgagtagagtaatatatacccagagtatgtctatagcagagggggttatgggggcgggagggtagactgacatacagaagtctctatttatccgggtgggaagagggagtcacatcgctttggggatccattggtgtttggtttggggtgttttttaagttttttcttttatatcatccagaaataaagacacgtacactaa

SEQ ID NO: 280136 - DNA, 3421 bp, Homo sapiens
ggcgcagccaatcctggccctaggattgtgttggggggcttggcaggcggtgtcccgacccccctttctgggcatcctggggatgaccccagcgccgggcccggcgccggccgcctgatgccaggcgagctgagctggggatgctggaacgaagggcgttgctatggcaacgggaggcagggcctggttggggggaccgggcccgggctgggaccgggggggccggcggtggctgtggtggggcgatggcggagcgcggccggccttctgcggcctgtacgacacgtcctcgctgctgcgatactgcaacgatgacaatttgtcgggcacgagcggtatggaagtggacgaccgcgtgtcggcgctggagcagcggctgcagttacaggaagacgagctggcggtcctaaaggcggcgctggcggatgctctgcgtcgcctgcgggcatgcgaagaacagggagcggcgctacgcgcgcggggcacccccaagggccgggcgcctccgcgcttaggcaccactgcctcggtgtgtcagctcttgaaaggccttcccaccaggacgccccttaatggctcgggacccccgcggcgcgtgggtggctatgccacgtccccatcctctcccaagaaggaggcgacctccgggcgcagcagtgtccgccgctacttgtcaccagagcgcctcgcctcggtgcgccgtgaggacccccgcagccggaccacatcctccagcagcaactgtagcgccaaaaaggaaggcaaaaccaaagaagttatcttcagtgtggaggatggctccgtgaaaatgttcctgaggggccgccctgtgcccatgatgatcccagacgagctggcacccacctacagcctggacacacgctcggagctgccttcttgccggctcaagctggagtgggtctatggctaccgtggccgagactgccgggccaacctttatttgctgcccaccggggagatagtgtactttgtggcctccgtagccgtgctatacagcgtggaggagcagaggcagcgacactacctgggacacaacgatgacatcaaatgcttggccatccacccagatatggtcaccatcgccacgggacaggtggcgggaaccactaaggaagggaagccgctgccgccccacgtgcgcatctgggactcagtttccctctccaccttacacgtgctgggcttgggggtgtttgacagagccgtgtgctgtgtgggcttctccaaatctaatggaggcaacctgctgtgtgcagtggatgaatccaatgatcacatgctctcggtgtgggactgggccaaggagaccaaggtggtggatgtcaagtgctccaatgaggctgtattggtggccaccttccaccccacggaccccactgtgcttatcacctgcgggaaatctcacatctacttctggaccttggaggggggcagcttgagcaagcggcaaggcctctttgagaaacatgagaaaccgaagtatgtgctgtgtgtgacctttttggaaggtggcgacgtggtcacgggggactctggggggaacctctatgtttggggcaaaggtgggaaccgtatcacacaggcggtgctgggcgcccacgacggcggcgtgtttgggctctgcgccctgcgggacgggacgctggtgtctggagggggccgtgatcggcgggtggtcctctggggttctgactacagcaagctgcaggaagtggaggtccctgaggactttggccctgtgcgcaccgtggcagagggccacggagacacactgtacgtggggaccacccgcaattccatcctgcagggctccgtgcacacaggcttctcactgctggtccagggccatgtggaagagctgtggggcctggccacacaccccagtcgggcccagtttgtgacctgcgggcaggataagctggtgcatctatggagctcagattcccaccagcccctgtggagcaggatcatcgaggaccctgcccgctcagccggcttccaccccagtggctctgtcctggctgtgggtacagtgactggcagatggctgctgctggacacggagacccatgacctggtggctatccacacagacggcaatgaacagatctcagtggtcagcttctccccagacggggcgtacctggccgtgggctcccacgacaacttggtgtacgtgtacacggtggaccagggcggccgcaaggtcagccgcctgggcaagtgctcgggccattccagttttatcacccacctggattgggcccaggacagcagctgctttgtcaccaactccggggactatgagattctgtactgggacccggctacctgtaagcagatcaccagtgcggatgctgtgaggaacatggaatgggccacagctacttgtgtcctagggtttggggtgtttgggatctggtctgagggggcggacggcactgatatcaacgctgtggcccgctctcatgatgggaagttgctggcttcagctgatgactttggcaaagttcacctgtttagctacccctgctgtcagcctcgagccctcagccacaagtacggtggacacagcagccatgtgacaaatgtggccttcttgtgggatgacagcatggccctgaccacagggggcaaggacaccagtgtgctacagtggcgggtggtctgatgcggccagggaagagtcaggtgtcagggcaggaattctattttcgggagatgtctattgccgagtagagtaatatatacccagagtatgtctatagcagagggggttatgggggcgggagggtagactgacatacagaagtctctatttatccgggtgggaagagggagtcacatcgctttggggatccattggtgtttggtttggggtgttttttaagttttttcttttatatcatccagaaataaagacacgtacactaaaaaaaaaaaaaaaaaaaaaaaaaaaaaaaaaaaaaaaaaaaaaaagagggggggggggcgaaaaaaaattcccgggggggggggcccagagtttgggggcgaccgagttttttgtgtaaagaggggggccccaaaagggggggtaaaaaaaaaggagaggggggggggcgcggcggattaaaacaacgggcgggagaggaggggggaaacacacgtgctagacggggggaactctggggagagggacccccacatccggcgggggggggcaaacaatgggggacacaacacaccccaccagaagattataaacggcgccagaggagaaaaagataaacagtgcgaggcgcatatcggggggtcagacccgcgagcggcaataatgtgcgccgggcaagaaaaatattgccacacacgagggataggagctgaggaaaaattaacagggcagagagtgaacagagga

SEQ ID NO: 280137 - DNA, 2216 bp, Homo sapiens
atcagctcggtaccggattgacgccacgtaaagaagttatctctcagtgtggaggatggctccgtgaaaatgttcctgaggggccgccctgtgcccatgatgatcccagacgagctggcacccacctacagcctggacacacgctcggagctgccttcttgccggctcaagctggagtgggtctatggctaccgtggccgagactgccgggccaacctttatttgctgcccaccggggagatagtgtactttgtggcctccgtagccgtgctatacagcgtggaggagcagaggcagcgacactacctgggacacaacgatgacatcaaatgcttggccatccacccagatatggtcaccatcgccacgggacaggtggcgggaaccactaaggaagggaagccgctgccgccccacgtgcgcatctgggactcagtttccctctccaccttacacgtgctgggcttgggggtgtttgacagagccgtgtgctgtgtgggcttctccaaatctaatggaggcaacctgctgtgtgcagtggatgaatccaatgatcacatgctctcggtgtgggactgggccaaggagaccaaggtggtggatgtcaagtgctccaatgaggctgtattggtggccaccttccaccccacggaccccactgtgcttatcacctgcgggaaatctcacatctacttctggaccttggaggggggcagcttgagcaagcggcaaggcctctttgagaaacatgagaaaccgaagtatgtgctgtgtgtgacctttttggaaggtggcgacgtggtcacgggggactctggggggaacctctatgtttggggcaaaggtgggaaccgtatcacacaggcggtgctgggcgcccacgacggcggcgtgtttgggctctgcgccctgcgggacgggacgctggtgtctggagggggccgtgatcggcgggtggtcctctggggttctgactacagcaagctgcaggaagtggaggtccctgaggactttggccctgtgcgcaccgtggcagagggccacggagacacactgtacgtggggaccacccgcaattccatcctgcagggctccgtgcacacaggcttctcactgctggtccagggccatgtggaagagctgtggggcctggccacacaccccagtcgggcccagtttgtgacctgcgggcaggataagctggtgcatctatggagctcagattcccaccagcccctgtggagcaggatcatcgaggaccctgcccgctcagccggcttccaccccagtggctctgtcctggctgtgggtacagtgactggcagatggctgctgctggacacggagacccatgacctggtggctatccacacagacggcaatgaacagatctcagtggtcagcttctccccagacggggcgtacctggccgtgggctcccacgacaacttggtgtacgtgtacacggtggaccagggcggccgcaaggtcagccgcctgggcaagtgctcgggccattccagttttatcacccacctggattgggcccaggacagcagctgctttgtcaccaactccggggactatgagattctgtactgggacccggctacctgtaagcagatcaccagtgcggatgctgtgaggaacatggaatgggccacagctacttgtgtcctagggtttggggtgtttgggatctggtctgagggggcggacggcactgatatcaacgctgtggcccgctctcatgatgggaagttgctggcttcagctgatgactttggcaaagttcacctgtttagctacccctgctgtcagcctcgagccctcagccacaagtacggtggacacagcagccatgtgacaaatgtggccttcttgtgggatgacagcatggccctgaccacagggggcaaggacaccagtgtgctacagtggcgggtggtctgatgcggccagggaagagtcaggtgtcagggcaggaattctattttcgggagatgtctattgccgagtagagtaatatatacccagagtatgtctatagcagagggggttatgggggcgggagggtagactgacatacagaagtctctatttatccgggtgggaagagggagtcacatcgctttggggatccattggtgtttggtttggggtgttttttaagttttttcttttatatcatccagaaataaagacacgtacactaa

SEQ ID NO: 280138 - DNA, 1794 bp, Homo sapiens
aggctaggtagcgggctgggtgtgaatcggccgaggtcgcccgggacaggtggcgggaaccactaaggaagggaagccgctgccgccccacgtgcgcatctgggactcagtttccctctccaccttacacgtgctgggcttgggggtgtttgacagagccgtgtgctgtgtgggcttctccaaatcttgctccaatgaggctgtattggtggccaccttccaccccacggaccccactgtgcttatcacctgcgggaaatctcacatctacttctggaccttggaggggggcagcttgagcaagcggcaaggcctctttgagaaacatgagaaaccgaagtatgtgctgtgtgtgacctttttggaaggtggcgacgtggtcacgggggactctggggggaacctctatgtttggggcaaaggtgggaaccgtatcacacaggcggtgctgggcgcccacgacggcggcgtgtttgggctctgcgccctgcgggacgggacgctggtgtctggagggggccgtgatcggcgggtggtcctctggggttctgactacagcaagctgcaggaagtggaggtccctgaggactttggccctgtgcgcaccgtggcagagggccacggagacacactgtacgtggggaccacccgcaattccatcctgcagggctccgtgcacacaggcttctcactgctggtccagggccatgtggaagagctgtggggcctggccacacaccccagtcgggcccagtttgtgacctgcgggcaggataagctggtgcatctatggagctcagattcccaccagcccctgtggagcaggatcatcgaggaccctgcccgctcagccggcttccaccccagtggctctgtcctggctgtgggtacagtgactggcagatggctgctgctggacacggagacccatgacctggtggctatccacacagacggcaatgaacagatctcagtggtcagcttctccccagacggggcgtacctggccgtgggctcccacgacaacttggtgtacgtgtacacggtggaccagggcggccgcaaggtcagccgcctgggcaagtgctcgggccattccagttttatcacccacctggattgggcccaggacagcagctgctttgtcaccaactccggggactatgagattctgtactgggacccggctacctgtaagcagatcaccagtgcggatgctgtgaggaacatggaatgggccacagctacttgtgtcctagggtttggggtgtttgggatctggtctgagggggcggacggcactgatatcaacgctgtggcccgctctcatgatgggaagttgctggcttcagctgatgactttggcaaagttcacctgtttagctacccctgctgtcagcctcgagccctcagccacaagtacggtggacacagcagccatgtgacaaatgtggccttcttgtgggatgacagcatggccctgaccacagggggcaaggacaccagtgtgctacagtggcgggtggtctgatgcggccagggaagagtcaggtgtcagggcaggaattctattttcgggagatgtctattgccgagtagagtaatatatacccagagtatgtctatagcagagggggttatgggggcgggagggtagactgacatacagaagtctctatttatccgggtgggaagagggagtcacatcgctttggggatccattggtgtttggtttggggtgttttttaagttttttcttttatatcatccagaaataaagacacgtacactaa

SEQ ID NO: 280139 - DNA, 2857 bp, Homo sapiens
ggcgcagccaatcctggccctaggattgtgttggggggcttggcaggcggtgtcccgacccccctttctgggcatcctggggatgaccccagcgccgggcccggcgccggccgcctgatgccaggcgagctgagctggggatgctggaacgaagggcgttgctatggcaacgggaggcagggcctggttggggggaccgggcccgggctgggaccgggggggccggcggtggctgtggtggggcgatggcggagcgcggccggccttctgcggcctgtacgacacgtcctcgctgctgcgatactgcaacgatgacaatttgtcgggcacgagcggtatggaagtggacgaccgcgtgtcggcgctggagcagcggctgcagttacaggaagacgagctggcggtcctaaaggcggcgctggcggatgctctgcgtcgcctgcgggcatgcgaagaacagggagcggcgctacgcgcgcggggcacccccaagggccgggcgcctccgcgcttaggcaccactgcctcggtgtgtcagctcttgaaaggccttcccaccaggacgccccttaatggctcgggacccccgcggcgcgtgggtggctatgccacgtccccatcctctcccaagaaggaggcgacctccgggcgcagcagtgtccgccgctacttgtcaccagagcgcctcgcctcggtgcgccgtgaggacccccgcagccggaccacatcctccagcagcaactgtagcgccaaaaaggaaggcaaaaccaaagaagttatcttcagtgtggaggatggctccgtgaaaatgttcctgaggggccgccctgtgcccatgatgatcccagacgagctggcacccacctacagcctggacacacgctcggagctgccttcttgccggctcaagctggagtgggtctatggctaccgtggccgagactgccgggccaacctttatttgctgcccaccggggagatagtgtactttgtggcctccgtagccgtgctatacagcgtggaggagcagaggcagcgacactacctgggacacaacgatgacatcaaatgcttggccatccacccagatatggtcaccatcgccacgggacaggtggcgggaaccactaaggaagggaagccgctgccgccccacgtgcgcatctgggactcagtttccctctccaccttacacgtgctgggcttgggggtgtttgacagagccgtgtgctgtgtgggcttctccaaatctaatggaggcaacctgctgtgtgcagtggatgaatccaatgatcacatgctctcggtgtgggactgggccaaggagaccaaggtggtggatgtcaagtgctccaatgaggctgtattggtggccaccttccaccccacggaccccactgtgcttatcacctgcgggaaatctcacatctacttctggaccttggaggggggcagcttgagcaagcggcaaggcctctttgagaaacatgagaaaccgaagtatgtgctgtgtgtgacctttttggaaggtggcgacgtggtcacgggggactctggggggaacctctatgtttggggcaaaggtgggaaccgtatcacacaggcggtgctgggcgcccacgacggcggcgtgtttgggctctgcgccctgcgggacgggacgctggtgtctggagggggccgtgatcggcgggtggtcctctggggttctgactacagcaagctgcaggaagtggaggtccctgaggactttggccctgtgcgcaccgtggcagagggccacggagacacactgtacgtggggaccacccgcaattccatcctgcagggctccgtgcacacaggcttctcactgctggtccagggccatgtggaagagctgtggggcctggccacacaccccagtcgggcccagtttgtgacctgcgggcaggataagctggtgcatctatggagctcagattcccaccagcccctgtggagcaggatcatcgaggaccctgcccgctcagccggcttccaccccagtggctctgtcctggctgtgggtacagtgactggcagatggctgctgctggacacggagacccatgacctggtggctatccacacagacggcaatgaacagatctcagtggtcagcttctccccagggccattccagttttatcacccacctggattgggcccaggacagcagctgctttgtcaccaactccggggactatgagattctgtactgggacccggctacctgtaagcagatcaccagtgcggatgctgtgaggaacatggaatgggccacagctacttgtgtcctagggtttggggtgtttgggatctggtctgagggggcggacggcactgatatcaacgctgtggcccgctctcatgatgggaagttgctggcttcagctgatgactttggcaaagttcacctgtttagctacccctgctgtcagcctcgagccctcagccacaagtacggtggacacagcagccatgtgacaaatgtggccttcttgtgggatgacagcatggccctgaccacagggggcaaggacaccagtgtgctacagtggcgggtggtctgatgcggccagggaagagtcaggtgtcagggcaggaattctattttcgggagatgtctattgccgagtagagtaatatatacccagagtatgtctatagcagagggggttatgggggcgggagggtagactgacatacagaagtctctatttatccgggtgggaagagggagtcacatcgctttggggatccattggtgtttggtttggggtgttttttaagttttttcttttatatcatccagaaataaagacacgtacactaa

SEQ ID NO: 280140 - DNA, 1396 bp, Homo sapiens
agggtgcagcctgtctgacccctgagatcaagctctgagccaccatgccctcctgcctcccattgtgcaaagaagaaagcagaggtccctggagaaggggcaggatttgccttgagtcacacaccagggcatgggttcagatgcccaattgaggcccccttcagacatactgggaaaggtcttccctgggtcccgctggggcagggtgagttgctggggctcatctagcatttgtctggcattagtgttgagtgggaaaaggccagggctgctgtctccatcctgctgtcctccctttccaccagggccatgtggaagagctgtggggcctggccacacaccccagtcgggcccagtttgtgacctgcgggcaggataagctggtgcatctatggagctcagattcccaccagcccctgtggagcaggatcatcgaggaccctgcccgctcagccggcttccaccccagtggctctgtcctggctgtgggtacagtgactggcagatggctgctgctggacacggagacccatgacctggtggctatccacacagacggcaatgaacagatctcagtggtcagcttctccccagacggggcgtacctggccgtgggctcccacgacaacttggtgtacgtgtacacggtggaccagggcggccgcaaggtcagccgcctgggcaagtgctcgggccattccagttttatcacccacctggattgggcccaggacagcagctgctttgtcaccaactccggggactatgagattctgtactgggacccggctacctgtaagcagatcaccagtgcggatgctgtgaggaacatggaatgggccacagctacttgtgtcctagggtttggggtgtttgggatctggtctgagggggcggacggcactgatatcaacgctgtggcccgctctcatgatgggaagttgctggcttcagctgatgactttggcaaagttcacctgtttagctacccctgctgtcagcctcgagccctcagccacaagtacggtggacacagcagccatgtgacaaatgtggccttcttgtgggatgacagcatggccctgaccacagggggcaaggacaccagtgtgctacagtggcgggtggtctgatgcggccagggaagagtcaggtgtcagggcaggaattctattttcgggagatgtctattgccgagtagagtaatatatacccagagtatgtctatagcagagggggttatgggggcgggagggtagactgacatacagaagtctctatttatccgggtgggaagagggagtcacatcgctttggggatccattggtgtttggtttggggtgttttttaagttttttcttttatatcatccagaaataaagacacgtacactaa

SEQ ID NO: 280141 - DNA, 1232 bp, Homo sapiens
ataaacatgcatcatgtctgtgccctcatggtgtccctttgtcttcttgtcaaaacactcatccttatgtccctcttgagtttaaatgtctttctctcatcctcttctcctcagccccattccccttttctcagggtggtgatcacaggacaccatgctgattgaattgactcataatcccagagtcccactttttaaaaaggagatatttactctctctcccactcacgttggtgcaatctcagccctatgtcttaaatgcaggatttccagcagtaagagggaggcatgatttggttggagagaacttctatcactcactcaactacagtgactggcagatggctgctgctggacacggagacccatgacctggtggctatccacacagacggcaatgaacagatctcagtggtcagcttctccccagacggggcgtacctggccgtgggctcccacgacaacttggtgtacgtgtacacggtggaccagggcggccgcaaggtcagccgcctgggcaagtgctcgggccattccagttttatcacccacctggattgggcccaggacagcagctgctttgtcaccaactccggggactatgagattctgtactgggacccggctacctgtaagcagatcaccagtgcggatgctgtgaggaacatggaatgggccacagctacttgtgtcctagggtttggggtgtttgggatctggtctgagggggcggacggcactgatatcaacgctgtggcccgctctcatgatgggaagttgctggcttcagctgatgactttggcaaagttcacctgtttagctacccctgctgtcagcctcgagccctcagccacaagtacggtggacacagcagccatgtgacaaatgtggccttcttgtgggatgacagcatggccctgaccacagggggcaaggacaccagtgtgctacagtggcgggtggtctgatgcggccagggaagagtcaggtgtcagggcaggaattctattttcgggagatgtctattgccgagtagagtaatatatacccagagtatgtctatagcagagggggttatgggggcgggagggtagactgacatacagaagtctctatttatccgggtgggaagagggagtcacatcgctttggggatccattggtgtttggtttggggtgttttttaagttttttcttttatatcatccagaaataaagacacgtacactaa

SEQ ID NO: 280142 - DNA, 741 bp, Homo sapiens
tgctagacgcaacgtcaagccattgagggagggctttggccattccagttttatcacccacctggattgggcccaggacagcagctgctttgtcaccaactccggggactatgagattctgtactgggacccggctacctgtaagcagatcaccagtgcggatgctgtgaggaacatggaatgggccacagctacttgtgtcctagggtttggggtgtttgggatctggtctgagggggcggacggcactgatatcaacgctgtggcccgctctcatgatgggaagttgctggcttcagctgatgactttggcaaagttcacctgtttagctacccctgctgtcagcctcgagccctcagccacaagtacggtggacacagcagccatgtgacaaatgtggccttcttgtgggatgacagcatggccctgaccacagggggcaaggacaccagtgtgctacagtggcgggtggtctgatgcggccagggaagagtcaggtgtcagggcaggaattctattttcgggagatgtctattgccgagtagagtaatatatacccagagtatgtctatagcagagggggttatgggggcgggagggtagactgacatacagaagtctctatttatccgggtgggaagagggagtcacatcgctttggggatccattggtgtttggtttggggtgttttttaagttttttcttttatatcatccagaaataaagacacgtacactaa

SEQ ID NO: 280143 - DNA, 1922 bp, Homo sapiens
ggcgcagccaatcctggccctaggattgtgttggggggcttggcaggcggtgtcccgacccccctttctgggcatcctggggatgaccccagcgccgggcccggcgccggccgcctgatgccaggcgagctgagctggggatgctggaacgaagggcgttgctatggcaacgggaggcagggcctggttggggggaccgggcccgggctgggaccgggggggccggcggtggctgtggtggggcgatggcggagcgcggccggccttctgcggcctgtacgacacgtcctcgctgctgcgatactgcaacgatgacaatttgtcgggcacgagcggtatggaagtggacgaccgcgtgtcggcgctggagcagcggctgcagttacaggaagacgagctggcggtcctaaaggcggcgctggcggatgctctgcgtcgcctgcgggcatgcgaagaacagggagcggcgctacgcgcgcggggcacccccaagggccgggcgcctccgcgcttaggcaccactgcctcggtgtgtcagctcttgaaaggccttcccaccaggacgccccttaatggctcgggacccccgcggcgcgtgggtggctatgccacgtccccatcctctcccaagaaggaggcgacctccgggcgcagcagtgtccgccgctacttgtcaccagagcgcctcgcctcggtgcgccgtgaggacccccgcagccggaccacatcctccagcagcaactgtagcgccaaaaaggaaggcaaaaccaaagaagttatcttcagtgtggaggatggctccgtgaaaatgttcctgaggggccgccctgtgcccatgatgatcccagacgagctggcacccacctacagcctggacacacgctcggagctgccttcttgccggctcaagctggagtgggtctatggctaccgtggccgagactgccgggccaacctttatttgctgcccaccggggagatagtgtactttgtggcctccgtagccgtgctatacagcgtggaggagcagaggcagcgacactacctgggacacaacgatgacatcaaatgcttggccatccacccagatatggtcaccatcgccacgggacaggtggcgggaaccactaaggaagggaagccgctgccgccccacgtgcgcatctgggactcagtttccctctccaccttacacgtgctgggcttgggggtgtttgacagagccgtgtgctgtgtgggcttctccaaatctaatggaggcaacctgctgtgtgcagtggatgaatccaatgatcacatgctctcggtgtgggactgggccaaggagaccaaggtggtggatgtcaagaaacatgagaaaccgaagtatgtgctgtgtgtgacctttttggaaggtggcgacgtggtcacgggggactctggggggaacctctatgtttggggcaaaggtgggaaccgtatcacacaggcggtgctgggcgcccacgacggcggcgtgtttgggctctgcgccctgcgggacgggacgctggtgtctggagggggccgtgatcggcgggtggtcctctggggttctgactacagcaagctgcaggaagtggaggtccctgaggactttggccctgtgcgcaccgtggcagagggccacggagacacactgtacgtggggaccacccgcaattccatcctgcagggctccgtgcacacaggcttctcactgctggtccaggcctgcctccggtgctccctcccgccgtgcctccctccctcgctcggtcctccgtagctcctactggcggaaatctcagcaggccctttgttttctgttccccacagcctgggccggctcctgccctcacatatgctccggcacaagctgcaggactgccccctccccctcggcagtgtacacatttactctc

SEQ ID NO: 280144 - DNA, 133 bp, Homo sapiens
agacgggtgacaaggtgagcacacacaagcagacggaaacgtgggcctctgtgcttctcaagtttcttttatgagaaacgtatgctcaaataacctatcatctggcaaaactgaacaccgattatatgacgtt

SEQ ID NO: 280145 - DNA, 1856 bp, Homo sapiens
tcagattctcaatcttgcttgaagactgacaagatgtccctgtggactcccaaactctactccagatggggaggtgcccttaacaccaagattttaaaagctccaatttcagagcaagagtcgaaaactcacagataaagttatagttatttcagggttctgaaaagacgcagaacatgaagggactcagaagtctggcagcaacaaccttggctcttttcctggtgtttgttttcctgggaaactccagctgcgctccgcagagactgttggagagaaggaactggactcctcaagctatgctctacctgaaaggggcacagggtcgccgcttcatctccgaccagagccggagaaaggacctctccgaccggccactgccggaaagacgaagcccaaatccccaactactaactattccggaggcagcaaccatcttactggcgtcccttcagaaatcaccagaagatgaagaaaaaaactttgatcaaaccagattcctggaagacagtctgcttaactggtgaaaatatactggattatgtttaattatggttctattctctttgaaaacatgaaccatgtgaataaaacctttggacccttttattccatttgtaatcttaagaacacacacagatagttttattctttcagaaacaaaatatatataggatgcttagctgagaacatcatcttctttcattgcttcaggtcctgtttagatgaccaaaaatgttttcagatcaccttgtgtcttactcttgagtttcttagaatatttataattataaggctgaagactaaagtgttctttccttttaactatagccagtacctgtcttgatcttagtgtgttttttttttcattttgttacccacttgcattttgttttcactcagcagaaattctccttctctgttttccttttatcccatccccaagaatgtggaaggaaggtgagaaacatggcaggatgggaaataggagagtatgactctctatagctcatccaggagtaatcaattaagaagataaattggatgactgtggagaagctctgtgataggaacacttcagtgtggttgctgagaggagacagtcattgaggtagaaggtttgccaaagatccagagctcagagctccctttgtgctctttgggaattaccttgcattcagtttagaaacatggatctaaaagttactgggaaataagcagatggagacacactctgttgtttacgtattggaagaagggaacaagccagttttgttagaggtaactcattttccatgaccaaacagactcaacagattcaagtactctgcttactctaattgactagactctaggttttatttgacatcatagcattacataaatcactctgataacataagtgcacagtaatatgcctgatctcttcctttttaaaagccaacttgagttcagtaccatctgaatacacacacatgcacatatacccacacacgcatacacacctactcctgtggcaaacataataatgtatttatttagaattataatatgaccatcatgttaattattttttacctaatcagagttgttattgacaaatgtcataagtggaaagtattaattcttattgtcatcagtatttagccattatttagtagctcaagaatatctttatgtgaatgtctctgtaacttggaattgcaatttcactgtgttaagtaatcagaactctgcttataagatttatctgtatcttgtttcataatttaataatgaaactaaattcaagttaatgtaatgttgatctccgtcgaaaaataacttgtgagcattaaaatatctgtatggcatta

SEQ ID NO: 280146 - DNA, 609 bp, Homo sapiens
tcagattctcaatcttgcttgaagactgacaagatgtccctgtggactcccaaactctactccagatggggaggtgcccttaacaccaagattttaaaagctccaatttcagagcaagagtcgaaaactcacagataaagttatagttatttcagggttctgaaaagacgcagaacatgaagggactcagaagtctggcagcaacaaccttggctcttttcctggtgtttgttttcctgggaaactccagctgcgctccgcagagactgttggagagaaggaactggactcctcaagctatgctctacctgaaaggggcacagggtcgccgcttcatctccgaccagagccggagaaaggacctctccgaccggccactgccggaaagacgaagcccaaatccccaactactaactattccggaggcagcaaccatcttactggcgtcccttcagaaatcaccagaagatgaagaaaaaaactttgatcaaaccagattcctggaagacagtctgcttaactggtgaaaatatactggattatgtttaattatggttctattctctttgaaaacatgaaccatgtgaataaaacctttggaccctttta

SEQ ID NO: 280147 - DNA, 452 bp, Homo sapiens
tgcgctgggagcgctggaaactcggcagccccgcgcgaccctatcctggagcaacctgccccctccccacgcccggggactgcgctgtgccgggaggagctgaggtttaagcgcgggttgtcccgggccaggctgtcgctgagccccaggtctcgtttttgcagagggtcgccgcttcatctccgaccagagccggagaaaggacctctccgaccggccactgccggaaagacgaagcccaaatccccaactactaactattccggaggcagcaaccatcttactggcgtcccttcagaaatcaccagaagatgaagaaaaaaactttgatcaaaccagattcctggaagacagtctgcttaactggtgaaaatatactggattatgtttaattatggttctattctctttgaaaacatgaaccatgtgaataaaacctttggaccctttta

SEQ ID NO: 280148 - DNA, 727 bp, Homo sapiens
tcagattctcaatcttgcttgaagactgacaagatgtccctgtggactcccaaactctactccagatggggaggtgcccttaacaccaagattttaaaagctccaatttcagagcaagagtcgaaaactcacagataaagttatagttatttcagggttctgaaaagacgcagaacatgaagggactcagaagtctggcagcaacaaccttggctcttttcctggtgtttgttttcctgggaaactccagctgcgctccgcagagactgttggagagaaggaactggactcctcaagctatgctctacctgaaaggggcacagggtcgccgcttcatctccgaccagagccggagaaaggacctctccgaccggccactgccggaaagacgaagcccaaatccccaactactaactattccggaggcagcaaccatcttactggcgtcccttcagaatagttagtagttggagaaaggacctctccgaccggccactgccggaaagacgaagcccaaatccccaactactaactattccggaggcagcaaccatcttactggcgtcccttcagaaatcaccagaagatgaagaaaaaaactttgatcaaaccagattcctggaagacagtctgcttaactggtgaaaatatactggattatgtttaattatggttctattctctttgaaaacatgaaccatgtgaataaaacctttggaccctttta

SEQ ID NO: 280149 - DNA, 1699 bp, Homo sapiens
tgcgctgggagcgctggaaactcggcagccccgcgcgaccctatcctggagcaacctgccccctccccacgcccggggactgcgctgtgccgggaggagctgaggtttaagcgcgggttgtcccgggccaggctgtcgctgagccccaggtctcgtttttgcagagggtcgccgcttcatctccgaccagagccggagaaaggacctctccgaccggccactgccggaaagacgaagcccaaatccccaactactaactattccggaggcagcaaccatcttactggcgtcccttcagaaatcaccagaagatgaagaaaaaaactttgatcaaaccagattcctggaagacagtctgcttaactggtgaaaatatactggattatgtttaattatggttctattctctttgaaaacatgaaccatgtgaataaaacctttggacccttttattccatttgtaatcttaagaacacacacagatagttttattctttcagaaacaaaatatatataggatgcttagctgagaacatcatcttctttcattgcttcaggtcctgtttagatgaccaaaaatgttttcagatcaccttgtgtcttactcttgagtttcttagaatatttataattataaggctgaagactaaagtgttctttccttttaactatagccagtacctgtcttgatcttagtgtgttttttttttcattttgttacccacttgcattttgttttcactcagcagaaattctccttctctgttttccttttatcccatccccaagaatgtggaaggaaggtgagaaacatggcaggatgggaaataggagagtatgactctctatagctcatccaggagtaatcaattaagaagataaattggatgactgtggagaagctctgtgataggaacacttcagtgtggttgctgagaggagacagtcattgaggtagaaggtttgccaaagatccagagctcagagctccctttgtgctctttgggaattaccttgcattcagtttagaaacatggatctaaaagttactgggaaataagcagatggagacacactctgttgtttacgtattggaagaagggaacaagccagttttgttagaggtaactcattttccatgaccaaacagactcaacagattcaagtactctgcttactctaattgactagactctaggttttatttgacatcatagcattacataaatcactctgataacataagtgcacagtaatatgcctgatctcttcctttttaaaagccaacttgagttcagtaccatctgaatacacacacatgcacatatacccacacacgcatacacacctactcctgtggcaaacataataatgtatttatttagaattataatatgaccatcatgttaattattttttacctaatcagagttgttattgacaaatgtcataagtggaaagtattaattcttattgtcatcagtatttagccattatttagtagctcaagaatatctttatgtgaatgtctctgtaacttggaattgcaatttcactgtgttaagtaatcagaactctgcttataagatttatctgtatcttgtttcataatttaataatgaaactaaattcaagttaatgtaatgttgatctccgtcgaaaaataacttgtgagcattaaaatatctgtatggcatta

SEQ ID NO: 280150 - DNA, 1974 bp, Homo sapiens
tcagattctcaatcttgcttgaagactgacaagatgtccctgtggactcccaaactctactccagatggggaggtgcccttaacaccaagattttaaaagctccaatttcagagcaagagtcgaaaactcacagataaagttatagttatttcagggttctgaaaagacgcagaacatgaagggactcagaagtctggcagcaacaaccttggctcttttcctggtgtttgttttcctgggaaactccagctgcgctccgcagagactgttggagagaaggaactggactcctcaagctatgctctacctgaaaggggcacagggtcgccgcttcatctccgaccagagccggagaaaggacctctccgaccggccactgccggaaagacgaagcccaaatccccaactactaactattccggaggcagcaaccatcttactggcgtcccttcagaatagttagtagttggagaaaggacctctccgaccggccactgccggaaagacgaagcccaaatccccaactactaactattccggaggcagcaaccatcttactggcgtcccttcagaaatcaccagaagatgaagaaaaaaactttgatcaaaccagattcctggaagacagtctgcttaactggtgaaaatatactggattatgtttaattatggttctattctctttgaaaacatgaaccatgtgaataaaacctttggacccttttattccatttgtaatcttaagaacacacacagatagttttattctttcagaaacaaaatatatataggatgcttagctgagaacatcatcttctttcattgcttcaggtcctgtttagatgaccaaaaatgttttcagatcaccttgtgtcttactcttgagtttcttagaatatttataattataaggctgaagactaaagtgttctttccttttaactatagccagtacctgtcttgatcttagtgtgttttttttttcattttgttacccacttgcattttgttttcactcagcagaaattctccttctctgttttccttttatcccatccccaagaatgtggaaggaaggtgagaaacatggcaggatgggaaataggagagtatgactctctatagctcatccaggagtaatcaattaagaagataaattggatgactgtggagaagctctgtgataggaacacttcagtgtggttgctgagaggagacagtcattgaggtagaaggtttgccaaagatccagagctcagagctccctttgtgctctttgggaattaccttgcattcagtttagaaacatggatctaaaagttactgggaaataagcagatggagacacactctgttgtttacgtattggaagaagggaacaagccagttttgttagaggtaactcattttccatgaccaaacagactcaacagattcaagtactctgcttactctaattgactagactctaggttttatttgacatcatagcattacataaatcactctgataacataagtgcacagtaatatgcctgatctcttcctttttaaaagccaacttgagttcagtaccatctgaatacacacacatgcacatatacccacacacgcatacacacctactcctgtggcaaacataataatgtatttatttagaattataatatgaccatcatgttaattattttttacctaatcagagttgttattgacaaatgtcataagtggaaagtattaattcttattgtcatcagtatttagccattatttagtagctcaagaatatctttatgtgaatgtctctgtaacttggaattgcaatttcactgtgttaagtaatcagaactctgcttataagatttatctgtatcttgtttcataatttaataatgaaactaaattcaagttaatgtaatgttgatctccgtcgaaaaataacttgtgagcattaaaatatctgtatggcatta

SEQ ID NO: 280151 - DNA, 2295 bp, Homo sapiens
tcagattctcaatcttgcttgaagactgacaagatgtccctgtggactcccaaactctactccagatggggaggtgcccttaacaccaagattttaaaagctccaatttcagagcaagagtcgaaaactcacagataaagttatagttatttcagggttctgaaaagacgcagaacatgaagggactcagaagtctggcagcaacaaccttggctcttttcctggtgtttgttttcctgggaaactccagctgcgctccgcagagactgttggagagaaggaactggactcctcaagctatgctctacctgaaaggggcacagggtcgccgcttcatctccgaccagagccggagaaaggacctctccgaccggccactgccggaaagacgaagcccaaatccccaactactaactattccggaggcagcaaccatcttactggcgtcccttcagaaatcaccagaagatgaagaaaaaaactttgatcaaaccagattcctggaagacagtctgcttaactggtgaaaatatactggattatgtttaattatggttctattctctttgaaaacatgaaccatgtgaataaaacctttggacccttttattccatttgtaatcttaagaacacacacagatagttttattctttcagaaacaaaatatatataggatgcttagctgagaacatcatcttctttcattgcttcaggtcctgtttagatgaccaaaaatgttttcagatcaccttgtgtcttactcttgagtttcttagaatatttataattataaggctgaagactaaagtgttctttccttttaactatagccagtacctgtcttgatcttagtgtgttttttttttcattttgttacccacttgcattttgttttcactcagcagaaattctccttctctgttttccttttatcccatccccaagaatgtggaaggaaggtgagaaacatggcaggatgggaaataggagagtatgactctctatagctcatccaggagtaatcaattaagaagataaattggatgactgtggagaagctctgtgataggaacacttcagtgtggttgctgagaggagacagtcattgaggtagaaggtttgccaaagatccagagctcagagctccctttgtgctctttgggaattaccttgcattcagtttagaaacatggatctaaaagttactgggaaataagcagatggagacacactctgttgtttacgtattggaagaagggaacaagccagttttgttagaggtaactcattttccatgaccaaacagactcaacagattcaagtactctgcttactctaattgactagactctaggttttatttgacatcatagcattacataaatcactctgataacataagtgcacagtaatatgcctgatctcttcctttttaaaagccaacttgagttcagtaccatctgaatacacacacatgcacatatacccacacacgcatacacacctactcctgtggcaaacataataatgtatttatttagaattataatatgaccatcatgttaattattttttacctaatcagagttgttattgacaaatgtcataagtggaaagtattaattcttattgtcatcagtatttagccattatttagtagctcaagaatatctttatgtgaatgtctctgtaacttggaattgcaatttcactgtgttaagtaatcagaactctgcttataagatttatctgtatcttgtttcataatttaataatgaaactaaattcaagttaatgtaatgttgatctccgtcgaaaaataacttgtgagcattaaaatatctgtatggcattaaaaaaaggcacctgtcattaattatgatttgatttgaaagtagacttactaggtagtgcttacatctgatttattgaaaattttttccaaaagcattgtcttttatttatacagtcctaaccacttcaccattaggaggggtgggacattaaaaattatttacccatcagacataaaattgtacaaattgactattcaaaatagtatgtgtattcaaagaacacttttaacatctatcttatgaaataattcttcctacaactaaccagaacaatctcaaaaatgtcatactaaccattgttttaaaagctgtctcaatgatcaatagctgttaaaatatagctccaagtattctaagtactcaaattccttgaatgttcttatgtacaaatatgctgattaattaaaaggtccctcttcccaattttctataactttc

SEQ ID NO: 280152 - DNA, 503 bp, Homo sapiens
ccacactgaaccatatcgaagaggctgggcagacctcatcgatatggttcaggctgccacactgactgatctcttcctttttaaaagccaacttgagttcagtaccatctgaatacacacacatgcacatatacccacacacgcatacacacctactcctgtggcaaacataataatgtatttatttagaattataatatgaccatcatgttaattattttttacctaatcagagttgttattgacaaatgtcataagtggaaagtattaattcttattgtcatcagtatttagccattatttagtagctcaagaatatctttatgtgaatgtctctgtaacttggaattgcaatttcactgtgttaagtaatcagaactctgcttataagatttatctgtatcttgtttcataatttaataatgaaactaaattcaagttaatgtaatgttgatctccgtcgaaaaataacttgtgagcattaaaatatctgtatggcatta

SEQ ID NO: 280153 - DNA, 806 bp, Homo sapiens
gttggcagcagcagcagctggatgccgagcgccggagctgggagctcgcgcgtccagccccgcgccaatggtggcaagggcggcccaggctggcgctgcggctccccaagccttattggcttgcggctgttcagccagccctctggctgccagggtgtgcagaggtccccagggagttaggacctgaggtgcagctcagagggaaagacgaagcccaaatccccaactactaactattccggaggcagcaaccatcttactggcgtcccttcagaaatcaccagaagatgaagaaaaaaactttgatcaaaccagattcctggaagacagtctgcttaactgcttttgtcggtcttggggaaaaggatgaagaaatgactacagtggagagatggagtcacctggcagcagctgtctgaataggggactgcgtacaggatagaaggtgattcctacacatactgccaaagccagcctcctcttcctcatcgtatctctcatcctccacttcatcttccacatcactgctctgaggactggaggcctgagaccctgaaggagaaggtggtactgaggaaggcctgggatatttaaatccttctgtctgccaaagacaaaaataagacataaacatcacaacagtttcttggctttcaacgatgtaaatactatgcatgcactatcaattttttaagtagttatctatcttttgtagtctgggtgctattaaactttgattcattttgattttgataccaccaatctcaagagggattcattcaatatatagctattctttattaagt

SEQ ID NO: 280154 - DNA, 610 bp, Homo sapiens
tcagattctcaatcttgcttgaagactgacaagatgtccctgtggactcccaaactctactccagatggggaggtgcccttaacaccaagattttaaaagctccaatttcagagcaagagtcgaaaactcacagataaagttatagttatttcagggttctgaaaagacgcagaacatgaagggactcagaagtctggcagcaacaaccttggctcttttcctggtgtttgttttcctgggaaactccagctgcgctccgcagagactgttggagagaaggaactggactcctcaagctatgctctacctgaaaggggcacagggtcgccgcttcatctccgaccagagccggagaaaggacctctccgaccggccactgccggaaagacgaagcccaaatccccaactactaactattccggaggcagcaaccatcttactggcgtcccttcagaaatcaccagaagatgatgaaaacaaccatcatcaacccagtcttcttgagggcaggatgcgatgatgctggagacggtgtggctggtggccgtgtaatctaactattgtatgtgaatacatcaatcattttgatataacgtctgaaacctttta

SEQ ID NO: 280155 - DNA, 864 bp, Homo sapiens
cttctaccacagtactttcagtggctggatggtgttcctttgtacatgggcacatggtaaatgacatttctgggacctgctgttggatggagtgacttttgatgacaaaggacaatcccagagacaagtcctggattgggctggaatgaagcgcttctctctctccatttggaaaaggatttctttccctgccagtgcgtggcactaaatgctgatgataaatgagacgtgaactcaacacagcaatgtgtaagtgaaacaacagaagtctctcagccttattgtccaattgtcagcaagaacagggcctgacaatgctcagggctctcagcctgctggcagaactcaggactcatgttcctgctacaccacattctttcctgctgataaaacatggctgacaatctgtcttccctattgttcaattttttttttttaatagcatgaaacttggcacagagaattaatgctgaatagcaagaatcatccaaacattcttacccatggagtagtcaccaaccaggtactccttcatctctgacttgttcccgccatgcactgtttccagggcactgaacaagggtctccatcccgactggatctgcgtggaacacacttcaaccagctcaccaatggatgtgacaacctggtagaggcaaagcaagtggcacttaaagccctctccttaaaaggagcagaatttctgggaagggtgatgtatttctctgtcccctattttggagttaattttagtgaaaaggaaaaaccagaatagacaaactcactcaaaaatcttctgaataatcagccgtattgtattaatttgcatttcactaatgactaatgctgcaaagcaacttttca

SEQ ID NO: 280156 - DNA, 4870 bp, Homo sapiens
ttgatcagaggatcccagttcgacggagactctcctacgccatgttgatcttgcatcaccagaggaacatcagaagcaccgagagatggctgttgactgccctggagatttgggcaccaggatgatgccaatacgtcgaagtgcacagttggagcgtattcggcaacaacaggaggacatgaggcgtaggagagaggaagaagggaaaaagcaagaacttgaccttaattcttccatgagacttaagaaactagcccaaattcctccaaagaccggaatagataaccctatgtttgatacagaggaaggaattgtcttagaaagtcctcattatgctgtgaaaatattagaaatagaagacttgttttcttcacttaaacatatccaacatactttggtagattctcagagccaggaggatatttcactgcttttacaacttgttcaaaataaggatttccagaatgcatttaagatacacaatgccatcacagtacacatgaacaaggccagtcctccatttcctcttatctccaacgcacaagatcttgctcaagaggtacaaactgttttgaagccagttcatcataaggaaggacaagaactaactgctttgctgaatactccacatattcaggcacttttactggcccacgataaggttgctgagcaggaaatgcagctagagcccattacagatgagagagtttatgaaagtattggccagtatggaggagaaactgtaaaaatagttcgtatagaaaaggctcgtgatattccgttgggtgctacagttcgtaatgaaatggactctgtcatcattagccggatagtaaaagggggtgctgcagagaaaagtggtctgttgcatgaaggagatgaagttctagagattaatggcattgaaattcgggggaaagatgtcaatgaggtttttgacttgttgtctgatatgcatggtactttgacttttgtcctgattcccagtcaacagatcaagccgcctcctgccaaggaaacagtaatccatgtaaaagctcattttgactatgacccctcagatgacccttatgttccatgtcgagagttaggtctgtcttttcaaaaaggtgatatacttcatgtgatcagtcaagaagatccaaactggtggcaggcctacagggaaggggacgaagataatcaacctctagccgggcttgttccagggaaaagctttcagcagcaaagggaagccatgaaacaaaccatagaagaagataaggagccagaaaaatcaggaaaactgtggtgtgcaaagaagaataaaaagaagaggaaaaaggttttatataatgccaataaaaatgatgattatgacaacgaggagatcttaacctatgaggaaatgtcactttatcatcagccagcaaataggaagagacctatcatcttgattggtccacagaactttggccagaacgaattgcgtcagaggctcatgaacaaagaaaaggaccgctttgcatctgcagttcctcatacaacccggagtaggcgagaccaagaagtagccggtagagattaccactttgtttcgcggcaagcattcgaggcagacatagcagctggaaagttcattgagcatggtgaatttgagaagaatttgtatggaactagcatagattctgtacggcaagtgatcaactctggcaaaatatgtcttttaagtcttcgtacacagtcattgaagactctccggaattcagatttgaaaccatatattatcttcattgcacccccttcacaagaaagacttcgggcattattggccaaagaaggcaagaatccaaagcctgaagagttgagagaaatcattgagaagacaagagagatggagcagaacaatggccactactttgatacggcaattgtgaattccgatcttgataaagcctatcaggaattgcttaggttaattaacaaacttgatactgaacctcagtgggtaccatccacttggctgaggtgaaagaaacatccattctgtggcatgttggacttgatctggcaaaaactgccaataggaggactgcccgacactgcagcaagattgaggataagatggaaggcagcagtataagctgtagatctgttcttagatctcttgaattagtgagacgacagttcccttaggcagtttgtgcatggcatcctttattctctatacatggctttagcggttcttgcctcattttgggattctaaatggaagctttcaacagagcattccattttgtcctgttaaaaccttttgttttcacctaaaccctttctgcttagttgtatctctgtgaaaaacttgtatacacaagcgtccatgtctcacacaaatattgatgtgattattcttaagtgttaaatcattaacacttaaatgacttcattgggaatattgagcagagggactgtgcttctatgcactgggcaaggcagtatttgcttaggaaactaatttagtcatcagagatactttcctaaaaaggaaaaataaaaaacaaaatggtgccactttgggttgaagctactttgttaggcttgaattcatttatatgtcttttgattcttaaaaaaacaaaaaacattccattagaagcaccagtttttttgctcagactttgtggatcagactctacactcaacacactctaatctacttaaaggtatacaaaatatgctgatcttttttaaattatgatttcctgaatttttttcttaagtcgtctcaactgatttactcacttagcttcccttccctcatcagcatagtataatagaatgtatgttacatttttatgaatggcaggtgttcattataatctgtattgacttaaaaagtttcttcctcatgatgctaatagttttttgtatacatgggaggatagcacatttgacagtttttgcatttttatgtatgagcacagtatcctatgactgtgctacgtatatataggtaataaactggaattctgttgatgaatatagctgctgtactgtatattaatatttaatagatcaacaaatggtcattgaaaacacttgtttagcattagaataaaattatatatgtccttgggaaatattatgacagttgactttaagatcaaaaggaagggaagacctgaaagtcatttgaacattttaggaaaagaatattggagagaaaaaggtattaaatatatagaaataggtttttaacctaacaaggtctgcctcttatgacgagaatgcaacagcttggtaaatcataaaagaaacatttaagctaataggattttcgtactgtctctatagctgtagctttaaaattcaacgtatataattggcatggaaacttaatttgcagtcttttcaagcctttaggatagtgtgatgtgtaacaaacaacctcaaatgtgaatgccttgattttatttttatggtgactttagctacagcatttcctatacccagagctaaacactggaataatactgacatcatttaatttaacataagcaattatgtttaaggagtaatttgtgtcatgtacatatttgattgattttttttcttctacataattttatttgaacaaatgtagacagtttatatgtcgcctttttctgttcaaatttgcatggcctattaagttggctggagagtgttttatgtggaaatattttcaagataatgttccttaggaagaaaataacattcttgggttgagggaaggaatgccatacactactgtctcttcagatctgaaatactccagtttagagccaggaaatttcacaggtcacaccgatttttagcattaaaaactaaggaatatacttagcacttacttaatcttttcagttttccagtttacgtctcaggaatgaagtgtagtctatggttgacaatggagttttgtgatcctgcttattgtaactgacaactgttttcaactccaagagctaaactattggcagttcatgttaagttagagtgagggtgtaggtagtgtcagtgagtggctcttgtgcctgctgtagacattaggcctgcactagggccatgtgctgtcaagattcaggaacatggctttaacaagcagatcttgtatcaaggcagaggtgatgccatgccatacttttaggaagtctgagatgataaatatttcaaggtcagtgaagtctatcaatcattctccccttcctcatcagcaatggtagatagaaatgtcctaaacttttctaaatcctagtgatgaggatgtgctgatattcaacatagtccttaaagtgaaaactgagttgttgctgacctccacaaaagaatatggaaaaaagccttgctgtacacctagttgtacagccactctggccaattccatttcctgtccctctgtggttctgactggagaccccagtgtgggggaggtcttaccatttaatatagaaatgatatcaataactaatgctatgtacttggaaaatccaaataaggaagttttaggttggtgcataactttgtttctcaaattttcgttgtcagaacaaatggaaggagaatattatttagactaatccagatttgctttctatgaaaatctaatgtctggattatcttccttttctcatggcctaagaaataaggatcaataaggaatgatttgaatgtaattttgtgaatgtgtggaaaatataaagcagggatttagccttaataaaggtaaccttctgacatctgttgttaatccccctttgtactcttttcctgtatctgcactgttattttgagatgtcatactgtacactgtattgtaaaaataaaaagtaaaattatatttcaaattttaaaa

SEQ ID NO: 280157 - DNA, 5362 bp, Homo sapiens
gcggccgcaggggccggtctcgcgcggtctagaagtggagttgctggcggctgcggcggtgacggcggcgacggaggaggcaggcggtggggcgggggcggggactaaggattctgaggtggggagtcgggagtttctggattctttatccggaatttcaagggccgccggagggctgtcgcttctgcagtgcgtaggagcggccggggcgggaggctccgcggagccgaggcgtggagaataagaaagccttgagttttgtgaaaaaccggagaagagaaactaaaaggacagtagaaaaggcttttccagtttgcataatatttccttcatggatactttttcatagcattattatgtgatgtgagaagtttttttttttgaagtaacatggattttatactacagaatcaagagaattggcttataggaaaaattgatttataaaaagtggtacaggttttcatagataaccatgacaacatcccatatgaatgggcatgttacagaggaatcagacagcgaagtaaaaaatgttgatcttgcatcaccagaggaacatcagaagcaccgagagatggctgttgactgccctggagatttgggcaccaggatgatgccaatacgtcgaagtgcacagttggagcgtattcggcaacaacaggaggacatgaggcgtaggagagaggaagaagggaaaaagcaagaacttgaccttaattcttccatgagacttaagaaactagcccaaattcctccaaagaccggaatagataaccctatgtttgatacagaggaaggaattgtcttagaaagtcctcattatgctgtgaaaatattagaaatagaagacttgttttcttcacttaaacatatccaacatactttggtagattctcagagccaggaggatatttcactgcttttacaacttgttcaaaataaggatttccagaatgcatttaagatacacaatgccatcacagtacacatgaacaaggccagtcctccatttcctcttatctccaacgcacaagatcttgctcaagaggtacaaactgttttgaagccagttcatcataaggaaggacaagaactaactgctttgctgaatactccacatattcaggcacttttactggcccacgataaggttgctgagcaggaaatgcagctagagcccattacagatgagagagtttatgaaagtattggccagtatggaggagaaactgtaaaaatagttcgtatagaaaaggctcgtgatattccgttgggtgctacagttcgtaatgaaatggactctgtcatcattagccggatagtaaaagggggtgctgcagagaaaagtggtctgttgcatgaaggagatgaagttctagagattaatggcattgaaattcgggggaaagatgtcaatgaggtttttgacttgttgtctgatatgcatggtactttgacttttgtcctgattcccagtcaacagatcaagccgcctcctgccaaggaaacagtaatccatgtaaaagctcattttgactatgacccctcagatgacccttatgttccatgtcgagagttaggtctgtcttttcaaaaaggtgatatacttcatgtgatcagtcaagaagatccaaactggtggcaggcctacagggaaggggacgaagataatcaacctctagccgggcttgttccagggaaaagctttcagcagcaaagggaagccatgaaacaaaccatagaagaagataaggagccagaaaaatcaggaaaactgtggtgtgcaaagaagaataaaaagaagaggaaaaaggttttatataatgccaataaaaatgatgattatgacaacgaggagatcttaacctatgaggaaatgtcactttatcatcagccagcaaataggaagagacctatcatcttgattggtccacagaactttggccagaacgaattgcgtcagaggctcatgaacaaagaaaaggaccgctttgcatctgcagttcctcatacaacccggagtaggcgagaccaagaagtagccggtagagattaccactttgtttcgcggcaagcattcgaggcagacatagcagctggaaagttcattgagcatggtgaatttgagaagaatttgtatggaactagcatagattctgtacggcaagtgatcaactctggcaaaatatgtcttttaagtcttcgtacacagtcattgaagactctccggaattcagatttgaaaccatatattatcttcattgcacccccttcacaagaaagacttcgggcattattggccaaagaaggcaagaatccaaagcctgaagagttgagagaaatcattgagaagacaagagagatggagcagaacaatggccactactttgatacggcaattgtgaattccgatcttgataaagcctatcaggaattgcttaggttaattaacaaacttgatactgaacctcagtgggtaccatccacttggctgaggtgaaagaaacatccattctgtggcatgttggacttgatctggcaaaaactgccaataggaggactgcccgacactgcagcaagattgaggataagatggaaggcagcagtataagctgtagatctgttcttagatctcttgaattagtgagacgacagttcccttaggcagtttgtgcatggcatcctttattctctatacatggctttagcggttcttgcctcattttgggattctaaatggaagctttcaacagagcattccattttgtcctgttaaaaccttttgttttcacctaaaccctttctgcttagttgtatctctgtgaaaaacttgtatacacaagcgtccatgtctcacacaaatattgatgtgattattcttaagtgttaaatcattaacacttaaatgacttcattgggaatattgagcagagggactgtgcttctatgcactgggcaaggcagtatttgcttaggaaactaatttagtcatcagagatactttcctaaaaaggaaaaataaaaaacaaaatggtgccactttgggttgaagctactttgttaggcttgaattcatttatatgtcttttgattcttaaaaaaacaaaaaacattccattagaagcaccagtttttttgctcagactttgtggatcagactctacactcaacacactctaatctacttaaaggtatacaaaatatgctgatcttttttaaattatgatttcctgaatttttttcttaagtcgtctcaactgatttactcacttagcttcccttccctcatcagcatagtataatagaatgtatgttacatttttatgaatggcaggtgttcattataatctgtattgacttaaaaagtttcttcctcatgatgctaatagttttttgtatacatgggaggatagcacatttgacagtttttgcatttttatgtatgagcacagtatcctatgactgtgctacgtatatataggtaataaactggaattctgttgatgaatatagctgctgtactgtatattaatatttaatagatcaacaaatggtcattgaaaacacttgtttagcattagaataaaattatatatgtccttgggaaatattatgacagttgactttaagatcaaaaggaagggaagacctgaaagtcatttgaacattttaggaaaagaatattggagagaaaaaggtattaaatatatagaaataggtttttaacctaacaaggtctgcctcttatgacgagaatgcaacagcttggtaaatcataaaagaaacatttaagctaataggattttcgtactgtctctatagctgtagctttaaaattcaacgtatataattggcatggaaacttaatttgcagtcttttcaagcctttaggatagtgtgatgtgtaacaaacaacctcaaatgtgaatgccttgattttatttttatggtgactttagctacagcatttcctatacccagagctaaacactggaataatactgacatcatttaatttaacataagcaattatgtttaaggagtaatttgtgtcatgtacatatttgattgattttttttcttctacataattttatttgaacaaatgtagacagtttatatgtcgcctttttctgttcaaatttgcatggcctattaagttggctggagagtgttttatgtggaaatattttcaagataatgttccttaggaagaaaataacattcttgggttgagggaaggaatgccatacactactgtctcttcagatctgaaatactccagtttagagccaggaaatttcacaggtcacaccgatttttagcattaaaaactaaggaatatacttagcacttacttaatcttttcagttttccagtttacgtctcaggaatgaagtgtagtctatggttgacaatggagttttgtgatcctgcttattgtaactgacaactgttttcaactccaagagctaaactattggcagttcatgttaagttagagtgagggtgtaggtagtgtcagtgagtggctcttgtgcctgctgtagacattaggcctgcactagggccatgtgctgtcaagattcaggaacatggctttaacaagcagatcttgtatcaaggcagaggtgatgccatgccatacttttaggaagtctgagatgataaatatttcaaggtcagtgaagtctatcaatcattctccccttcctcatcagcaatggtagatagaaatgtcctaaacttttctaaatcctagtgatgaggatgtgctgatattcaacatagtccttaaagtgaaaactgagttgttgctgacctccacaaaagaatatggaaaaaagccttgctgtacacctagttgtacagccactctggccaattccatttcctgtccctctgtggttctgactggagaccccagtgtgggggaggtcttaccatttaatatagaaatgatatcaataactaatgctatgtacttggaaaatccaaataaggaagttttaggttggtgcataactttgtttctcaaattttcgttgtcagaacaaatggaaggagaatattatttagactaatccagatttgctttctatgaaaatctaatgtctggattatcttccttttctcatggcctaagaaataaggatcaataaggaatgatttgaatgtaattttgtgaatgtgtggaaaatataaagcagggatttagccttaataaaggtaaccttctgacatctgttgttaatccccctttgtactcttttcctgtatctgcactgttattttgagatgtcatactgtacactgtattgtaaaaataaaaagtaaaattatatttcaaattttaaaa

SEQ ID NO: 280158 - DNA, 5291 bp, Homo sapiens
  misc_feature (5291)..(5291): n is a, c, g, or t
ttgatcagaggatcccagttcgacggagactctcctacgccatgttgatcttgcatcaccagaggaacatcagaagcaccgagagatggctgttgactgccctggagatttgggcaccaggatgatgccaatacgtcgaagtgcacagttggagcgtattcggcaacaacaggaggacatgaggcgtaggagagaggaagaagggaaaaagcaagaacttgaccttaattcttccatgagacttaagaaactagcccaaattcctccaaagaccggaatagataaccctatgtttgatacagaggaaggaattgtcttagaaagtcctcattatgctgtgaaaatattagaaatagaagacttgttttcttcacttaaacatatccaacatactttggtagattctcagagccaggaggatatttcactgcttttacaacttgttcaaaataaggatttccagaatgcatttaagatacacaatgccatcacagtacacatgaacaaggccagtcctccatttcctcttatctccaacgcacaagatcttgctcaagaggtacaaactgttttgaagccagttcatcataaggaaggacaagaactaactgctttgctgaatactccacatattcaggcacttttactggcccacgataaggttgctgagcaggaaatgcagctagagcccattacagatgagagagtttatgaaagtattggccagtatggaggagaaactgtaaaaatagttcgtatagaaaaggctcgtgatattccgttgggtgctacagttcgtaatgaaatggactctgtcatcattagccggatagtaaaagggggtgctgcagagaaaagtggtctgttgcatgaaggagatgaagttctagagattaatggcattgaaattcgggggaaagatgtcaatgaggtttttgacttgttgtctgatatgcatggtactttgacttttgtcctgattcccagtcaacagatcaagccgcctcctgccaaggaaacagtaatccatgtaaaagctcattttgactatgacccctcagatgacccttatgttccatgtcgagagttaggtctgtcttttcaaaaaggtgatatacttcatgtgatcagtcaagaagatccaaactggtggcaggcctacagggaaggggacgaagataatcaacctctagccgggcttgttccagggaaaagctttcagcagcaaagggaagccatgaaacaaaccatagaagaagataaggagccagaaaaatcaggaaaactgtggtgtgcaaagaagaataaaaagaagaggaaaaaggttttatataatgccaataaaaatgatgattatgacaacgaggagatcttaacctatgaggaaatgtcactttatcatcagccagcaaataggaagagacctatcatcttgattggtccacagaactttggccagaacgaattgcgtcagaggctcatgaacaaagaaaaggaccgctttgcatctgcagttcctcatacaacccggagtaggcgagaccaagaagtagccggtagagattaccactttgtttcgcggcaagcattcgaggcagacatagcagctggaaagttcattgagcatggtgaatttgagaagaatttgtatggaactagcatagattctgtacggcaagtgatcaactctggcaaaatatgtcttttaagtcttcgtacacagtcattgaagactctccggaattcagatttgaaaccatatattatcttcattgcacccccttcacaagaaagacttcgggcattattggccaaagaaggcaagaatccaaagcctgaagagttgagagaaatcattgagaagacaagagagatggagcagaacaatggccactactttgatacggcaattgtgaattccgatcttgataaagcctatcaggaattgcttaggttaattaacaaacttgatactgaacctcagtgggtaccatccacttggctgaggtgaaagaaacatccattctgtggcatgttggacttgatctggcaaaaactgccaataggaggactgcccgacactgcagcaagattgaggataagatggaaggcagcagtataagctgtagatctgttcttagatctcttgaattagtgagacgacagttcccttaggcagtttgtgcatggcatcctttattctctatacatggctttagcggttcttgcctcattttgggattctaaatggaagctttcaacagagcattccattttgtcctgttaaaaccttttgttttcacctaaaccctttctgcttagttgtatctctgtgaaaaacttgtatacacaagcgtccatgtctcacacaaatattgatgtgattattcttaagtgttaaatcattaacacttaaatgacttcattgggaatattgagcagagggactgtgcttctatgcactgggcaaggcagtatttgcttaggaaactaatttagtcatcagagatactttcctaaaaaggaaaaataaaaaacaaaatggtgccactttgggttgaagctactttgttaggcttgaattcatttatatgtcttttgattcttaaaaaaacaaaaaacattccattagaagcaccagtttttttgctcagactttgtggatcagactctacactcaacacactctaatctacttaaaggtatacaaaatatgctgatcttttttaaattatgatttcctgaatttttttcttaagtcgtctcaactgatttactcacttagcttcccttccctcatcagcatagtataatagaatgtatgttacatttttatgaatggcaggtgttcattataatctgtattgacttaaaaagtttcttcctcatgatgctaatagttttttgtatacatgggaggatagcacatttgacagtttttgcatttttatgtatgagcacagtatcctatgactgtgctacgtatatataggtaataaactggaattctgttgatgaatatagctgctgtactgtatattaatatttaatagatcaacaaatggtcattgaaaacacttgtttagcattagaataaaattatatatgtccttgggaaatattatgacagttgactttaagatcaaaaggaagggaagacctgaaagtcatttgaacattttaggaaaagaatattggagagaaaaaggtattaaatatatagaaataggtttttaacctaacaaggtctgcctcttatgacgagaatgcaacagcttggtaaatcataaaagaaacatttaagctaataggattttcgtactgtctctatagctgtagctttaaaattcaacgtatataattggcatggaaacttaatttgcagtcttttcaagcctttaggatagtgtgatgtgtaacaaacaacctcaaatgtgaatgccttgattttatttttatggtgactttagctacagcatttcctatacccagagctaaacactggaataatactgacatcatttaatttaacataagcaattatgtttaaggagtaatttgtgtcatgtacatatttgattgattttttttcttctacataattttatttgaacaaatgtagacagtttatatgtcgcctttttctgttcaaatttgcatggcctattaagttggctggagagtgttttatgtggaaatattttcaagataatgttccttaggaagaaaataacattcttgggttgagggaaggaatgccatacactactgtctcttcagatctgaaatactccagtttagagccaggaaatttcacaggtcacaccgatttttagcattaaaaactaaggaatatacttagcacttacttaatcttttcagttttccagtttacgtctcaggaatgaagtgtagtctatggttgacaatggagttttgtgatcctgcttattgtaactgacaactgttttcaactccaagagctaaactattggcagttcatgttaagttagagtgagggtgtaggtagtgtcagtgagtggctcttgtgcctgctgtagacattaggcctgcactagggccatgtgctgtcaagattcaggaacatggctttaacaagcagatcttgtatcaaggcagaggtgatgccatgccatacttttaggaagtctgagatgataaatatttcaaggtcagtgaagtctatcaatcattctccccttcctcatcagcaatggtagatagaaatgtcctaaacttttctaaatcctagtgatgaggatgtgctgatattcaacatagtccttaaagtgaaaactgagttgttgctgacctccacaaaagaatatggaaaaaagccttgctgtacacctagttgtacagccactctggccaattccatttcctgtccctctgtggttctgactggagaccccagtgtgggggaggtcttaccatttaatatagaaatgatatcaataactaatgctatgtacttggaaaatccaaataaggaagttttaggttggtgcataactttgtttctcaaattttcgttgtcagaacaaatggaaggagaatattatttagactaatccagatttgctttctatgaaaatctaatgtctggattatcttccttttctcatggcctaagaaataaggatcaataaggaatgatttgaatgtaattttgtgaatgtgtggaaaatataaagcagggatttagccttaataaaggtaaccttctgacatctgttgttaatccccctttgtactcttttcctgtatctgcactgttattttgagatgtcatactgtacactgtattgtaaaaataaaaagtaaaattatatttcaaattttaaaaaaaaaaaaaaaaaaaaaaaaaaaaaaaaaaaggggggggggggaaaaaaaacccctgggggggcccaagtttgggtacccgtttttgggaaaagggggccccaaaagggggggggatataaaagaaaggagggggggggtaaaaggggtgccgcgggaacccgcgccgccggggaccttgggaaggacccctcttctctggcggctgtgaccattttctggcccacacccagggaaattaaagaccacagggaaacatacactctacaggcgggacagcgggcgaccaacgcgtatgcgctggcgcagaagacttcggatccgagagaggcatatgaaatatcgtgggcagacataaacacagaacaacacaacaaaagaacaagccatactacgacaaatcagatcaacatgaacacaan

SEQ ID NO: 280159 - DNA, 4078 bp, Homo sapiens
attttcatttcaactccaataccacaaagtttcagttctctgtggagtcctagaatgttcttccaataatcttgagcttacggtagacataagttttagcaaaaatgtcagtgtgttcagttacagtggtgaagtagattccctgctgggaacaaaggattctgtgtgccatattcagatgtacaacattccagaatgagagtcatgcaagaaactgcctcaggacaagccagagttgtcatatttttaatatgttttcttactgttacagaagttcaaacagttgaatgatataaattgttttgtactatgggtccaatatagtattgatgtgtgacttttatatctgagacattttgtcttgagtttaagttagttgtcttcattggcaggggtgatttgaggtgagtttcactttcttgaacccatgtgcctgataattagagggttcaggataagttttgcacatagccttgctgcctgcttatctttgtaaaatggccctttccttcagtcagtattttaaagtaggctactctatatagtttcccaaactctggtaggatacttttaactctctgcagcagatagtatagggcaagggctctttactagagccaaaagtaaatggcattttaggtccttgctccaaccagaaaggttcactccatattacagatgttactattaggaagaggttatagtgtctagaatgtttgaaaacaaatgtttgtagggaaacagtgtgtgttcttgaagcttgtagttttgttggtgagataagacaaaatatgtgaaaacctaaatagtggtataaaacaggatatattgagtcccagatggttcataatatgagtcgtgaagatgccaaagcaaaggtaaccattgtggccgtgacagggttggaaaggagctcctgaggttgggagagacagaaggaaagctatgaaggtcgctccttgttctttggccatctctgactcatcctatattatttggttaggaaaggaattatctcacagtttttatcttctgtttgcagcctgaagagttgagagaaatcattgagaagacaagagagatggagcagaacaatggccactactttgatacggcaattgtgaattccgatcttgataaagcctatcaggaattgcttaggttaattaacaaacttgatactgaacctcagtgggtaccatccacttggctgaggtgaaagaaacatccattctgtggcatgttggacttgatctggcaaaaactgccaataggaggactgcccgacactgcagcaagattgaggataagatggaaggcagcagtataagctgtagatctgttcttagatctcttgaattagtgagacgacagttcccttaggcagtttgtgcatggcatcctttattctctatacatggctttagcggttcttgcctcattttgggattctaaatggaagctttcaacagagcattccattttgtcctgttaaaaccttttgttttcacctaaaccctttctgcttagttgtatctctgtgaaaaacttgtatacacaagcgtccatgtctcacacaaatattgatgtgattattcttaagtgttaaatcattaacacttaaatgacttcattgggaatattgagcagagggactgtgcttctatgcactgggcaaggcagtatttgcttaggaaactaatttagtcatcagagatactttcctaaaaaggaaaaataaaaaacaaaatggtgccactttgggttgaagctactttgttaggcttgaattcatttatatgtcttttgattcttaaaaaaacaaaaaacattccattagaagcaccagtttttttgctcagactttgtggatcagactctacactcaacacactctaatctacttaaaggtatacaaaatatgctgatcttttttaaattatgatttcctgaatttttttcttaagtcgtctcaactgatttactcacttagcttcccttccctcatcagcatagtataatagaatgtatgttacatttttatgaatggcaggtgttcattataatctgtattgacttaaaaagtttcttcctcatgatgctaatagttttttgtatacatgggaggatagcacatttgacagtttttgcatttttatgtatgagcacagtatcctatgactgtgctacgtatatataggtaataaactggaattctgttgatgaatatagctgctgtactgtatattaatatttaatagatcaacaaatggtcattgaaaacacttgtttagcattagaataaaattatatatgtccttgggaaatattatgacagttgactttaagatcaaaaggaagggaagacctgaaagtcatttgaacattttaggaaaagaatattggagagaaaaaggtattaaatatatagaaataggtttttaacctaacaaggtctgcctcttatgacgagaatgcaacagcttggtaaatcataaaagaaacatttaagctaataggattttcgtactgtctctatagctgtagctttaaaattcaacgtatataattggcatggaaacttaatttgcagtcttttcaagcctttaggatagtgtgatgtgtaacaaacaacctcaaatgtgaatgccttgattttatttttatggtgactttagctacagcatttcctatacccagagctaaacactggaataatactgacatcatttaatttaacataagcaattatgtttaaggagtaatttgtgtcatgtacatatttgattgattttttttcttctacataattttatttgaacaaatgtagacagtttatatgtcgcctttttctgttcaaatttgcatggcctattaagttggctggagagtgttttatgtggaaatattttcaagataatgttccttaggaagaaaataacattcttgggttgagggaaggaatgccatacactactgtctcttcagatctgaaatactccagtttagagccaggaaatttcacaggtcacaccgatttttagcattaaaaactaaggaatatacttagcacttacttaatcttttcagttttccagtttacgtctcaggaatgaagtgtagtctatggttgacaatggagttttgtgatcctgcttattgtaactgacaactgttttcaactccaagagctaaactattggcagttcatgttaagttagagtgagggtgtaggtagtgtcagtgagtggctcttgtgcctgctgtagacattaggcctgcactagggccatgtgctgtcaagattcaggaacatggctttaacaagcagatcttgtatcaaggcagaggtgatgccatgccatacttttaggaagtctgagatgataaatatttcaaggtcagtgaagtctatcaatcattctccccttcctcatcagcaatggtagatagaaatgtcctaaacttttctaaatcctagtgatgaggatgtgctgatattcaacatagtccttaaagtgaaaactgagttgttgctgacctccacaaaagaatatggaaaaaagccttgctgtacacctagttgtacagccactctggccaattccatttcctgtccctctgtggttctgactggagaccccagtgtgggggaggtcttaccatttaatatagaaatgatatcaataactaatgctatgtacttggaaaatccaaataaggaagttttaggttggtgcataactttgtttctcaaattttcgttgtcagaacaaatggaaggagaatattatttagactaatccagatttgctttctatgaaaatctaatgtctggattatcttccttttctcatggcctaagaaataaggatcaataaggaatgatttgaatgtaattttgtgaatgtgtggaaaatataaagcagggatttagccttaataaaggtaaccttctgacatctgttgttaatccccctttgtactcttttcctgtatctgcactgttattttgagatgtcatactgtacactgtattgtaaaaataaaaagtaaaattatatttcaaattttaaaa

SEQ ID NO: 280160 - DNA, 3442 bp, Homo sapiens
  misc_feature (3442)..(3442): n is a, c, g, or t
ttgatcagaggatcccagttcgacggagactctcctacgccatgttgatcttgcatcaccagaggaacatcagaagcaccgagagatggctgttgactgccctggagatttgggcaccaggatgatgccaatacgtcgaagtgcacagttggagcgtattcggcaacaacaggaggacatgaggcgtaggagagaggaagaagggaaaaagcaagaacttgaccttaattcttccatgagacttaagaaactagcccaaattcctccaaagaccggaatagataaccctatgtttgatacagaggaaggaattgtcttagaaagtcctcattatgctgtgaaaatattagaaatagaagacttgttttcttcacttaaacatatccaacatactttggtagattctcagagccaggaggatatttcactgcttttacaacttgttcaaaataaggatttccagaatgcatttaagatacacaatgccatcacagtacacatgaacaaggccagtcctccatttcctcttatctccaacgcacaagatcttgctcaagaggtacaaactgttttgaagccagttcatcataaggaaggacaagaactaactgctttgctgaatactccacatattcaggcacttttactggcccacgataaggttgctgagcaggaaatgcagctagagcccattacagatgagagagtttatgaaagtattggccagtatggaggagaaactgtaaaaatagttcgtatagaaaaggctcgtgatattccgttgggtgctacagttcgtaatgaaatggactctgtcatcattagccggatagtaaaagggggtgctgcagagaaaagtggtctgttgcatgaaggagatgaagttctagagattaatggcattgaaattcgggggaaagatgtcaatgaggtttttgacttgttgtctgatatgcatggtactttgacttttgtcctgattcccagtcaacagatcaagccgcctcctgccaaggaaacagtaatccatgtaaaagctcattttgactatgacccctcagatgacccttatgttccatgtcgagagttaggtctgtcttttcaaaaaggtgatatacttcatgtgatcagtcaagaagatccaaactggtggcaggcctacagggaaggggacgaagataatcaacctctagccgggcttgttccagggaaaagctttcagcagcaaagggaagccatgaaacaaaccatagaagaagataaggagccagaaaaatcaggaaaactgtggtgtgcaaagaagaataaaaagaagaggaaaaaggttttatataatgccaataaaaatgatgattatgacaacgaggagatcttaacctatgaggaaatgtcactttatcatcagccagcaaataggaagagacctatcatcttgattggtccacagaactttggccagaacgaattgcgtcagaggctcatgaacaaagaaaaggaccgctttgcatctgcagttcctcatacaacccggagtaggcgagaccaagaagtagccggtagagattaccactttgtttcgcggcaagcattcgaggcagacatagcagctggaaagttcattgagcatggtgaatttgagaagaatttgtatggaactagcatagattctgtacggcaagtgatcaactctggcaaaatatgtcttttaagtcttcgtacacagtcattgaagactctccggaattcagatttgaaaccatatattatcttcattgcacccccttcacaagaaagacttcgggcattattggccaaagaaggcaagaatccaaagcctgaagagttgagagaaatcattgagaagacaagagagatggagcagaacaatggccactactttgatacggcaattgtgaattccgatcttgataaagcctatcaggaattgcttaggttaattaacaaacttgatactgaacctcagtgggtaccatccacttggctgaggtgaaagaaacatccattctgtggcatgttggacttgatctggcaaaaactgccaataggaggactgcccgacactgcagcaagattgaggataagatggaaggcagcagtataagctgtagatctgttcttagatctcttgaattagtgagacgacagttcccttaggcagtttgtgcatggcatcctttattctctatacatggctttagcggttcttgcctcattttgggattctaaatggaagctttcaacagagcattccattttgtcctgttaaaaccttttgttttcacctaaaccctttctgcttagttgtatctctgtgaaaaacttgtatacacaagcgtccatgtctcacacaaatattgatgtgattattcttaagtgttaaatcattaacacttaaatgacttcattgggaatattgagcagagggactgtgcttctatgcactgggcaaggcagtatttgcttaggaaactaatttagtcatcagagatactttcctaaaaaggaaaaataaaaaacaaaatggtgccactttgggttgaagctactttgttaggcttgaattcatttatatgtcttttgattcttaaaaaaacaaaaaacattccattagaagcaccagtttttttgctcagactttgtggatcagactctacactcaacacactctaatctacttaaaggtatacaaaatatgctgatcttttttaaattatgatttcctgaatttttttcttaagtcgtctcaactgatttactcacttagcttcccttccctcatcagcatagtataatagaatgtatgttacatttttatgaatggcaggtgttcattataatctgtattgacttaaaaagtttcttcctcatgatgctaatagttttttgtatacatgggaggatagcacatttgacagtttttgcatttttatgtatgagcacagtatcctatgactgtgctacgtatatataggtaataaactggaattctgttgatgaataaaaaaaaaaaaaaaaaaaaaaaaaaaaaaaaggggggggggggaaaaaaaacccctgggggggcccaagtttgggtacccgtttttgggaaaagggggccccaaaagggggggggatataaaagaaaggagggggggggtaaaaggggtgccgcgggaacccgcgccgccggggaccttgggaaggacccctcttctctggcggctgtgaccattttctggcccacacccagggaaattaaagaccacagggaaacatacactctacaggcgggacagcgggcgaccaacgcgtatgcgctggcgcagaagacttcggatccgagagaggcatatgaaatatcgtgggcagacataaacacagaacaacacaacaaaagaacaagccatactacgacaaatcagatcaacatgaacacaan

SEQ ID NO: 280161 - DNA, 296 bp, Homo sapiens
aagaaagccttgagttttgtgaaaaaccggagaagagaaactaaaaggacagtagaaaaggcttttccagtttgcataatgtaagttcttttcacttttcttggcttgaattctgccttagctgacaaagctgtttctatggaaacaaatagtttaacctcttagaatgtcagaggaatgctgatcacttaaaatgagacttcccagctgctggtcaaagggcattacttgctggagaaagaggggaaggatgaatttaaaaaattctagagttctggacactagtgtagactgaa

SEQ ID NO: 280162 - DNA, 1023 bp, Homo sapiens
gcggccgcaggggccggtctcgcgcggtctagaagtggagttgctggcggctgcggcggtgacggcggcgacggaggaggcaggcggtggggcgggggcggggactaaggattctgaggtggggagtcgggagtttctggattctttatccggaatttcaagggccgccggagggctgtcgcttctgcagtgcgtaggagcggccggggcgggaggctccgcggagccgaggcgtggagaataagaaagccttgagttttgtgaaaaaccggagaagagaaactaaaaggacagtagaaaaggcttttccagtttgcataatatttccttcatggatactttttcatagcattattatgtgatgtgagaagtttttttttttgaagtaacatggattttatactacagaatcaagagaattggcttataggaaaaattgatttataaaaagtggtacaggttttcatagataaccatgacaacatcccatatgaatgggcatgttacagaggaatcagacagcgaagtaaaaaatgttgatcttgcatcaccagaggaacatcagaagcaccgagagatggctgttgactgccctggagatttgggcaccaggatgatgccaatacgtcgaagtgcacagttggagcgtattcggcaacaacaggaggacatgaggcgtaggagagaggaagaagggaaaaagcaagaacttgaccttaattcttccatgagacttaagaaactagcccaaattcctccaaagaccggaatagataaccctatgtttgatacagaggaaggaattgtcttagaaagtcctcattatgctgtgaaaatattaggtaagtaaaaatagaggtataacagaaaacattttgctttaatttatctgtgccttataatgtatatgagaaggaagagggtttaagagaatgtaagtaatgacagtttgaattccagaccaagatcctttgttttcgtggaaacgccgtataactattgtttactgttaccaacatagag

SEQ ID NO: 280163 - DNA, 5130 bp, Homo sapiens
gcggccgcaggggccggtctcgcgcggtctagaagtggagttgctggcggctgcggcggtgacggcggcgacggaggaggcaggcggtggggcgggggcggggactaaggattctgaggtggggagtcgggagtttctggattctttatccggaatttcaagggccgccggagggctgtcgcttctgcagtgcgtaggagcggccggggcgggaggctccgcggagccgaggcgtggagaataagaaagccttgagttttgtgaaaaaccggagaagagaaactaaaaggacagtagaaaaggcttttccagtttgcataataggaacatcagaagcaccgagagatggctgttgactgccctggagatttgggcaccaggatgatgccaatacgtcgaagtgcacagttggagcgtattcggcaacaacaggaggacatgaggcgtaggagagaggaagaagggaaaaagcaagaacttgaccttaattcttccatgagacttaagaaactagcccaaattcctccaaagaccggaatagataaccctatgtttgatacagaggaaggaattgtcttagaaagtcctcattatgctgtgaaaatattagaaatagaagacttgttttcttcacttaaacatatccaacatactttggtagattctcagagccaggaggatatttcactgcttttacaacttgttcaaaataaggatttccagaatgcatttaagatacacaatgccatcacagtacacatgaacaaggccagtcctccatttcctcttatctccaacgcacaagatcttgctcaagaggtacaaactgttttgaagccagttcatcataaggaaggacaagaactaactgctttgctgaatactccacatattcaggcacttttactggcccacgataaggttgctgagcaggaaatgcagctagagcccattacagatgagagagtttatgaaagtattggccagtatggaggagaaactgtaaaaatagttcgtatagaaaaggctcgtgatattccgttgggtgctacagttcgtaatgaaatggactctgtcatcattagccggatagtaaaagggggtgctgcagagaaaagtggtctgttgcatgaaggagatgaagttctagagattaatggcattgaaattcgggggaaagatgtcaatgaggtttttgacttgttgtctgatatgcatggtactttgacttttgtcctgattcccagtcaacagatcaagccgcctcctgccaaggaaacagtaatccatgtaaaagctcattttgactatgacccctcagatgacccttatgttccatgtcgagagttaggtctgtcttttcaaaaaggtgatatacttcatgtgatcagtcaagaagatccaaactggtggcaggcctacagggaaggggacgaagataatcaacctctagccgggcttgttccagggaaaagctttcagcagcaaagggaagccatgaaacaaaccatagaagaagataaggagccagaaaaatcaggaaaactgtggtgtgcaaagaagaataaaaagaagaggaaaaaggttttatataatgccaataaaaatgatgattatgacaacgaggagatcttaacctatgaggaaatgtcactttatcatcagccagcaaataggaagagacctatcatcttgattggtccacagaactttggccagaacgaattgcgtcagaggctcatgaacaaagaaaaggaccgctttgcatctgcagttcctcatacaacccggagtaggcgagaccaagaagtagccggtagagattaccactttgtttcgcggcaagcattcgaggcagacatagcagctggaaagttcattgagcatggtgaatttgagaagaatttgtatggaactagcatagattctgtacggcaagtgatcaactctggcaaaatatgtcttttaagtcttcgtacacagtcattgaagactctccggaattcagatttgaaaccatatattatcttcattgcacccccttcacaagaaagacttcgggcattattggccaaagaaggcaagaatccaaagcctgaagagttgagagaaatcattgagaagacaagagagatggagcagaacaatggccactactttgatacggcaattgtgaattccgatcttgataaagcctatcaggaattgcttaggttaattaacaaacttgatactgaacctcagtgggtaccatccacttggctgaggtgaaagaaacatccattctgtggcatgttggacttgatctggcaaaaactgccaataggaggactgcccgacactgcagcaagattgaggataagatggaaggcagcagtataagctgtagatctgttcttagatctcttgaattagtgagacgacagttcccttaggcagtttgtgcatggcatcctttattctctatacatggctttagcggttcttgcctcattttgggattctaaatggaagctttcaacagagcattccattttgtcctgttaaaaccttttgttttcacctaaaccctttctgcttagttgtatctctgtgaaaaacttgtatacacaagcgtccatgtctcacacaaatattgatgtgattattcttaagtgttaaatcattaacacttaaatgacttcattgggaatattgagcagagggactgtgcttctatgcactgggcaaggcagtatttgcttaggaaactaatttagtcatcagagatactttcctaaaaaggaaaaataaaaaacaaaatggtgccactttgggttgaagctactttgttaggcttgaattcatttatatgtcttttgattcttaaaaaaacaaaaaacattccattagaagcaccagtttttttgctcagactttgtggatcagactctacactcaacacactctaatctacttaaaggtatacaaaatatgctgatcttttttaaattatgatttcctgaatttttttcttaagtcgtctcaactgatttactcacttagcttcccttccctcatcagcatagtataatagaatgtatgttacatttttatgaatggcaggtgttcattataatctgtattgacttaaaaagtttcttcctcatgatgctaatagttttttgtatacatgggaggatagcacatttgacagtttttgcatttttatgtatgagcacagtatcctatgactgtgctacgtatatataggtaataaactggaattctgttgatgaatatagctgctgtactgtatattaatatttaatagatcaacaaatggtcattgaaaacacttgtttagcattagaataaaattatatatgtccttgggaaatattatgacagttgactttaagatcaaaaggaagggaagacctgaaagtcatttgaacattttaggaaaagaatattggagagaaaaaggtattaaatatatagaaataggtttttaacctaacaaggtctgcctcttatgacgagaatgcaacagcttggtaaatcataaaagaaacatttaagctaataggattttcgtactgtctctatagctgtagctttaaaattcaacgtatataattggcatggaaacttaatttgcagtcttttcaagcctttaggatagtgtgatgtgtaacaaacaacctcaaatgtgaatgccttgattttatttttatggtgactttagctacagcatttcctatacccagagctaaacactggaataatactgacatcatttaatttaacataagcaattatgtttaaggagtaatttgtgtcatgtacatatttgattgattttttttcttctacataattttatttgaacaaatgtagacagtttatatgtcgcctttttctgttcaaatttgcatggcctattaagttggctggagagtgttttatgtggaaatattttcaagataatgttccttaggaagaaaataacattcttgggttgagggaaggaatgccatacactactgtctcttcagatctgaaatactccagtttagagccaggaaatttcacaggtcacaccgatttttagcattaaaaactaaggaatatacttagcacttacttaatcttttcagttttccagtttacgtctcaggaatgaagtgtagtctatggttgacaatggagttttgtgatcctgcttattgtaactgacaactgttttcaactccaagagctaaactattggcagttcatgttaagttagagtgagggtgtaggtagtgtcagtgagtggctcttgtgcctgctgtagacattaggcctgcactagggccatgtgctgtcaagattcaggaacatggctttaacaagcagatcttgtatcaaggcagaggtgatgccatgccatacttttaggaagtctgagatgataaatatttcaaggtcagtgaagtctatcaatcattctccccttcctcatcagcaatggtagatagaaatgtcctaaacttttctaaatcctagtgatgaggatgtgctgatattcaacatagtccttaaagtgaaaactgagttgttgctgacctccacaaaagaatatggaaaaaagccttgctgtacacctagttgtacagccactctggccaattccatttcctgtccctctgtggttctgactggagaccccagtgtgggggaggtcttaccatttaatatagaaatgatatcaataactaatgctatgtacttggaaaatccaaataaggaagttttaggttggtgcataactttgtttctcaaattttcgttgtcagaacaaatggaaggagaatattatttagactaatccagatttgctttctatgaaaatctaatgtctggattatcttccttttctcatggcctaagaaataaggatcaataaggaatgatttgaatgtaattttgtgaatgtgtggaaaatataaagcagggatttagccttaataaaggtaaccttctgacatctgttgttaatccccctttgtactcttttcctgtatctgcactgttattttgagatgtcatactgtacactgtattgtaaaaataaaaagtaaaattatatttcaaattttaaaa

SEQ ID NO: 280164 - DNA, 5469 bp, Homo sapiens
gcggccgcaggggccggtctcgcgcggtctagaagtggagttgctggcggctgcggcggtgacggcggcgacggaggaggcaggcggtggggcgggggcggggactaaggattctgaggtggggagtcgggagtttctggattctttatccggaatttcaagggccgccggagggctgtcgcttctgcagtgcgtaggagcggccggggcgggaggctccgcggagccgaggcgtggagattttaagtttcttaaggatacggactctgcctcagcagcctttttcttgacaatgactatccaagtttttggtaccaagtgggtactcgccttgttgaatgaaaagaataagaaagccttgagttttgtgaaaaaccggagaagagaaactaaaaggacagtagaaaaggcttttccagtttgcataatatttccttcatggatactttttcatagcattattatgtgatgtgagaagtttttttttttgaagtaacatggattttatactacagaatcaagagaattggcttataggaaaaattgatttataaaaagtggtacaggttttcatagataaccatgacaacatcccatatgaatgggcatgttacagaggaatcagacagcgaagtaaaaaatgttgatcttgcatcaccagaggaacatcagaagcaccgagagatggctgttgactgccctggagatttgggcaccaggatgatgccaatacgtcgaagtgcacagttggagcgtattcggcaacaacaggaggacatgaggcgtaggagagaggaagaagggaaaaagcaagaacttgaccttaattcttccatgagacttaagaaactagcccaaattcctccaaagaccggaatagataaccctatgtttgatacagaggaaggaattgtcttagaaagtcctcattatgctgtgaaaatattagaaatagaagacttgttttcttcacttaaacatatccaacatactttggtagattctcagagccaggaggatatttcactgcttttacaacttgttcaaaataaggatttccagaatgcatttaagatacacaatgccatcacagtacacatgaacaaggccagtcctccatttcctcttatctccaacgcacaagatcttgctcaagaggtacaaactgttttgaagccagttcatcataaggaaggacaagaactaactgctttgctgaatactccacatattcaggcacttttactggcccacgataaggttgctgagcaggaaatgcagctagagcccattacagatgagagagtttatgaaagtattggccagtatggaggagaaactgtaaaaatagttcgtatagaaaaggctcgtgatattccgttgggtgctacagttcgtaatgaaatggactctgtcatcattagccggatagtaaaagggggtgctgcagagaaaagtggtctgttgcatgaaggagatgaagttctagagattaatggcattgaaattcgggggaaagatgtcaatgaggtttttgacttgttgtctgatatgcatggtactttgacttttgtcctgattcccagtcaacagatcaagccgcctcctgccaaggaaacagtaatccatgtaaaagctcattttgactatgacccctcagatgacccttatgttccatgtcgagagttaggtctgtcttttcaaaaaggtgatatacttcatgtgatcagtcaagaagatccaaactggtggcaggcctacagggaaggggacgaagataatcaacctctagccgggcttgttccagggaaaagctttcagcagcaaagggaagccatgaaacaaaccatagaagaagataaggagccagaaaaatcaggaaaactgtggtgtgcaaagaagaataaaaagaagaggaaaaaggttttatataatgccaataaaaatgatgattatgacaacgaggagatcttaacctatgaggaaatgtcactttatcatcagccagcaaataggaagagacctatcatcttgattggtccacagaactttggccagaacgaattgcgtcagaggctcatgaacaaagaaaaggaccgctttgcatctgcagttcctcatacaacccggagtaggcgagaccaagaagtagccggtagagattaccactttgtttcgcggcaagcattcgaggcagacatagcagctggaaagttcattgagcatggtgaatttgagaagaatttgtatggaactagcatagattctgtacggcaagtgatcaactctggcaaaatatgtcttttaagtcttcgtacacagtcattgaagactctccggaattcagatttgaaaccatatattatcttcattgcacccccttcacaagaaagacttcgggcattattggccaaagaaggcaagaatccaaagcctgaagagttgagagaaatcattgagaagacaagagagatggagcagaacaatggccactactttgatacggcaattgtgaattccgatcttgataaagcctatcaggaattgcttaggttaattaacaaacttgatactgaacctcagtgggtaccatccacttggctgaggtgaaagaaacatccattctgtggcatgttggacttgatctggcaaaaactgccaataggaggactgcccgacactgcagcaagattgaggataagatggaaggcagcagtataagctgtagatctgttcttagatctcttgaattagtgagacgacagttcccttaggcagtttgtgcatggcatcctttattctctatacatggctttagcggttcttgcctcattttgggattctaaatggaagctttcaacagagcattccattttgtcctgttaaaaccttttgttttcacctaaaccctttctgcttagttgtatctctgtgaaaaacttgtatacacaagcgtccatgtctcacacaaatattgatgtgattattcttaagtgttaaatcattaacacttaaatgacttcattgggaatattgagcagagggactgtgcttctatgcactgggcaaggcagtatttgcttaggaaactaatttagtcatcagagatactttcctaaaaaggaaaaataaaaaacaaaatggtgccactttgggttgaagctactttgttaggcttgaattcatttatatgtcttttgattcttaaaaaaacaaaaaacattccattagaagcaccagtttttttgctcagactttgtggatcagactctacactcaacacactctaatctacttaaaggtatacaaaatatgctgatcttttttaaattatgatttcctgaatttttttcttaagtcgtctcaactgatttactcacttagcttcccttccctcatcagcatagtataatagaatgtatgttacatttttatgaatggcaggtgttcattataatctgtattgacttaaaaagtttcttcctcatgatgctaatagttttttgtatacatgggaggatagcacatttgacagtttttgcatttttatgtatgagcacagtatcctatgactgtgctacgtatatataggtaataaactggaattctgttgatgaatatagctgctgtactgtatattaatatttaatagatcaacaaatggtcattgaaaacacttgtttagcattagaataaaattatatatgtccttgggaaatattatgacagttgactttaagatcaaaaggaagggaagacctgaaagtcatttgaacattttaggaaaagaatattggagagaaaaaggtattaaatatatagaaataggtttttaacctaacaaggtctgcctcttatgacgagaatgcaacagcttggtaaatcataaaagaaacatttaagctaataggattttcgtactgtctctatagctgtagctttaaaattcaacgtatataattggcatggaaacttaatttgcagtcttttcaagcctttaggatagtgtgatgtgtaacaaacaacctcaaatgtgaatgccttgattttatttttatggtgactttagctacagcatttcctatacccagagctaaacactggaataatactgacatcatttaatttaacataagcaattatgtttaaggagtaatttgtgtcatgtacatatttgattgattttttttcttctacataattttatttgaacaaatgtagacagtttatatgtcgcctttttctgttcaaatttgcatggcctattaagttggctggagagtgttttatgtggaaatattttcaagataatgttccttaggaagaaaataacattcttgggttgagggaaggaatgccatacactactgtctcttcagatctgaaatactccagtttagagccaggaaatttcacaggtcacaccgatttttagcattaaaaactaaggaatatacttagcacttacttaatcttttcagttttccagtttacgtctcaggaatgaagtgtagtctatggttgacaatggagttttgtgatcctgcttattgtaactgacaactgttttcaactccaagagctaaactattggcagttcatgttaagttagagtgagggtgtaggtagtgtcagtgagtggctcttgtgcctgctgtagacattaggcctgcactagggccatgtgctgtcaagattcaggaacatggctttaacaagcagatcttgtatcaaggcagaggtgatgccatgccatacttttaggaagtctgagatgataaatatttcaaggtcagtgaagtctatcaatcattctccccttcctcatcagcaatggtagatagaaatgtcctaaacttttctaaatcctagtgatgaggatgtgctgatattcaacatagtccttaaagtgaaaactgagttgttgctgacctccacaaaagaatatggaaaaaagccttgctgtacacctagttgtacagccactctggccaattccatttcctgtccctctgtggttctgactggagaccccagtgtgggggaggtcttaccatttaatatagaaatgatatcaataactaatgctatgtacttggaaaatccaaataaggaagttttaggttggtgcataactttgtttctcaaattttcgttgtcagaacaaatggaaggagaatattatttagactaatccagatttgctttctatgaaaatctaatgtctggattatcttccttttctcatggcctaagaaataaggatcaataaggaatgatttgaatgtaattttgtgaatgtgtggaaaatataaagcagggatttagccttaataaaggtaaccttctgacatctgttgttaatccccctttgtactcttttcctgtatctgcactgttattttgagatgtcatactgtacactgtattgtaaaaataaaaagtaaaattatatttcaaattttaaaa

SEQ ID NO: 280165 - DNA, 4705 bp, Homo sapiens
tgtaatttttaaaagagttttacttaaaacctatgaaatgaccatgattgacaataatatatgcagattttggtatttttctgaaaacttaaattgttactggttcaaagaaatgttctctgaaaatgcatgttgaattaatactgaaacagttaatttttggataccttttcttcttctactagaaatagaagacttgttttcttcacttaaacatatccaacatactttggtagattctcagagccaggaggatatttcactgcttttacaacttgttcaaaataaggatttccagaatgcatttaagatacacaatgccatcacagtacacatgaacaaggccagtcctccatttcctcttatctccaacgcacaagatcttgctcaagaggtacaaactgttttgaagccagttcatcataaggaaggacaagaactaactgctttgctgaatactccacatattcaggcacttttactggcccacgataaggttgctgagcaggaaatgcagctagagcccattacagatgagagagtttatgaaagtattggccagtatggaggagaaactgtaaaaatagttcgtatagaaaaggctcgtgatattccgttgggtgctacagttcgtaatgaaatggactctgtcatcattagccggatagtaaaagggggtgctgcagagaaaagtggtctgttgcatgaaggagatgaagttctagagattaatggcattgaaattcgggggaaagatgtcaatgaggtttttgacttgttgtctgatatgcatggtactttgacttttgtcctgattcccagtcaacagatcaagccgcctcctgccaaggaaacagtaatccatgtaaaagctcattttgactatgacccctcagatgacccttatgttccatgtcgagagttaggtctgtcttttcaaaaaggtgatatacttcatgtgatcagtcaagaagatccaaactggtggcaggcctacagggaaggggacgaagataatcaacctctagccgggcttgttccagggaaaagctttcagcagcaaagggaagccatgaaacaaaccatagaagaagataaggagccagaaaaatcaggaaaactgtggtgtgcaaagaagaataaaaagaagaggaaaaaggttttatataatgccaataaaaatgatgattatgacaacgaggagatcttaacctatgaggaaatgtcactttatcatcagccagcaaataggaagagacctatcatcttgattggtccacagaactttggccagaacgaattgcgtcagaggctcatgaacaaagaaaaggaccgctttgcatctgcagttcctcatacaacccggagtaggcgagaccaagaagtagccggtagagattaccactttgtttcgcggcaagcattcgaggcagacatagcagctggaaagttcattgagcatggtgaatttgagaagaatttgtatggaactagcatagattctgtacggcaagtgatcaactctggcaaaatatgtcttttaagtcttcgtacacagtcattgaagactctccggaattcagatttgaaaccatatattatcttcattgcacccccttcacaagaaagacttcgggcattattggccaaagaaggcaagaatccaaagcctgaagagttgagagaaatcattgagaagacaagagagatggagcagaacaatggccactactttgatacggcaattgtgaattccgatcttgataaagcctatcaggaattgcttaggttaattaacaaacttgatactgaacctcagtgggtaccatccacttggctgaggtgaaagaaacatccattctgtggcatgttggacttgatctggcaaaaactgccaataggaggactgcccgacactgcagcaagattgaggataagatggaaggcagcagtataagctgtagatctgttcttagatctcttgaattagtgagacgacagttcccttaggcagtttgtgcatggcatcctttattctctatacatggctttagcggttcttgcctcattttgggattctaaatggaagctttcaacagagcattccattttgtcctgttaaaaccttttgttttcacctaaaccctttctgcttagttgtatctctgtgaaaaacttgtatacacaagcgtccatgtctcacacaaatattgatgtgattattcttaagtgttaaatcattaacacttaaatgacttcattgggaatattgagcagagggactgtgcttctatgcactgggcaaggcagtatttgcttaggaaactaatttagtcatcagagatactttcctaaaaaggaaaaataaaaaacaaaatggtgccactttgggttgaagctactttgttaggcttgaattcatttatatgtcttttgattcttaaaaaaacaaaaaacattccattagaagcaccagtttttttgctcagactttgtggatcagactctacactcaacacactctaatctacttaaaggtatacaaaatatgctgatcttttttaaattatgatttcctgaatttttttcttaagtcgtctcaactgatttactcacttagcttcccttccctcatcagcatagtataatagaatgtatgttacatttttatgaatggcaggtgttcattataatctgtattgacttaaaaagtttcttcctcatgatgctaatagttttttgtatacatgggaggatagcacatttgacagtttttgcatttttatgtatgagcacagtatcctatgactgtgctacgtatatataggtaataaactggaattctgttgatgaatatagctgctgtactgtatattaatatttaatagatcaacaaatggtcattgaaaacacttgtttagcattagaataaaattatatatgtccttgggaaatattatgacagttgactttaagatcaaaaggaagggaagacctgaaagtcatttgaacattttaggaaaagaatattggagagaaaaaggtattaaatatatagaaataggtttttaacctaacaaggtctgcctcttatgacgagaatgcaacagcttggtaaatcataaaagaaacatttaagctaataggattttcgtactgtctctatagctgtagctttaaaattcaacgtatataattggcatggaaacttaatttgcagtcttttcaagcctttaggatagtgtgatgtgtaacaaacaacctcaaatgtgaatgccttgattttatttttatggtgactttagctacagcatttcctatacccagagctaaacactggaataatactgacatcatttaatttaacataagcaattatgtttaaggagtaatttgtgtcatgtacatatttgattgattttttttcttctacataattttatttgaacaaatgtagacagtttatatgtcgcctttttctgttcaaatttgcatggcctattaagttggctggagagtgttttatgtggaaatattttcaagataatgttccttaggaagaaaataacattcttgggttgagggaaggaatgccatacactactgtctcttcagatctgaaatactccagtttagagccaggaaatttcacaggtcacaccgatttttagcattaaaaactaaggaatatacttagcacttacttaatcttttcagttttccagtttacgtctcaggaatgaagtgtagtctatggttgacaatggagttttgtgatcctgcttattgtaactgacaactgttttcaactccaagagctaaactattggcagttcatgttaagttagagtgagggtgtaggtagtgtcagtgagtggctcttgtgcctgctgtagacattaggcctgcactagggccatgtgctgtcaagattcaggaacatggctttaacaagcagatcttgtatcaaggcagaggtgatgccatgccatacttttaggaagtctgagatgataaatatttcaaggtcagtgaagtctatcaatcattctccccttcctcatcagcaatggtagatagaaatgtcctaaacttttctaaatcctagtgatgaggatgtgctgatattcaacatagtccttaaagtgaaaactgagttgttgctgacctccacaaaagaatatggaaaaaagccttgctgtacacctagttgtacagccactctggccaattccatttcctgtccctctgtggttctgactggagaccccagtgtgggggaggtcttaccatttaatatagaaatgatatcaataactaatgctatgtacttggaaaatccaaataaggaagttttaggttggtgcataactttgtttctcaaattttcgttgtcagaacaaatggaaggagaatattatttagactaatccagatttgctttctatgaaaatctaatgtctggattatcttccttttctcatggcctaagaaataaggatcaataaggaatgatttgaatgtaattttgtgaatgtgtggaaaatataaagcagggatttagccttaataaaggtaaccttctgacatctgttgttaatccccctttgtactcttttcctgtatctgcactgttattttgagatgtcatactgtacactgtattgtaaaaataaaaagtaaaattatatttcaaattttaaaa

SEQ ID NO: 280166 - DNA, 4274 bp, Homo sapiens
ttgatcagaggatcccagttcgacggagactctcctacgccgcacttttactggcccacgataaggttgctgagcaggaaatgcagctagagcccattacagatgagagagtttatgaaagtattggccagtatggaggagaaactgtaaaaatagttcgtatagaaaaggctcgtgatattccgttgggtgctacagttcgtaatgaaatggactctgtcatcattagccggatagtaaaagggggtgctgcagagaaaagtggtctgttgcatgaaggagatgaagttctagagattaatggcattgaaattcgggggaaagatgtcaatgaggtttttgacttgttgtctgatatgcatggtactttgacttttgtcctgattcccagtcaacagatcaagccgcctcctgccaaggaaacagtaatccatgtaaaagctcattttgactatgacccctcagatgacccttatgttccatgtcgagagttaggtctgtcttttcaaaaaggtgatatacttcatgtgatcagtcaagaagatccaaactggtggcaggcctacagggaaggggacgaagataatcaacctctagccgggcttgttccagggaaaagctttcagcagcaaagggaagccatgaaacaaaccatagaagaagataaggagccagaaaaatcaggaaaactgtggtgtgcaaagaagaataaaaagaagaggaaaaaggttttatataatgccaataaaaatgatgattatgacaacgaggagatcttaacctatgaggaaatgtcactttatcatcagccagcaaataggaagagacctatcatcttgattggtccacagaactttggccagaacgaattgcgtcagaggctcatgaacaaagaaaaggaccgctttgcatctgcagttcctcatacaacccggagtaggcgagaccaagaagtagccggtagagattaccactttgtttcgcggcaagcattcgaggcagacatagcagctggaaagttcattgagcatggtgaatttgagaagaatttgtatggaactagcatagattctgtacggcaagtgatcaactctggcaaaatatgtcttttaagtcttcgtacacagtcattgaagactctccggaattcagatttgaaaccatatattatcttcattgcacccccttcacaagaaagacttcgggcattattggccaaagaaggcaagaatccaaagcctgaagagttgagagaaatcattgagaagacaagagagatggagcagaacaatggccactactttgatacggcaattgtgaattccgatcttgataaagcctatcaggaattgcttaggttaattaacaaacttgatactgaacctcagtgggtaccatccacttggctgaggtgaaagaaacatccattctgtggcatgttggacttgatctggcaaaaactgccaataggaggactgcccgacactgcagcaagattgaggataagatggaaggcagcagtataagctgtagatctgttcttagatctcttgaattagtgagacgacagttcccttaggcagtttgtgcatggcatcctttattctctatacatggctttagcggttcttgcctcattttgggattctaaatggaagctttcaacagagcattccattttgtcctgttaaaaccttttgttttcacctaaaccctttctgcttagttgtatctctgtgaaaaacttgtatacacaagcgtccatgtctcacacaaatattgatgtgattattcttaagtgttaaatcattaacacttaaatgacttcattgggaatattgagcagagggactgtgcttctatgcactgggcaaggcagtatttgcttaggaaactaatttagtcatcagagatactttcctaaaaaggaaaaataaaaaacaaaatggtgccactttgggttgaagctactttgttaggcttgaattcatttatatgtcttttgattcttaaaaaaacaaaaaacattccattagaagcaccagtttttttgctcagactttgtggatcagactctacactcaacacactctaatctacttaaaggtatacaaaatatgctgatcttttttaaattatgatttcctgaatttttttcttaagtcgtctcaactgatttactcacttagcttcccttccctcatcagcatagtataatagaatgtatgttacatttttatgaatggcaggtgttcattataatctgtattgacttaaaaagtttcttcctcatgatgctaatagttttttgtatacatgggaggatagcacatttgacagtttttgcatttttatgtatgagcacagtatcctatgactgtgctacgtatatataggtaataaactggaattctgttgatgaatatagctgctgtactgtatattaatatttaatagatcaacaaatggtcattgaaaacacttgtttagcattagaataaaattatatatgtccttgggaaatattatgacagttgactttaagatcaaaaggaagggaagacctgaaagtcatttgaacattttaggaaaagaatattggagagaaaaaggtattaaatatatagaaataggtttttaacctaacaaggtctgcctcttatgacgagaatgcaacagcttggtaaatcataaaagaaacatttaagctaataggattttcgtactgtctctatagctgtagctttaaaattcaacgtatataattggcatggaaacttaatttgcagtcttttcaagcctttaggatagtgtgatgtgtaacaaacaacctcaaatgtgaatgccttgattttatttttatggtgactttagctacagcatttcctatacccagagctaaacactggaataatactgacatcatttaatttaacataagcaattatgtttaaggagtaatttgtgtcatgtacatatttgattgattttttttcttctacataattttatttgaacaaatgtagacagtttatatgtcgcctttttctgttcaaatttgcatggcctattaagttggctggagagtgttttatgtggaaatattttcaagataatgttccttaggaagaaaataacattcttgggttgagggaaggaatgccatacactactgtctcttcagatctgaaatactccagtttagagccaggaaatttcacaggtcacaccgatttttagcattaaaaactaaggaatatacttagcacttacttaatcttttcagttttccagtttacgtctcaggaatgaagtgtagtctatggttgacaatggagttttgtgatcctgcttattgtaactgacaactgttttcaactccaagagctaaactattggcagttcatgttaagttagagtgagggtgtaggtagtgtcagtgagtggctcttgtgcctgctgtagacattaggcctgcactagggccatgtgctgtcaagattcaggaacatggctttaacaagcagatcttgtatcaaggcagaggtgatgccatgccatacttttaggaagtctgagatgataaatatttcaaggtcagtgaagtctatcaatcattctccccttcctcatcagcaatggtagatagaaatgtcctaaacttttctaaatcctagtgatgaggatgtgctgatattcaacatagtccttaaagtgaaaactgagttgttgctgacctccacaaaagaatatggaaaaaagccttgctgtacacctagttgtacagccactctggccaattccatttcctgtccctctgtggttctgactggagaccccagtgtgggggaggtcttaccatttaatatagaaatgatatcaataactaatgctatgtacttggaaaatccaaataaggaagttttaggttggtgcataactttgtttctcaaattttcgttgtcagaacaaatggaaggagaatattatttagactaatccagatttgctttctatgaaaatctaatgtctggattatcttccttttctcatggcctaagaaataaggatcaataaggaatgatttgaatgtaattttgtgaatgtgtggaaaatataaagcagggatttagccttaataaaggtaaccttctgacatctgttgttaatccccctttgtactcttttcctgtatctgcactgttattttgagatgtcatactgtacactgtattgtaaaaataaaaagtaaaattatatttcaaattttaaaa

SEQ ID NO: 280167 - DNA, 559 bp, Homo sapiens
ggcggccgcagggaggcagccattttccgtaggcggtggccgcggcgcttccgggccgcgcggctggagcctgaggcggggccaccgtcgggcacgagaaaccattctctccccgcttttcgcagctgtatcccagaggcgcggctgaagctcgctgggacactgcccgcttgcccagtgcccacgggcacgcctgtcgcagacacaggctgtggcgaatccgagtgctggcgggcagcagtgcctgcagctgcgcccgcagactctttcccgcctccgccggcatttccgtgtccggccgatgtcatgcggtcggttgagcctcagggctagcagcttctactgatgcaaaaacataggaagtgtctctttgcttctggaaccggggtgggcagcaaggagctggccacttctttgaataccggtggcatcctgggcagaatttcggtgccgtttctgctggctcacttcaggaaaagtgaggctcacggctctcctcagccccccttagaagtctaaatgacctttggagaaatacaaagtcagcagaaagtttcac

SEQ ID NO: 280168 - DNA, 561 bp, Homo sapiens
acaaccctctgttgagagaattctgagagtgtcttaccacagctctccagagcatattattttgcacctcttctgtgaaggccggcaaaatagcttcttgaaaggttctctgttaatggaaactgaagtttgtaagagtttaaggccaaacgtaagaggtcatactccctgtcacaaactccagctgaactaacttggaggaggatcttccctgacagctctggaaggaaattgacagaactttcataaagccaaagactggcagaaataaagtaaataatgatgaaactgagcaatagagcacccagaaggagtgtcccctgccaaaaagaatgtggcatttcaccctccaagaaacaaatggacaccttatcccacagaagaatggggctcacaggtcaccgtcactcacttctttatcctttcgccaaaggaagccacttcatctaggatgttctggacactgacacatacctcctggatggcatagattttatttataaatccctttttttcactgtcctaaaatgcaataaaaaagaaattctgtatgagtaaaag

SEQ ID NO: 280169 - DNA, 654 bp, Homo sapiens
tgataattatggatctcagctatttaaatacaaacttgaaaaaaatatttttgcagggtaccataaatatgattaattttttaaaaaatttagtgtcacttgatgaaaatataactagaccaatagtaaaatacaggtgtatcttaattacctgaagtcctcatttagcttggtttatttttttcctatcacaatttcatattccatttaagaacaaagtctttcacagtgaaaaatgtgctaaaatttaggacggtgttatttcttcaaagctacaagtatgacttctttccaaccaatatgttctaaatttcaggaaggaaattgacagaactttcataaagccaaagactggcagaaataaagtaaataatgatgaaactgagcaatagagcacccagaaggagtgtcccctgccaaaaagaatgtggcatttcaccctccaagaaacaaatggacaccttatcccacagaagaatggggctcacaggtcaccgtcactcacttctttatcctttcgccaaaggaagccacttcatctaggatgttctggacactgacacatacctcctggatggcatagattttatttataaatccctttttttcactgtcctaaaatgcaataaaaaagaaattctgtatgagtaaaag

SEQ ID NO: 280170 - DNA, 1091 bp, Homo sapiens
aactgtgctagaagctcatctaatggcattacaagttttaaattcaccatagcagcttcttcctgaaatcagaaagctttttttctgtctgcagctggagtgcgatggcatgatctcggctcactgcaacctctgcctcccaggttcaagcgtttctcctgcctcaccctcccaagtagctgggattgcaggcatgcaccactgtgcccaggaagctgagagtgctgagggcacatctgaaaccactggaggttggcgacatggaggtcagaactgaagaatttggaagtgctcaaatttttaaataaccagatcgaggagctgccaacacagatcagcaggcttcaaaaactcaaacacctgaaccttggccaccctgtgtgcactctatctaagtgacaacggttttgaaatcctgccaccagatattgggaagctcacaaagttgcagatagtaactcagcaatagggataaagacctgatctcactgcttaaggaaattggggagcttacccagcttaaagagctccacattcagaggaaccgcctcactgttctacgcccagaactaggcaatgatgggacctcttctcctgcatttgttacccagataattttgcctttggagaagagaagaaaatcacattggtctgctcggaatgcaacaaaacaaagtgttattgacaccaaaaccttatttgcaccaatccaaacagcctatgggacatatgtctgcaatgctgcacacacctggggctagccagcttagtgccctacgatatgtgccaataatcgatagcattttttactacagtaattatgagaagcatagtattttctagcatgcttgtgaagagtggaaacaaatattaatccccttcagagagtaaaggacattatgaattgagaatttcctcccaatttattctccagaatgaacagaattaacagtgagtggatgtacgtccaaaatttcttctgttatatctcttaatccttttcctgcggacatcgagaaactaaagaaaaataactttctttactgaggcaggcaagaaggaaatccagtattctttgtttgatcaattaa

SEQ ID NO: 280171 - DNA, 1034 bp, Homo sapiens
caagaagctaagcactgctacttgaataaccaaacctatgcccaaatcccatctttgtggggctatctcctggtactcttcctagcatttttctctttgtcagagtccaatcaggagacataaatcacttaaatacaaactggtaacatttaatgaagctgagagtgctgagggcacatctgaaaccactggaggttggcgacatggaggtcagaactgaagaatttggaagtgctcaaatttttaaataaccagatcgaggagctgccaacacagatcagcaggcttcaaaaactcaaacacctgaaccttggccaccctgtgtgcactctatctaagtgacaacggttttgaaatcctgccaccagatattgggaagctcacaaagttgcagatagtaactcagcaatagggataaagacctgatctcactgcttaaggaaattggggagcttacccagcttaaagagctccacattcagaggaaccgcctcactgttctacgcccagaactaggcaatgatgggacctcttctcctgcatttgttacccagataattttgcctttggagaagagaagaaaatcacattggtctgctcggaatgcaacaaaacaaagtgttattgacaccaaaaccttatttgcaccaatccaaacagcctatgggacatatgtctgcaatgctgcacacacctggggctagccagcttagtgccctacgatatgtgccaataatcgatagcattttttactacagtaattatgagaagcatagtattttctagcatgcttgtgaagagtggaaacaaatattaatccccttcagagagtaaaggacattatgaattgagaatttcctcccaatttattctccagaatgaacagaattaacagtgagtggatgtacgtccaaaatttcttctgttatatctcttaatccttttcctgcggacatcgagaaactaaagaaaaataactttctttactgaggcaggcaagaaggaaatccagtattctttgtttgatcaattaa

SEQ ID NO: 280172 - DNA, 1078 bp, Homo sapiens
gacgggtcccaaaactggcttgccacagtccctttcagtattgctgtgatgagacgcctggaggaaagctgtcagagcagatgtgtgtagaggaagaaagttgtgtagtcgaaggacagtgttgtttactcttatcttgagtgtgagtagagaactgtattaacaatagggctttgtgccattgacagagtgtgaaagagggagcctatattacattggggtttgggacctgacctgcctatatctagccagcgagagtgaatggggtcagtgttagctgccttcatctatgcagtcacaaaggtggcttaagattaagaagtgaggacatggaggcggactgtccctctgagcagctctgaagtagggccaagcacactgccttccagtaagttcttgcccacattccttcactcccttgacgtagatgtctccaaatactcttaacatgaaatgcatgtaatgaggagcaggcctgtcatagatcttgatttggggcaataaagatgtgtttttgtcacagaactttttgaggatgacactgtaaatccctaacttttattttctcagtgcatggtgacccccatagctgtttttcccaatagttctgtcagcaggcattttccaagaaggggccccagtattccttcctaaatggtgaggtggtcaagacgtcagaccagttggtggtgtgatattttttcaaggttctgaatgatggattatttgcttgtgcttagagattgcctactttttcttgctttcagttatgttaaagaaggcgagggaaatgttacttattggccgaaatcatctaatgtcttttttgtgaacaagaaattaatttgttaggacttttgtactataaattagaggtaatcttaagatttaaaaaaagaagaaaacacccttaaatgataactttattggctccctgtgtctttatttcctgtatttcctggtggaggtacttatatttggcttttactcatttaataattccagaccccaggagaaagcctggcttttgatgtctggtctggtctctgatgataacaaggaattcccctcccaaggg

SEQ ID NO: 280173 - DNA, 336 bp, Homo sapiens
gaagaattgaggcacagcacagcaactggcagagaaatggaaaaagaacactccaaacctggccactacctgaggatgtgtaaagaggttttctgcaggcaattagaccccactacagtggaagcttgtagaacatcacacatcgacagtctgaaatgcaccacaagaactgctcgaagagtgtgtcactttcacacttacctgaccgtgggatggaagtgcagcgtgaagctgtggtgccaggagctgaagtatgctgttcatccaatgcctatgacaatatgggctgctatcatgtgtcaattactctgaaggaaacaattcatcttccataat

SEQ ID NO: 280174 - DNA, 533 bp, Homo sapiens
aatcatattagtgaagattaggaagaagctttaaaatcccaaggctagtgtgcattgctagaattgttaagagagagagctcatatgaaattggttatcgtgggatatttaaaataaaacaaagaacagtttactttcaggcaaaaagatgccagtaatcaatattgaggacctgacagaaaaggacaaattgaagatggaagttgaccagctcaagaaagaagtgacactggaaagaatgctagtttccaaatgttgtgaagaagtaagagattacgttgaagaacgatctggcgaggatccactggtaaagggcatcccagaggacaaaaatcccttcaaggagctcaaaggaggctgtgtgatttcataatacaaacaaaaagaaaaaaaattaaacaaattcttggaaatatctcaaatgttaataacaatatgaatttttctcatgcatactattactactaagcatgtacgtgaatttttaaatttatagatgtaaacttttaataaaaattggggtgtggtaaccc

SEQ ID NO: 280175 - DNA, 678 bp, Homo sapiens
tattcattctcctccacctttactagtcacatttttgggatgaggaaaaagatttaatcaatatgaactctggtgacacccttgacttctgttgccagctgtgttgtgaaccctgggtcttgtctcctttgatgttggaggcagtgtctgctgggaatctttagctggagtgtggccagctgtttttcctttgtctggagatatatccagaaggagtgggaagggtgcaactttcttctttcctacaaagtaaatatgcattggtgtaaagtagagagaatcaaactgaaattatacaacctgaaaatttattgtaataaataaattcctggcatctggagtattctgttttaaaccaaatgagtcatccctttttccttccccttaaggtttccaaatgttgtgaagaagtaagagattacgttgaagaacgatctggcgaggatccactggtaaagggcatcccagaggacaaaaatcccttcaaggagctcaaaggaggctgtgtgatttcataatacaaacaaaaagaaaaaaaattaaacaaattcttggaaatatctcaaatgttaataacaatatgaatttttctcatgcatactattactactaagcatgtacgtgaatttttaaatttatagatgtaaacttttaataaaaattggggtgtggtaaccc

SEQ ID NO: 280176 - DNA, 723 bp, Homo sapiens
aggtgaggcaatgcctcgccctgcttcggctcgagcacggtgcgcacacacactggcctgcgcccactgtctggcactccctagtgagatgaacccggcacctcagatggaaatgcagaaatcacccgtcttctgcgacgctcacgctgggagctgtagaccggagctgttcctattcggccatcttggctcctcctcttatgatcctcttctgaaatcaggaatacgaccccaagaaatgacaggcaaaaagatgccagtaatcaatattgaggacctgacagaaaaggacaaattgaagatggaagttgaccagctcaagaaagaagtgacactggaaagaatgctaatcccagccaggcaccttcaaaaccaatcccttatggactactgaattaaggacagcaagttacacctctgttcctgtcatctgggtgaagccaaaagtagtgacttttagagagagagtgtgggaccactgaggaagagggaaaaaagtgaatctaaattaatgcatatttcaaaagttatgtgaatctgcaagtatcatcctttgaaggaagaaactaacctgacaaatgcttcctggctccagttgaaaataatttgttttactatgtaattaatgagtctgcctagttataaaataatcttaagtcttatatcaaatgttccttggaatttacataaaagcggactaaagatttcatttgaaaaaaaaaa

SEQ ID NO: 280177 - DNA, 546 bp, Homo sapiens
tcctcctttctggagtctgaaatgttaagtatggaggcaaaagctgaagctggagcaacagtctcagaatatgacaacaaccatgagaatggaggccattcatagcagaactacgagacaagaggagcctaggtccctgagctgcagaactgcatactaacctgatgagaagactaatgctcagtgaggtgaactccttcagggccacaggctgtaaagatctaaacaccatctgatccagtttcaatatgactgcctggatgaagaaggatttgagactaagtttattcctccaaagcaaaccaactgagaatgcagtttctgaggaccttggctcatttcaaaatctggaaatatatttgaacacctctcccagaagtgggtaagaagttagaataatggaaaggcttggctccaagttcagttgaatgtcaaaaagcccaagtttggctgaatggactttgtgtcgtgaaatctcagctccctctctcttcttccaggccaaatacctactggatgaaactgataaaattaaacaaagagaga

SEQ ID NO: 280178 - DNA, 804 bp, Homo sapiens
tcctcctttctggagtctgaaatgttaagtatggaggcaaaagctgaagctggagcaacagtctcagaatatgacaacaaccatgagaatggaggccattcatagcagaactacgagacaagaggagcctaggtccctgagctgcagaactgcatactaacctgatgagaagactaatgctcagtgaggtgaactccttcagggccacaggctgtaaagatctaaacaccatctgatccagtttcaatatgactgcctggatgaagaaggatttgagactaagtttattcctccaaagcaaaccaactgagaatgcagagacagggtcttgctatgttgcccaggccagtctcaaactcctgggttcaagcaatccactcgccttggcctcttaaagcactgggattacaagcgtgaaccaccatgcctggctgaagattcaagtttttaaaacatctgatttccacttgaaaccttgaattgtatcattggcaacaaataatgtcagttattttccttgagatgacaacttcacttagttattttcaagaaaactgctgccatgtagccaactgtgaatgaccacagtttgcctgtcagtcattctgtcaagtaaaatggtgctcctcaaacaaagcagcacgtttagctcacaactcaacaaccacacagcagtcttcctcccacccaccatggcacttatattaatataagcagcagaggtgctttatgtatgagtattgtgtgaaaatactcaaaagacctgtaaccaagggtcaagattactacaattaatttctactg

SEQ ID NO: 280179 - DNA, 663 bp, Homo sapiens
tcctcctttctggagtctgaaatgttaagtatggaggcaaaagctgaagctggagcaacagtctcagaatatgacaacaaccatgagaatggaggccattcatagcagaactacgagacaagaggagcctaggtccctgagctgcagaactgcatactaacctgatgagaagactaatgctcagtgaggtgaactccttcagggccacaggctgtaaagatctaaacaccatctgatccagtttcaatatgactgcctggatgaagaaggatttgagactaagtttattcctccaaagcaaaccaactgagaatgcagttttcaatgcaacccatcatcaaagggaaggagttgatgaaaagaaatgaaattgaaacgtgcacctggggagaagtgattgaaggttcttcatttaagggattggctccttttctcttattatactgtgaaatctgaaaacatctcttgaaattctggtcactgtcttctggacatcccaaggcgcaccatctccacagttcctccctcctagattatcccatccagtgtggcatccagtgtggcaaatggaaagactcttccagtgggcaactgaaaaggacaccaaagaaagcagatacagcccatgatcaaagaagcacataacttcagtttggaacatga

SEQ ID NO: 280180 - DNA, 1875 bp, Homo sapiens
gcatggctgccgacgtcactggaaaaagtgacccattttgtgtggtagaactgaacaacgatagactgctaacacatactgtctacaaaaatctcaatcctgagtggaataaagtcttcacgttcaacattaaagatatccattcagttcttgaagtgacagtttatgatgaagatcgggatcgaagtgctgactttctgggcaaagttgctataccattgctgtctattcaaaatggtgaacagaaagcctacgtcttgaaaaacaggcagctgacagggccaacaaagggggtcatctatcttgaaatagatgtgatttttaatgctgtgaaagccagcttacgaacattaatacccaaagaacagaagtacattgaagaggaaaacagactctctaaacagctgctactaagaaactttatcagaatgaaacgttgtgtcatggtgctggtaaatgctgcatactacgttaatagttgctttgattgggattcacccccaaggagtctcgctgcttttgtggtagtggaggacatgctagaggacgaggaagaagaagatgacaaagatgacaaggacagtgaaaaaaagggatttataaataaaatctatgccatccaggaggtatgtgtcagtgtccagaacatcctagatgaagtggcttcctttggcgaaaggataaagaatactttcaactggactgtcccattcttaagctggctggccattgtagccctctgtgtgttcacagccatcctgtactgcattccgctgagatacattgtccttgtctggggcatcaataaatttacaaaaaagcttcggagtccatatgcaattgataacaatgaactacttgacttcctttccagagtcccttcagatgtacaagtggtgcaataccaagaactgaaaccagatccttctcatagcccatataaaagaaagaaaaacaatcttggctagccagctcccagcactgaggagaccagcatctgtttgggaagataaaagaaaaagccctcagcctcagcagcatttcctttctttctgctttttatttattttgcctttttatcatgatcgagagaatctgtaaatagtgtacaaaggcatatgtctttgaatatatacttctattgtacagactcaacttgataaaggttttgctactgctgtgtcaaaaccttgttagctgtggataataatataacacactgaaagaacaaatataagaatgataacactggaagatatattcttatctaattacaagtggattaaatactcacctgtgctctgattaaatctacatcaattgtaaatgtcgatttgattttaaagtttttttttaatgcgactattttttatctgaaaagtaatccattacacttttctatgttttatacatttcaaaagggagggaaattccaaagcctgaataatggaatggatacatttcaatttaacatatattctggctttagatcccgacattcactcctgtgcaaattacttaggtatgacttaggctaattttaagctaataagtgaaggtacattcactccctcaagagaatcaatactcagaaggttacaaagttttctttatagaatttcaatcaatcattccatctaaaaccttaaaatctctacaggactacataacataaatactgccagtttataaacgattgcctatctgaatttttatacctaccactactttaatttatacagttagttagcaaattagcaacccagtaagtacagttatcaaaaatactaggaaactatatccatatcgcttttggtgtcagattgtatctgtgcatctaaaaatattttaataaatactcaagtgctctcagag

SEQ ID NO: 280181 - DNA, 246 bp, Homo sapiens
aaatcagctggagctatctaaattttcaaaactattcttgttgttgtttcctactgatgaaatctttttttcttacatatatttattatgcagcaacattaaagatatccattcagttcttgaagtgacagtttatgatgaagatcgggatcgaagtgctgactttctgggcaaagttgctataccattgctgtctgtaagttttattcacctgacacactgttctgtgttgcttttgctcacgga

SEQ ID NO: 280182 - DNA, 2929 bp, Homo sapiens
gcatggctgccgacgtcactggaaaaagtgacccattttgtgtggtagaactgaacaacgatagactgctaacacatactgtctacaaaaatctcaatcctgagtggaataaagtcttcacgttcaacattaaagatatccattcagttcttgaagtgacagtttatgatgaagatcgggatcgaagtgctgactttctgggcaaagttgctataccattgctgtctattcaaaatggtgaacagaaagcctacgtcttgaaaaacaggcagctgacagggccaacaaagggggtcatctatcttgaaatagatgtgatttttaatgctgtgaaagccagcttacgaacattaatacccaaagaacagaagtacattgaagaggaaaacagactctctaaacagctgctactaagaaactttatcagaatgaaacgttgtgtcatggtgctggtaaatgctgcatactacgttaatagttgctttgattgggattcacccccaaggagtctcgctgcttttgtggtagtggaggacatgctagaggacgaggaagaagaagatgacaaagatgacaaggacagtgaaaaaaagggatttataaataaaatctatgccatccaggaggtatgtgtcagtgtccagaacatcctagatgaagtggcttcctttggcgaaaggataaagaatactttcaactggactgtcccattcttaagctggctggccattgtagccctctgtgtgttcacagccatcctgtactgcattccgctgagatacattgtccttgtctggggcatcaataaatttacaaaaaagcttcggagtccatatgcaattgataacaatgaactacttgacttcctttccagagtcccttcagatgtacaagtggtgcaataccaagaactgaaaccagatccttctcatagcccatataaaagaaagaaaaacaatcttggctagccagctcccagcactgaggagaccagcatctgtttgggaagataaaagaaaaagccctcagcctcagcagcatttcctttctttctgctttttatttattttgcctttttatcatgatcgagagaatctgtaaatagtgtacaaaggcatatgtctttgaatatatacttctattgtacagactcaacttgataaaggttttgctactgctgtgtcaaaaccttgttagctgtggataataatataacacactgaaagaacaaatataagaatgataacactggaagatatattcttatctaattacaagtggattaaatactcacctgtgctctgattaaatctacatcaattgtaaatgtcgatttgattttaaagtttttttttaatgcgactattttttatctgaaaagtaatccattacacttttctatgttttatacatttcaaaagggagggaaattccaaagcctgaataatggaatggatacatttcaatttaacatatattctggctttagatcccgacattcactcctgtgcaaattacttaggtatgacttaggctaattttaagctaataagtgaaggtacattcactccctcaagagaatcaatactcagaaggttacaaagttttctttatagaatttcaatcaatcattccatctaaaaccttaaaatctctacaggactacataacataaatactgccagtttataaacgattgcctatctgaatttttatacctaccactactttaatttatacagttagttagcaaattagcaacccagtaagtacagttatcaaaaatactaggaaactatatccatatcgcttttggtgtcagattgtatctgtgcatctaaaaatattttaataaatactcaagtgctctcagagaaaaaaaaaacctgctttctcattagattactgaaatgctttaattcatactatgattttgttattagtgtgaattttaatgtagagaattcagtgtgctaagtgatatgccagtgtttcactacattcatttattaaaaaaaatcattcttgattatgcatgaaaacctgttttgtaaaataaaataaactgcttgggggtggtggttgcctttatcaatgtttcactattatcatagaatctatacttaaaaattgcattcccaagactcttaaagtagtttttatatctcactccctggtatactaagggagcataactctggagaaaaaataatttggttggttgagaatgtcttacttccctgacttggtaggggactacactcagttgaaattgcagcagacaatgctttgcactactttattaataataaacttggatggggtaaaagtgggggttatactggaaaaactatagaaaagctaaaagaaatgtatatttcactctaaaggaagattctttaacaataaatgtaatctcattgaagctgatttttaaagtatttttattttagagataagttgttaaatactatttcttataatagaactattttgatctgtttatatactatgcttgaatgtcaattaaattccctttctacagaaaggctttgacctcaacatgctttatttaatgtatcatgtttaaaatgacatgcttctgtctgcataccatcactgtttgttgctaaaaacataatgttccatgaacatgatgttactacagaaagtttattgatgagataactgtttgaaataactttcaattataccttatgtgagacttttatgttctgtgctgacaatgtgtactcaaatgtctataagcctgatattctacaacctcagatgtatctagtggatagtaaccattaacagatgactaatttgtttcactgtatcaaatttcagatgtttagttcaatggtaatgctgactacacattcactgtattaaatacaaaagaaaataatctttcccacgtata

SEQ ID NO: 280183 - DNA, 1718 bp, Homo sapiens
agactcggtggttgctaaggcgggaggtcacagagcgcggcgcagggattgggccgtgttgggggaggtgtgtggtgattgggcggcgcccaggaggcgcccgggtgaggcacgggtgcgcaagcgggagttccggctggagacccgtgctctgggccggcgccttcaccatggcctcggcagagctggactacaccatcgagatcccggatcagccctgctggagccagaagaacagccccagcccaggtgggaaggaggcagaaactcggcagcctgtggtgattctcttgggctggggtggctgcaaggacaagaaccttgccaagtacagtgccatctaccacaaaaggggctgcatcgtaatccgatacacagccccgtggcacatggtcttcttctccgagtcactgggtatcccttcacttcgtgttttggcccagaagctgctcgagctgctctttgattatgagattgagaaggagcccctgctcttccatgtcttcagcaacggtggcgtcatgctgtaccgctacgtgctggagctcctgcagacccgtcgcttctgccgcctgcgtgtggtgggcaccatctttgacagcgctcctggtgacagcaacctggtaggggctctgcgggccctggcagccatcctggagcgccgggccgccatgctgcgcctgttgctgctggtggcctttgccctggtggtcgtcctgttccacgtcctgcttgctcccatcacagccctcttccacacccacttctatgacaggctacaggacgcgggctctcgctggcccgagctctacctctactcgagggctgacgaagtagtcctggccagagacatagaacgcatggtggaggcacgcctggcacgccgggtcctggcgcgttctgtggatttcgtgtcatctgcacacgtcagccacctccgtgactaccctacttactacacaagcctctgtgtcgacttcatgcgcaactgcgtccgctgctgaggccattgctccatctcacctctgctccagaaataaatgcctgacacctccccacaacctgcaatctgtcgggcactcttctcgttcaactccctgtagccctttgggactttgcggtcccctaagtagaaaattcctatgggcctgtctcctgggggcctctgtctgctggtggtctgcttaccacagaatcctaaggggcaggagtgcctgggcatgtgtctgtgggagccttgcagtcagttgtgtttggacaagtgcaacagtcaggctgctgattcctgtggcatgcaggctgtagaggttgacaaatggaggggggtgttgagggtgagccctagttgattttttaaaatttaaactctggtaagaacatttaatatgagacctactctctttttttctttacttatttatttatctatttatttcaagacagggtctcactctgtcacctaggctggggtgcaatggtgcaatcatggctcactgcagcctcaacctcccaggctcaagtgatcctcccacctcagcctcccaaagtgctaggattacaggcatgagtcaccgcgcctggccaagatcacctaacaaaattgtaagtgtgtacgatacttaaaatttaagagattatgtgcacggcagacctctagaactgaatagtcttgcatcttgcataattcagaacttcatcatcttgcataactgaaactt

SEQ ID NO: 280184 - DNA, 675 bp, Homo sapiens
agactcggtggttgctaaggcgggaggtcacagagcgcggcgcagggattgggccgtgttgggggaggtgtgtggtgattgggcggcgcccaggaggcgcccgggtgaggcacgggtgcgcaagcgggagttccggctggagacccgtgctctgggccggcgccttcaccatggcctcggcagagctggactacaccatcgagatcccggatcagccctgctggagccagaagaacagccccagcccaggtgggaaggaggcagaaactcggcagcctgtggtgattctcttgggctggggtggctgcaaggacaagaaccttgccaagtacagtgccatctaccacaaaaggaagctgctcgagctgctctttgattatgagattgagaaggaagcaggatcatgctgggcccaggccatccccacctgctccccacagtctgcaacgaaggcacagctctagccccagctgtggtgtgccaagtgggccctcagctctagggctcctttgaagcaaaccaatttagaggtcaaagacctgggcctcttcccaatagttttccgctggagcccaaggagggaatgagtgagagtgaaagcaaaaggagagagcagtggtcagaagggaagaagctgctgagaccacatggagaccccaagagcccacagattca

SEQ ID NO: 280185 - DNA, 1671 bp, Homo sapiens
agactcggtggttgctaaggcgggaggtcacagagcgcggcgcagggattgggccgtgttgggggaggtgtgtggtgattgggcggcgcccaggaggcgcccgggtgaggcacgggtgcgcaagcgggagttccggctggagacccgtgctctgggccggcgccttcaccatggcctcggcagagctggactacaccatcgagatcccggatcagccctgctggagccagaagaacagccccagcccaggtgggaaggaggcagaaactcggcagcctgtggtgattctcttgggctggggtggctgcaaggacaagaaccttgccaagtacagtgccatctaccacaaaaggctccgagtcactgggtatcccttcacttcgtgttttggcccagaagctgctcgagctgctctttgattatgagattgagaaggagcccctgctcttccatgtcttcagcaacggtggcgtcatgctgtaccgctacgtgctggagctcctgcagacccgtcgcttctgccgcctgcgtgtggtgggcaccatctttgacagcgctcctggtgacagcaacctggtaggggctctgcgggccctggcagccatcctggagcgccgggccgccatgctgcgcctgttgctgctggtggcctttgccctggtggtcgtcctgttccacgtcctgcttgctcccatcacagccctcttccacacccacttctatgacaggctacaggacgcgggctctcgctggcccgagctctacctctactcgagggctgacgaagtagtcctggccagagacatagaacgcatggtggaggcacgcctggcacgccgggtcctggcgcgttctgtggatttcgtgtcatctgcacacgtcagccacctccgtgactaccctacttactacacaagcctctgtgtcgacttcatgcgcaactgcgtccgctgctgaggccattgctccatctcacctctgctccagaaataaatgcctgacacctccccacaacctgcaatctgtcgggcactcttctcgttcaactccctgtagccctttgggactttgcggtcccctaagtagaaaattcctatgggcctgtctcctgggggcctctgtctgctggtggtctgcttaccacagaatcctaaggggcaggagtgcctgggcatgtgtctgtgggagccttgcagtcagttgtgtttggacaagtgcaacagtcaggctgctgattcctgtggcatgcaggctgtagaggttgacaaatggaggggggtgttgagggtgagccctagttgattttttaaaatttaaactctggtaagaacatttaatatgagacctactctctttttttctttacttatttatttatctatttatttcaagacagggtctcactctgtcacctaggctggggtgcaatggtgcaatcatggctcactgcagcctcaacctcccaggctcaagtgatcctcccacctcagcctcccaaagtgctaggattacaggcatgagtcaccgcgcctggccaagatcacctaacaaaattgtaagtgtgtacgatacttaaaatttaagagattatgtgcacggcagacctctagaactgaatagtcttgcatcttgcataattcagaacttcatcatcttgcataactgaaactt

SEQ ID NO: 280186 - DNA, 1476 bp, Homo sapiens
agactcggtggttgctaaggcgggaggtcacagagcgcggcgcagggattgggccgtgttgggggaggtgtgtggtgattgggcggcgcccaggaggcgcccgggtgaggcacgggtgcgcaagcgggagttccggctggagacccgtgctctgggccggcgccttcaccatggcctcggcagagctggactacaccatcgagatcccggatcagccctgctggagccagaagaacagccccagcccaggtgggaaggaggcagaaactcggcagcctgtggtgattctcttgggctggggtggctgcaaggacaagaaccttgccaagtacagtgccatctaccacaaaaggaagctgctcgagctgctctttgattatgagattgagaaggagcccctgctcttccatgtcttcagcaacggtggcgtcatgctgtaccgctacgtgctggagctcctgcagacccgtcgcttctgccgcctgcgtgtggtgggcaccatctttgacagcgctcctggtgacagcaacctggctacaggacgcgggctctcgctggcccgagctctacctctactcgagggctgacgaagtagtcctggccagagacatagaacgcatggtggaggcacgcctggcacgccgggtcctggcgcgttctgtggatttcgtgtcatctgcacacgtcagccacctccgtgactaccctacttactacacaagcctctgtgtcgacttcatgcgcaactgcgtccgctgctgaggccattgctccatctcacctctgctccagaaataaatgcctgacacctccccacaacctgcaatctgtcgggcactcttctcgttcaactccctgtagccctttgggactttgcggtcccctaagtagaaaattcctatgggcctgtctcctgggggcctctgtctgctggtggtctgcttaccacagaatcctaaggggcaggagtgcctgggcatgtgtctgtgggagccttgcagtcagttgtgtttggacaagtgcaacagtcaggctgctgattcctgtggcatgcaggctgtagaggttgacaaatggaggggggtgttgagggtgagccctagttgattttttaaaatttaaactctggtaagaacatttaatatgagacctactctctttttttctttacttatttatttatctatttatttcaagacagggtctcactctgtcacctaggctggggtgcaatggtgcaatcatggctcactgcagcctcaacctcccaggctcaagtgatcctcccacctcagcctcccaaagtgctaggattacaggcatgagtcaccgcgcctggccaagatcacctaacaaaattgtaagtgtgtacgatacttaaaatttaagagattatgtgcacggcagacctctagaactgaatagtcttgcatcttgcataattcagaacttcatcatcttgcataactgaaactt

SEQ ID NO: 280187 - DNA, 1450 bp, Homo sapiens
agactcggtggttgctaaggcgggaggtcacagagcgcggcgcagggattgggccgtgttgggggaggtgtgtggtgattgggcggcgcccaggaggcgcccgggtgaggcacgggtgcgcaagcgggagttccggctggagacccgtgctctgggccggcgccttcaccatggcctcggcagagctggactacaccatcgagatcccggatcagccctgctggagccagaagaacagccccagcccaggtgggaaggaggcagaaactcggcagcctgtggtgattctcttgggctggggtggctgcaaggacaagaaccttgccaagtacagtgccatctaccacaaaaggggctgcatcgtaatccgatacacagccccgtggcacatggtcttcttctccgagtcactgggtatcccttcacttcgtgttttggcccagaagctgctcgagctgctctttgattatgagattgagaaggagcccctgctcttccatgtcttcagcaacggtggcgtcatgctgtaccgctacgtgctggagctcctgcagacccgtcgcttctgccgcctgcgtgtggtgggcaccatctttgacagcgctcctggtgacagcaacctggtcttctgcatggcctcctgcttgctgctttcaccattgctggtggatggcatctctgctgggacagaggggcaactcacactccggccagactgggcagcacaggtgctaacgcggcttggctgtcaccttcaatgcatcacccgaagctgagagccccccttcgtcactcctagcttgcagcctcacaattccatttccccacccaaatacatccattttaatatgcacatcacaggcaggcagcacggtcacaaaggagccccaccagcagcagtccccacgtggtggaacggatggatgaccagccaccagcctcggcctcttggcttccagcagatggatacccagcagaggcctggcaccagagtgccaatgtctacgtgtcagctgcttgtacctcggaagccaccttccaggagagtggtggcccgtatccgcttctgtccacaccactcatactcctcaaagcggttgttgttctcatgctcgatgtccacagcatcatcctcagccatgcaggagccttccctctgtgaagagcagagcaggatcatgctgggcccaggccatccccacctgctccccacagtctgcaacgaaggcacagctctagccccagctgtggtgtgccaagtgggccctcagctctagggctcctttgaagcaaaccaatttagaggtcaaagacctgggcctcttcccaatagttttccgctggagcccaaggagggaatgagtgagagtgaaagcaaaaggagagagcagtggtcagaagggaagaagctgctgagaccacatggagaccccaagagcccacagattca

SEQ ID NO: 280188 - DNA, 953 bp, Homo sapiens
agactcggtggttgctaaggcgggaggtcacagagcgcggcgcagggattgggccgtgttgggggaggtgtgtggtgattgggcggcgcccaggaggcgcccgggtgaggcacgggtgcgcaagcgggagttccggctggagacccgtgctctgggccggcgccttcaccatggcctcggcagagctggactacaccatcgagatcccggatcagccctgctggagccagagtgctaacgcggcttggctgtcaccttcaatgcatcacccgaagctgagagccccccttcgtcactcctagcttgcagcctcacaattccatttccccacccaaatacatccattttaatatgcacatcacaggcaggcagcacggtcacaaaggagccccaccagcagcagtccccacgtggtggaacggatggatgaccagccaccagcctcggcctcttggcttccagcagatggatacccagcagaggcctggcaccagagtgccaatgtctacgtgtcagctgcttgtacctcggaagccaccttccaggagagtggtggcccgtatccgcttctgtccacaccactcatactcctcaaagcggttgttgttctcatgctcgatgtccacagcatcatcctcagccatgcaggagccttccctctgtgaagagcagagcaggatcatgctgggcccaggccatccccacctgctccccacagtctgcaacgaaggcacagctctagccccagctgtggtgtgccaagtgggccctcagctctagggctcctttgaagcaaaccaatttagaggtcaaagacctgggcctcttcccaatagttttccgctggagcccaaggagggaatgagtgagagtgaaagcaaaaggagagagcagtggtcagaagggaagaagctgctgagaccacatggagaccccaagagcccacagattca

SEQ ID NO: 280189 - DNA, 1058 bp, Homo sapiens
agactcggtggttgctaaggcgggaggtcacagagcgcggcgcagggattgggccgtgttgggggaggtgtgtggtgattgggcggcgcccaggaggcgcccgggtgaggcacgggtgcgcaagcgggagttccggctggagacccgtgctctgggccggcgccttcaccatggcctcggcagagctggactacaccatcgagatcccggatcagccctgctggagccagagtcttctgcatggcctcctgcttgctgctttcaccattgctggtggatggcatctctgctgggacagaggggcaactcacactccggccagactgggcagcacaggtgctaacgcggcttggctgtcaccttcaatgcatcacccgaagctgagagccccccttcgtcactcctagcttgcagcctcacaattccatttccccacccaaatacatccattttaatatgcacatcacaggcaggcagcacggtcacaaaggagccccaccagcagcagtccccacgtggtggaacggatggatgaccagccaccagcctcggcctcttggcttccagcagatggatacccagcagaggcctggcaccagagtgccaatgtctacgtgtcagctgcttgtacctcggaagccaccttccaggagagtggtggcccgtatccgcttctgtccacaccactcatactcctcaaagcggttgttgttctcatgctcgatgtccacagcatcatcctcagccatgcaggagccttccctctgtgaagagcagagcaggatcatgctgggcccaggccatccccacctgctccccacagtctgcaacgaaggcacagctctagccccagctgtggtgtgccaagtgggccctcagctctagggctcctttgaagcaaaccaatttagaggtcaaagacctgggcctcttcccaatagttttccgctggagcccaaggagggaatgagtgagagtgaaagcaaaaggagagagcagtggtcagaagggaagaagctgctgagaccacatggagaccccaagagcccacagattca

SEQ ID NO: 280190 - DNA, 1628 bp, Homo sapiens
agactcggtggttgctaaggcgggaggtcacagagcgcggcgcagggattgggccgtgttgggggaggtgtgtggtgattgggcggcgcccaggaggcgcccgggtgaggcacgggtgcgcaagcgggagttccggctggagacccgtgctctgggccggcgccttcaccatggcctcggcagagctggactacaccatcgagatcccggatcagccctgctggagccagaagaacagccccagcccaggtgggaaggaggcagaaactcggcagcctgtggtgattctcttgggctggggtggctgcaaggacaagaaccttgccaagtacagtgccatctaccacaaaaggaagctgctcgagctgctctttgattatgagattgagaaggagcccctgctcttccatgtcttcagcaacggtggcgtcatgctgtaccgctacgtgctggagctcctgcagacccgtcgcttctgccgcctgcgtgtggtgggcaccatctttgacagcgctcctggtgacagcaacctggtaggggctctgcgggccctggcagccatcctggagcgccgggccgccatgctgcgcctgttgctgctggtggcctttgccctggtggtcgtcctgttccacgtcctgcttgctcccatcacagccctcttccacacccacttctatgacaggctacaggacgcgggctctcgctggcccgagctctacctctactcgagggctgacgaagtagtcctggccagagacatagaacgcatggtggaggcacgcctggcacgccgggtcctggcgcgttctgtggatttcgtgtcatctgcacacgtcagccacctccgtgactaccctacttactacacaagcctctgtgtcgacttcatgcgcaactgcgtccgctgctgaggccattgctccatctcacctctgctccagaaataaatgcctgacacctccccacaacctgcaatctgtcgggcactcttctcgttcaactccctgtagccctttgggactttgcggtcccctaagtagaaaattcctatgggcctgtctcctgggggcctctgtctgctggtggtctgcttaccacagaatcctaaggggcaggagtgcctgggcatgtgtctgtgggagccttgcagtcagttgtgtttggacaagtgcaacagtcaggctgctgattcctgtggcatgcaggctgtagaggttgacaaatggaggggggtgttgagggtgagccctagttgattttttaaaatttaaactctggtaagaacatttaatatgagacctactctctttttttctttacttatttatttatctatttatttcaagacagggtctcactctgtcacctaggctggggtgcaatggtgcaatcatggctcactgcagcctcaacctcccaggctcaagtgatcctcccacctcagcctcccaaagtgctaggattacaggcatgagtcaccgcgcctggccaagatcacctaacaaaattgtaagtgtgtacgatacttaaaatttaagagattatgtgcacggcagacctctagaactgaatagtcttgcatcttgcataattcagaacttcatcatcttgcataactgaaactt

SEQ ID NO: 280191 - DNA, 1058 bp, Homo sapiens
agactcggtggttgctaaggcgggaggtcacagagcgcggcgcagggattgggccgtgttgggggaggtgtgtggtgattgggcggcgcccaggaggcgcccgggtgaggcacgggtgcgcaagcgggagttccggctggagacccgtgctctgggccggcgccttcaccatggcctcggcagagctggactacaccatcgagatcccggatcagccctgctggagccagaagaacagccccagcccaggtgggaaggaggcagaaactcggcagcctgtggtgattctcttgggctggggtggctgcaaggacaagaaccttgccaagtacagtgccatctaccacaaaaggggctgcatcgtaatccgatacacagccccgtggcacatggtcttcttctccgagtcactgggtatcccttcacttcgtgttttggcccagaagctgctcgagctgctctttgattatgagattgagaaggagcccctgctcttccatgtcttcagcaacggtggcgtcatgctgtaccgctacgtgctggagctcctgcagacccgtcgcttctgccgcctgcgtgtggtgggcaccatctttgacagcgctcctggtgacagcaacctggtaggggctctgcgggccctggcagccatcctggagcgccgggccgccatgctgcgcctgttgctgctggtggcctttgccctggtggtcgtcctgttccacgtcctgcttgctcccatcacagccctcttccacacccacttctatgacaggctacaggacgcgggctctcgctggcccgagctctacctctactcgagggctgacgaagtagtcctggccagagacatagaacgcatggtggaggcacgcctggcacgccgggtcctggcgcgttctgtggatttcgtgtcatctgcacacgtcagccacctccgtgactaccctacttactacacaagcctctgtgtcgacttcatgcgcaactgcgtccgctgctgaggccattgctccatctcacctctgctccagaaataaatgcctgacacctcccca

SEQ ID NO: 280192 - DNA, 1180 bp, Homo sapiens
agactcggtggttgctaaggcgggaggtcacagagcgcggcgcagggattgggccgtgttgggggaggtgtgtggtgattgggcggcgcccaggaggcgcccgggtgaggcacgggtgcgcaagcgggagttccggctggagacccgtgctctgggccggcgccttcaccatggcctcggcagagctggactacaccatcgagatcccggatcagccctgctggagccagaagaacagccccagcccaggtgggaaggaggcagaaactcggcagcctgtggtgattctcttgggctggggtggctgcaaggacaagaaccttgccaagtacagtgccatctaccacaaaagggtcttctgcatggcctcctgcttgctgctttcaccattgctggtggatggcatctctgctgggacagaggggcaactcacactccggccagactgggcagcacaggtgctaacgcggcttggctgtcaccttcaatgcatcacccgaagctgagagccccccttcgtcactcctagcttgcagcctcacaattccatttccccacccaaatacatccattttaatatgcacatcacaggcaggcagcacggtcacaaaggagccccaccagcagcagtccccacgtggtggaacggatggatgaccagccaccagcctcggcctcttggcttccagcagatggatacccagcagaggcctggcaccagagtgccaatgtctacgtgtcagctgcttgtacctcggaagccaccttccaggagagtggtggcccgtatccgcttctgtccacaccactcatactcctcaaagcggttgttgttctcatgctcgatgtccacagcatcatcctcagccatgcaggagccttccctctgtgaagagcagagcaggatcatgctgggcccaggccatccccacctgctccccacagtctgcaacgaaggcacagctctagccccagctgtggtgtgccaagtgggccctcagctctagggctcctttgaagcaaaccaatttagaggtcaaagacctgggcctcttcccaatagttttccgctggagcccaaggagggaatgagtgagagtgaaagcaaaaggagagagcagtggtcagaagggaagaagctgctgagaccacatggagaccccaagagcccacagattca

SEQ ID NO: 280193 - DNA, 1307 bp, Homo sapiens
caggctgtaccggccgaagtcttagatcctggacagggctgcggtaggccagcggtgggctggcggttgcgctcctcagatcggcggcctttcgggcggtggcttgcgtttgagcctcagaaagcgaggagcggcctccacggaagccaagctggccgagtgcttttaggaagaagatccttttattgcttttgtacaagaccagacaggatctcatttgttaaacgtggtaccaattgggtgtcttaacacaggagcagaacttcctagagcagaatgatgatggtagatctgaaagtggctgcgtacttggaccctcagatcagggctttgtgggagaccaaggggcctgcaagagagagctccggtcagagtaaaaaatctcctcaaatggactgtctcgatcctaagagctcttgctggcacttccggaatttcacctatgatgaagcaggtggaccccgtgaggctgtcagcaaacttcaagaattatgtcatctatggctgaagccagagatccactcaaaagagcagatactggaactgctggtgctggagcagttcctgactattctgcccagggagacacagacccagatgcagaagcaccatccacagagcattgaggaggctgtggctctggtagaacacttgcagagggaatctggtcaaacatggaatggggtgagaagaaagattcctgacatgtacagtgaaataggatgcaggtggatatagtagagatggtggcagttagttgagaaattagatggattaggtaggtcattgttggttttcttcttaaggacagttaaggtgggacttgaaactacaggcccacagaaaagttcacaggtttcagagattgtggtagatacttccctggccttagagaaagagagttgcttttgccctctttggagccagggtgaattgagggtgttgggcctagtctggcttggccaaggagacaggacttaagtacttagaaacagaataaaaggtaataaagagtcagggaggctggatgcagtggctcacacctgtaatctcagcactttaggaggctgaggcgggtagatcacctgaggtcaggagttcaagaccagcctggacagcatggtggaaccctctctctacaaaaataaacaaattagctgggcatgatgaccggtgcctgtaatcccggctatcctcgaggctgaggagggagaatcatttgaacctgggaggttgcagtgagccgagatcgcaccattgcactccagcctgggcaacacagcaagactccatctcacaaaaaaaaa

SEQ ID NO: 280194 - DNA, 978 bp, Homo sapiens
tgtcccgctcggggctggaatccgcccgggaggcgcgcgcaggccgcgcagccagaagccgcagccgggaccggctgtgccgcagcggcgcgcgccccccgccccggaccgcgcggccacgcggctgagtcacccagcgcttcacgttaagagtcccctccgcgcgtggcacgccgggaaggccgtgtctggggaccccgtccggggccgcaccgtaaatgggtgtcgcctttcctccagtccactctgcacccaacctcagcgggcgcacttttctgagttgcgcataccctctcaattattaaaggttgcagacggaaaagttagtagttttcggaattgtagaatacgctcgtgcagcgccaggacggctaatgcttacccgaaaatgtggaaccctgatctccccatgcgtggagcgaggttggaggtagcgtagtaagaatactggagttgcttaaacgcatttgctcgaaagtcactaccctggatatacattctggccaaaagaaagggggaaaaactccacatttttctcaaatactgagtttcatgaagagaacctccaacaaatggtatataaaggaaaacaaagcaaacaaaagagggaaactttgcaatttattaactcaagcatgaaaatacagaaaataaagagggctcaacatacttggaaaaggaaaaaacatgaagaaaaaacatgatggcattgtttatgaaactaaagaagttctcaatccatctcccaaagtaacacattgttgcaaatcactgtggttaaaatacagttttcagaaggcatacatgacccaacttgtcagctcccagccagttccagccatgtcaaggaacccagatcataatctactttctcagcccaaggagcatagcattgttcagaagcatcaccaggaggaaataattcacaagttggccatgcagctgagacacattggggacaacattgatcataggatg

SEQ ID NO: 280195 - DNA, 395 bp, Homo sapiens
ggcaggcctggaggccgtactgggacctggccaaagacccagaagtccagctttgaagaaaacctggagaaagagagagtcacaaatcatctccatactgcaggagatgcagaaatggcagaagggtagaatacacaataattacagagggaaatgaccaaagatgtcacattttgtgcctgtcttcagtcattccatggcatcaggacatgatcactcttcacttatgacttttgtgtgaacctcccggctcttcacccgcagtttgttcacctgggactcagcaatgtcagcccgttcctcggcctcctccagctcatgctggagcttgcggaatttagctagattggtgttggattgttcctcctgagaataaaaatggaattgtaaggaaa

SEQ ID NO: 280196 - DNA, 2911 bp, Homo sapiens
agcggttgggatttgaatctgccgcggactgcagccggaagtgtcgatccctcagccagggcatggagctctcctgccccggttcgcggtgcccggtgcaagagcagcgtgcccgctgggagcggaaacgcgcctgcaccgcccgggagctgctagagaccgagcggcgctaccaagaacagctggggctggtggccacgtactttttggggatcctgaaagccaaggggaccctgcgaccacctgagcgccaggccctgtttggctcctgggagctcatctacggcgccagccaggagctgcttccctacctggaaggaggatgctggggccaagggctggagggcttctgccgccacttggagctctataaccaatttgctgccaactcagagaggtcccagaccaccctgcaggagcagctaaagaaaaataaaggtttccggaggtttgtacggcttcaggaaggccgccctgagtttgggggccttcagctccaggacctgctccctctgcctctgcaacggctccagcagtatgagaatctcgtcgtagctttggctgaaaacacaggtcccaacagccctgaccatcaacagctcacacctgtccttccctcatgagaagctactgcttatgtccacagaccaggaggagctgtcacgctggtaccacagtctgacttgggctatcagcagccagaaaaactagaggaatcttatagattccagaactcaggatacctcagggataggtcacagccaagagtacaaaggaatcttcagtactgaacaaaacagaacccttcatgatttgacaaaggtcactttctgtttgcctggaccaagctactccagatcatctgaccaactcttaaaaatcacggccaggcacagtggctcatgcctgtaatcccagcactttgggaagcagaggtggcaggatcattccagcccaggagttcaagaccagcctgggcaacacagtgagtgagaccctgtctctatttaagaaaaaataattaagaaattttattaaaaaagaagaatcaggaaaccaagtccaacccaactaaacctcaaatgaaccagcccctaacacagatgaggggatttgggactgataagctctgtgctgtgtccatggcccgtcatttatcaaggctgcagctttgtaaatgtggctatttttatgttgtgtatagtttctatcatttatttttccactggatttgagtaaagttttttttcttttttttgggaaagacccttctgtctcagttttgctatgagaaaagggatttttgggccctgaacgcgggcatgctggtggcctcaggaatacgaggaaaagagctggagctccctctatcttctctgctgtcacactggaaggcagcctctttttgtcctaataaggacagctcttcaagaaggcccagttgtccttaggcacctagtatgggtgtgtacaaccaactaggatcgaaaaaacacacaggagcactccatcatgaaaacagactttgttttagtcgaccttcagctgtcgtccctccttcccagccaaggctgtgactggggccctttgccacagcctggctgcaccttctccgtagtccccgccccacctcccaggaagtagctaggttccatgtctctgtgctccagtttgtgggctcctcccaggcctgactgtcaccaacctcctcctcgtcctcctttaaacagaagtcctcaggaagaggtctgctggcctctgtgtggggagagatcaggaatgttccagtttcagagactttgtctccacctccagcagactcgcctcccgagccttcacctggttctgaagcctccatatccttgtccggcttgctatcttgcagcagctcgtggatggtccatagcttcatgttcagaagctcctgctgggctccagccagagtagtcacactgaagaaatgtccactcagtggctcccaacctatgtccccattcctccctcctgccacaaattccccaaaaattcacagaatcattgctctcctcaccgctcaaaaagggggtccagctgggccatcaggttgttcaggtgctgctctgtctgggccagctgttgtgtcaactgggccagctgttgctctggggataagggaaaaaagggggcagaagtggttatgtatcttctgctgtcccctaaactcccccgacccagcacagacttctgctaaacccacctgactgcagtggctgctgcttgcttgcctcctcgtggagaaccgcagtttcatctttcccctgttgtggaagaaggaaagggcagtactgaagcaacaaggttctgctccatcacctcagtctccagagccagccaagagagagtgcaatttgagatggagacagtgattgggtttttacctcagagaatcacaatcctagtctatctagctcctcacccagcatatgaagcgacgtcctatgtcccacacatggtcagtttgctgaaacacctccaggaatgagcaactccctccggtttgaaaaaagctctggtggctgagtgctgtggctcacacctgtaatcccagcacttcgggaagccaagggcctcctcccaaggagaacatgagaccacttcatatctggaactctagaaacactggctgcagcaatcaacctcctgtgccaaggctggccccactcttgtagcatggacactgctagctgggttcaaatcccagctccagcagttgccagcgctgggtgacctcgagcaagtgactactcctcactggattgtaggagaactaaatgtgatagtcattatttacagttcaccacacgctcttcacatccgttacctccctggatcctcaaaataacctcataatattggaaggccaaaaaaaaaa

SEQ ID NO: 280197 - DNA, 445 bp, Homo sapiens
ctatctcttctagtttcatatatctaaactggttccatcggttctattttataatgcaagtacgtaatagggtcacggctaaagacacagccctggaaggtactgtttttcaaaatgtactgtcaacttacatttcagggcctcctcccaaggagaacatgagaccacttcatatctggaactctagaaacactggctgcagcaatcaacctcctgtgccaaggctggccccactcttgtagcatggacactgctagctgggttcaaatcccagctccagcagttgccagcgctgggtgacctcgagcaagtgactactcctcactggattgtaggagaactaaatgtgatagtcattatttacagttcaccacacgctcttcacatccgttacctccctggatcctcaaaataacctcataatattggaaggccaaaaaaaaaa

SEQ ID NO: 280198 - DNA, 2511 bp, Homo sapiens
agcggttgggatttgaatctgccgcggactgcagccggaagtgtcgatccctcagccagggcatggagctctcctgccccggttcgcggtgcccggtgcaagagcagcgtgcccgctgggagcggaaacgcgcctgcaccgcccgggagctgctagagaccgagcggcgctaccaagaacagctggggctggtggccacgtactttttggggatcctgaaagccaaggggaccctgcgaccacctgagcgccaggccctgtttggctcctgggagctcatctacggcgccagccaggagctgcttccctacctggaaggaggatgctggggccaagggctggagggcttctgccgccacttggagctctataaccaatttgctgccaactcagagaggtcccagaccaccctgcaggagcagctaaagaaaaataaaggtttccggaggtttgtacggcttcaggaaggccgccctgagtttgggggccttcagctccaggacctgctccctctgcctctgcaacggctccagcagtatgagaatctcgtcgtagctttggctgaaaacacaggtcccaacagccctgaccatcaacagctcacacgggctgcccgactgataagtgagactgcccagagagtccatactattggtcagaaacagaagaatgaccagcaccttcggcgtgtccaggctctgctcagtggacgccaggcaaaggggctgacctcagggcgctggttcctacgccagggctggctgttagtggtgcctccccatggggagcctcggccccgcatgttcttcctcttcactgatgtgctcctcatggccaagcctcggcctccactgcacctgctgcggagtggcacctttgcctgcaaggccctctaccccatggcccagtgtcatctcagcagggtctttggccactcaggaggcccttgtgctgtccttccctcatgagaagctactgcttatgtccacagaccaggaggagctgtcacgctggtaccacagtctgacttgggctatcagcagccagaaaaactagaggaatcttatagattccagaactcaggatacctcagggataggtcacagccaagagtacaaaggaatcttcagtactgaacaaaacagaacccttcatgatttgacaaaggtcactttctgtttgcctggaccaagctactccagatcatctgaccaactcttaaaaatcacggccaggcacagtggctcatgcctgtaatcccagcactttgggaagcagaggtggcaggatcattccagcccaggagttcaagaccagcctgggcaacacaaagtcctcaggaagaggtctgctggcctctgtgtggggagagatcaggaatgttccagtttcagagactttgtctccacctccagcagactcgcctcccgagccttcacctggttctgaagcctccatatccttgtccggcttgctatcttgcagcagctcgtggatggtccatagcttcatgttcagaagctcctgctgggctccagccagagtagtcacactgaagaaatgtccactcagtggctcccaacctatgtccccattcctccctcctgccacaaattccccaaaaattcacagaatcattgctctcctcaccgctcaaaaagggggtccagctgggccatcaggttgttcaggtgctgctctgtctgggccagctgttgtgtcaactgggccagctgttgctctggggataagggaaaaaagggggcagaagtggttatgtatcttctgctgtcccctaaactcccccgacccagcacagacttctgctaaacccacctgactgcagtggctgctgcttgcttgcctcctcgtggagaaccgcagtttcatctttcccctgttgtggaagaaggaaagggcagtactgaagcaacaaggttctgctccatcacctcagtctccagagccagccaagagagagtgcaatttgagatggagacagtgattgggtttttacctcagagaatcacaatcctagtctatctagctcctcacccagcatatgaagcgacgtcctatgtcccacacatggtcagtttgctgaaacacctccaggaatgagcaactccctccggtttgaaaaaagctctggtggctgagtgctgtggctcacacctgtaatcccagcacttcgggaagccaagggcctcctcccaaggagaacatgagaccacttcatatctggaactctagaaacactggctgcagcaatcaacctcctgtgccaaggctggccccactcttgtagcatggacactgctagctgggttcaaatcccagctccagcagttgccagcgctgggtgacctcgagcaagtgactactcctcactggattgtaggagaactaaatgtgatagtcattatttacagttcaccacacgctcttcacatccgttacctccctggatcctcaaaataacctcataatattggaaggccaaaaaaaaaa

SEQ ID NO: 280199 - DNA, 1644 bp, Homo sapiens
attagtctaggtacgaggctgggtgtgaagggatttttgggccctgaacgcgggcatgctggtggcctcaggaatacgaggaaaagagctggagctccctctatcttctctgctgtcacactggaaggcagcctctttttgtcctaataaggacagctcttcaagaaggcccagttgtccttaggcacctagtatgggtgtgtacaaccaactaggatcgaaaaaacacacaggagcactccatcatgaaaacagactttgttttagtcgaccttcagctgtcgtccctccttcccagccaaggctgtgactggggccctttgccacagcctggctgcaccttctccgtagtccccgccccacctcccaggaagtagctaggttccatgtctctgtgctccagtttgtgggctcctcccaggcctgactgtcaccaacctcctcctcgtcctcctttaaacagaagtcctcaggaagaggtctgctggcctctgtgtggggagagatcaggaatgttccagtttcagagactttgtctccacctccagcagactcgcctcccgagccttcacctggttctgaagcctccatatccttgtccggcttgctatcttgcagcagctcgtggatggtccatagcttcatgttcagaagctcctgctgggctccagccagagtagtcacactgaagaaatgtccactcagtggctcccaacctatgtccccattcctccctcctgccacaaattccccaaaaattcacagaatcattgctctcctcaccgctcaaaaagggggtccagctgggccatcaggttgttcaggtgctgctctgtctgggccagctgttgtgtcaactgggccagctgttgctctggggataagggaaaaaagggggcagaagtggttatgtatcttctgctgtcccctaaactcccccgacccagcacagacttctgctaaacccacctgactgcagtggctgctgcttgcttgcctcctcgtggagaaccgcagtttcatctttcccctgttgtggaagaaggaaagggcagtactgaagcaacaaggttctgctccatcacctcagtctccagagccagccaagagagagtgcaatttgagatggagacagtgattgggtttttacctcagagaatcacaatcctagtctatctagctcctcacccagcatatgaagcgacgtcctatgtcccacacatggtcagtttgctgaaacacctccaggaatgagcaactccctccggtttgaaaaaagctctggtggctgagtgctgtggctcacacctgtaatcccagcacttcgggaagccaagggcctcctcccaaggagaacatgagaccacttcatatctggaactctagaaacactggctgcagcaatcaacctcctgtgccaaggctggccccactcttgtagcatggacactgctagctgggttcaaatcccagctccagcagttgccagcgctgggtgacctcgagcaagtgactactcctcactggattgtaggagaactaaatgtgatagtcattatttacagttcaccacacgctcttcacatccgttacctccctggatcctcaaaataacctcataatattggaaggccaaaaaaaaaa

SEQ ID NO: 280200 - DNA, 426 bp, Homo sapiens
gtatgagaatctcgtcgtagctttggctgaaaacacaggtcccaacagccctgaccatcaacagctcacacgtaggttcttgctcctcggcaacgcaggctggaggcttcctctcctgtattcctttctgattctgacctccaacaatgtctggtatgaccctatcttccactgacatgtatacagtgtccctactgctctgccttttcttcaagaagtcagaccctgaccctggtcccttccagaataacctctttcacaaccatggcacccaaagtcaaagttgtatggggagtaaggtgggagatgttattccaggggctgcccgactgataagtgagactgcccagagagtccatactattggtcagaaacagaagaatgaccagcaccttcggcgtgtccaggctctgctcagtggacgcc

SEQ ID NO: 280201 - DNA, 3705 bp, Homo sapiens
agcggttgggatttgaatctgccgcggactgcagccggaagtgtcgatccctcagccagggcatggagctctcctgccccggttcgcggtgcccggtgcaagagcagcgtgcccgctgggagcggaaacgcgcctgcaccgcccgggagctgctagagaccgagcggcgctaccaagaacagctggggctggtggccacgtactttttggggatcctgaaagccaaggggaccctgcgaccacctgagcgccaggccctgtttggctcctgggagctcatctacggcgccagccaggagctgcttccctacctggaaggaggatgctggggccaagggctggagggcttctgccgccacttggagctctataaccaatttgctgccaactcagagaggtcccagaccaccctgcaggagcagctaaagaaaaataaaggtttccggaggtttgtacggcttcaggaaggccgccctgagtttgggggccttcagctccaggacctgctccctctgcctctgcaacggctccagcagtatgagaatctcgtcgtagctttggctgaaaacacaggtcccaacagccctgaccatcaacagctcacacgggctgcccgactgataagtgagactgcccagagagtccatactattggtcagaaacagaagaatgaccagcaccttcggcgtgtccaggctctgctcagtggacgccaggcaaaggggctgacctcagggcgctggttcctacgccagggctggctgttagtggtgcctccccatggggagcctcggccccgcatgttcttcctcttcactgatgtgctcctcatggccaagcctcggcctccactgcacctgctgcggagtggcacctttgcctgcaaggccctctaccccatggcccagtgtcatctcagcagggtctttggccactcaggaggcccttgtgctgtccttccctcatgagaagctactgcttatgtccacagaccaggaggagctgtcacgctggtaccacagtctgacttgggctatcagcagccagaaaaactagaggaatcttatagattccagaactcaggatacctcagggataggtcacagccaagagtacaaaggaatcttcagtactgaacaaaacagaacccttcatgatttgacaaaggtcactttctgtttgcctggaccaagctactccagatcatctgaccaactcttaaaaatcacggccaggcacagtggctcatgcctgtaatcccagcactttgggaagcagaggtggcaggatcattccagcccaggagttcaagaccagcctgggcaacacagtgagtgagaccctgtctctatttaagaaaaaataattaagaaattttattaaaaaagaagaatcaggaaaccaagtccaacccaactaaacctcaaatgaaccagcccctaacacagatgaggggatttgggactgataagctctgtgctgtgtccatggcccgtcatttatcaaggctgcagctttgtaaatgtggctatttttatgttgtgtatagtttctatcatttatttttccactggatttgagtaaagttttttttcttttttttgggaaagacccttctgtctcagttttgctatgagaaaagggatttttgggccctgaacgcgggcatgctggtggcctcaggaatacgaggaaaagagctggagctccctctatcttctctgctgtcacactggaaggcagcctctttttgtcctaataaggacagctcttcaagaaggcccagttgtccttaggcacctagtatgggtgtgtacaaccaactaggatcgaaaaaacacacaggagcactccatcatgaaaacagactttgttttagtcgaccttcagctgtcgtccctccttcccagccaaggctgtgactggggccctttgccacagcctggctgcaccttctccgtagtccccgccccacctcccaggaagtagctaggttccatgtctctgtgctccagtttgtgggctcctcccaggcctgactgtcaccaacctcctcctcgtcctcctttaaacagaagtcctcaggaagaggtctgctggcctctgtgtggggagagatcaggaatgttccagtttcagagactttgtctccacctccagcagactcgcctcccgagccttcacctggttctgaagcctccatatccttgtccggcttgctatcttgcagcagctcgtggatggtccatagcttcatgttcagaagctcctgctgggctccagccagagtagtcacactgaagaaatgtccactcagtggctcccaacctatgtccccattcctccctcctgccacaaattccccaaaaattcacagaatcattgctctcctcaccgctcaaaaagggggtccagctgggccatcaggttgttcaggtgctgctctgtctgggccagctgttgtgtcaactgggccagctgttgctctggggataagggaaaaaagggggcagaagtggttatgtatcttctgctgtcccctaaactcccccgacccagcacagacttctgctaaacccacctgactgcagtggctgctgcttgcttgcctcctcgtggagaaccgcagtttcatctttcccctgttgtggaagaaggaaagggcagtactgaagcaacaaggttctgctccatcacctcagtctccagagccagccaagagagagtgcaatttgagatggagacagtgattgggtttttacctcagagaatcacaatcctagtctatctagctcctcacccagcatatgaagcgacgtcctatgtcccacacatggtcagtttgctgaaacacctccaggaatgagcaactccctccggtttgaaaaaagctctggtggctgagtgctgtggctcacacctgtaatcccagcacttcgggaagccaagaaggtgggtggatcacctgaggtcaggagtttgagaccagcctggccaacacggtgaaaccctgtctctattaaaaatacaaaaattagccgggcgtggtggcaggtgcctgtaatcccagttacttgagaggctgaggcaggagaatcgcttgaacctgggagccagaggttgcagtgagccgagattgcgccgctgcactccagcctgggtgacagagcgagactccatctcgaaaaaaacaaaaactttggttgttagacagttcatgcacaaagccaaaatttgtcctttatgtatcttctttccatagtgcttactggagccttccaaaataatgtctcctcaaggtgacagcccctcaggaatttgaaggcaatggtcacaccctcacccactttcctgagttttttctggtttattaacgtcagtctttacagtcagtgctcattgacggtggttttctctggttgtttcctgaacacgtagtgctcttaaagcaatgccctgaggagaatacaattctccaggggcattctgattggcaggtgaagcacagtgccatgttcccagcactgatttgggaagtggcttgtcacatcccacagtgaactcagtcaactggaatgcctaactctctttcataagacctcctgctacattatgtttctcccagactgtactcaggtccaagaacagaatttactagtctatccttctcaaagttcatcattaaattcagtcattcatcctagc

SEQ ID NO: 280202 - DNA, 2394 bp, Homo sapiens
agcggttgggatttgaatctgccgcggactgcagccggaagtgtcgatccctcagccagggcatggagctctcctgccccggttcgcggtgcccggtgcaagagcagcgtgcccgctgggagcggaaacgcgcctgcaccgcccgggagctgctagagaccgagcggcgctaccaagaacagctggggctggtggccacgtactttttggggatcctgaaagccaaggggaccctgcgaccacctgagcgccaggccctgtttggctcctgggagctcatctacggcgccagccaggagctgcttccctacctggaaggaggatgctggggccaagggctggagggcttctgccgccacttggagctctataaccaatttgctgccaactcagagaggtcccagaccaccctgcaggagcagctaaagaaaaataaaggtttccggaggtttgtacggcttcaggaaggccgccctgagtttgggggccttcagctccaggacctgctccctctgcctctgcaacggctccagcagtatgagaatctcgtcgtagctttggctgaaaacacaggtcccaacagccctgaccatcaacagctcacacgggctgcccgactgataagtgagactgcccagagagtccatactattggtcagaaacagaagaatgaccagcaccttcggcgtgtccaggctctgctcagtggacgccaggcaaaggggctgacctcagggcgctggttcctacgccagggctggctgttagtggtgcctccccatggggagcctcggccccgcatgttcttcctcttcactgatgtgctcctcatggccaagcctcggcctccactgcacctgctgcggagtggcacctttgcctgcaaggccctctaccccatggcccagtgtcatctcagcagggtctttggccactcaggaggcccttgtgctgtccttccctcatgagaagctactgcttatgtccacagaccaggaggagctgtcacgctggtaccacagtctgacttgggctatcagcagccagaaaaactagaggaatcttatagattccagaactcaggatacctcagggataggtcacagccaagagtacaaaggaatcttcagtactgaacaaaacagaacccttcatgatttgacaaaggtcactttctgtttgcctggaccaagctactccagatcatctgaccaactcttaaaaatcacggccaggcacagtggctcatgcctgtaatcccagcactttgggaagcagaggtggcaggatcattccagcccaggagttcaagaccagcctgggcaacacaaagtcctcaggaagaggtctgctggcctctgtgtggggagagatcaggaatgttccagtttcagagactttgtctccacctccagcagactcgcctcccgagccttcacctggttctgaagcctccatatccttgtccggcttgctatcttgcagcagctcgtggatggtccatagcttcatgttcagaagctcctgctgggctccagccagagtagtcacactgaagaaatgtccactcagtggctcccaacctatgtccccattcctccctcctgccacaaattccccaaaaattcacagaatcattgctctcctcaccgctcaaaaagggggtccagctgggccatcaggttgttcaggtgctgctctgtctgggccagctgttgtgtcaactgggccagctgttgctctggggataagggaaaaaagggggcagaagtggttatgtatcttctgctgtcccctaaactcccccgacccagcacagacttctgctaaacccacctgactgcagtggctgctgcttgcttgcctcctcgtggagaaccgcagtttcatctttcccctgttgtggaagaaggaaagggcagtactgaagcaacaaggttctgctccatcacctcagtctccagagccagccaagagagagtgcaatttgagatggagacagtgattgggtttttacctcagagaatcacaatcctagtctatctagctcctcacccagcatatgaagcgacgtcctatgtcccacacatggtcagtttgctgaaacacctccaggaatgagcaactccctccggtttgaaaaaagctctggtggctgagtgctgtggctcacacctgtaatcccagcacttcgggaagccaaggctgagacaggagaatcacgggaacctgggaggtggaggttgcagtaagccgaaatcgtgccactgcactccagcctgggcaaacgagtgagacaccgcctcagaaaaacaaaacaaaaacaaaacctgccttctgggattgggcttctggttttttgcccatgacacacacatcctttcctattttgtg

SEQ ID NO: 280203 - DNA, 1658 bp, Homo sapiens
agcggttgggatttgaatctgccgcggactgcagccggaagtgtcgatccctcagccagggcatggagctctcctgccccggttcgcggtgcccggtgcaagagcagcgtgcccgctgggagcggaaacgcgcctgcaccgcccgggagctgctagagaccgagcggcgctaccaagaacagctggggctggtggccacgtactttttggggatcctgaaagccaaggggaccctgcgaccacctgagcgccaggccctgtttggctcctgggagctcatctacggcgccagccaggagctgcttccctacctggaaggaggatgctggggccaagggctggagggcttctgccgccacttggagctctataaccaatttgctgccaactcagagaggtcccagaccaccctgcaggagcagctaaagaaaaataaaggtttccggaggtttgtacggcttcaggaaggccgccctgagtttgggggccttcagctccaggacctgctccctctgcctctgcaacggctccagcagtatgagaatctcgtcgtagctttggctgaaaacacaggtcccaacagccctgaccatcaacagctcacacgggctgcccgactgataagtgagactgcccagagagtccatactattggtcagaaacagaagaatgaccagcaccttcggcgtgtccaggctctgctcagtggacgccaggcaaaggggctgacctcagggcgctggttcctacgccagggctggctgttagtggtgcctccccatggggagcctcggccccgcatgttcttcctcttcactgatgtgctcctcatggccaagcctcggcctccactgcacctgctgcggagtggcacctttgcctgcaaggccctctaccccatggcccagtgtcatctcagcagggtctttggccactcaggaggcccttgtgctgtccttccctcatgagaagctactgcttatgtccacagaccaggaggagctgtcacgctggtaccacagtctgacttgggctatcagcagccagaaaaactagaggaatcttatagattccagaactcaggatacctcagggataggtcacagccaagagtacaaaggaatcttcagtactgaacaaaacagaacccttcatgatttgacaaaggtcactttctgtttgcctggaccaagctactccagatcatctgaccaactcttaaaaatcacggccaggcacagtggctcatgcctgtaatcccagcactttgggaagcagaggtggcaggatcattccagcccaggagttcaagaccagcctgggcaacacagtgagtgagaccctgtctctatttaagaaaaaataattaagaaattttattaaaaaagaagaatcaggaaaccaagtccaacccaactaaacctcaaatgaaccagcccctaacacagatgaggggatttgggactgataagctctgtgctgtgtccatggcccgtcatttatcaaggctgcagctttgtaaatgtggctatttttatgttgtgtatagtttctatcatttatttttccactggatttgagtaaagttttttttcttttttttttttttttttttttttttttttttttttttttttttttttttttttttatttttt

SEQ ID NO: 280204 - DNA, 1307 bp, Homo sapiens
ttgacccagcctcaccaggccgggcccctctgctcaggaccaggccccaccccagtgccgccctgaggcctggcaggggcctctggagcccgcacacccctctccttggcagccccctccatcctgggcccttcgtctttcccacaggtgtgtccctcaggactttgcagccagggtgtggccggccgcaggtttcggatgcaggcggccggatcgtggggggtcacgctgccccggccggcgcatggccatggcaggccagcctccgcctgcggaggatgcacgtgtgcggcgggtcactgctcagcccccagtgggtgctcacagctgcccactgcttctccgggtccctgaactcatccgactaccaggtgcacctgggggaactggagatcactttgtctccccacttctccaccgtgaggcagatcatcctgcactccagcccctcaggacagccggggaccaccggatcctgcccgtctgcctcccggaggcctcagatgacttctgccctgggatccggtgctcggtgaccggctggggctatacgcgggagggagagcctctgccacccccgtacagcctgcgggaggtgaaagtctccgtggtggacacagagacctgccgccgggactatcccggccccgggggcagcatccttcagcccgacatgctgtgtgcccggggccccggggatgcctgccaggacgactccggggggcctctggtctgccaggtgaacggtgcctgggtgcaggctggcattgtgagctggggtgagggctgcggccgccccaacaggccgggagtctacactcgtgtccctgcctacgtgaactggatccgccgccacatcacagcatcagggggctcagagtctgggtaccccaggctccccctcctggctggcttcttcctccccggcctcttccttctgctagtctcctgtgtcctgctggccaagtgcctgctgcacccatctgcggatggtactcccttccccgcccctgactgatggcaggaatccaagtgcatttcttaaataagttactatttattccgctccgccccctccctctcccttgagaagctgagtcttctgcatcagattattgcaacatttaacctgaatttaaaagcacacgaaacaaaggtgtcaatgggaatctcgcggccaacgcccccagatgtaggggaggcctgatacgcatcggggccgggcgcgttactccatggggtcggccccttagtgaggtgtcacctctcccagagtcacaggacgcttctgggaaggcccgagcgga

SEQ ID NO: 280205 - DNA, 1154 bp, Homo sapiens
ttgacccagcctcaccaggccgggcccctctgctcaggaccaggccccaccccagtgccgccctgaggcctggcaggggcctctggagcccgcacacccctctccttggcagccccctccatcctgggcccttcgtctttcccacaggtgtgtccctcaggactttgcagccagggtgtggccggccgcaggtttcggatgcaggcggccggatcgtggggggtcacgctgccccggccggcgcatggccatggcaggccagcctccgcctgcggaggatgcacgtgtgcggcgggtcactgctcagcccccagtgggtgctcacagctgcccactgcttctccgggtccctgaactcatccgactaccaggtgcacctgggggaactggagatcactttgtctccccacttctccaccgtgaggcagatcatcctgcactccagcccctcaggacagccggggaccaccggatcctgcccgtctgcctcccggaggcctcagatgacttctgccctgggatccggtgctcggtgaccggctggggctatacgcgggagggagagcctctgccacccccgtacagcctgcgggaggtgaaagtctccgtggtggacacagagacctgccgccgggactatcccggccccgggggcagcatccttcagcccgacatgctgtgtgcccggggccccggggatgcctgccaggacgactccggggggcctctggtctgccaggtgaacggtgcctgggtgcaggctggcattgtgagctggggtgagggctgcggccgccccaacaggccgggagtctacactcgtgtccctgcctacgtgaactggatccggttccagcgtccactccgacagccactgcaggcaggggccctctgccctctgccgggagggcctgcaatgaattacatgtgattggccacatacaaagggatcgctgttctgcgagcagggagccagcctgtcagattgcctccgcgagcagtcacgaatccagggcaaaactgcagctgacatttaattcaaaaatcaaaggttgttcaatgtagggggaaaaaaagccatgctactgtaataagggaagccagcaggaggctctgcgggaaggaagggaattttaaaatcggccctcgtgccg

SEQ ID NO: 280206 - DNA, 1332 bp, Homo sapiens
ccgggcaggtattcaagtgattctcccatctcggtctcctgagtagctgggactacaggtgcatgccactaagccccatggcccttggggcctgtggcctcctgctgctcctggctgtgcccggtgtgtccctcaggactttgcagccagggtgtggccggccgcaggtttcggatgcaggcggccggatcgtggggggtcacgctgccccggccggcgcatggccatggcaggccagcctccgcctgcggaggatgcacgtgtgcggcgggtcactgctcagcccccagtgggtgctcacagctgcccactgcttctccgggtccctgaactcatccgactaccaggtgcacctgggggaactggagatcactttgtctccccacttctccaccgtgaggcagatcatcctgcactccagcccctcaggacagccggggaccagcggggacatcgccctggtggagctcagtgtccccgtgaccctctccagccggatcctgcccgtctgcctcccggaggcctcagatgacttctgccctgggatccggtgctcggtgaccggctggggctatacgcgggagggagagcctctgccacccccgtacagcctgcgggaggtgaaagtctccgtggtggacacagagacctgccgccgggactatcccggccccgggggcagcatccttcagcccgacatgctgtgtgcccggggccccggggatgcctgccaggacgactccggggggcctctggtctgccaggtgaacggtgcctgggtgcaggctggcattgtgagctggggtgagggctgcggccgccccaacaggccgggagtctacactcgtgtccctgcctacgtgaactggatccgccgccacatcacagcatcagggggctcagagtctgggtaccccaggctccccctcctggctggcttcttcctccccggcctcttccttctgctagtctcctgtgtcctgctggccaagtgcctgctgcacccatctgcggatggtactcccttccccgcccctgactgatggcaggaatccaagtgcatttcttaaataagttactatttattccgctccgccccctccctctcccttgagaagctgagtcttctgcatcagattattgcaacatttaacctgaatttaaaagcacacgaaacaaaggtgtcaatgggaatctcgcggccaacgcccccagatgtaggggaggcctgatacgcatcggggccgggcgcgttactccatggggtcggccccttagtgaggtgtcacctctcccagagtcacaggacgcttctgggaaggcccgagcgga

SEQ ID NO: 280207 - DNA, 7751 bp, Homo sapiens
gggagcccacagcgtctctgtgacttggcaggacccagctccactgaatcagagtccagaaaaagatcaatttcaaaaagaaagtctcatctggatctcctcaaactcatcatggatggcatgaccgaagcatgcatcaagggtggcatcgaagcttgctatgcagccgtgtcctgtgtctgcaccttgctgggtgccctggatgagctcagccaggggaagggcttgagcgaaggtcaggtgcaactgctgcttctgcgccttgaggagctgaaggatggggctgagtggagccgagattccatggagatcaatgaggctgacttccgctggcagcggcgagtgctgtcctcagaacacacgccgtgggagtcagggaacgagaggagccttgacatcagcatcagtgtcaccacagacacaggccagaccactctcgagggagagttgggtcagactacacccgaggaccattcgggaaaccacaagaacagtctcaagtcgccagccatcccagagggtaaggagacgctgagcaaagtattggaaacagaggcggtagaccagccagatgtcgtgcagagaagccacacggtcccttaccctgacataactaacttcctgtcagtagactgcaggacaaggtcctatggatctaggtatagtgagagcaattttagcgttgatgaccaagacctttctaggacagagtttgattcctgtgatcagtactctatggcagcagaaaaggactcgggcaggtccgacgtgtcagacattgggtcggacaactgttcactagccgatgaagagcagacaccccgggactgcctaggccaccggtccctgcgaactgccgccctgtctctaaaactgctgaagaaccaggaggcggatcagcacagcgccaggctgttcatacagtccctggaaggcctcctccctcggctcctgtctctctccaatgtagaggaggtggacaccgctctgcagaactttgcctctactttctgctcaggcatgatgcactctcctggctttgacgggaatagcagcctcagcttccagatgctgatgaacgcagacagcctctacacagctgcacactgcgccctgctcctcaacctgaagctctcccacggtgactactacaggaagcggccgaccctggcgccaggcgtgatgaaggacttcatgaagcaggtgcagaccagcggcgtgctgatggtcttctctcaggcctggattgaggagctctaccatcaggtgctcgacaggaacatgcttggagaggctggctattggggcagcccagaagataacagccttcccctcatcacaatgctgaccgatattgacggcttagagagcagtgccattggtggccagctgatggcctcggctgctacagagtctcctttcgcccagagcaggagaattgatgactccacagtggcaggcgtggcatttgctcgctatattctggtgggctgctggaagaacttgatcgatactttatcaaccccactgactggtcgaatggcggggagctccaaagggctggccttcattctgggagctgaaggcatcaaagagcagaaccagaaggagcgggacgccatctgcatgagcctcgacgggctgcggaaagccgcacggctgagctgcgctctaggcgttgctgctaactgcgcctcagcccttgcccagatggcagctgcctcctgtgtccaagaagaaaaagaagagagggaggcccaagaacccagtgatgccatcacacaagtgaaactaaaagtggagcagaaactggagcagattgggaaggtgcagggggtgtggctgcacactgcccacgtcttgtgcatggaggccatcctcagcgtaggcctggagatgggaagccacaacccggactgctggccacacgtgttcagggtgtgtgaatacgtgggcaccctggagcacaaccacttcagcgatggtgcctcgcagccccctctgaccatcagccagccccagaaggccactggaagcgctggcctccttggggaccccgagtgtgagggctcgccccccgagcacagcccggagcaggggcgctccctgagcacggcccctgtcgtccagcccctgtccatccaggacctcgtccgggaaggcagccggggtcgggcctccgacttccgcggcgggagcctcatgagcgggagcagcgcggccaaggtggtgctcaccctctccacgcaagccgacaggctctttgaagatgctacggataagttgaacctcatggccttgggaggttttctttaccagctgaagaaagcatcgcagtctcagcttttccattctgttacagatacagttgattactctctggcaatgccaggagaagttaaatccactcaagaccgaaaaagcgccctccacctgttccgcctggggaatgccatgctgaggattgtgcggagcaaagcacggcccctgctccacgtgatgcgctgctggagccttgtggccccacacctggtggaggctgcttgccataaggaaagacatgtgtctcagaaggctgtttccttcatccatgacatactgacagaagtcctcactgactggaatgagccacctcattttcacttcaatgaagcactcttccgacctttcgagcgcattatgcagctggaattgtgtgatgaggacgtccaagaccaggttgtcacatccattggtgagctggttgaagtgtgttccacgcagatccagtcgggatggagacccttgttcagtgccctggaaacagtgcatggcgggaacaagtcagagatgaaggagtacctggttggtgactactccatgggaaaaggccaagctccagtgtttgatgtatttgaagcttttctcaatactgacaacatccaggtctttgctaatgcagccactagctacatcatgtgccttatgaagtttgtcaaaggactgggggaggtggactgtaaagagattggagactgtgccccagcacccggagccccgtccacagacctgtgcctcccggccctggattacctcaggcgctgctctcagttattggccaaaatctacaaaatgcccttgaagccaatattccttagtgggagacttgccggcttgcctcgaagacttcaggaacagtcagccagcagtcacaggagggaattgaatcagtcctgtctgattttgatgatgacaccggtctgatagaagtctggataatcctgctggagcagctgacagcggctgtgtccaattgtccacggcagcaccaaccaccaactctggatttactctttgagctgttgagagatgtgacgaaaacaccaggaccagggtttggtatctatgcagtggttcacctcctccttcctgtgatgtccgtttggctccgccggagccataaagaccattcctactgggatatggcctctgccaatttcaagcacgctattggtctgtcctgtgagctggtggtggagcacattcaaagctttctacattcagatatcaggtacgagagcatgatcaataccatgctgaaggacctctttgagttgctggtcgcctgtgtggccaagcccactgaaaccatctccagagtgggctgctcctgtattagatacgtccttgtgacagcgggccctgtgttcactgaggagatgtggaggcttgcctgctgtgccctgcaagatgcgttctctgccacactcaagccagtgaaggacctgctgggctgcttccacagcggcacggagagcttcagcggggaaggctgccaggtgcgagtggcggccccgtcctcctccccaagtgccgaggccgagtactggcgcatccgagccatggcccagcaggtgtttatgctggacacccagtgctcaccaaagacaccaaacaactttgaccacgctcagtcctgccagctcattattgagctgcctcctgatgaaaaaccaaatggacacaccaagaaaagcgtgtctttcagggaaattgtggtgagcctgctgtctcatcaggtgttactccagaacttatatgacatcttgttagaagagtttgtcaaaggcccctctcctggagaggaaaagacgatacaagtgccagaagccaagctggctggcttcctcagatacatctctatgcagaacttggcagtcatattcgacctgctgctggactcttataggactgccagggagtttgacaccagccccgggctgaagtgcctgctgaagaaagtgtctggcatcgggggcgccgccaacctctaccgccagtctgcgatgagctttaacatttatttccacgccctggtgtgtgctgttctcaccaatcaagaaaccatcacggccgagcaagtgaagaaggtcctttttgaggacgacgagagaagcacggattcttcccagcagtgttcatctgaggatgaagacatctttgaggaaaccgcccaggtcagccccccgagaggcaaggagaagagacagtggcgggcacggatgcccttgctcagcgtccagcctgtcagcaacgcagattgggtgtggctggtcaagaggctgcacaagctgtgcatggaactgtgcaacaactacatccagatgcacttggacctggagaactgtatggaggagcctcccatcttcaagggcgacccgttcttcatcctgccctccttccagtccgagtcatccaccccatccaccgggggcttctctgggaaagaaaccccttccgaggatgacagaagccagtcccgggagcacatgggcgagtccctgagcctgaaggccggtggtggggacctgctgctgccccccagccccaaagtggagaagaaggatcccagccggaagaaggagtggtgggagaatgcggggaacaaaatctacaccatggcagccgacaagaccatttcaaagttgatgaccgaatacaaaaagaggaaacagcagcacaacctgtccgcgttccccaaagaggtcaaagtggagaagaaaggagagccactgggtcccaggggccaggactccccgctgcttcagcgtccccagcacttgatggaccaagggcaaatgcggcattccttcagcgcaggccccgagctgctgcgacaggacaagaggccccgctcaggctccaccgggagctccctcagtgtctcggtgagagacgcagaagcacagatccaggcatggaccaacatggtgctaacagttctcaatcagattcagattctcccagaccagaccttcacggccctccagcccgcagtgttcccgtgcatcagtcagctgacctgtcacgtgaccgacatcagagttcgccaggctgtgagggagtggctgggcagggtgggccgtgtctatgacatcattgtgtagccgactcctgttctactctcccaccaaataacagtagtgagggttagagtcctgccaatacagctgttgcattttccccaccactagccccacttaaactactactactgtctcagagaacagtgtttcctaatgtaaaaagcctttccaaccactgatcagcattggggccatactaaggtttgtatctagatgacacaaacgatattctgattttgcacattattatagaagaatctataatccttgatatgtttctaactcttgaagtatatttcccagtgcttttgcttacagtgttgtccccaaatgggtcattttcaaggattactcatttgaaaacactatattgatccatttgatccatcatttaaaaaataaatacaattcctaaggcaatatctgctggtaagtcaagctgataaacactcagacatctagtaccagggattattaattggaggaagatttatggttatgggtctggctgggaagaagacaactataaatacatattcttgggtgtcataatcaagaaagaggtgacttctgttgtaaaataatccagaacacttcaaaattattcctaaatcattaagattttcaggtattcaccaatttccccatgtaaggtactgtgttgtacctttatttctgtatttctaaaagaagaaagttctttcctagcagggtttgaagtctgtggcttatcagcctgtgacacagagtacccagtgaaagtggctggtacgtagattgtcaagagacataagaccgaccagccaccctggctgttcttgtggtgtttgtttccatccccaaggcaaacaaggaaaggaaaggaaagaagaaaaggtgccttagtcctttgttgcacttccatttccatgccccacaattgtctgaacataaggtatagcatttggtttttaagaaaacaaaacattaagacgcaactcattttatatcaacacgcttggaggaaagggactcagggaagggagcagggagtgtggggtggggatggattatgatgaaatcattttcaatcttaaaatataatacaacaatcttgcaaaattatggtgtcagttacacaagctctagtctcaaaatgaaagtaatggagaaagacactgaaatttagaaaattttgtcgatttaaaatatttctcctatctaccaagtaaagttaccctatgtttgatgtctttgcattcagaccaatatttcaggtggatatttctaagtattactagaaaatacgtttgaaagctttatcttattatttacagtatttttatatttcttacattatcctaatgattgaaaactcctcaatcaagcttacttacacacattctacagagttatttaaggcatacattataatctcccagccccattcataatgaataagtcaccctttaaatataagacacaaattctacagtattgaaataaggatttaaaggggtatttgtaaactttgccctccttgagaaatatggaactaccttagaggttaagaggaaggcagtgttctgacttctttaggtgatctgaaaaaaacacccttatcatccagtgtaccatctagagatcaccacagaatccatttttttcccagttccacaaaacactctgtttgccttcagtttttactcactagacaataattcaagtttagaaacaggtaatcagctatttgatcttaaaaggcaatgaattgttgggatatcagtgaactatgttgtatacttttgaatttttacattttataaatggaattgaaagttggataactgctttttttaaattttccaacagaagtaacaccacagttgctttgtttctttttatagcttacctgaggttcagttcttctttgtgaacctgtgagtactccacagtttactgggggaaaaggcttcagtaaagcagaggctagaattacagtatttatacatagcaacttttcataaagtagaaaaattcaaaggaagctgtctcaatttgagaataccagctgggcacggtggctcacgcctgtaatcccagcacttactttgggaggccaaggtgggcagataacctgcggtcaggagtttgagaccaggctggacaacatggtgaaacctcgtctctactaaaaatacaaaaattagccaggtgtggtaggatgcacctgtaatcccagctacttaggaggccgagacaggagaatcgctcgaacccaggaggcggacgttgcagtgagccaagattgcaccattgcactccagactgggtgacaagagtgaaactccatctaaaaaaaaaaaa

SEQ ID NO: 280208 - DNA, 5993 bp, Homo sapiens
gggagcccacagcgtctctgtgacttggcaggacccagctccactgaatcagagtccagaaaaagatcaatttcaaaaagaaagtctcatctggatctcctcaaactcatcatggatggcatgaccgaagcatgcatcaagggtggcatcgaagcttgctatgcagccgtgtcctgtgtctgcaccttgctgggtgccctggatgagctcagccaggggaagggcttgagcgaaggtcaggtgcaactgctgcttctgcgccttgaggagctgaaggatggggctgagtggagccgagattccatggagatcaatgaggctgacttccgctggcagcggcgagtgctgtcctcagaacacacgccgtgggagtcagggaacgagaggagccttgacatcagcatcagtgtcaccacagacacaggccagaccactctcgagggagagttgggtcagactacacccgaggaccattcgggaaaccacaagaacagtctcaagtcgccagccatcccagagggtaaggagacgctgagcaaagtattggaaacagaggcggtagaccagccagatgtcgtgcagagaagccacacggtcccttaccctgacataactaacttcctgtcagtagactgcaggacaaggtcctatggatctaggtatagtgagagcaattttagcgttgatgaccaagacctttctaggacagagtttgattcctgtgatcagtactctatggcagcagaaaaggactcgggcaggtccgacgtgtcagacattgggtcggacaactgttcactagccgatgaagagcagacaccccgggactgcctaggccaccggtccctgcgaactgccgccctgtctctaaaactgctgaagaaccaggaggcggatcagcacagcgccaggctgttcatacagtccctggaaggcctcctccctcggctcctgtctctctccaatgtagaggaggtggacaccgctctgcagaactttgcctctactttctgctcaggcatgatgcactctcctggctttgacgggaatagcagcctcagcttccagatgctgatgaacgcagacagcctctacacagctgcacactgcgccctgctcctcaacctgaagctctcccacggtgactactacaggaagcggccgaccctggcgccaggcgtgatgaaggacttcatgaagcaggtgcagaccagcggcgtgctgatggtcttctctcaggcctggattgaggagctctaccatcaggtgctcgacaggaacatgcttggagaggctggctattggggcagcccagaagataacagccttcccctcatcacaatgctgaccgatattgacggcttagagagcagtgccattggtggccagctgatggcctcggctgctacagagtctcctttcgcccagagcaggagaattgatgactccacagtggcaggcgtggcatttgctcgctatattctggtgggctgctggaagaacttgatcgatactttatcaaccccactgactggtcgaatggcggggagctccaaagggctggccttcattctgggagctgaaggcatcaaagagcagaaccagaaggagcgggacgccatctgcatgagcctcgacgggctgcggaaagccgcacggctgagctgcgctctaggcgttgctgctaactgcgcctcagcccttgcccagatggcagctgcctcctgtgtccaagaagaaaaagaagagagggaggcccaagaacccagtgatgccatcacacaagtgaaactaaaagtggagcagaaactggagcagattgggaaggtgcagggggtgtggctgcacactgcccacgtcttgtgcatggaggccatcctcagcgtaggcctggagatgggaagccacaacccggactgctggccacacgtgttcagggtgtgtgaatacgtgggcaccctggagcacaaccacttcagcgatggtgcctcgcagccccctctgaccatcagccagccccagaaggccactggaagcgctggcctccttggggaccccgagtgtgagggctcgccccccgagcacagcccggagcaggggcgctccctgagcacggcccctgtcgtccagcccctgtccatccaggacctcgtccgggaaggcagccggggtcgggcctccgacttccgcggcgggagcctcatgagcgggagcagcgcggccaaggtggtgctcaccctctccacgcaagccgacaggctctttgaagatgctacggataagttgaacctcatggccttgggaggttttctttaccagctgaagaaagcatcgcagtctcagcttttccattctgttacagatacagttgattactctctggcaatgccaggagaagttaaatccactcaagaccgaaaaagcgccctccacctgttccgcctggggaatgccatgctgaggattgtgcggagcaaagcacggcccctgctccacgtgatgcgctgctggagccttgtggccccacacctggtggaggctgcttgccataaggaaagacatgtgtctcagaaggctgtttccttcatccatgacatactgacagaagtcctcactgactggaatgagccacctcattttcacttcaatgaagcactcttccgacctttcgagcgcattatgcagctggaattgtgtgatgaggacgtccaagaccaggttgtcacatccattggtgagctggttgaagtgtgttccacgcagatccagtcgggatggagacccttgttcagtgccctggaaacagtgcatggcgggaacaagtcagagatgaaggagtacctggttggtgactactccatgggaaaaggccaagctccagtgtttgatgtatttgaagcttttctcaatactgacaacatccaggtctttgctaatgcagccactagctacatcatgtgccttatgaagtttgtcaaaggactgggggaggtggactgtaaagagattggagactgtgccccagcacccggagccccgtccacagacctgtgcctcccggccctggattacctcaggcgctgctctcagttattggccaaaatctacaaaatgcccttgaagccaatattccttagtgggagacttgccggcttgcctcgaagacttcaggaacagtcagccagcagtcacaggagggaattgaatcagtcctgtctgattttgatgatgacaccggtctgatagaagtctggataatcctgctggagcagctgacagcggctgtgtccaattgtccacggcagcaccaaccaccaactctggatttactctttgagctgttgagagatgtgacgaaaacaccaggaccagggtttggtatctatgcagtggttcacctcctccttcctgtgatgtccgtttggctccgccggagccataaagaccattcctactgggatatggcctctgccaatttcaagcacgctattggtctgtcctgtgagctggtggtggagcacattcaaagctttctacattcagatatcaggtacgagagcatgatcaataccatgctgaaggacctctttgagttgctggtcgcctgtgtggccaagcccactgaaaccatctccagagtgggctgctcctgtattagatacgtccttgtgacagcgggccctgtgttcactgaggagatgtggaggcttgcctgctgtgccctgcaagatgcgttctctgccacactcaagccagtgaaggacctgctgggctgcttccacagcggcacggagagcttcagcggggaaggctgccaggtgcgagtggcggccccgtcctcctccccaagtgccgaggccgagtactggcgcatccgagccatggcccagcaggtgtttatgctggacacccagtgctcaccaaagacaccaaacaactttgaccacgctcagtcctgccagctcattattgagctgcctcctgatgaaaaaccaaatggacacaccaagaaaagcgtgtctttcagggaaattgtggtgagcctgctgtctcatcaggtgttactccagaacttatatgacatcttgttagaagagtttgtcaaaggcccctctcctggagaggaaaagacgatacaagtgccagaagccaagctggctggcttcctcagatacatctctatgcagaacttggcagtcatattcgacctgctgctggactcttataggactgccagggagtttgacaccagccccgggctgaagtgcctgctgaagaaagtgtctggcatcgggggcgccgccaacctctaccgccagtctgcgatgagctttaacatttatttccacgccctggtgtgtgctgttctcaccaatcaagaaaccatcacggccgagcaagtgaagaaggtcctttttgaggacgacgagagaagcacggattcttcccagcagtgttcatctgaggatgaagacatctttgaggaaaccgcccaggtcagccccccgagaggcaaggagaagagacagtggcgggcacggatgcccttgctcagcgtccagcctgtcagcaacgcagattgggtgtggctggtcaagaggctgcacaagctgtgcatggaactgtgcaacaactacatccagatgcacttggacctggagaactgtatggaggagcctcccatcttcaagggcgacccgttcttcatcctgccctccttccagtccgagtcatccaccccatccaccgggggcttctctgggaaagaaaccccttccgaggatgacagaagccagtcccgggagcacatgggcgagtccctgagcctgaaggccggtggtggggacctgctgctgccccccagccccaaagtggagaagaaggatcccagccggaagaaggagtggtgggagaatgcggggaacaaaatctacaccatggcagccgacaagaccatttcaaagttgatgaccgaatacaaaaagaggaaacagcagcacaacctgtccgcgttccccaaagaggtcaaagtggagaagaaaggagagccactgggtcccaggggccaggactccccgctgcttcagcgtccccagcacttgatggaccaagggcaaatgcggcattccttcagcgcaggccccgagctgctgcgacaggacaagaggccccgctcaggctccaccgggagctccctcagtgtctcggtgagagacgcagaagcacagatccaggcatggaccaacatggtgctaacagttctcaatcagattcagattctcccagaccagaccttcacggccctccagcccgcagtgttcccgtgcatcagtcagctgacctgtcacgtgaccgacatcagagttcgccaggctgtgagggagtggctgggcagggtgggccgtgtctatgacatcattgtgtagccgactcctgttctactctcccaccaaataacagtagtgagggttagagtcctgccaatacagctgttgcattttccccaccactagccccacttaaactactactactgtctcagagaacagtgtttcctaatgtaaaaagcctttccaaccactgatcagcattggggccatactaaggtttgtatctagatgacacaaacgatattctgattttgcacattattatagaagaatctataatccttgatatgtttctaactcttgaagtatatttcccagtgcttttgcttacagtgttgtccccaaatgggtcattttcaaggattactcatttgaaaacactatattgatccatttgatccatcatttaaaaaataaatacaattcctaaggcaatatctgctggtaagtcaagctgataaacactcagacatctagtaccagggattattaattggaggaagatttatggttatgggtctggctgggaagaagacaactataaatcttcctccaattaatactccctggtcctagacgcctgagtgtttaccagctgtcgac

SEQ ID NO: 280209 - DNA, 356 bp, Homo sapiens
gctgtgcctgacccagagcccatgaaagggcctggaaggaatggcacctgccagctcaggatccatcccacttctggagctggagagctggggccaccagcacgtgggacctgctggctgggtggtttgcatgatggtccgcaaggacctactgtggaggtgcttgctgccactgaagtctgtcctttcccttttgcccttgcatgacacacattctttcattttcattctttctgtctcccttactcaacctgttattttaataaatgtctttctggcacagtgaaactaaaagtggagcagaaactggagcagattgggaaggtgcagggggtgtggctgcacactgcccacgt

SEQ ID NO: 280210 - DNA, 6296 bp, Homo sapiens
gggagcccacagcgtctctgtgacttggcaggacccagctccactgaatcagagtccagaaaaagatcaatttcaaaaagaaagtctcatctggatctcctcaaactcatcatggatggcatgaccgaagcatgcatcaagggtggcatcgaagcttgctatgcagccgtgtcctgtgtctgcaccttgctgggtgccctggatgagctcagccaggggaagggcttgagcgaaggtcaggtgcaactgctgcttctgcgccttgaggagctgaaggatggggctgagtggagccgagattccatggagatcaatgaggctgacttccgctggcagcggcgagtgctgtcctcagaacacacgccgtgggagtcagggaacgagaggagccttgacatcagcatcagtgtcaccacagacacaggccagaccactctcgagggagagttgggtcagactacacccgaggaccattcgggaaaccacaagaacagtctcaagtcgccagccatcccagagggtaaggagacgctgagcaaagtattggaaacagaggcggtagaccagccagatgtcgtgcagagaagccacacggtcccttaccctgacataactaacttcctgtcagtagactgcaggacaaggtcctatggatctaggtatagtgagagcaattttagcgttgatgaccaagacctttctaggacagagtttgattcctgtgatcagtactctatggcagcagaaaaggactcgggcaggtccgacgtgtcagacattgggtcggacaactgttcactagccgatgaagagcagacaccccgggactgcctaggccaccggtccctgcgaactgccgccctgtctctaaaactgctgaagaaccaggaggcggatcagcacagcgccaggctgttcatacagtccctggaaggcctcctccctcggctcctgtctctctccaatgtagaggaggtggacaccgctctgcagaactttgcctctactttctgctcaggcatgatgcactctcctggctttgacgggaatagcagcctcagcttccagatgctgatgaacgcagacagcctctacacagctgcacactgcgccctgctcctcaacctgaagctctcccacggtgactactacaggaagcggccgaccctggcgccaggcgtgatgaaggacttcatgaagcaggtgcagaccagcggcgtgctgatggtcttctctcaggcctggattgaggagctctaccatcaggtgctcgacaggaacatgcttggagaggctggctattggggcagcccagaagataacagccttcccctcatcacaatgctgaccgatattgacggcttagagagcagtgccattggtggccagctgatggcctcggctgctacagagtctcctttcgcccagagcaggagaattgatgactccacagtggcaggcgtggcatttgctcgctatattctggtgggctgctggaagaacttgatcgatactttatcaaccccactgactggtcgaatggcggggagctccaaagggctggccttcattctgggagctgaaggcatcaaagagcagaaccagaaggagcgggacgccatctgcatgagcctcgacgggctgcggaaagccgcacggctgagctgcgctctaggcgttgctgctaactgcgcctcagcccttgcccagatggcagctgcctcctgtgtccaagaagaaaaagaagagagggaggcccaagaacccagtgatgccatcacacaagtgaaactaaaagtggagcagaaactggagcagattgggaaggtgcagggggtgtggctgcacactgcccacgtcttgtgcatggaggccatcctcagcgtaggcctggagatgggaagccacaacccggactgctggccacacgtgttcagggtgtgtgaatacgtgggcaccctggagcacaaccacttcagcgatggtgcctcgcagccccctctgaccatcagccagccccagaaggccactggaagcgctggcctccttggggaccccgagtgtgagggctcgccccccgagcacagcccggagcaggggcgctccctgagcacggcccctgtcgtccagcccctgtccatccaggacctcgtccgggaaggcagccggggtcgggcctccgacttccgcggcgggagcctcatgagcgggagcagcgcggccaaggtggtgctcaccctctccacgcaagccgacaggctctttgaagatgctacggataagttgaacctcatggccttgggaggttttctttaccagctgaagaaagcatcgcagtctcagcttttccattctgttacagatacagttgattactctctggcaatgccaggagaagttaaatccactcaagaccgaaaaagcgccctccacctgttccgcctggggaatgccatgctgaggattgtgcggagcaaagcacggcccctgctccacgtgatgcgctgctggagccttgtggccccacacctggtggaggctgcttgccataaggaaagacatgtgtctcagaaggctgtttccttcatccatgacatactgacagaagtcctcactgactggaatgagccacctcattttcacttcaatgaagcactcttccgacctttcgagcgcattatgcagctggaattgtgtgatgaggacgtccaagaccaggttgtcacatccattggtgagctggttgaagtgtgttccacgcagatccagtcgggatggagacccttgttcagtgccctggaaacagtgcatggcgggaacaagtcagagatgaaggagtacctggttggtgactactccatgggaaaaggccaagctccagtgtttgatgtatttgaagcttttctcaatactgacaacatccaggtctttgctaatgcagccactagctacatcatgtgccttatgaagtttgtcaaaggactgggggaggtggactgtaaagagattggagactgtgccccagcacccggagccccgtccacagacctgtgcctcccggccctggattacctcaggcgctgctctcagttattggccaaaatctacaaaatgcccttgaagccaatattccttagtgggagacttgccggcttgcctcgaagacttcaggaacagtcagccagcagtcacaggagggaattgaatcagtcctgtctgattttgatgatgacaccggtctgatagaagtctggataatcctgctggagcagctgacagcggctgtgtccaattgtccacggcagcaccaaccaccaactctggatttactctttgagctgttgagagatgtgacgaaaacaccaggaccagggtttggtatctatgcagtggttcacctcctccttcctgtgatgtccgtttggctccgccggagccataaagaccattcctactgggatatggcctctgccaatttcaagcacgctattggtctgtcctgtgagctggtggtggagcacattcaaagctttctacattcagatatcaggtacgagagcatgatcaataccatgctgaaggacctctttgagttgctggtcgcctgtgtggccaagcccactgaaaccatctccagagtgggctgctcctgtattagatacgtccttgtgacagcgggccctgtgttcactgaggagatgtggaggcttgcctgctgtgccctgcaagatgcgttctctgccacactcaagccagtgaaggacctgctgggctgcttccacagcggcacggagagcttcagcggggaaggctgccaggtgcgagtggcggccccgtcctcctccccaagtgccgaggccgagtactggcgcatccgagccatggcccagcaggtgtttatgctggacacccagtgctcaccaaagacaccaaacaactttgaccacgctcagtcctgccagctcattattgagctgcctcctgatgaaaaaccaaatggacacaccaagaaaagcgtgtctttcagggaaattgtggtgagcctgctgtctcatcaggtgttactccagaacttatatgacatcttgttagaagagtttgtcaaaggcccctctcctggagaggaaaagacgatacaagtgccagaagccaagctggctggcttcctcagatacatctctatgcagaacttggcagtcatattcgacctgctgctggactcttataggactgccagggagtttgacaccagccccgggctgaagtgcctgctgaagaaagtgtctggcatcgggggcgccgccaacctctaccgccagtctgcgatgagctttaacatttatttccacgccctggtgtgtgctgttctcaccaatcaagaaaccatcacggccgagcaagtgaagaaggtcctttttgaggacgacgagagaagcacggattcttcccagcagtgttcatctgaggatgaagacatctttgaggaaaccgcccaggtcagccccccgagaggcaaggagaagagacagtggcgggcacggatgcccttgctcagcgtccagcctgtcagcaacgcagattgggtgtggctggtcaagaggctgcacaagctgtgcatggaactgtgcaacaactacatccagatgcacttggacctggagaactgtatggaggagcctcccatcttcaagggcgacccgttcttcatcctgccctccttccagtccgagtcatccaccccatccaccgggggcttctctgggaaagaaaccccttccgaggatgacagaagccagtcccgggagcacatgggcgagtccctgagcctgaaggccggtggtggggacctgctgctgccccccagccccaaagtggagaagaaggatcccagccggaagaaggagtggtgggagaatgcggggaacaaaatctacaccatggcagccgacaagaccatttcaaagttgatgaccgaatacaaaaagaggaaacagcagcacaacctgtccgcgttccccaaagaggtcaaagtggagaagaaaggagagccactgggtcccaggggccaggactccccgctgcttcagcgtccccagcacttgatggaccaagggcaaatgcggcattccttcagcgcaggccccgagctgctgcgacaggacaagaggccccgctcaggctccaccgggagctccctcagtgtctcggtgagagacgcagaagcacagatccaggcatggaccaacatggtgctaacagttctcaatcagattcagattctcccagaccagaccttcacggccctccagcccgcagtgttcccgtgcatcagtcagctgacctgtcacgtgaccgacatcagagttcgccaggctgtgagggagtggctgggcagggtgggccgtgtctatgacatcattgtgtagccgactcctgttctactctcccaccaaataacagtagtgagggttagagtcctgccaatacagctgttgcattttccccaccactagccccacttaaactactactactgtctcagagaacagtgtttcctaatgtaaaaagcctttccaaccactgatcagcattggggccatactaaggtttgtatctagatgacacaaacgatattctgattttgcacattattatagaagaatctataatccttgatatgtttctaactcttgaagtatatttcccagtgcttttgcttacagtgttgtccccaaatgggtcattttcaaggattactcatttgaaaacactatattgatccatttgatccatcatttaaaaaataaatacaattcctaaggcaaaaaaaaaaaacggaggccacaggatcccagcccggcctttgtgggactgaggtggcgctgagtgggagagcagcaggcgatgcgcgaaaggcgggacttggagataaatactgagcacccacaacaggcagccagcaccactgcagattggatactgcaatgatgataagcatggcctgcctttatggaggtgatgttattgtgtggggaggcagatggttctggatgttcctgtggataacctcaaggagcacgggacctgggacatgactgcccccagcattccttctggcggcagacagagtttgtcagttcgccaacatcctgctttcatgagaacagtttgctgtttgctcacagagcctccagtggtatactgagttggtcacgaccctcattccttcggcctccaacatctccccttttgtttttgcattaattgaataaaggtaatttcaggctgtgcagctt

SEQ ID NO: 280211 - DNA, 3527 bp, Homo sapiens
  misc_feature (3375)..(3375): n is a, c, g, or t
gggagcccacagcgtctctgtgacttggcaggacccagctccactgaatcagagtccagaaaaagatcaatttcaaaaagaaagtctcatctggatctcctcaaactcatcatggatggcatgaccgaagcatgcatcaagggtggcatcgaagcttgctatgcagccgtgtcctgtgtctgcaccttgctgggtgccctggatgagctcagccaggggaagggcttgagcgaaggtcaggtgcaactgctgcttctgcgccttgaggagctgaaggatggggctgagtggagccgagattccatggagatcaatgaggctgacttccgctggcagcggcgagtgctgtcctcagaacacacgccgtgggagtcagggaacgagaggagccttgacatcagcatcagtgtcaccacagacacaggccagaccactctcgagggagagttgggtcagactacacccgaggaccattcgggaaaccacaagaacagtctcaagtcgccagccatcccagagggtaaggagacgctgagcaaagtattggaaacagaggcggtagaccagccagatgtcgtgcagagaagccacacggtcccttaccctgacataactaacttcctgtcagtagactgcaggacaaggtcctatggatctaggtatagtgagagcaattttagcgttgatgaccaagacctttctaggacagagtttgattcctgtgatcagtactctatggcagcagaaaaggactcgggcaggtccgacgtgtcagacattgggtcggacaactgttcactagccgatgaagagcagacaccccgggactgcctaggccaccggtccctgcgaactgccgccctgtctctaaaactgctgaagaaccaggaggcggatcagcacagcgccaggctgttcatacagtccctggaaggcctcctccctcggctcctgtctctctccaatgtagaggaggtggacaccgctctgcagaactttgcctctactttctgctcaggcatgatgcactctcctggctttgacgggaatagcagcctcagcttccagatgctgatgaacgcagacagcctctacacagctgcacactgcgccctgctcctcaacctgaagctctcccacggtgactactacaggaagcggccgaccctggcgccaggcgtgatgaaggacttcatgaagcaggtgcagaccagcggcgtgctgatggtcttctctcaggcctggattgaggagctctaccatcaggtgctcgacaggaacatgcttggagaggctggctattggggcagcccagaagataacagccttcccctcatcacaatgctgaccgatattgacggcttagagagcagtgccattggtggccagctgatggcctcggctgctacagagtctcctttcgcccagagcaggagaattgatgactccacagtggcaggcgtggcatttgctcgctatattctggtgggctgctggaagaacttgatcgatactttatcaaccccactgactggtcgaatggcggggagctccaaagggctggccttcattctgggagctgaaggcatcaaagagcagaaccagaaggagcgggacgccatctgcatgagcctcgacgggctgcggaaagccgcacggctgagctgcgctctaggcgttgctgctaactgcgcctcagcccttgcccagatggcagctgcctcctgtgtccaagaagaaaaagaagagagggaggcccaagaacccagtgatgccatcacacaagtgaaactaaaagtggagcagaaactggagcagattgggaaggtgcagggggtgtggctgcacactgcccacgtcttgtgcatggaggccatcctcagcgtaggcctggagatgggaagccacaacccggactgctggccacacgtgttcagggtgtgtgaatacgtgggcaccctggagcacaaccacttcagcgatggtgcctcgcagccccctctgaccatcagccagccccagaaggccactggaagcgctggcctccttggggaccccgagtgtgagggctcgccccccgagcacagcccggagcaggggcgctccctgagcacggcccctgtcgtccagcccctgtccatccaggacctcgtccgggaaggcagccggggtcgggcctccgacttccgcggcgggagcctcatgagcgggagcagcgcggccaaggtggtgctcaccctctccacgcaagccgacaggctctttgaagatgctacggataagttgaacctcatggccttgggaggttttctttaccagctgaagaaagcatcgcagtctcagcttttccattctgttacagatacagttgattactctctggcaatgccaggagaagttaaatccactcaagaccgaaaaagcgccctccacctgttccgcctggggaatgccatgctgaggattgtgcggagcaaagcacggcccctgctccacgtgatgcgctgctggagccttgtggccccacacctggtggaggctgcttgccataaggaaagacatgtgtctcagaaggctgtttccttcatccatgacatactgacagaagtcctcactgactggaatgagccacctcattttcacttcaatgaagcactcttccgacctttcgagcgcattatgcagctggaattgtgtgatgaggacgtccaagaccaggttgtcacatccattggtgagctggttgaagtgtgttccacgcagatccagtcgggatggagacccttgttcagtgccctggaaacagtgcatggcgggaacaagtcagagatgaaggagtacctggttggtgactactccatgggaaaaggccaagctccagtgtttgatgtatttgaagcttttctcaatactgacaacatccaggtctttgctaatgcagccactagctacatcatgtgccttatgaagtttgtcaaaggactgggggaggtggactgtaaagagattggagactgtgccccagcacccggagccccgtccacagacctgtgcctcccggccctggattacctcaggcgctgctctcagttattggccaaaatctacaaaatgcccttgaagccaatattccttagtgggagacttgccggcttgcctcgaagacttcaggaacagtcagccagcagtcacaggagggaattgaatcagtcctgtctgattttgatgatgacaccggtctgatagaagtctggataatcctgctggagcagctgacagcggctgtgtccaattgtccacggcagcaccaaccaccaactctggatttactctttgagctgttgagagatgtgacgaaaacaccaggaccagggntttggtattctatgcaggggtacccgagctccgaattccgttaatccattggtccttaggcttgtttccctgtgttgaacagccgccccccccccccccccccccccccccccccccctcccccccccccccccccccccccccgcctcccc

SEQ ID NO: 280212 - DNA, 728 bp, Homo sapiens
cagggagaagaggaaactttccacttattcaccatcattcattccaactgctaaacagatccaggctcctaacagctaataaatgaaactgagaggtttgagaagacaataaacagggtctcactctgttgcccggattggagggcagtggcacaatcatggctcactgcagcctcaacctcctggccttaatcaatcctcccacttcagcctcctgagtagctgggaccacagcaaagagacaaatacacaactgtttgtatttgtgctgcttttttttcccattaccatacgtgaatggaatgaacagcttctctgaggatggatagtgtaagatgtggaattcctgcctgctatcttgtaaggagctatttgcatatgaaattttgtggacatgagattgaaaatgcgtgatttataagcaaaaggaaaaaaaaacctttaagccttcatgccctgcatttcaaatttctggctgatttataaacctttcaaagctcatgctatgaagcaattcaaaatttctatgtctatacatgtttagctaacattaactcagctagccgccccgtggcattttccgtgctagtcttcattttttccctctatattttttctcgtctcgcttttttagaaatgttattcctatttctgtcacactgtcaccttttagtctgtcttgcaagaatgtaacatcagccgccaaatgaacctaggaaagaagaaaa

SEQ ID NO: 280213 - DNA, 2054 bp, Homo sapiens
  misc_feature (326)..(326): n is a, c, g, or t
  misc_feature (487)..(487): n is a, c, g, or t
  misc_feature (566)..(566): n is a, c, g, or t
ccatagtcttagctactcaggaggctgaggagggaggattatctgagccctggcggttgaggctataatgagccatgattgtgccactgcactccagccttggcaacacagtgtgagaccctgtctcaaaaacaataaaaacccaaaacaaaagaaccaagaaattactggacctgaggcctggcctttagctgctgccctgcccttgtgacctggtcactcgggatcccctgggcctaaacacacagcctattgtctacctcaagaaggctccccactgcttggctggcaattggggtgggctttgcaggccccacctgtcctgnccccacggcgctggtgctgcaggcccccaccactgcttgttccgagctccccagcctcctgcagagttgcctgcacctgatggcgatgaatcaggaaggcaggcgtgtcctgggccacagagcagtcatggctgtcagccaccagggggctccatttgcanctttggatgtggctttggcctctttgtccaaagtgaccttggggcccccagacaagagacagggagactggagcccagncccaccctcccgcacatacctggcccatccctgccctatcctggaagatgggggccaccacacgtgcaagggacacgggataggaacctttggccttgttatcagacattttaaaactaagtgcaaacgtgattatcaggtgcagtttttacagcagcaagaaacctgtgcttacagaaagaaacacgtgctagcaacccacctatgcggaaagccacacagagccattgttttctgcactctcaggtgacggctcacatttgccccagggaaggtcacagctgcctgaacttttaaaactcccagacacgcactgcctgtgcaggatccggagcccagcagcactgccagggccttgaagtgcttcttcagagacctttcttcatagactacttttttttctttaagcagcaaaaggagaaaattgtcatcaaaggatattccagattcttgacagcattctcgtcatctctgaggacatcaccatcatctcaggatgaggggcatgaagctgctgggggcgctgctggcactggcggccctactgcagggggccgtgtccctgaagatcgcagccttcaacatccagacatttggggagaccaagatgtccaatgccaccctcgtcagctacattgtgcagatcctgagccgctatgacatcgccctggtccaggaggtcagagacagccacctgactgccgtggggaagctgctggacaacctcaatcaggatgcaccagacacctatcactacgtggtcagtgagccactgggacggaacagctataaggagcgctacctgttcgtgtacaggcctgaccaggtgtctgcggtggacagctactactacgatgatggctgcgagccctgcgggaacgacaccttcaaccgagagccagccattgtcaggttcttctcccggttcacagaggtcagggagtttgccattgttcccctgcatgcggccccgggggacgcagtagccgagatcgacgctctctatgacgtctacctggatgtccaagaagaaatggggcttggaggacgtcatgttgatgggcgacttcaatgcgggctgcagctatgtgagaccctcccagtggtcatccatccgcctgtggacaagccccaccttccagtggctgatccccgacagcgctgacaccacagctacacccacgcactgtgcctatgacaggatcgtggttgcagggatgctgctccgaggcgccgttgttcccgactcggctcttccctttaacttccaggctgcctatggcctgagtgaccaactggcccaagccatcagtgaccactatccagtggaggtgatgctgaagtgagcagcccctccccacaccagttgaactgcaggaagagaggacccatcctgccacaggacccagaaaaaaagcccaacacacactcgggttaagaaatacctttaaatttaggtaaataaagctcaaggaggtggggctgtca

SEQ ID NO: 280214 - DNA, 2310 bp, Homo sapiens
  misc_feature (326)..(326): n is a, c, g, or t
  misc_feature (487)..(487): n is a, c, g, or t
  misc_feature (566)..(566): n is a, c, g, or t
ccatagtcttagctactcaggaggctgaggagggaggattatctgagccctggcggttgaggctataatgagccatgattgtgccactgcactccagccttggcaacacagtgtgagaccctgtctcaaaaacaataaaaacccaaaacaaaagaaccaagaaattactggacctgaggcctggcctttagctgctgccctgcccttgtgacctggtcactcgggatcccctgggcctaaacacacagcctattgtctacctcaagaaggctccccactgcttggctggcaattggggtgggctttgcaggccccacctgtcctgnccccacggcgctggtgctgcaggcccccaccactgcttgttccgagctccccagcctcctgcagagttgcctgcacctgatggcgatgaatcaggaaggcaggcgtgtcctgggccacagagcagtcatggctgtcagccaccagggggctccatttgcanctttggatgtggctttggcctctttgtccaaagtgaccttggggcccccagacaagagacagggagactggagcccagncccaccctcccgcacatacctggcccatccctgccctatcctggaagatgggggccaccacacgtgcaagggacacgggataggaacctttggccttgttatcagacattttaaaactaagtgcaaacgtgattatcaggtgcagtttttacagcagcaagaaacctgtgcttacagaaagaaacacgtgctagcaacccacctatgcggaaagccacacagagccattgttttctgcactctcaggtgacggctcacatttgccccagggaaggtcacagctgcctgaacttttaaaactcccagacacgcactgcctgtgcaggatccggagcccagcagcactgccagggccttgaagtgcttcttcagagacctttcttcatagactacttttttttctttaagcagcaaaaggagaaaattgtcatcaaaggatattccagattcttgacagcattctcgtcatctctgaggacatcaccatcatctcaggatgaggggcatgaagctgctgggggcgctgctggcactggcggccctactgcagggggccgtgtccctgaagatcgcagccttcaacatccagacatttggggagaccaagatgtccaatgccaccctcgtcagctacattgtgcagatcctgagccgctatgacatcgccctggtccaggaggtcagagacagccacctgactgccgtggggaagctgctggacaacctcaatcaggatgcaccagacacctatcactacgtggtcagtgagccactgggacggaacagctataaggagcgctacctgttcgtgtacaggcctgaccaggtgtctgcggtggacagctactactacgatgatggctgcgagccctgcgggaacgacaccttcaaccgagagccagccattgtcaggttcttctcccggttcacagaggtcagggagtttgccattgttcccctgcatgcggccccgggggacgcagtagccgagatcgacgctctctatgacgtctacctggatgtccaagaagaaatggggcttggaggacgtcatgttgatgggcgacttcaatgcgggctgcagctatgtgagaccctcccagtggtcatccatccgcctgtggacaagccccaccttccagtggctgatccccgacagcgctgacaccacagctacacccacgcactgtgcctatgacaggatcgtggttgcagggatgctgctccgaggcgccgttgttcccgactcggctcttccctttaacttccaggctgcctatggcctgagtgaccaactggtatgtgtcctcccttgcacagccacatgaggatgggacacaggagctcaggttggacaccagctcttcctgtgtcatcccgataccagtatcctgaggagagagacgcactaagtgccaagcccccagcacctggggagccgggtgagtgcaccagcagtcccagggactcaagtggtgtcaatgacattggccagacagggcccagccaggtagcaccagatgctcatcagaaaagactaattctaggggccgggagtgatggttcatgcctgtaatcccagcactatgggaggccaaggcaggcggatcacttgaggccaggagttcaagaccagcctggccaacatggtaaaaccccatctctactaaaaaagaaattagccaggcatgatggcgagcacctgtggttccagctactcggaggctgaggcaggaaaattgct

SEQ ID NO: 280215 - DNA, 1984 bp, Homo sapiens
  misc_feature (326)..(326): n is a, c, g, or t
  misc_feature (487)..(487): n is a, c, g, or t
  misc_feature (566)..(566): n is a, c, g, or t
ccatagtcttagctactcaggaggctgaggagggaggattatctgagccctggcggttgaggctataatgagccatgattgtgccactgcactccagccttggcaacacagtgtgagaccctgtctcaaaaacaataaaaacccaaaacaaaagaaccaagaaattactggacctgaggcctggcctttagctgctgccctgcccttgtgacctggtcactcgggatcccctgggcctaaacacacagcctattgtctacctcaagaaggctccccactgcttggctggcaattggggtgggctttgcaggccccacctgtcctgnccccacggcgctggtgctgcaggcccccaccactgcttgttccgagctccccagcctcctgcagagttgcctgcacctgatggcgatgaatcaggaaggcaggcgtgtcctgggccacagagcagtcatggctgtcagccaccagggggctccatttgcanctttggatgtggctttggcctctttgtccaaagtgaccttggggcccccagacaagagacagggagactggagcccagncccaccctcccgcacatacctggcccatccctgccctatcctggaagatgggggccaccacacgtgcaagggacacgggataggaacctttggccttgttatcagacattttaaaactaagtgcaaacgtgattatcaggtgcagtttttacagcagcaagaaacctgtgcttacagaaagaaacacgtgctagcaacccacctatgcggaaagccacacagagccattgttttctgcactctcaggtgacggctcacatttgccccagggaaggtcacagctgcctgaacttttaaaactcccagacacgcactgcctgtgcaggatccggagcccagcagcactgccagggccttgaagtgcttcttcagagacctttcttcatagactacttttttttctttaagcagcaaaaggagaaaattgtcatcaaaggatattccagattcttgacagcattctcgtcatctctgaggacatcaccatcatctcaggatgaggggcatgaagctgctgggggcgctgctggcactggcggccctactgcagggggccgtgtccctgaagatcgcagccttcaacatccagacatttggggagaccaagatgtccaatgccaccctcgtcagctacattgtgcagatcctgagccgctatgacatcgccctggtccaggaggtcagagacagccacctgactgccgtggggaagctgctggacaacctcaatcaggatgcaccagacacctatcactacgtggtcagtgagccactgggacggaacagctataaggagcgctacctgttcgtgtacaggcctgaccaggtgtctgcggtggacagctactactacgatgatggctgcgagccctgcgggaacgacaccttcaaccgagagccagccattgtcaggttcttctcccggttcacagaggtcagggagtttgccattgttcccctgcatgcggccccgggggacgcagtagccgagatcgacgctctctatgacgtctacctggatgtccaagaagaaatggggcttggaggacgtcatgttgatgggcgacttcaatgcgggctgcagctatgtgagaccctcccagtggtcatccatccgcctgtggacaagccccaccttccagtggctgatccccgacagcgctgacaccacagctacacccacgcactgtgcctatgacaggctgcctatggcctgagtgaccaactggcccaagccatcagtgaccactatccagtggaggtgatgctgaagtgagcagcccctccccacaccagttgaactgcaggaagagaggacccatcctgccacaggacccagaaaaaaagcccaacacacactcgggttaagaaatacctttaaatttaggtaaataaagctcaaggaggtggggctgtca

SEQ ID NO: 280216 - DNA, 1484 bp, Homo sapiens
  misc_feature (326)..(326): n is a, c, g, or t
  misc_feature (487)..(487): n is a, c, g, or t
  misc_feature (566)..(566): n is a, c, g, or t
ccatagtcttagctactcaggaggctgaggagggaggattatctgagccctggcggttgaggctataatgagccatgattgtgccactgcactccagccttggcaacacagtgtgagaccctgtctcaaaaacaataaaaacccaaaacaaaagaaccaagaaattactggacctgaggcctggcctttagctgctgccctgcccttgtgacctggtcactcgggatcccctgggcctaaacacacagcctattgtctacctcaagaaggctccccactgcttggctggcaattggggtgggctttgcaggccccacctgtcctgnccccacggcgctggtgctgcaggcccccaccactgcttgttccgagctccccagcctcctgcagagttgcctgcacctgatggcgatgaatcaggaaggcaggcgtgtcctgggccacagagcagtcatggctgtcagccaccagggggctccatttgcanctttggatgtggctttggcctctttgtccaaagtgaccttggggcccccagacaagagacagggagactggagcccagncccaccctcccgcacatacctggcccatccctgccctatcctggaagatgggggccaccacacgtgcaagggacacgggataggaacctttggccttgttatcagacattttaaaactaagtgcaaacgtgattatcaggtgcagtttttacagcagcaagaaacctgtgcttacagaaagaaacacgtgctagcaacccacctatgcggaaagccacacagagccattgttttctgcactctcaggtgacggctcacatttgccccagggaaggtcacagctgcctgaacttttaaaactcccagacacgcactgcctgtgcaggatccggagcccagcagcactgccagggccttgaagtgcttcttcagagacctttcttcatagactacttttttttctttaagcagcaaaaggagaaaattgtcatcaaaggatattccagattcttgacagcattctcgtcatctctgaggacatcaccatcatctcaggatgaggggcatgaagctgctgggggcgctgctggcactggcggccctactgcagggggccgtgtccctgaagatcgcagccttcaacatccagacatttggggagaccaagatgtccaatgccaccctcgtcagctacattgtgcagggatgcaccagacacctatcactacgtggtcagtgagccactgggacggaacagctataaggagcgctacctgttcgtgtacaggcctgaccaggtgtctgcggtggacagctactactacgatgatggctgcgagccctgcgggaacgacaccttcaaccgagagccagccattgtcaggttcttctcccggttcacaggccacagcagcgtttcctggtagacgtcatgttaggcgacttcaatcggtctttcgccacagggatcctctagaa

SEQ ID NO: 280217 - DNA, 805 bp, Homo sapiens
ttgatccactacagggaacagaataacaagagccacgatttttaggttttttcggaaaagcacatctggggataagaggagaggcagacacctaggctgtcatgtggtttccacattgaggggcacagaccagggtgtgcagttttgggcacccacagacctgcactggcaggtcccagggctcttagtttagttcctgcgggtgctgagccaggcccatgtgtgaaaggggaacctactttctcttcccaacacccatcaggatcgtggttgcagggatgctgctccgaggcgccgttgttcccgactcggctcttccctttaacttccaggctgcctatggcctgagtgaccaactggtatgtgtcctcccttgcacagccacatgaggatgggacacaggagctcaggttggacaccagctcttcctgtgtcatcccgataccagtatcctgaggagagagacgcactaagtgccaagcccccagcacctggggagccgggtgagtgcaccagcagtcccagggactcaagtggtgtcaatgacattggccagacagggcccagccaggtagcaccagatgctcatcagaaaagactaattctaggggccgggagtgatggttcatgcctgtaatcccagcactatgggaggccaaggcaggcggatcacttgaggccaggagttcaagaccagcctggccaacatggtaaaaccccatctctactaaaaaagaaattagccaggcatgatggcgagcacctgtggttccagctactcggaggctgaggcaggaaaattgct

SEQ ID NO: 280218 - DNA, 1965 bp, Homo sapiens
  misc_feature (326)..(326): n is a, c, g, or t
  misc_feature (487)..(487): n is a, c, g, or t
  misc_feature (566)..(566): n is a, c, g, or t
ccatagtcttagctactcaggaggctgaggagggaggattatctgagccctggcggttgaggctataatgagccatgattgtgccactgcactccagccttggcaacacagtgtgagaccctgtctcaaaaacaataaaaacccaaaacaaaagaaccaagaaattactggacctgaggcctggcctttagctgctgccctgcccttgtgacctggtcactcgggatcccctgggcctaaacacacagcctattgtctacctcaagaaggctccccactgcttggctggcaattggggtgggctttgcaggccccacctgtcctgnccccacggcgctggtgctgcaggcccccaccactgcttgttccgagctccccagcctcctgcagagttgcctgcacctgatggcgatgaatcaggaaggcaggcgtgtcctgggccacagagcagtcatggctgtcagccaccagggggctccatttgcanctttggatgtggctttggcctctttgtccaaagtgaccttggggcccccagacaagagacagggagactggagcccagncccaccctcccgcacatacctggcccatccctgccctatcctggaagatgggggccaccacacgtgcaagggacacgggataggaacctttggccttgttatcagacattttaaaactaagtgcaaacgtgattatcaggtgcagtttttacagcagcaagaaacctgtgcttacagaaagaaacacgtgctagcaacccacctatgcggaaagccacacagagccattgttttctgcactctcaggtgacggctcacatttgccccagggaaggtcacagctgcctgaacttttaaaactcccagacacgcactgcctgtgcaggatccggagcccagcagcactgccagggccttgaagtgcttcttcagagacctttcttcatagactacttttttttctttaagcagcaaaaggagaaaattgtcatcaaaggatattccagattcttgacagcattctcgtcatctctgaggacatcaccatcatctcaggatgaggggcatgaagctgctgggggcgctgctggcactggcggccctactgcagggggccgtgtccctgaagatcgcagccttcaacatccagacatttggggagaccaagatgtccaatgccaccctcgtcagctacattgtgcagggatgcaccagacacctatcactacgtggtcagtgagccactgggacggaacagctataaggagcgctacctgttcgtgtacaggcctgaccaggtgtctgcggtggacagctactactacgatgatggctgcgagccctgcgggaacgacaccttcaaccgagagccagccattgtcaggttcttctcccggttcacagaggtcagggagtttgccattgttcccctgcatgcggccccgggggacgcagtagccgagatcgacgctctctatgacgtctacctggatgtccaagaagaaatggggcttggaggacgtcatgttgatgggcgacttcaatgcgggctgcagctatgtgagaccctcccagtggtcatccatccgcctgtggacaagccccaccttccagtggctgatccccgacagcgctgacaccacagctacacccacgcactgtgcctatgacaggatcgtggttgcagggatgctgctccgaggcgccgttgttcccgactcggctcttccctttaacttccaggctgcctatggcctgagtgaccaactggcccaagccatcagtgaccactatccagtggaggtgatgctgaagtgagcagcccctccccacaccagttgaactgcaggaagagaggacccatcctgccacaggacccagaaaaaaagcccaacacacactcgggttaagaaatacctttaaatttaggtaaataaagctcaaggaggtggggctgtca

SEQ ID NO: 280219 - DNA, 1865 bp, Homo sapiens
  misc_feature (326)..(326): n is a, c, g, or t
  misc_feature (487)..(487): n is a, c, g, or t
  misc_feature (566)..(566): n is a, c, g, or t
ccatagtcttagctactcaggaggctgaggagggaggattatctgagccctggcggttgaggctataatgagccatgattgtgccactgcactccagccttggcaacacagtgtgagaccctgtctcaaaaacaataaaaacccaaaacaaaagaaccaagaaattactggacctgaggcctggcctttagctgctgccctgcccttgtgacctggtcactcgggatcccctgggcctaaacacacagcctattgtctacctcaagaaggctccccactgcttggctggcaattggggtgggctttgcaggccccacctgtcctgnccccacggcgctggtgctgcaggcccccaccactgcttgttccgagctccccagcctcctgcagagttgcctgcacctgatggcgatgaatcaggaaggcaggcgtgtcctgggccacagagcagtcatggctgtcagccaccagggggctccatttgcanctttggatgtggctttggcctctttgtccaaagtgaccttggggcccccagacaagagacagggagactggagcccagncccaccctcccgcacatacctggcccatccctgccctatcctggaagatgggggccaccacacgtgcaagggacacgggataggaacctttggccttgttatcagacattttaaaactaagtgcaaacgtgattatcaggtgcagtttttacagcagcaagaaacctgtgcttacagaaagaaacacgtgctagcaacccacctatgcggaaagccacacagagccattgttttctgcactctcaggtgacggctcacatttgccccagggaaggtcacagctgcctgaacttttaaaactcccagacacgcactgcctgtgcaggatccggagcccagcagcactgccagggccttgaagtgcttcttcagagacctttcttcatagactacttttttttctttaagcagcaaaaggagaaaattgtcatcaaaggatattccagattcttgacagcattctcgtcatctctgaggacatcaccatcatctcaggatgaggggcatgaagctgctgggggcgctgctggcactggcggccctactgcagggggccgtgtccctgaagatcgcagccttcaacatccagacatttggggagaccaagatgtccaatgccaccctcgtcagctacattgtgcagatcctgagccgctatgacatcgccctggtccaggaggtcagagacagccacctgactgccgtggggaagctgctggacaacctcaatcaggatgcaccagacacctatcactacgtggtcagtgagccactgggacggaacagctataaggagcgctacctgttcgtgtacaggcctgaccaggtgtctgcggtggacagctactactacgatgatggctgcgagccctgcgggaacgacaccttcaaccgagagccagccattgtcaggttcttctcccggttcacagaggtcagggagtttgccattgttcccctgcatgcggccccgggggacgcagtagccgagatcgacgctctctatgacgtctacctggatgtccaagaagaaatggggcttggaggacgtcatgttgatgggcgacttcaatgcgggctgcagctatgtgagaccctcccagtggtcatccatccgcctgtggacaagccccaccttccagtggctgatccccgacagcgctgacaccacagctacacccacgcactgtgcctatgacaggtgagcagggcctcgcgcttagggcagactgagggcacctccaagggcagccgtgactcataggtcgggcttcagaagcctcaaagcctttgaacact

SEQ ID NO: 280220 - DNA, 272 bp, Homo sapiens
aggtcagggagtttgccattgttcccctgcatgcggccccgggggacgcagtagccgagatcgacgctctctatgacgtctacctggatgtccaagaagaaatggggcttggaggtgaggccctcccaggggcagtgggcaccagcggcctccgcatgtcccagggccacaggcagcgtttcctggtaggacgtcatgttgatgggcgacttcaatgcgggctgcagctatgtgagaccctcccagtggtcatccatccgcctgtggacaag

SEQ ID NO: 280221 - DNA, 602 bp, Homo sapiens
ccgtggggtgcgtcgatcctgtagctcagagggagaagctacttagaacttcgtgaagcacagaggatctggactgcccttttggccccgtgcaattttattagaaatcattatccctttcgcaattaaacataaccaccaaaccaagaccggcgaagtcactccaggattttttcccaacaagggatcgcctccgctcgaggcagccaccccctcgggccgcagcgccttgggagttttattggctttgagctttcccccaggttggagattctgccaagcggctccggtggctctgctggggtttgcaatcccttaattgcagcgtgtaaaataaaagttgtaccctgaagaggttacttgacagctccaggggttaaacaatttttctcctgtttgtgtgaagctagggccaactgacagttcaaattggtgttcaggctaaggtttcctgggtgcaacgtggacacgaatacagaactcctatggaactgcacacccgcttctgaagttgagcctaaaaacagacgtgtgtgtgcctgcaagtctagataccgtctcgtgcgtgcatcaaaataaatcaccgggaaccgaaatttagc

SEQ ID NO: 280222 - DNA, 1365 bp, Homo sapiens
ggccctcaatctcgatgaagataacacgaggagtgcacaggcaagtgcccagttgccagcaattgcttcaaaagcccatgttcttcttttcccccattcttaggcacagccaaaattggtcagaaaggggagtaaagtgggacacgagcttcaaagtagggaaaccaaagaagggagcatccacgtcctctctctccagcttctcccccgcgttcttcgggcgaatccgagggacgggcgctgcgctggggaaagtttgtcccacccgcgtttcgcagctggttgcaaggagaggaggaggagagggagggtcaagctcggagcctgtgaccgcacggatgatcgagccggcgtcgcgcttacctcgcagtcctcgtacttgatattatccgtcaatttccaaagcattttcatggatcggcgtgaacggatatgcccctctcggtctcgcacccaagtggagctactctctggctctttaccaacagcctaatcgcctcattagcatatcaacaatagtccaattgctcgccagtaccacaatctgccgccggccgctccgacacaggtataaaggcctctctacgccgcgaacttgcttctagagcgcactccagcctgcgaactgataaaaccttcctcgagctccgccgcgaggccctgccccaacaccccctctcttaccccaattccgccacattccccttcctttctttctccgcttccttttctccagagatgccttctgcaaagcccggcactgctcaaggtccaagcgccacgcctggggcccagcttctagcacttctcccttaaccctgctaccacgatccgagctgcccttttggccccgtgcaattttattagaaatcattatccctttcgcaattaaacataaccaccaaaccaagaccggcgaagtcactccaggattttttcccaacaagggatcgcctccgctcgaggcagccaccccctcgggccgcagcgccttgggagttttattggctttgagctttcccccaggttggagattctgccaagcggctccggtggctctgctggggtttgcaatcccttaattgcagcgtgtaaaataaaagttgtaccctgaagaggttacttgacagctccaggggttaaacaatttttctcctgtttgtgtgaagctagggccaactgacagttcaaattggtgttcaggctaaggtttcctgggtgcaacgtggacacgaatacagaactcctatggaactgcacacccgcttctgaagttgagcctaaaaacagacgtgtgtgtgcctgcaagtctagataccgtctcgtgcgtgcatcaaaataaatcaccgggaaccgaaatttagc

SEQ ID NO: 280223 - DNA, 1313 bp, Homo sapiens
ggcagagagggagaccgaaggagagagcgcagagagggagaatgtgtctgcgcacagccaaaattggtcagaaaggggagtaaagtgggacacgagcttcaaagtagggaaaccaaagaagggagcatccacgtcctctctctccagcttctcccccgcgttcttcgggcgaatccgagggacgggcgctgcgctggggaaagtttgtcccacccgcgtttcgcagctggttgcaaggagaggaggaggagagggagggtcaagctcggagcctgtgaccgcacggatgatcgagccggcgtcgcgcttacctcgcagtcctcgtacttgatattatccgtcaatttccaaagcattttcatggatcggcgtgaacggatatgcccctctcggtctcgcacccaagtggagctactctctggctctttaccaacagcctaatcgcctcattagcatatcaacaatagtccaattgctcgccagtaccacaatctgccgccggccgctccgacacaggtataaaggcctctctacgccgcgaacttgcttctagagcgcactccagcctgcgaactgataaaaccttcctcgagctccgccgcgaggccctgccccaacaccccctctcttaccccaattccgccacattccccttcctttctttctccgcttccttttctccagagatgccttctgcaaagcccggcactgctcaaggtccaagcgccacgcctggggcccagcttctagcacttctcccttaaccctgctaccacgatccgagctgcccttttggccccgtgcaattttattagaaatcattatccctttcgcaattaaacataaccaccaaaccaagaccggcgaagtcactccaggattttttcccaacaagggatcgcctccgctcgaggcagccaccccctcgggccgcagcgccttgggagttttattggctttgagctttcccccaggttggagattctgccaagcggctccggtggctctgctggggtttgcaatcccttaattgcagcgtgtaaaataaaagttgtaccctgaagaggttacttgacagctccaggggttaaacaatttttctcctgtttgtgtgaagctagggccaactgacagttcaaattggtgttcaggctaaggtttcctgggtgcaacgtggacacgaatacagaactcctatggaactgcacacccgcttctgaagttgagcctaaaaacagacgtgtgtgtgcctgcaagtctagataccgtctcgtgcgtgcatcaaaataaatcaccgggaaccgaaatttagc

SEQ ID NO: 280224 - DNA, 908 bp, Homo sapiens
ggccctcaatctcgatgaagataacacgaggagtgcacaggcaagtgcccagttgccagcaattgcttcaaaagcccatgttcttcttttcccccattcttaggcacagccaaaattggtcagaaaggggagtaaagtgggacacgagcttcaaagtagggaaaccaaagaagggagcatccacgtcctctctctccagcttctcccccgcgttcttcgggcgaatccgagggacgggcgctgcgctggggaaagtttgtcccacccgcgtttcgcagctggttgcaaggagaggaggaggagagggagggtcaagctcggagcctgtgaccgcacggatgatcgagccggcgtcgcgcttacctcgcagtcctcgtacttgatattatccgtcaatttccaaagcattttcatggatcggcgtgaacggatatgcccctctcggtctcgcacccaagtggagctactctctggctctttaccaacagcctaatcgcctcattagcatatcaacaatagtccaattgctcgccagtaccacaatctgccgccggccgctccgacacaggtataaaggcctctctacgccgcgaacttgcttctagagcgcactccagcctgcgaactgataaaaccttcctcgagctccgccgcgaggccctgccccaacaccccctctcttaccccaattccgccacattccccttcctttctttctccgcttccttttctccagagatgccttctgcaaagcccggcactgctcaaggtccaagcgccacgcctggggcccagcttctagcacttctcccttaaccctgctaccacgatccgagctgcccttttggccccgtgcaattttattagaaatcattatccctttcgcaattaaacataaccaccaaacc

SEQ ID NO: 280225 - DNA, 1145 bp, Homo sapiens
ggcagagagggagaccgaaggagagagcgcagagagggagaatgtgtctgcgcacagccaaaattggtcagaaaggggagtaaagtgggacacgagcttcaaagtagggaaaccaaagaagggagcatccacgtcctctctctccagcttctcccccgcgttcttcgggcgaatccgagggacgggcgctgcgctggggaaagtttgtcccacccgcgtttcgcagctggttgcaaggagaggaggaggagagggagggtcaagctcggagcctgtgaccgcacggatgatcgagccggcgtcgcgcttacctcgcagtcctcgtacttgatattatccgtcaatttccaaagcattttcatggatcggcgtgaacggatatgcccctctcggtctcgcacccaagtggagctactctctggctctttaccaacagcctaatcgcctcattagcatatcaacaatagtccaattgctcgccagtaccacaatctgccgccggccgctccgacacagagatgccttctgcaaagcccggcactgctcaaggtccaagcgccacgcctggggcccagcttctagcacttctcccttaaccctgctaccacgatccgagctgcccttttggccccgtgcaattttattagaaatcattatccctttcgcaattaaacataaccaccaaaccaagaccggcgaagtcactccaggattttttcccaacaagggatcgcctccgctcgaggcagccaccccctcgggccgcagcgccttgggagttttattggctttgagctttcccccaggttggagattctgccaagcggctccggtggctctgctggggtttgcaatcccttaattgcagcgtgtaaaataaaagttgtaccctgaagaggttacttgacagctccaggggttaaacaatttttctcctgtttgtgtgaagctagggccaactgacagttcaaattggtgttcaggctaaggtttcctgggtgcaacgtggacacgaatacagaactcctatggaactgcacacccgcttctgaagttgagcctaaaaacagacgtgtgtgtgcctgcaagtctagataccgtctcgtgcgtgcatcaaaataaatcaccgggaaccgaaatttagc

SEQ ID NO: 280226 - DNA, 321 bp, Homo sapiens
gatcacgaggtcaggagttcgagaccatcctggccagcatgtcatgttgtcataggaacaactggagaagaataaagtggacacgaaaagggagagtattcttccaacgataatactcacatcgcagaacgcgaaaatcttctgtcaggaggggcgatcctcagagtcactgggctacacaccatcctggagttgcgaggggacagcacagccttcttgtgataaccattccagcacactgtgggaagtacccccagacaggaatactgggcctgatggatcggatagcgtcttcgaggtgttattacaaaccgatctggt

SEQ ID NO: 280227 - DNA, 687 bp, Homo sapiens
ttttctacgatagatcacagttttttattcttaatgtcacaagcaggagaaaaatctcacattcatactaaaaattccaactagactcaacaggaatgaagtctctatttgtaatggaaagtcccagcctcccgctgccgtccagtgtgtgtactgtacacatccacactcactctcactcagggttcccggaccggctgtcctgcctgcggaactgaggtaaacaagctcaggtactgacactaggagggtctaccttacataaggtacaggtagaagcttgattgctaggcccaggcccacccagaccctccaatcctaacaggtatttaggcttgaggttcactccctcctcagctgcacacgcagccaggtataacactcgccctcagtcacaacggggagggggcaccggttacatctacatcacattatttataaaataagaattacatttcatataacatggccagaaggagctctagtcccccaggaaagctgccgggacagcatttgagcctcttctttgcacaggcataacttaactatacagctaattggggggggccccccctgaaaaataatccccccaaataagcagcatgtcatgtccttagaatatgttacactagaaaggtagaaaaattcaggctaaggaggcaatttagagtcaagttatcacgaatt

SEQ ID NO: 280228 - DNA, 1525 bp, Homo sapiens
gcggccgccggcaactcgtccgtcttgataaccatggtggcgggagcgggcgtccgcctcggctgtccgcgccgcccgccgcgccactaacccaagtgccctgcgcgccgcggctgctgagggaaggacggagtcaccggcccacgtggtgcgcgccgtggcctttgaccccgccgccgtttccctgccccaccctcgcgcccggcccagcccacggcggcccgcgagggacaaaacgcgccgcgcctggttccccgcccacggacgcggtgactttccagaacgtcttaaaggcaacgcactctgactcaaggcccagggaggctgggcgccctcgcggggcggggcctcggggagactccctgctgctcgctgcccgtcgggcgggcactgtgaccttgggtggagactggtctggttctgccatggctaatcctcccctctccaaggatcccctgttttctcttgcagatttgctaaatgaccgcgcagtctgtcatctgcggtgttcgcgtgaccctcagcgccctccccacccggcaggccctttcccgccgaatgggtgcggctggattattgagggagtggagggtcgcttagggcacgggcacgagaggcgagggcgagacgtggctaatggggatcaagagtcagaatggacccgccaaactttgccccgagccagaacgggctccctacccgcgtcctcgacccatgggtcctcacctccaggctggtgtcctcattttacagtggaggaggccgagaccaaggtcacacagagagcaaggggtagagccgggtctgactccatccacagccaggacgctttaactcgtatttttcacttggcaggggcttggcggggacggaacggtgaggtcagagaatgctgcagaggggacattgggaccaggtcttgcagtgagttgaagtgctccaggcagagagcgccggtgggtctttcctggccaggccgcagggggcctttgggaagcacccgaggcctataaccttcggagcgtttgtcaagctctaatgagaactggaaagcttcagcttcccgaggtgggctgggagggccctaggtagggcctcgcacaaattgcgaaggaaagccgaccttgttctggagagcacgtggtgaggaaagccagcgacttgatgtgagcatttaaacgggaggaaggaagatgagaactggtaagattcttctcggccgggcggtgcagcggctcacgcctgtaatcctagcactttgggaggccgaagccaggcggatgacttgagttcaggattcggaagtttgagaccaacctgggcaacatttcaaaacccccgtctctacaaaaaatattgtttaaaaaaagccaggtgtagtggcacgcgcctgtagtcccagctacttgggagctgagctgggagtatcactcaggacggctcagattgagcccaggagttccaagctgcagtgagctatgatcgcaccactgcactcctgcctgggtgacacagacaccgtctc

SEQ ID NO: 280229 - DNA, 1443 bp, Homo sapiens
gcggccgccggcaactcgtccgtcttgataaccatggtggcgggagcgggcgtccgcctcggctgtccgcgccgcccgccgcgccactaacccaagtgccctgcgcgccgcggctgctgagggaaggacggagtcaccggcccacgtggtgcgcgccgtggcctttgaccccgccgccgtttccctgccccaccctcgcgcccggcccagcccacggcggcccgcgagggacaaaacgcgccgcgcctggttccccgcccacggacgcggtgactttccagaacgtcttaaaggcaacgcactctgactcaaggcccagggaggctgggcgccctcgcggggcggggcctcggggagactccctgctgctcgctgcccgtcgggcgggcactgtgaccttgggtggagactggtctggttctgccatggctaatcctcccctctccaaggatcccctgttttctcttgcagatttgctaaatgaccgcgcagtctgtcatctgcggtgttcgcgtgaccctcagcgccctccccacccggcaggccctttcccgccgaatgggtgcggctggattattgagggagtggagggtcgcttagggcacgggcacgagaggcgagggcgagacgtggctaatggggatcaagagtcagaatggacccgccaaactttgccccgagccagaacgggctccctacccgcgtcctcgacccatgggtcctcacctccaggctggtgtcctcattttacagtggaggaggccgagaccaaggggcttggcggggacggaacggtgaggtcagagaatgctgcagaggggacattgggaccaggtcttgcagtgagttgaagtgctccaggcagagagcgccggtgggtctttcctggccaggccgcagggggcctttgggaagcacccgaggcctataaccttcggagcgtttgtcaagctctaatgagaactggaaagcttcagcttcccgaggtgggctgggagggccctaggtagggcctcgcacaaattgcgaaggaaagccgaccttgttctggagagcacgtggtgaggaaagccagcgacttgatgtgagcatttaaacgggaggaaggaagatgagaactggtaagattcttctcggccgggcggtgcagcggctcacgcctgtaatcctagcactttgggaggccgaagccaggcggatgacttgagttcaggattcggaagtttgagaccaacctgggcaacatttcaaaacccccgtctctacaaaaaatattgtttaaaaaaagccaggtgtagtggcacgcgcctgtagtcccagctacttgggagctgagctgggagtatcactcaggacggctcagattgagcccaggagttccaagctgcagtgagctatgatcgcaccactgcactcctgcctgggtgacacagacaccgtctc

SEQ ID NO: 280230 - DNA, 770 bp, Homo sapiens
tcttactttatcagcaggtctcttttcagcttccttctttaccttttcagttgtgaggaccttgccattattattaccagaaggaagactggatgatattttgggctcttgcttaatggaaatgttttttgtgcttgaaattttgggtggctccacatcctaaaagatgaaaaaaggcattatctagttccttccccctgaaacaactagcagtatcagttttctgtgtatccatatcgatggtaacgttttaaatccagtataccccatcatccccagatgaaaccgtctagctgcaggaaagcaagctcaaggttcccactgattctacattatgaatgtaagttccatgaaggcaggcagtggattggtcttgcctactgttgtaacccctgtctggcagagttcctggaaaacagcaaataactacatggtcttgctctgtcacccaggttggagtgcactgagatcatggctcactgcagcctcgaactcctgggctcaagtgatcctcctgcctcagcctcccaagcagctaggactacaggcatgcaccaccgtaaccatgcccagatccatttttcaccctacctggcaatctcaaaagaagtccaaagttgatcatatgcacgtgccccagatgaaggaaacagaaactgttcacatagagtgcagtattatcgttgccatttcataatggctctaaaaaactttgttcttcatgacttcgcaagctcttgcaaccccttccaataaacattgatcgaaag

SEQ ID NO: 280231 - DNA, 456 bp, Homo sapiens
aatcaccaaaaagttattacaaataaaagtaaatttccttcttattcctgacaggcattatctagttccttccccctgaaacaactagcagtatcagttttctgtgtatccatatcgatggtaacgttttaaatccaggttggagtgcactgagatcatggctcactgcagcctcgaactcctgggctcaagtgatcctcctgcctcagcctcccaagcagctaggactacaggcatgcaccaccgtaaccatgcccagatccatttttcaccctacctggcaatctcaaaagaagtccaaagttgatcatatgcacgtgccccagatgaaggaaacagaaactgttcacatagagtgcagtattatcgttgccatttcataatggctctaaaaaactttgttcttcatgacttcgcaagctcttgcaaccccttccaataaacattgatcgaaag

SEQ ID NO: 280232 - DNA, 746 bp, Homo sapiens
tcttactttatcagcaggtctcttttcagcttccttctttaccttttcagttgtgaggaccttgccattattattaccagaaggaagactggatgatattttgggctcttgcttaatggaaatgttttttgtgcttgaaattttgggtggctccacatcctaaaagatgaaaaaaggcattatctagttccttccccctgaaacaactagcagtatcagttttctgtgtatccatatcgatggtaacgttttaaatccagtataccccatcatccccagatgaaaccgtctagctgcaggaaagcaagctcaaggttcccactgattctacattatgaatgtaagttccatgaaggcaggcagtggattggtcttgcctactgttgtaacccctgtctggcagagttcctggaaaacagcaaataactgttggagtgcactgagatcatggctcactgcagcctcgaactcctgggctcaagtgatcctcctgcctcagcctcccaagcagctaggactacaggcatgcaccaccgtaaccatgcccagatccatttttcaccctacctggcaatctcaaaagaagtccaaagttgatcatatgcacgtgccccagatgaaggaaacagaaactgttcacatagagtgcagtattatcgttgccatttcataatggctctaaaaaactttgttcttcatgacttcgcaagctcttgcaaccccttccaataaacattgatcgaaag

SEQ ID NO: 280233 - DNA, 315 bp, Homo sapiens
ctatgttaaagttttacttttctgttttttaatttgtaatagataatactgtacacatgatataaaatttaaaatcaccaaaaagttattacaaataaaagtaaatttccttcttattcctgacaggcattatctagttccttccccctgaaacaactagcagtatcagttttctgtgtatccatatcgatggtaacgttttaaatccaggtaggcctctccctgccacagaactccttcctaactgtgttttaaaagatacacttcgcagtttcagtacatagaacttgatgggtttacgtcaagtttactctg

SEQ ID NO: 280234 - DNA, 2340 bp, Homo sapiens
  misc_feature (172)..(172): n is a, c, g, or t
  misc_feature (1948)..(1948): n is a, c, g, or t
  misc_feature (1954)..(1954): n is a, c, g, or t
  misc_feature (1956)..(1956): n is a, c, g, or t
  misc_feature (2084)..(2084): n is a, c, g, or t
  misc_feature (2109)..(2109): n is a, c, g, or t
  misc_feature (2313)..(2313): n is a, c, g, or t
  misc_feature (2325)..(2325): n is a, c, g, or t
aaagaaacatggtctcactctgttgcccaggctggagtacagtggcacaattatagctcactgcagcctcaaactcctgggctcaagcaatcctcctgtctcagcctcctgagtagctggaactacaggtgtgtgctaccactcctggctaagaataccctttgtttggctngtcttaccttatagaaagagtaacagtaatagtacagtgctactccattatcaataggatatgtaactgtaggtttgtactacactagttttgcacaatcacctgtataatcactggcacatggctctaagactattgttgcgtcaaggatgaggtcaatcactaacactgtaaacagcaagtgaaacttaagtaacagaaaagaaagaactgatgcgaatgagaattgctgaactctgctatatgataattctctagctctccactttagaaaagccagaatataaaccctcctgggatatgaagatgacatttccattttgatgatcatctgaaattctttaatgcatcaggattatagtaaatatatcatccttgccaacattccccagataaatgggattttagattagatgagtgatagaaatcttctaaccttgagtttaggaaattatttaatgatacaaaaatacaactatttcttccctaaagattgtatgagttaggaaactcttataaaccatttcctttatgttttagtctatctgaatttctctttacttctgctggaaatgccttgtcaggtacaaaattgcaaagtaattgctcgacttcaatatgactacgtttacaagaatgagaaaatcacatagacctttggggcttatttcaacaaatgaaacgtcaggctgaggccaaacataactcctctggggtttatttgtaccaagctgacaaataaagccaggcagagtttgtttggactcactctgacatttcctctattgaaataagtatattatatattcattaaaagtcattatttcaggaatatctaatattttgagaaatactgtctatatactattaaatgaaaacatgcaaaacctctctatatatagcatatcaattttttaaaaaaaggaaactattaagaaaaaataataaaatgttactaaaagctatttctggtataattataagtgattttttatttttgttacttttaatttcttgttctcattttataatcaagttgaaggagtaataataagtagcagaatacagaaaccaattttattgataaaaaatttcaccaaagacaaattcttccccaattagggtatgaaagagcttaactgcctattacctgcatcaataaagagaacttttaccctgttatttcaagagaaaaagcaatactaaacatattttttcttaaggaaacattttatttcctgaagtagtttggtgaattaaaatttttttaaaagacatttttatcaaataagtatatgaattacatttatccaagtttaggtaaatctgagatgatatatgaaatcaaataataactaagccaaaagatattcaagaactccctcttttttctgatgtcttggaggattgaattaaataataataataataaataaaaagaacttccttttttaaagtcacgggtccagtaacaaagacccactattctcatttccaaaaagtaaaaatacaataaagttaaagcgataatgggatagaagagaataaacagatcatgtctcagaaccacctgaatctttgaaccatgagacctctgagtccctccaggacatgaagcactttcaggacaagtattctctatcaactgagaatatgtacatgtcctctatagcaattataactcaagtatcttaggagaattttcctaaaatgagtacatttttaatagtgctccagatggtcgtcacagcatgttaatgtaaaccaccataaaanctgttncnaatactaacatacatgcacatatacacacgcacacacacacacacacacacacacacacacacacacacacatgcccgcgcacacagtgttctggttgctgaggctctagttaagcatttttatgcantaaattttaactcattatttgaccntcaacgttatgttaaattaaaacagaaaatcttgaaatatttttaacagtacttgccttttttgcagattcagaaaagagaactccgttgtttccaacgatacctactgggtacccaaatattcgagcaaatcctcaaaagaaagttcaaagaagatttatgtcttgtgcttttccaagggcttcaattcacaagaaagaggcntatttacacatnctttaatatcagatc

SEQ ID NO: 280235 - DNA, 520 bp, Homo sapiens
aataaggaaaccacatctggcttagaaatggaaagacctgcttgcagaaaatgaaataaattcaagatcagtcattgaatcctaagaggggccacaaaggaaatgtcagatggagatgaagaagaatacttacccagtgagaccagatggccatagttctccaacattacacatctgtacaaatctctttgagcaggctgaagccatttccactcctcctgggagaagtctatggccacatctctgaatgtcactgacccctgaaatgacggacagatatttgcatgaccagcacgcatgcccccaaactccctcatcaaggaataaaatgagtctcactgtggaggttaggcaatgtgtctaagtagtaacagtgagagttttcagaattctgagtaattatataatgaagagcctagctcttgtgttttgttgtataactggagaaaaggagaaaaacataaattatctgtcctgagataatttacaattttattcaaaataaaggattatacacatg

SEQ ID NO: 280236 - DNA, 1084 bp, Homo sapiens
agcgaatgccagtgaatcccagggcgccctctcccgcgcgttggttctctagccctccttccctgggaggggtgggattgggagtgttctgttttcattactgcaccccttcccctaaagacaacgggactgccctcctccacagcgccttacctcaaacaggggaccgatcttgttcttctccaggttggacacctaatttgcacatcaggactgccatggaccatggtgcaatgaaggtgaagactggagcactcatcacccacgggtctcactttgttgcccaggctggagtatagtgccctgatcacagcttgctgcaacctcaagctcccatgctcaagcaagcttcctgcctcaacttcccaagtagctgagaccacaggcatgctccatgacacctgaactcctgaactcaagcgatcctcctgcctcagccttccaaagtgctgggattacaggcatgagcccctgaaccctgcctaccctctgtttctatgtggtatttgtctttctaagcctggcctatttcgtgtaacataatttcctccagatttatccatattgtctcaaatgaccagatttctttcttttttaaggctgaatagtattccattgtacatatatactacattttatttatccattcatctgttgatggacacttaggttgattccatatcttggctattgtgaataagctgcaatgaacataggagtgcagatactgctttgacatattcatttcattttctttggatatgtatccagaagtggaattgggctggaatataggcagttctatttttaatattttgaggaaactccatattactttccataatagctgtgctaatttacattcccaccgccaatgtataagggcttccttttctccacatcctctccaacactggttatctcttgtctttttgatatgttttctcttctctgtaaagctattggttgtagcattttactttttccaaatttttttaatcaaacttttgaaatgtatagctgaaatgaaagaattttagcatgaatgctaatatacactcagcacctatattcttgctttttc

SEQ ID NO: 280237 - DNA, 560 bp, Homo sapiens
atagtgcctcttatgcttatgctgcaattaagcaacttgtggaagaggcttatgtggtgacattaggaaaaaaggttggacacctaatttgcacatcaggactgccatggaccatggtgcaatgaaggtgaagactggagcactcatcacccacgggtctcactttgttgcccaggctggagtatagtgccctgatcacagcttgctgcaacctcaagctcccatgctcaagcaagcttcctgcctcaacttcccaagtagctgagaccacaggcatgctccatgacacctgaactcctgaactcaagcgatcctcctgcctcagcactttgggaggctgaggcgggcagatcacgaggtcaggagatggaaaacatcctggttaacacggtgaaaccccatctctactaaaaaaatacaaaaaattagccgggtatggtggcgggcgcctgtagtcccagctactcgggaggctgaggcaggagaatggcgtgaacccgggaggcggagcttgcagtgagccaagatcgcaacactgcactccagcctgagcaacagag

SEQ ID NO: 280238 - DNA, 552 bp, Homo sapiens
ggtttttcccagaacacccaggactctggccaggggctggaaggtgctccaggctcaatgctgggcaatactcatggattaattggtgctggctgggcctgccagcctagtcgtggccccagggtccccactaaagggctccttctccagcgcccactctgttggcaaggtcttcactaccatcacctgcctggactccatccaagcatcagggttgctgcagtcgctcctgaagagacccggctctgcttgaaagttcttccctcagcgcctgctggagccctccctgccggagttgccagaatccacacggaatccacagatctgccctgatgatcatgaaggaatgcgaaagagcctggtaaaacgatatggacttgtgcaaatgcaaagcaatggtgaagtcatcacgaaccgcacagactggacagaactcctatctggctgcaatggcttgggttcagtcagcccaggggccagagaattggctacaaagagctctggagtgcccctccctccaaataaagtattctaagcgtgcactgatcaaca

SEQ ID NO: 280239 - DNA, 512 bp, Homo sapiens
aagagatcagaattcagcttccccagggacagcaaggccaagaaggtgtccagatcctggcctctctccagatcttggactctctcaaggccaagactctctctcttaagatctctatctcaaggccaagatctctctccagatattggcctctctcaaggtacttccaagatctcagagggccattcactgtggatctaatatgaagacagagaaaccagccttccagaggagcggacacatttccttagtcccaggatacactttgtgtggaatccacagatctgccctgatgatcatgaaggaatgcgaaagagcctggtaaaacgatatggacttgtgcaaatgcaaagcaatggtgaagtcatcacgaaccgcacagactggacagaactcctatctggctgcaatggcttgggttcagtcagcccaggggccagagaattggctacaaagagctctggagtgcccctccctccaaataaagtattctaagcgtgcactgatcaaca

SEQ ID NO: 280240 - DNA, 1072 bp, Homo sapiens
gaaaacatcttggggtctccacattggaaagaggccagaagatcagtgagcagattgtcattggcacccctgggactgtgctggactggtgctccaagctcaagttcattgatcccaagaaaatcaaggtgtttgttctggatgaggctgatgtcatgatagccactcagggccaccaagatcagagcatccgcatccagaggatgctgcccaggaactgccagatgctgcttttctccgccacctttgaagactctgtgtggaagtttgcccagaaagtggtcccagacccaaacgttatcaaactgaagcgtgaggaagagaccctggacaccatcaagcagtactatgtcctgtgcagcagcagagacgagaagttccaggccttgtgtaacctctacggggccatcaccattgctcaagccatgatcttctgccatactcgcaaaacagctagttggctggcagcagagctctcaaaagaaggccaccaggtggctctgctgagtggggagatgatggtggaacagagggctgcagtgattgagcgcttccgagagggcaaagagaaggttttggtgaccaccaacgtgtgtgcccgcggcattgatgttgaacaagtgtctgtcgtcatcaactttgatcttcccgtggacaaggacgggaatcctgacaatgagacctacctgcaccggatcgggcgcacgggccgctttggcaagaggggcctggcagtgaacatggtggacagcaagcacagcatgaacatcctgaacagaatccaggagcattttaataagaagatagaaagattggacacagatgatttggacgagattgagaaaatagccaactgagaagctccaccagccactgatgccagccctggcactgcccctgcacaggagacaagtgcgttcagggcacaggccccgacatcaccccaaggacaacggcacaagtagagagaaactacctacctcacttcaaattatgtttggacttgacaaaaatgtatgcaaatgatttacgccgggggcgggggcaaagagaaaaaataaactttaacctt

SEQ ID NO: 280241 - DNA, 1106 bp, Homo sapiens
gaaaacatcttggggtctccacattggaaagaggccagaagatcagtgagcagattgtcattggcacccctgggactgtgctggactggtgctccaagctcaagttcattgatcccaagaaaatcaaggtgtttgttctggatgaggctgatgtcatgatagccactcagggccaccaagatcagagcatccgcatccagaggatgctgcccaggaactgccagatgctgcttttctccgccacctttgaagactctgtgtggaagtttgcccagaaagtggtcccagacccaaacgttatcaaactgaagcgtgaggaagagaccctggacaccatcaagcagtactatgtcctgtgcagcagcagagacgagaagttccaggccttgtgtaacctctacggggccatcaccattgctcaagccatgatcttctgccatactcgcaaaacagctagttggctggcagcagagctctcaaaagaaggccaccaggtggctctgctgagtggggagatgatggtggaacagagggctgcagtgattgagcgcttccgagagggcaaagagaaggttttggtgaccaccaacgtgtgtgcccgcggcattgatgttgaacaagtgtctgtcgtcatcaactttgatcttcccgtggacaaggacgggaatcctgacaatgagacctacctgcaccggatcgggcgcacgggccgctttggcaagaggggcctggcagtgaacatggtggacagcaagcacagcatgaacatcctgaacagaatccaggagcattttaataagaagatagaaagattggacacagatgatttggacgagattgagaaaatagccaactgagaagctccaccagccactgatgccagccctggcactgcccctgcacaggagacaagtgcgttcagggcacaggccccgacatcaccccaaggacaacggcacaagtagagagaaactacctacctcacttcaaattatgtttggacttgacaaaaatgtatgcaaatgatgggggatggtagaaaaaaattatttacacaaccttggaagattaggcatgaatacacagagatttacctttaaaaaatt

SEQ ID NO: 280242 - DNA, 2387 bp, Homo sapiens
gaggagacgcgctttgtgctgggcgccggccgcgccagccacggcctgcggcgcccgcggcaccatgatctccaccaaggagaagaacaagatcccgaaggacagcatgacgcttctgccctgcttctacttcgtggagctgcccatagtggcttcttccatcgtatccttgtacttcctggagctgaccgacctcttcaagccggccaaggtgggcttccagtgctatgaccgcactctctccatgccctacgtggagaccaacgaggagctcatcccgctgctgatgctgctcagcttggccttcgcggcccctgccgcctcgatcatggtggccgagggcatgttgtactgtctgcagtcccggctgtggggccgtgccggggggcccgccggggcggagggcagcatcaacgccggcggctgcaacttcaactccttcctgcggcgtacggtgcggtttgtgggtgtccacgtgttcggcctgtgtgccacagccctggtgacggacgtgatccagctggccacgggttaccacactcccttcttcctcaccgtctgcaagcccaactacactctcctgggcacgtcctgcgaggtcaacccctacatcacgcaggacatctgctccggccacgacatccacgccatcctgtctgcacggaagaccttcccgtcccagcacgccacgctgtcagccttcgccgcggtctatgtgtcggtgagtccggcacctcactgcccttcccaggccctcttgctgacccgtggggagccctccctgaccccaacccccatgccccagatgtacttcaactcggtcatctcggacaccaccaagctgctgaagcccatcctggtcttcgcctttgccatcgccgcgggcgtatgcgggctcacgcagatcacgcagtaccgcagccaccctgtggacgtgtatgccggcttcctcatcggggcgggcatcgctgcctacctggcctgccacgcggtgggcaacttccaggccccacctgcagagaagcccgcggccccggcccccgccaaggacgcgctgcgggccctgacgcagcggggccacgactcggtttatcagcagaataagtcggtgagcaccgacgagctggggcccccagggcggctggagggcgcgccccggcccgtggcccgcgagaagacctcgctgggcagcctgaagcgcgccagcgtggacgtggacctgctggccccgcgcagccccatggccaaggagaacatggtgaccttcagccacacgctgcccagggccagcgcgccctcgctggacgaccccgcgcgccgccacatgaccatccacgtgccgctggacgcctcgcgctccaagcagctcatcagcgagtggaagcagaagagcctggagggccgcggcctggggctgcccgacgacgccagccccgggcacctgcgcgcgcccgccgaacccatggcggaggaggaggaagaggaggaggacgaagaggaagaggaggaggaggaagaggaggaggacgagggcccggccccgccctcgctctaccccaccgtgcaggcgcggccggggctggggcctcgggtcatcctcccaccgcgcgcggggccgccgccgctggtgcacatcccggaggagggcgcgcagacgggggccggcctgtcccccaaaagcggcgccggggtgcgcgccaagtggctcatgatggccgagaagagcggggcggcagtggccaaccctccgcggctgctgcaggtcatcgccatgtccaaggctccgggcgcgccgggccccaaggcggccgagacggcgtcgtcgtccagcgccagctccgactcctcgcagtaccggtcgccgtcggaccgcgactccgccagcatcgtgaccatcgacgcgcacgcgccgcaccaccccgtggtgcacctgtcggccggcggcgcgccctgggagtggaaggcggcgggcggcggggccaaggcggaggccgacggcggctacgagctgggggacctggcgcgcggcttccgcggcggggccaagcccccgggcgtgtcccccggctcgtcggtcagcgacgtggaccaggaggagccgcggttcggggccgtggccaccgtcaacctggccacgggcgaggggctgcccccgctgggcgcggccgatggggcgctgggcccgggcagccgggagtccacgctgcggcgccacgcgggcggcctggggctggcggagcgcgaggcggaggcggaggccgagggctacttccgcaagatgcaggcgcgccgcttccccgactagcgcggcggggccgggggcgggcggggggcgggccgagggcgcgggcggccgcgcggatgctcaataaagcggcagaaaccga

SEQ ID NO: 280243 - DNA, 2173 bp, Homo sapiens
gaggagacgcgctttgtgctgggcgccggccgcgccagccacggcctgcggcgcccgcggcaccatgatctccaccaaggagaagaacaagatcccgaaggacagcatgacgcttctgccctgcttctacttcgtggagctgcccatagtggcttcttccatcgtatccttgtacttcctggagctgaccgacctcttcaagccggccaaggtgggcttccagtgctatgaccgcactctctccatgccctacgtggagaccaacgaggagctcatcccgctgctgatgctgctcagcttggccttcgcggcccctgccgcctcgatcatggtggccgagggcatgttgtactgtctgcagtcccggctgtggggccgtgccggggggcccgccggggcggagggcagcatcaacgccggcggctgcaacttcaactccttcctgcggcgtacggtgcggtttgtgggtgtccacgtgttcggcctgtgtgccacagccctggtgacggacgtgatccagctggccacgggttaccacactcccttcttcctcaccgtctgcaagcccaactacactctcctgggcacgtcctgcgaggtcaacccctacatcacgcaggacatctgctccggccacgacatccacgccatcctgtctgcacggaagaccttcccgtcccagcacgccacgctgtcagccttcgccgcggtctatgtgtcgatgtacttcaactcggtcatctcggacaccaccaagctgctgaagcccatcctggtcttcgcctttgccatcgccgcgggcgtatgcgggctcacgcagatcacgcagtaccgcagccaccctgtggacgtgtatgccggcttcctcatcggggcgggcatcgctgcctacctggcctgccacgcggtgggcaacttccaggccccacctgcagagaagcccgcggccccggcccccgccaaggacgcgctgcgggccctgacgcagcggggccacgactcggtttatcagcagaataagtcggtgagcaccgacgagctggggcccccagggcggctggagggcgcgccccggcccgtggcccgcgagaagaccccgcgcgccgccacatgaccatccacgtgccgctggacgcctcgcgctccaagcagctcatcagcgagtggaagcagaagagcctggagggccgcggcctggggctgcccgacgacgccagccccgggcacctgcgcgcgcccgccgaacccatggcggaggaggaggaagaggaggaggacgaagaggaagaggaggaggaggaagaggaggaggacgagggcccggccccgccctcgctctaccccaccgtgcaggcgcggccggggctggggcctcgggtcatcctcccaccgcgcgcggggccgccgccgctggtgcacatcccggaggagggcgcgcagacgggggccggcctgtcccccaaaagcggcgccggggtgcgcgccaagtggctcatgatggccgagaagagcggggcggcagtggccaaccctccgcggctgctgcaggtcatcgccatgtccaaggctccgggcgcgccgggccccaaggcggccgagacggcgtcgtcgtccagcgccagctccgactcctcgcagtaccggtcgccgtcggaccgcgactccgccagcatcgtgaccatcgacgcgcacgcgccgcaccaccccgtggtgcacctgtcggccggcggcgcgccctgggagtggaaggcggcgggcggcggggccaaggcggaggccgacggcggctacgagctgggggacctggcgcgcggcttccgcggcggggccaagcccccgggcgtgtcccccggctcgtcggtcagcgacgtggaccaggaggagccgcggttcggggccgtggccaccgtcaacctggccacgggcgaggggctgcccccgctgggcgcggccgatggggcgctgggcccgggcagccgggagtccacgctgcggcgccacgcgggcggcctggggctggcggagcgcgaggcggaggcggaggccgagggctacttccgcaagatgcaggcgcgccgcttccccgactagcgcggcggggccgggggcgggcggggggcgggccgagggcgcgggcggccgcgcggatgctcaataaagcggcagaaaccga

SEQ ID NO: 280244 - DNA, 2208 bp, Homo sapiens
gaggagacgcgctttgtgctgggcgccggccgcgccagccacggcctgcggcgcccgcggcaccatgatctccaccaaggagaagaacaagatcccgaaggacagcatgacgcttctgccctgcttctacttcgtggagctgcccatagtggcttcttccatcgtatccttgtacttcctggagctgaccgacctcttcaagccggccaaggtgggcttccagtgctatgaccgcactctctccatgccctacgtggagaccaacgaggagctcatcccgctgctgatgctgctcagcttggccttcgcggcccctgccgcctcgatcatggtggccgagggcatgttgtactgtctgcagtcccggctgtggggccgtgccggggggcccgccggggcggagggcagcatcaacgccggcggctgcaacttcaactccttcctgcggcgtacggtgcggtttgtgggtgtccacgtgttcggcctgtgtgccacagccctggtgacggacgtgatccagctggccacgggttaccacactcccttcttcctcaccgtctgcaagcccaactacactctcctgggcacgtcctgcgaggtcaacccctacatcacgcaggacatctgctccggccacgacatccacgccatcctgtctgcacggaagaccttcccgtcccagcacgccacgctgtcagccttcgccgcggtctatgtgtcgatgtacttcaactcggtcatctcggacaccaccaagctgctgaagcccatcctggtcttcgcctttgccatcgccgcgggcgtatgcgggctcacgcagatcacgcagtaccgcagccaccctgtggacgtgtatgccggcttcctcatcggggcgggcatcgctgcctacctggcctgccacgcggtgggcaacttccaggccccacctgcagagaagcccgcggccccggcccccgccaaggacgcgctgcgggccctgacgcagcggggccacgactcggtttatcagcagaataagtcggtgagcaccgacgagctggggcccccagggcggctggagggcgcgccccggcccgtggcccgcgagaagaccccgcgcgccgccacatgaccatccacgtgccgctggacgcctcgcgctccaagcagctcatcagcgagtggaagcagaagagcctggagggccgcggcctggggctgcccgacgacgccagccccgggcacctgcgcgcgcccgccgaacccatggcggaggaggaggaagaggaggaggacgaagaggaagaggaggaggaggaagaggaggaggacgagggcccggccccgccctcgctctaccccaccgtgcaggcgcggccggggctggggcctcgggtcatcctcccaccgcgcgcggggccgccgccgctggtgcacatcccggaggagggcgcgcagacgggggccggcctgtcccccaaaagcggcgccggggtgcgcgccaagtggctcatgatggccgagaagagcggggcggcagtggccaaccctccgcggctgctgcaggtcatcgccatgtccaaggctccgggcgcgccgggccccaaggcggccgagacggcgtcgtcgtccagcgccagctccgactcctcgcagtaccggtcgccgtcggaccgcgactccgccagcatcgtgaccatcgacgcgcacgcgccgcaccaccccgtggtgcacctgtcggccggcggcgcgccctgggagtggaaggcggcgggcggcggggccaaggcggaggccgacggcggctacgagctgggggacctggcgcgcggcttccgcggcggggccaagcccccgggcgtgtcccccggctcgtcggtcagcgacgtggaccaggaggagccgcggttcggggccgtggccaccgtcaacctggccacgggcgaggggctgcccccgctgggcgcggccgatggggcgctgggcccgggcagccgggagtccacgctgcggcgccacgcgggcggcctggggctggcggagcgcgaggcggaggcggaggccgagggctacttccgcaagatgcaggcgcgccgcttccccgactagcgcggcggggccgggggcgggcggggggcgggccgagggcgcgggcggccgcgcggatgctcaataaagcggcagaaaccgaaaaaaacaacacaaacagaacacacaaaaaaaaac

SEQ ID NO: 280245 - DNA, 932 bp, Homo sapiens
cgacccacgcgtcggactagttctagatcgcgagcagacctcgctgggcagcctgaagcgcgccagcgtggacgtggacctgctggccccgcgcagccccatggccaaggagaacatggtgaccttcagccacacgctgcccagggccagcgcgccctcgctggacgaccccgcgcgccgccacatgaccatccacgtgccgctggacgcctcgcgctccaagcagctcatcagcgagtggaagcagaagagcctggagggccgcggcctggggctgcccgacgacgccagccccgggcacctgcgcgcgcccgccgaacccatggcggaggaggaggaagaggaggaggacgaagaggaagaggaggaggaggaagaggaggaggacgagggcccggccccgccctcgctctaccccaccgtgcaggcgcggccggggctggggcctcgggtcatcctcccaccgcgcgcggggccgccgccgctggtgcacatcccggaggagggcgcgcagacgggggccggcctgtcccccaaaagcggcgccggggtgcgcgccaagtggctcatgatggccgagaagagcggggcggcagtggccaaccctccgcggctgctgcaggtcatcgccatgtccaaggctccgggcgcgccgggccccaaggcggccgagacggcgtcgtcgtccagcgccagctccgactcctcgcagtacgtcgcgtcgacggatcgcagcatgtgacatgagcgcagcgcgacacgcgggtaccgttgcggggcccggaatggaagggggggggggcagcgggggagaggaacggggccgccggtccggggcaccgggttcgttcggagaagagcggggggccaacgccgaggccaggtggcgcaagccaccccgggcaggcgaaaccacggcggctgcgggtttg

SEQ ID NO: 280246 - DNA, 1879 bp, Homo sapiens
gaggagacgcgctttgtgctgggcgccggccgcgccagccacggcctgcggcgcccgcggcaccatgatctccaccaaggagaagaacaagatcccgaaggacagcatgacgcttctgccctgcttctacttcgtggagctgcccatagtggcttcttccatcgtatccttgtacttcctggagctgaccgacctcttcaagccggccaaggtgggcttccagtgctatgaccgcactctctccatgccctacgtggagaccaacgaggagctcatcccgctgctgatgctgctcagcttggccttcgcggcccctgccgcctcgatcatggtggccgagggcatgttgtactgtctgcagtcccggctgtggggccgtgccggggggcccgccggggcggagggcagcatcaacgccggcggctgcaacttcaactccttcctgcggcgtacggtgcggtttgtgggtgtccacgtgttcggcctgtgtgccacagccctggtgacggacgtgatccagctggccacgggttaccacactcccttcttcctcaccgtctgcaagcccaactacactctcctgggcacgtcctgcgaggtcaacccctacatcacgcaggacatctgctccggccacgacatccacgccatcctgtctgcacggaagaccttcccgtcccagcacgccacgctgtcagccttcgccgcggtctatgtgtcgatgtacttcaactcggtcatctcggacaccaccaagctgctgaagcccatcctggtcttcgcctttgccatcgccgcgggcgtatgcgggctcacgcagatcacgcagtaccgcagccaccctgtggacgtgtatgccggcttcctcatcggggcgggcatcgctgcctacctggcctgccacgcggtgggcaacttccaggccccacctgcagagaagcccgcggccccggcccccgccaaggacgcgctgcgggccctgacgcagcggggccacgactcggtttatcagcagaataagtcggtgagcaccgacgagctggggcccccagggcggctggagggcgcgccccggcccgtggcccgcgagaagacctcgctgggcagcctgaagcgcgccagcgtggacgtggacctgctggccccgcgcagccccatggccaaggagaacatggtgaccttcagccacacgctgcccagggccagcgcgccctcgctggacgaccccgcgcgccgccacatgaccatccacgtgccgctggacgcctcgcgctccaagcagctcatcagcgagtggaagcagaagagcctggagggccgcggcctggggctgcccgacgacgccagccccgggcacctgcgcgcgcccgccgaacccatggcggaggaggaggaagaggaggaggacgaagaggaagaggaggaggaggaagaggaggaggacgagggcccggccccgccctcgctctaccccaccgtgcaggcgcggccggggctggggcctcgggtcatcctcccaccgcgcgcggggccgccgccgctggtgcacatcccggaggagggcgcgcagacgggggccggcctgtcccccaaaagcggcgccggggtgcgcgccaagtggctcatgatggccgagaagagcggggcggcagtggccaaccctccgcggctgctgcaggtcatcgccattccacgctgcggcgccacgcgggcggcctggggctggcggagcgcgaggcggaggcggaggccgagggctacttccgcaagatgcaggcgcgccgcttccccgactagcgcggcggggccgggggcgggcggggggcgggccgagggcgcgggcggccgcgcggatgctcaataaagcggcagaaaccga

SEQ ID NO: 280247 - DNA, 863 bp, Homo sapiens
gaggagacgcgctttgtgctgggcgccggccgcgccagccacggcctgcggcgcccgcggcaccatgatctccaccaaggagaagaacaagatcccgaaggacagcatgacgcttctgccctgcttctacttcgtggagctgcccatagtggcttcttccatcgtatccttgtacttcctggagctgaccgacctcttcaagccggccaaggtgggcttccagtgctatgaccgcactctctccatgccctacgtggagaccaacgaggagctcatcccgctgctgatgctgctcagcttggccttcgcggcccctgccgcctcgatcatggtggccgagggcatgttgtactgtctgcagtcccggctgtggggccgtgccggggggcccgccggggcggagggcagcatcaacgccggcggctgcaacttcaactccttcctgcggcgtacggtgcggtttgtgggtgtccacgtgttcggcctgtgtgccacagccctggtgacggacgtgatccagctggccacgggttaccacactcccttcttcctcaccgtctgcaagcccaactacactctcctgggcacgtcctgcgaggtcaacccctacatcacgcaggacatctgctccggccacgacatccacgccatcctgtctgcacggaagaccttcccgtcccagcacgccacggcgggcggcctggggctggcggagcgcgaggcggaggcggaggccgagggctacttccgcaagatgcaggcgcgccgcttccccgactagcgcggcggggccgggggcgggcggggggcgggccgagggcgcgggcggccgcgcggatgctcaataaagcggcagaaaccga

SEQ ID NO: 280248 - DNA, 1026 bp, Homo sapiens
gtgaaggtctcagtgaaccaagatagcaccactgcactccagcctgggcaacagagcaagactccatctcaaaaacaaaaagtccacataaatgcaggaagaacttagacaatgcctgaaatgcaaaggcgacactggagtcttctttctctaacgtgtagcgttgaatgaatatctgcctggaaccaagagggctgctctgatgtttgggagtcggttttttgtgagccacatctgatatttctgatatccccaggaaggagtggcctggaggtcactggttcaggctccctttgggcgaaatcctgggagtgatgctctaaaaatccacctttcccatcatccctactcatcagaaagacaaatataaaatcccagagaggtggaggagctaaaaaagcaattgctccaccttacaaatttggatagaaaggagatgtagtttatttcatatgggcaaagtagtcctcttccaaagtcctgtacagttgttctctgcaattgacgcacatctgccctaagcgaaatctgtcagaaggaatcaacaaggctccttgcctcccctcccaatcccccttttggaggacttgtggcttcagtgtcgtcctaagtgagagtggcgtgtgcttttttcctgtcccctcctccctccgtgtcctagacgctggctgccttctgtgcactcccaggcagatcactacggaagagtcggagcctgtggggttggactggccacactcagtcctgagaaggcgagttgccatggaaagctgggggcagaggtgtttttggagaggaggcggcaggcaaacattgcctttgacttgctctccgcgtacccggggttgtagagctgctcaggaaggggcaggatgtaaggccagaggtgcctggtgggtgagaagcccaggcagggctgggcgccctctccgaagaggtggcagcagggtgaccctgaactcccaaatggggagtgatgccactggggaaactgagtggatcaaagagatgaaaccaaaaaaaagc

SEQ ID NO: 280249 - DNA, 6272 bp, Homo sapiens
  misc_feature (2117)..(2117): n is a, c, g, or t
  misc_feature (2120)..(2120): n is a, c, g, or t
cctgcctgcccccaaaatgtgaagcttgctgaaatcaacttgaaaggagatagcacatgccttttgtttctccgctctccccctatttctcttccttcctgctccctgcataatctgaattctctgaaggcaggggtcctgtcttactcatcttgatgttcatcgtgactcgtacagcagcggcggcagcggcagcccagccgagcgttaggtgctgctctctgcgcggcgttttgcaaaggacttcaccgatctacttttgcagtcgcctcggactgtccatgtgtttacttcccccagcccgaggattcgatatctaggttcctgtgaaatgcaactgagcagccaaagtactttgagaacacggggcggcataaacaccaaaacttttttgtggaaggaaaatgcaataagcaagcttgccgttttccgatgcggtgtggagtgagtgtgtgtcgcgcgtgtccgcactggaggcatatgcttgtgtgtgtacatggggtgtgtttttcggtatgtagggagaaaatgcttgccaaccaccggaaatctcctggaatttattagaaaataatggattataaaaagaaggcaagcaaggagcggatctccccttgagttgcaacccgatttgctgctggctcagtttgttgtgattctttttgttgataggtgtctgatggtattccgataacgttccccccttttcttccccttgagcttttacagtttaaaaaaaggaaacaaaaaccaccccaaaatctccccccccgtttttttcgccccgtcgggatcgccgtttccatccatgtgcttgcgtctcccccgcgttccacttaaactattttaatccttggacccaaggaggaggctgataggggggtggataaaaaaagttcttccaaaatagtgtgcccggggagcaggatgggggatttcgcagcccccgctgctgccgcgaatggcagtagtatttgcatcaacagtagcctgaacagcagcctcggcggggccgggatcggtgtgaataatactcccaatagtactcccgctgctccgagtagcaatcacccggcagccggtggatgcggcggctccgggggccccggcggcggttcggcggccgttcccaagcacagcaccgtggtggagcggctccgccagcgcatcgagggctgccgtcggcaccacgtcaactgcgagaacaggtaccagcaggctcaggtggagcagctggagctggagcgccgggacaccgtgagcctctaccagcggaccctggagcagagggccaagaaatcgggcgccggcaccggcaaacagcagcacccgagcaaaccccagcaagatgcggaggctgcctcggcggagcagaggaaccacacgctgatcatgctacaagagactgtgaaaaggaagttggaaggagctcgatcaccacttaatggagaccagcagaatggtgcttgtgatgggaatttttctccgactagcaaacgaattcgaaaggacatttctgcggggatggaagccatcaacaatttgcccagtaacatgccactgccttcagcttctcctcttcaccaacttgacctgaaaccttctttgcccttgcagaacagtggaactcacactcctgggcttctagaagatctaagtaagaatggtaggctccctgagattaaacttcctgtcaacggttgcagtgacctggaggatagcttcaccatcttgcagagcaaagacctcaaacaagaacctctcgatgaccctacttgcatagacacatcagaaacatctctttcaaatcagaacaagctgttctcagacattaatctgaatgatcaggagtggcaagaattaatagatgaattggccaacacggttcctgaggatgacatacaggacctgttcaacgaagactttgaagagaagaaggagccagaattctcgcagccagcaactgagacccctctctcccaggagagtgcgagcgtgaagagcgacccctctcactctcccttcgcacatgtctccatgggatctccccaggcgaggccttcttcttctggtcctcccttttctactgtctccacggccactagtttaccttctgntgncagcactcccgcagctccaaaccctgcaagctcaccagcaaactgtgctgtccagtcccctcaaactccaaaccaagcccacactccaggccaagctccacctcggcctggaaatggttatctcctgaatccggcagcagtgacagtggccggttcagcgtcagggcctgtggctgtgcccagctctgacatgtctccagcagaacagctcaaacagatggctgcacagcagcaacaaagggccaaactcatgcagcagaagcagcaacagcaacagcagcagcagcagcagcagcagcaacagcagcagcagcagcagcaacagcactcaaatcagacttcaaattggtctcccttaggacctccctctagtccatatggagcagcttttactgcagaaaaaccaaatagcccaatgatgtacccccaagcctttaacaaccaaaaccctatagtgcctccaatggcaaacaacctgcagaagacaacaatgaataactacctccctcagaatcacatgaatatgatcaatcagcagccaaataacttgggtacaaactccttaaacaaacagcacaatattctgacttatggcaacactaaacccctgacccacttcaatgcagacctgagtcagaggatgacaccaccagtggccaaccccaacaaaaaccccttgatgccgtatatccagcagcagcaacagcagcagcaacagcaacagcagcagcagcagcagcagcagccgccacctccacagctccaggcccccagggcacacctgagcgaagaccagaaacgcctgcttctcatgaagcagaaaggagtgatgaatcagcccatggcttacgctgcacttccatcccacggtcaggagcagcatccagttggacttccccgaaccacaggccccatgcagtcctccgtgcccccaggctcaggtggcatggtctcaggagccagtcccgcaggccccggcttcctgggcagccagccccaagcagccatcatgaagcagatgctcattgatcagcgggcccagttgatagagcagcagaagcaacagttcctgcgggagcaaagcgcagcagcagcagcagcagcagcagattttggcggaacagcagttgcagcaatcacatctaccccggcagcacctccagccacagcggaatccatacccagtgcagcaggtcaatcagtttcaaggttctccccaggatatagcagccgtaagaagccaagcagccctccagagcatgcgaacgtcacggctgatggcacagaacgcaggcatgatgggaataggaccctcccagaaccctgggacgatggccaccgcagctgcgcagtcggagatgggactggccccttatagcaccacgcctaccagccaaccaggaatgtacaatatgagcacaggcatgacccaaatgttgcagcatccaaaccaaagtggcatgagcatcacacataaccaagcccagggaccgaggcaacctgcctctgggcagggggttggaatggtgagtggctttggtcagagcatgctggtgaactcagccattacccagcaacatccacagatgaaagggccagtaggccaggccttgcctaggccccaagcccctccaaggctgcagagccttatgggaacagtccagcaaggagcacaaagctggcaacagaggagcttgcagggcatgcctgggaggactagtggagaattgggaccattcaacaatggcgccagctaccctcttcaagctgggcagccgagactgaccaagcagcacttcccacagggactgagccagtcagtcgtggatgctaacacgggcacagtgaggaccctcaacccagctgccatgggtcggcagatgatgccatcgctcccggggcagcaaggcaccagccaggcgaggccaatggtcatgtctggcctgagccagggagtcccaggcatgccagcgttcagccagcccccagcacagcagcagatacccagtggcagctttgctccaagcagccagagccaagcctatgagcggaatgcccctcaggacgtgtcatacaattacagtggcgacggagctgggggttccttccctggcctcccggacggtgcagaccttgtggactccatcatcaaaggcgggccaggggacgagtggatgcaggagcttgatgaattgtttggtaacccctaatcaagagaggccccaagatccacaactcgagtggttaaagcttaaaaagtgaaaaagaaacaggatgttgacccatccttgttttttgtttttttgacccacgtaaactgagcaaaactgcagctggctgacaatggaagatccaggtgccaatccacagccccaccaggcctcatttcacctgattttcacacagcaatcgagatgagacgccatgcagatcccggctgcgagagagggagacacccggaggagcaggtgggaagatgaagccggccagagcccctctgcccagcatgccctgtgatcgcctggcccagcaggagctgcttcagccgagagggactattacccaagagaggtatcctcagcccctcctgccccaggtcgggagacagcagctttggagacacaaaagagacagagcctcagccagggagagtgagtcccccagaagaggctgggtggttgcacaggccaggtgcacaggttggaaatgcactgaactctgggtgccgagagatgtaaggctttgagacatgctactgaatttggagggcaggcacgaagaacagtgagattgtcaaaaggagacaaccacagatcctacaggactgtctgtctcctgccccatgatgaccctcaggaattgcaaaggctctgctgtcacaaggagagcaggctgagtttggagcagggtccatccggcagtcctgggacggcttccctctgctggtgcccctggtggcagtccctccaggtggggctggagcctgctggcgcccaatacaaaacccatacatccaggtgggtcacatctacttctggcggccgcagggcagggaaacccctactggaccctgtgtgtctgccagcctggagcctttgtctccagccctgcctttattcctccttgcctccacaccagcctccccttgcttctccttacagactatccaagaagtgaagcttatgtctttagggagccttgggcagagtccacataaatgcaggaagaacttagacaatgcctgaaatgcaaaggcgacactggagtcttctttctctaacgtgtagcgttgaatgaatatctgcctggaaccaagagggctgctctgatgtttgggagtcggttttttgtgagccacatctgatatttctgatatccccaggaaggagtggcctggaggtcactggttcaggctccctttgggcgaaatcctgggagtgatgctctaaaaatccacctttcccatcatccctactcatcagaaagacaaatataaaatcccagagaggtggaggagctaaaaaagcaattgctccaccttacaaatttggatagaaaggagatgtagtttatttcatatgggcaaagtagtcctcttccaaagtcctgtacagttgttctctgcaattgacgcacatctgccctaagcgaaatctgtcagaaggaatcaacaaggctccttgcctcccctcccaatcccccttttggaggacttgtggcttcagtgtcgtcctaagtgagagtggcgtgtgcttttttcctgtcccctcctccctccgtgtcctagacgctggctgccttctgtgcactcccaggcagatcactacggaagagtcggagcctgtggggttggactggccacactcagtcctgagaaggcgagttgccatggaaagctgggggcagaggtgtttttggagaggaggcggcaggcaaacattgcctttgacttgctctccgcgtacccggggttgtagagctgctcaggaaggggcaggatgtaaggccagaggtgcctggtgggtgagaagcccaggcagggctgggcgccctctccgaagaggtggcagcagggtgaccctgaactcccaaatggggagtgatgccactggggaaactgagtggatcaaagagatgaaaccaaaaaaaagc

SEQ ID NO: 280250 - DNA, 5806 bp, Homo sapiens
  misc_feature (2117)..(2117): n is a, c, g, or t
  misc_feature (2120)..(2120): n is a, c, g, or t
cctgcctgcccccaaaatgtgaagcttgctgaaatcaacttgaaaggagatagcacatgccttttgtttctccgctctccccctatttctcttccttcctgctccctgcataatctgaattctctgaaggcaggggtcctgtcttactcatcttgatgttcatcgtgactcgtacagcagcggcggcagcggcagcccagccgagcgttaggtgctgctctctgcgcggcgttttgcaaaggacttcaccgatctacttttgcagtcgcctcggactgtccatgtgtttacttcccccagcccgaggattcgatatctaggttcctgtgaaatgcaactgagcagccaaagtactttgagaacacggggcggcataaacaccaaaacttttttgtggaaggaaaatgcaataagcaagcttgccgttttccgatgcggtgtggagtgagtgtgtgtcgcgcgtgtccgcactggaggcatatgcttgtgtgtgtacatggggtgtgtttttcggtatgtagggagaaaatgcttgccaaccaccggaaatctcctggaatttattagaaaataatggattataaaaagaaggcaagcaaggagcggatctccccttgagttgcaacccgatttgctgctggctcagtttgttgtgattctttttgttgataggtgtctgatggtattccgataacgttccccccttttcttccccttgagcttttacagtttaaaaaaaggaaacaaaaaccaccccaaaatctccccccccgtttttttcgccccgtcgggatcgccgtttccatccatgtgcttgcgtctcccccgcgttccacttaaactattttaatccttggacccaaggaggaggctgataggggggtggataaaaaaagttcttccaaaatagtgtgcccggggagcaggatgggggatttcgcagcccccgctgctgccgcgaatggcagtagtatttgcatcaacagtagcctgaacagcagcctcggcggggccgggatcggtgtgaataatactcccaatagtactcccgctgctccgagtagcaatcacccggcagccggtggatgcggcggctccgggggccccggcggcggttcggcggccgttcccaagcacagcaccgtggtggagcggctccgccagcgcatcgagggctgccgtcggcaccacgtcaactgcgagaacaggtaccagcaggctcaggtggagcagctggagctggagcgccgggacaccgtgagcctctaccagcggaccctggagcagagggccaagaaatcgggcgccggcaccggcaaacagcagcacccgagcaaaccccagcaagatgcggaggctgcctcggcggagcagaggaaccacacgctgatcatgctacaagagactgtgaaaaggaagttggaaggagctcgatcaccacttaatggagaccagcagaatggtgcttgtgatgggaatttttctccgactagcaaacgaattcgaaaggacatttctgcggggatggaagccatcaacaatttgcccagtaacatgccactgccttcagcttctcctcttcaccaacttgacctgaaaccttctttgcccttgcagaacagtggaactcacactcctgggcttctagaagatctaagtaagaatggtaggctccctgagattaaacttcctgtcaacggttgcagtgacctggaggatagcttcaccatcttgcagagcaaagacctcaaacaagaacctctcgatgaccctacttgcatagacacatcagaaacatctctttcaaatcagaacaagctgttctcagacattaatctgaatgatcaggagtggcaagaattaatagatgaattggccaacacggttcctgaggatgacatacaggacctgttcaacgaagactttgaagagaagaaggagccagaattctcgcagccagcaactgagacccctctctcccaggagagtgcgagcgtgaagagcgacccctctcactctcccttcgcacatgtctccatgggatctccccaggcgaggccttcttcttctggtcctcccttttctactgtctccacggccactagtttaccttctgntgncagcactcccgcagctccaaaccctgcaagctcaccagcaaactgtgctgtccagtcccctcaaactccaaaccaagcccacactccaggccaagctccacctcggcctggaaatggttatctcctgaatccggcagcagtgacagtggccggttcagcgtcagggcctgtggctgtgcccagctctgacatgtctccagcagaacagctcaaacagatggctgcacagcagcaacaaagggccaaactcatgcagcagaagcagcaacagcaacagcagcagcagcagcagcagcagcaacagcagcagcagcagcagcaacagcactcaaatcagacttcaaattggtctcccttaggacctccctctagtccatatggagcagcttttactgcagaaaaaccaaatagcccaatgatgtacccccaagcctttaacaaccaaaaccctatagtgcctccaatggcaaacaacctgcagaagacaacaatgaataactacctccctcagaatcacatgaatatgatcaatcagcagccaaataacttgggtacaaactccttaaacaaacagcacaatattctgacttatggcaacactaaacccctgacccacttcaatgcagacctgagtcagaggatgacaccaccagtggccaaccccaacaaaaaccccttgatgccgtatatccagcagcagcaacagcagcagcaacagcaacagcagcagcagcagcagcagcagccgccacctccacagctccaggcccccagggcacacctgagcgaagaccagaaacgcctgcttctcatgaagcagaaaggagtgatgaatcagcccatggcttacgctgcacttccatcccacggtcaggagcagcatccagttggacttccccgaaccacaggccccatgcagtcctccgtgcccccaggctcaggtggcatggtctcaggagccagtcccgcaggccccggcttcctgggcagccagccccaagcagccatcatgaagcagatgctcattgatcagcgggcccagttgatagagcagcagaagcaacagttcctgcgggagcaaagcgcagcagcagcagcagcagcagcagattttggcggaacagcagttgcagcaatcacatctaccccggcagcacctccagccacagcggaatccatacccagtgcagcaggtcaatcagtttcaaggttctccccaggatatagcagccgtaagaagccaagcagccctccagagcatgcgaacgtcacggctgatggcacagaacgcaggcatgatgggaataggaccctcccagaaccctgggacgatggccaccgcagctgcgcagtcggagatgggactggccccttatagcaccacgcctaccagccaaccaggaatgtacaatatgagcacaggcatgacccaaatgttgcagcatccaaaccaaagtggcatgagcatcacacataaccaagcccagggaccgaggcaacctgcctctgggcagggggttggaatggtgagtggctttggtcagagcatgctggtgaactcagccattacccagcaacatccacagatgaaagggccagtaggccaggccttgcctaggccccaagcccctccaaggctgcagagccttatgggaacagtccagcaaggagcacaaagctggcaacagaggagcttgcagggcatgcctgggaggactagtggagaattgggaccattcaacaatggcgccagctaccctcttcaagctgggcagccgagactgaccaagcagcacttcccacagggactgagccagtcagtcgtggatgctaacacgggcacagtgaggaccctcaacccagctgccatgggtcggcagatgatgccatcgctcccggggcagcaaggcaccagccaggcgaggccaatggtcatgtctggcctgagccagggagtcccaggcatgccagcgttcagccagcccccagcacagcagcagatacccagtggcagctttgctccaagcagccagagccaagcctatgagcggaatgcccctcaggacgtgtcatacaattacagtggcgacggagctgggggttccttccctggcctcccggacggtgcagaccttgtggactccatcatcaaaggcgggccaggggacgagtggatgcaggagcttgatgaattgtttggtaacccctaatcaagagaggccccaagatccacaactcgagtggttaaagcttaaaaagtgaaaaagaaacaggatgttgacccatccttgttttttgtttttttgacccacgtaaactgagcaaaactgcagctggctgacaatggaagatccaggtgccaatccacagccccaccaggcctcatttcacctgattttcacacagcaatcgagatgagacgccatgcagatcccggctgcgagagagggagacacccggaggagcaggtgggaagatgaagccggccagagcccctctgcccagcatgccctgtgatcgcctggcccagcaggagctgcttcagccgagagggactattacccaagagaggtatcctcagcccctcctgccccaggtcgggagacagcagctttggagacacaaaagagacagagcctcagccagggagagtgagtcccccagaagaggctgggtggttgcacaggccaggtgcacaggttggaaatgcactgaactctgggtgccgagagatgtaaggctttgagacatgctactgaatttggagggcaggcacgaagaacagtgagattgtcaaaaggagacaaccacagatcctacaggactgtctgtctcctgccccatgatgaccctcaggaattgcaaaggctctgctgtcacaaggagagcaggctgagtttggagcagggtccatccggcagtcctgggacggcttccctctgctggtgcccctggtggcagtccctccaggtggggctggagcctgctggcgcccaatacaaaacccatacatccaggtgggtcacatctacttctggcggccgcagggcagggaaacccctactggaccctgtgtgtctgccagcctggagcctttgtctccagccctgcctttattcctccttgcctccacaccagcctccccttgcttctccttacagactatccaagaagtgaagcttatgtctttagggagccttgggcagagtccacataaatgcaggaagaacttagacaatgcctgaaatgcaaaggcgacactggagtcttctttctctaacgtgtgcttttttcctgtcccctcctccctccgtgtcctagacgctggctgccttctgtgcactcccaggcagatcactacggaagagtcggagcctgtggggttggactggccacactcagtcctgagaaggcgagttgccatggaaagctgggggcagaggtgtttttggagaggaggcggcaggcaaacattgcctttgacttgctctccgcgtacccggggttgtagagctgctcaggaaggggcaggatgtaaggccagaggtgcctggtgggtgagaagcccaggcagggctgggcgccctctccgaagaggtggcagcagggtgaccctgaactcccaaatggggagtgatgccactggggaaactgagtggatcaaagagatgaaaccaaaaaaaagc

SEQ ID NO: 280251 - DNA, 3797 bp, Homo sapiens
  misc_feature (2117)..(2117): n is a, c, g, or t
  misc_feature (2120)..(2120): n is a, c, g, or t
  misc_feature (3491)..(3491): n is a, c, g, or t
  misc_feature (3506)..(3506): n is a, c, g, or t
  misc_feature (3540)..(3540): n is a, c, g, or t
  misc_feature (3664)..(3664): n is a, c, g, or t
  misc_feature (3666)..(3666): n is a, c, g, or t
  misc_feature (3669)..(3669): n is a, c, g, or t
  misc_feature (3671)..(3671): n is a, c, g, or t
cctgcctgcccccaaaatgtgaagcttgctgaaatcaacttgaaaggagatagcacatgccttttgtttctccgctctccccctatttctcttccttcctgctccctgcataatctgaattctctgaaggcaggggtcctgtcttactcatcttgatgttcatcgtgactcgtacagcagcggcggcagcggcagcccagccgagcgttaggtgctgctctctgcgcggcgttttgcaaaggacttcaccgatctacttttgcagtcgcctcggactgtccatgtgtttacttcccccagcccgaggattcgatatctaggttcctgtgaaatgcaactgagcagccaaagtactttgagaacacggggcggcataaacaccaaaacttttttgtggaaggaaaatgcaataagcaagcttgccgttttccgatgcggtgtggagtgagtgtgtgtcgcgcgtgtccgcactggaggcatatgcttgtgtgtgtacatggggtgtgtttttcggtatgtagggagaaaatgcttgccaaccaccggaaatctcctggaatttattagaaaataatggattataaaaagaaggcaagcaaggagcggatctccccttgagttgcaacccgatttgctgctggctcagtttgttgtgattctttttgttgataggtgtctgatggtattccgataacgttccccccttttcttccccttgagcttttacagtttaaaaaaaggaaacaaaaaccaccccaaaatctccccccccgtttttttcgccccgtcgggatcgccgtttccatccatgtgcttgcgtctcccccgcgttccacttaaactattttaatccttggacccaaggaggaggctgataggggggtggataaaaaaagttcttccaaaatagtgtgcccggggagcaggatgggggatttcgcagcccccgctgctgccgcgaatggcagtagtatttgcatcaacagtagcctgaacagcagcctcggcggggccgggatcggtgtgaataatactcccaatagtactcccgctgctccgagtagcaatcacccggcagccggtggatgcggcggctccgggggccccggcggcggttcggcggccgttcccaagcacagcaccgtggtggagcggctccgccagcgcatcgagggctgccgtcggcaccacgtcaactgcgagaacaggtaccagcaggctcaggtggagcagctggagctggagcgccgggacaccgtgagcctctaccagcggaccctggagcagagggccaagaaatcgggcgccggcaccggcaaacagcagcacccgagcaaaccccagcaagatgcggaggctgcctcggcggagcagaggaaccacacgctgatcatgctacaagagactgtgaaaaggaagttggaaggagctcgatcaccacttaatggagaccagcagaatggtgcttgtgatgggaatttttctccgactagcaaacgaattcgaaaggacatttctgcggggatggaagccatcaacaatttgcccagtaacatgccactgccttcagcttctcctcttcaccaacttgacctgaaaccttctttgcccttgcagaacagtggaactcacactcctgggcttctagaagatctaagtaagaatggtaggctccctgagattaaacttcctgtcaacggttgcagtgacctggaggatagcttcaccatcttgcagagcaaagacctcaaacaagaacctctcgatgaccctacttgcatagacacatcagaaacatctctttcaaatcagaacaagctgttctcagacattaatctgaatgatcaggagtggcaagaattaatagatgaattggccaacacggttcctgaggatgacatacaggacctgttcaacgaagactttgaagagaagaaggagccagaattctcgcagccagcaactgagacccctctctcccaggagagtgcgagcgtgaagagcgacccctctcactctcccttcgcacatgtctccatgggatctccccaggcgaggccttcttcttctggtcctcccttttctactgtctccacggccactagtttaccttctgntgncagcactcccgcagctccaaaccctgcaagctcaccagcaaactgtgctgtccagtcccctcaaactccaaaccaagcccacactccaggccaagctccacctcggcctggaaatggttatctcctgaatccggcagcagtgacagtggccggttcagcgtcagggcctgtggctgtgcccagctctgacatgtctccagcagaacagctcaaacagatggctgcacagcagcaacaaagggccaaactcatgcagcagaagcagcaacaacagcagcagcagcagcagcaacagcactcaaatcagacttcaaattggtctcccttaggacctccctctagtccatatggagcagcttttactgcagaaaaaccaaatagcccaatgatgtacccccaagcctttaacaaccaaaaccctatagtgcctccaatggcaaacaacctgcagaagacaacaatgaataactacctccctcagaatcacatgaatatgatcaatcagcagccaaataacttgggtacaaactccttaaacaaacagcacaatattctgacttatggcaacactaaacccctgacccacttcaatgcagacctgagtcagaggatgacaccaccagtggccaaccccaacaaaaaccccttgatgccgtatatccagcagcagcaacagcagcagcaacagcaacagcagcagcagcagcagcagcagccgccacctccacagctccaggcccccagggcacacctgagcgaagaccagaaacgcctgcttctcatgaagcagaaaggagtgatgaatcagcccatggcttacgctgcacttccatcccacggtcaggtaagtgtgaaagtgacacactcttcgagcagttcttgtggtgcatttcaagactgtcgatgtgtgatgttctacaaagcttccactgtagtggggtctaattgcctgcagaaaacctctttacaacatcctcaggtagtggccaggtttggagtgttctttttccatttctcctaagaaatggaaaagggtggcatgataaactttcgtgtatttcagtgtctaggaatcaaacttcttttattcccaactgcagataagaattacataaaattctcactctgagggagggaggctgcagaggtcactccaccaaacacggcactacctctgtagcttctctcccagcttgcatgatcccaggctctgggtggtgggaagcaggggacattcagggctgtctacaacagttttataaggccctgagcagccttcgagttttttaaattttattttagtgaatacatgcattaaaataaaacaacaacaacaacaacaacaaaaacacaaagaggctagagatttcnccgtttctacccccnaaataacgcttgctatcaagactttggagggggntgggggaaaagaatttaaaagccaaataatttttttttcataaaaagtaaaagctaccataaaacatttttttttctgtcacactgattaaatttcttctgaaaagccgcacatatagacaaancnaancnaaaattcctgaactggacaaacagcaaatactcaacagggttgttaacctaggtaacagttcagtagtttaaagaatcttttagacatctggaagcctttctattcattcctcagtacagtgttcc

SEQ ID NO: 280252 - DNA, 4112 bp, Homo sapiens
aaacttacggctaggtacgaggctgggtttgaatcggccgaggctccaggccaagctccacctcggcctggaaatggttatctcctgaatccggcagcagtgacagtggccggttcagcgtcagggcctgtggctgtgcccagctctgacatgtctccagcagaacagctcaaacagatggctgcacagcagcaacaaagggccaaactcatgcagcagaagcagcaacagcaacagcagcagcagcagcagcagcagcaacagcagcagcagcagcagcaacagcactcaaatcagacttcaaattggtctcccttaggacctccctctagtccatatggagcagcttttactgcagaaaaaccaaatagcccaatgatgtacccccaagcctttaacaaccaaaaccctatagtgcctccaatggcaaacaacctgcagaagacaacaatgaataactacctccctcagaatcacatgaatatgatcaatcagcagccaaataacttgggtacaaactccttaaacaaacagcacaatattctgacttatggcaacactaaacccctgacccacttcaatgcagacctgagtcagaggatgacaccaccagtggccaaccccaacaaaaaccccttgatgccgtatatccagcagcagcaacagcagcagcaacagcaacagcagcagcagcagcagcagcagccgccacctccacagctccaggcccccagggcacacctgagcgaagaccagaaacgcctgcttctcatgaagcagaaaggagtgatgaatcagcccatggcttacgctgcacttccatcccacggtcaggagcagcatccagttggacttccccgaaccacaggccccatgcagtcctccgtgcccccaggctcaggtggcatggtctcaggagccagtcccgcaggccccggcttcctgggcagccagccccaagcagccatcatgaagcagatgctcattgatcagcgggcccagttgatagagcagcagaagcaacagttcctgcgggagcaaagcgcagcagcagcagcagcagcagcagattttggcggaacagcagttgcagcaatcacatctaccccggcagcacctccagccacagcggaatccatacccagtgcagcaggtcaatcagtttcaaggttctccccaggatatagcagccgtaagaagccaagcagccctccagagcatgcgaacgtcacggctgatggcacagaacgcaggcatgatgggaataggaccctcccagaaccctgggacgatggccaccgcagctgcgcagtcggagatgggactggccccttatagcaccacgcctaccagccaaccaggaatgtacaatatgagcacaggcatgacccaaatgttgcagcatccaaaccaaagtggcatgagcatcacacataaccaagcccagggaccgaggcaacctgcctctgggcagggggttggaatggtgagtggctttggtcagagcatgctggtgaactcagccattacccagcaacatccacagatgaaagggccagtaggccaggccttgcctaggccccaagcccctccaaggctgcagagccttatgggaacagtccagcaaggagcacaaagctggcaacagaggagcttgcagggcatgcctgggaggactagtggagaattgggaccattcaacaatggcgccagctaccctcttcaagctgggcagccgagactgaccaagcagcacttcccacagggactgagccagtcagtcgtggatgctaacacgggcacagtgaggaccctcaacccagctgccatgggtcggcagatgatgccatcgctcccggggcagcaaggcaccagccaggcgaggccaatggtcatgtctggcctgagccagggagtcccaggcatgccagcgttcagccagcccccagcacagcagcagatacccagtggcagctttgctccaagcagccagagccaagcctatgagcggaatgcccctcaggacgtgtcatacaattacagtggcgacggagctgggggttccttccctggcctcccggacggtgcagaccttgtggactccatcatcaaaggcgggccaggggacgagtggatgcaggagcttgatgaattgtttggtaacccctaatcaagagaggccccaagatccacaactcgagtggttaaagcttaaaaagtgaaaaagaaacaggatgttgacccatccttgttttttgtttttttgacccacgtaaactgagcaaaactgcagctggctgacaatggaagatccaggtgccaatccacagccccaccaggcctcatttcacctgattttcacacagcaatcgagatgagacgccatgcagatcccggctgcgagagagggagacacccggaggagcaggtgggaagatgaagccggccagagcccctctgcccagcatgccctgtgatcgcctggcccagcaggagctgcttcagccgagagggactattacccaagagaggtatcctcagcccctcctgccccaggtcgggagacagcagctttggagacacaaaagagacagagcctcagccagggagagtgagtcccccagaagaggctgggtggttgcacaggccaggtgcacaggttggaaatgcactgaactctgggtgccgagagatgtaaggctttgagacatgctactgaatttggagggcaggcacgaagaacagtgagattgtcaaaaggagacaaccacagatcctacaggactgtctgtctcctgccccatgatgaccctcaggaattgcaaaggctctgctgtcacaaggagagcaggctgagtttggagcagggtccatccggcagtcctgggacggcttccctctgctggtgcccctggtggcagtccctccaggtggggctggagcctgctggcgcccaatacaaaacccatacatccaggtgggtcacatctacttctggcggccgcagggcagggaaacccctactggaccctgtgtgtctgccagcctggagcctttgtctccagccctgcctttattcctccttgcctccacaccagcctccccttgcttctccttacagactatccaagaagtgaagcttatgtctttagggagccttgggcagagtccacataaatgcaggaagaacttagacaatgcctgaaatgcaaaggcgacactggagtcttctttctctaacgtgtagcgttgaatgaatatctgcctggaaccaagagggctgctctgatgtttgggagtcggttttttgtgagccacatctgatatttctgatatccccaggaaggagtggcctggaggtcactggttcaggctccctttgggcgaaatcctgggagtgatgctctaaaaatccacctttcccatcatccctactcatcagaaagacaaatataaaatcccagagaggtggaggagctaaaaaagcaattgctccaccttacaaatttggatagaaaggagatgtagtttatttcatatgggcaaagtagtcctcttccaaagtcctgtacagttgttctctgcaattgacgcacatctgccctaagcgaaatctgtcagaaggaatcaacaaggctccttgcctcccctcccaatcccccttttggaggacttgtggcttcagtgtcgtcctaagtgagagtggcgtgtgcttttttcctgtcccctcctccctccgtgtcctagacgctggctgccttctgtgcactcccaggcagatcactacggaagagtcggagcctgtggggttggactggccacactcagtcctgagaaggcgagttgccatggaaagctgggggcagaggtgtttttggagaggaggcggcaggcaaacattgcctttgacttgctctccgcgtacccggggttgtagagctgctcaggaaggggcaggatgtaaggccagaggtgcctggtgggtgagaagcccaggcagggctgggcgccctctccgaagaggtggcagcagggtgaccctgaactcccaaatggggagtgatgccactggggaaactgagtggatcaaagagatgaaaccaaaaaaaagc

SEQ ID NO: 280253 - DNA, 3906 bp, Homo sapiens
  misc_feature (2117)..(2117): n is a, c, g, or t
  misc_feature (2120)..(2120): n is a, c, g, or t
cctgcctgcccccaaaatgtgaagcttgctgaaatcaacttgaaaggagatagcacatgccttttgtttctccgctctccccctatttctcttccttcctgctccctgcataatctgaattctctgaaggcaggggtcctgtcttactcatcttgatgttcatcgtgactcgtacagcagcggcggcagcggcagcccagccgagcgttaggtgctgctctctgcgcggcgttttgcaaaggacttcaccgatctacttttgcagtcgcctcggactgtccatgtgtttacttcccccagcccgaggattcgatatctaggttcctgtgaaatgcaactgagcagccaaagtactttgagaacacggggcggcataaacaccaaaacttttttgtggaaggaaaatgcaataagcaagcttgccgttttccgatgcggtgtggagtgagtgtgtgtcgcgcgtgtccgcactggaggcatatgcttgtgtgtgtacatggggtgtgtttttcggtatgtagggagaaaatgcttgccaaccaccggaaatctcctggaatttattagaaaataatggattataaaaagaaggcaagcaaggagcggatctccccttgagttgcaacccgatttgctgctggctcagtttgttgtgattctttttgttgataggtgtctgatggtattccgataacgttccccccttttcttccccttgagcttttacagtttaaaaaaaggaaacaaaaaccaccccaaaatctccccccccgtttttttcgccccgtcgggatcgccgtttccatccatgtgcttgcgtctcccccgcgttccacttaaactattttaatccttggacccaaggaggaggctgataggggggtggataaaaaaagttcttccaaaatagtgtgcccggggagcaggatgggggatttcgcagcccccgctgctgccgcgaatggcagtagtatttgcatcaacagtagcctgaacagcagcctcggcggggccgggatcggtgtgaataatactcccaatagtactcccgctgctccgagtagcaatcacccggcagccggtggatgcggcggctccgggggccccggcggcggttcggcggccgttcccaagcacagcaccgtggtggagcggctccgccagcgcatcgagggctgccgtcggcaccacgtcaactgcgagaacaggtaccagcaggctcaggtggagcagctggagctggagcgccgggacaccgtgagcctctaccagcggaccctggagcagagggccaagaaatcgggcgccggcaccggcaaacagcagcacccgagcaaaccccagcaagatgcggaggctgcctcggcggagcagaggaaccacacgctgatcatgctacaagagactgtgaaaaggaagttggaaggagctcgatcaccacttaatggagaccagcagaatggtgcttgtgatgggaatttttctccgactagcaaacgaattcgaaaggacatttctgcggggatggaagccatcaacaatttgcccagtaacatgccactgccttcagcttctcctcttcaccaacttgacctgaaaccttctttgcccttgcagaacagtggaactcacactcctgggcttctagaagatctaagtaagaatggtaggctccctgagattaaacttcctgtcaacggttgcagtgacctggaggatagcttcaccatcttgcagagcaaagacctcaaacaagaacctctcgatgaccctacttgcatagacacatcagaaacatctctttcaaatcagaacaagctgttctcagacattaatctgaatgatcaggagtggcaagaattaatagatgaattggccaacacggttcctgaggatgacatacaggacctgttcaacgaagactttgaagagaagaaggagccagaattctcgcagccagcaactgagacccctctctcccaggagagtgcgagcgtgaagagcgacccctctcactctcccttcgcacatgtctccatgggatctccccaggcgaggccttcttcttctggtcctcccttttctactgtctccacggccactagtttaccttctgntgncagcactcccgcagctccaaaccctgcaagctcaccagcaaactgtgctgtccagtcccctcaaactccaaaccaagcccacactccaggccaagctccacctcggcctggaaatggttatctcctgaatccggcagcagtgacagtggccggttcagcgtcagggcctgtggctgtgcccagctctgacatgtctccagcagaacagctcaaacagatggctgcacagcagcaacaaagggccaaactcatgcagcagaagcagcaacagcaacagcagcagcagcagcagcagcagcaacagcagcagcagcagcagcaacagcactcaaatcagacttcaaattggtctcccttaggacctccctctagtccatatggagcagcttttactgcagaaaaaccaaatagcccaatgatgtacccccaagcctttaacaaccaaaaccctatagtgcctccaatggcaaacaacctgcagaagacaacaatgaataactacctccctcagaatcacatgaatatgatcaatcagcagccaaataacttgggtacaaactccttaaacaaacagcacaatattctgacttatggcaacactaaacccctgacccacttcaatgcagacctgagtcagaggatgacaccaccagtggccaaccccaacaaaaaccccttgatgccgtatatccagcagcagcaacagcagcagcaacagcaacagcagcagcagcagcagcagcagccgccacctccacagctccaggcccccagggcacacctgagcgaagaccagaaacgcctgcttctcatgaagcagaaaggagtgatgaatcagcccatggcttacgctgcacttccatcccacggtcaggagcagcatccagttggacttccccgaaccacaggccccatgcagtcctccgtgcccccaggctcaggtggcatggtctcaggagccagtcccgcaggccccggcttcctgggcagccagccccaagcagccatcatgaagcagatgctcattgatcagcgggcccagttgatagagcagcagaagcaacagttcctgcgggagcaaagcgcagcagcagcagcagcagcagcagattttggcggaacaggtgacatgccccttggcgtgattcattcattcattcagcaagcacttattcagcacctgcctgctgcctgtgaggaagtggcagttcacatcctccatcaagatgctcacggtctagcatttcccaggatcacaagagaacctgaagaatttagacctttcaattagttagggtttttcctataatgaattaatttgttcttaaaagacaggctccagccatcaatttgaaggcctgtgtgccagagacatttctttgattcaagtctgactcctttccttctgatttctggtacaggggtctgtgtaatcagcacatggcggggactgtctcacatgctccataagccgtaatatttctagcttgaagaaaaaaataataattcagagaactctgtttcttagaggaaattgacaggaagaggaattgagaagaattctatagaatgggtaatgaacaatggatcaggaacaatagcagaataataaggcccgcagaactacctggaaacctgaactctgggtcacacacagggtgcaaacttaagaaaactccccacagcttttaaaacagctcaggacatctgtgagttcaaggaaagcctacacaaatacagtttaccttaagcattttgtccacctcgcctatattcctcgcttgag

SEQ ID NO: 280254 - DNA, 2489 bp, Homo sapiens
ggcaggaggagatggtcatgccaaggggactttttagtgaattttttcaggcaaaaaacccctactaccaccaccaaagctgagatgatccgtaacagaggacagaggatacaggcagttttcaaaaaaatattgatctggatcagatgggctgataaggcccaaacacttataaaccaaagctgcaggtctctaaggtcttcagagaagctacacaaaatactatgatttcattagcatccacatatgtatcattttccacaacattttacaattctcttgtttcacagggaaggtgaactaattataatgaaatatcagtaatgtatcttaaataagtaacatgttgctggaaaaaatttaagttaaaatgcactacataatagtgcagaaacaaagtgcaggtggcaattttaagacatgaaaacaatgctgaatcagtagtgtttggagtgatacattttgcccatttttggccagtcctagaacagtactcaccacaagctgcatgccaaatatgaactaatgaggctaaaacactgaagaccaaatagaaccactctagagtctgtttcacaatgagatactcctccccgttctggaaacagcgatctgctgtagttcctatcctcctgtggcacctatccctgctacagtacctataaccagatgtcctccatcatccagcctccaggacaagtggtgctcagtgagtcacaacctgaggaacagctgctggttaccgatttgtattcctgtatatactcgacttgggtagccaggattttctcgtttgtcttgaatatatttacttctaaaaagactgttagtcttgttgggaggtgagcagaggaatgtttacttgctggagaacatagtaacaaacatcacttctcacccctcataaacagaaagcccattgtctgtgccgtgaaaagaggactaccttgtcaggaagattttacttacctctacaagaaaaaggactcgtattaaaatcgacctgtggttaccacccttagaaatgctgttttcagatattcctattcctagtcttagaggcagccatggaatatatagtctcctctgaccttggggtcaggaagaaagggaaatctattcataaaaggaatttaaattctggcctaggcctctcaaacctgcttcaagtgaaagaagatagcttaactaacaggagcctcaagttgaatgtctttttttttttttttttttttttgagatggagtctccctgtgttgcccaggctggagtgcaatggcatgatcttggcttactgcagtctccacctctcgggctcaagcgattctccggcctcagcctcctgagtagctgggattacaggcatgcactaccccgcctagctaatttttgtatttttagtagagatggggtttcaccatgttggccaggctggtcttgaactcctgacctcaggtgatccgcccacctcagcctcccaatgtgctgagattacaggcgtgagccactgtgcctggcctgattcctttaatacaggctcaagcacaagtgcccacacgtatactgtgggtacaaccttcttttttttttttgagacggagtctcactctgtcgcccaggctggagtgcagtggcgcgatcttggctcactgcaagctccgcctcctgggttcacgccattctcctgcctcagcctcccgagtagctgggactacaggtgcctgccaccatgtccgactaatttttttgtatttttagtagagatggggtttcaccgtgttagacaggatggtctcgaactcctgaccttgtgatccgcccgcctcggcctcccaaagtgctgggattacaggtgtgagccaccgcgcccggcctggcagaaccttcttaacaagagggtccctccagcacatctttccgagagctaagttggtggggaaaacagactttgcactcatttggccgactgcctgagcagggtctgggaaaaatgcctttaaccccacctctgattccttgctcctatgctagaagactagcacatctatccctactgaacaaggagcttgtctggggttagggcactctcatcaaaaggcatctttgatgtttttgagctggcgcacagccagatctacagggaggctaaacttgaggctgctgaggcgactgagcaggttgagggcactctcaaagcctgtgtgtgccatgtagctccagggctggtagtgaggctcgatgagtgacccggacttgcagatgaggttcacccaggacaccagacgctgctcattcagtgccatgcacaccaaggccttcaattctgagtctgcactgcgcttaaaagggtcatgctctgtcagcaccatgtggatggctgtcagtaggctctgtttgggggtgacaacagtgcctcccgtaacaggaagggcgaaggactgggagagcttccgggctggggattccacataagcacggccgttcttagc

SEQ ID NO: 280255 - DNA, 1303 bp, Homo sapiens
ggcaggaggagatggtcatgccaaggggactttttagtgaattttttcaggcaaaaaacccctactaccaccaccaaagctgagatgatccgtaacagaggacagaggatacaggcagttttcaaaaaaatattgatctggatcagatgggctgataaggcccaaacacttataaaccaaagctgcaggtctctaaggtcttcagagaagctacacaaaatactatgatttcattagcatccacatatgtatcattttccacaacattttacaattctcttgtttcacagggaaggtgaactaattataatgaaatatcagtaatgtatcttaaataagtaacatgttgctggaaaaaatttaagttaaaatgcactacataatagtgcagaaacaaagtgcaggtggcaattttaagacatgaaaacaatgctgaatcagtagtgtttggagtgatacattttgcccatttttggccagtcctagaacagtactcaccacaagctgcatgccaaatatgaactaatgaggctaaaacactgaagaccaaatagaaccactctagagtctgtttcacaatgagatactcctccccgttctggaaacagcgatctgctgtagttcctatcctcctgtggcacctatccctgctacagtacctataaccagatgtcctccatcatccagcctccaggacaagtggtgctcagtgagtcacaacctgaggaacagctgctggttaccgatttgtattcctgtatatactcgacttgggtagccaggattttctcgtttgtcttgaatatatttacttctaaaaagactgttagtcttgttgggaggtgagcagaggaatgtttacttgctggagaacatagtaacaaacatcacttctcacccctcataaacagaaagcccattgtctgtgccgtgaaaagaggactaccttgtcaggaagattttacttacctctacaagaaaaaggactcgtattaaaatcgacctgtggttaccacccttagaaatgctgttttcagatattcctattcctagtcttagaggcagccatggaatatatagtctcctctgaccttggggtcaggaagaaagggaaatctattcataaaaggaatttaaattctggcctaggcctctcaaacctgcttcaagtgaaagaagatagcttaactaacaggagcctcaagttgaatgtctttttttttttttttttttggggccaaggcgattgggggttcccgagcaaaattccgtaaccttggccttagtttttcccggtgtaaaa

SEQ ID NO: 280256 - DNA, 539 bp, Homo sapiens
ccaggatcagcagtcttctgctgccttcttaatgtttcacctaagttcccatagttgctctcaaaaagtttcttggccctcgtgggccagtgtggaggggctgtatcatcattcatcaggagcgtcacttggtggtttagggggaaataatctattcttaagattgaagagagtgcaggatttggggggttgactctacatccttcagtatcagggcttatctccttgtcttacctcctaggagaccctcctgttcttaactgtgggcgatgagaaaggtggtggactcttcttactggcagggccacctgcgtctgtggagaccctggggcccagggtggctgaggtcctggaaggcaaaggagcagggaagaaaggccgttttcagggcaaggccaccaagatgagccggcggatggaggcgcaggcgcttctccaggactacatcagcacgcagagtgctaaggagtgagggcttagggcactcacctcctgtttccacaggaatcttttggtcaataaaatagattgactcagaa

SEQ ID NO: 280257 - DNA, 1148 bp, Homo sapiens
tcctaagtgaaatctccccttcactgtttcagagctgaggaacagataggtttctcctgccttcaggttctaggatccgctgtggtttatgcatgtgcacacgtgtgtgtgtgtgttacccccttgcctcatgtaggtcattaagattctgggcactgagaaggggaaaaagaacagaaccaacctgatatttctgtctgggaaccgggtgctgaagtggatggagagaagtcatggaactgaaaaagcactgactgctctgcttaaaagtatgcctgtttcagtaccttcgattacctcccatttctgagattttcgacataatctcttaccctggggtgtggagcagaggatcatgtggaagcagtgaaaaagctccagaactccaccaagatcctgcagaaggataggctctgcagacttggtcttctgcctaaacagatgtgtagtttgtcaaagtgggagtgaggggagaatgaggtggagggaagctgatactctctattgttatcctttccatttatctactgagttaccatatccatttcagaataacctgaatctgctcagagacctggctgtgcacattgcccatagcctcaggaacagtccagactggggaggtgtggtcatattacacaggtgagaaattaggagctggacacaaggaaggggaactgtgttgggcttagggctcagtgtcttctctatatgcaatgtacagtgggaggtggattgctcactggtattctcaagcagtactctctcttggctaagggatatgggactttatgtgtacataggcagcaaggccagcctcagaaggaggggccaggcttcctgcagtttcacagccaccactccaacctgggtctcatgtctgtgtcctttgttgtaggaaggagggtgattcagagttcatgaatatcattgccaatgagattgggtcagaggtaagaggagcatgagattctctaccccggcctggatagagacctagggagacataagtgaggggcgctagtttagccaaagtccctccacatgaacacatgaggaggaggaaatagccattcattcaatactgttttcttagtactagctatatgccaagctctgttttaggtgttgagctagatctatgttat

SEQ ID NO: 280258 - DNA, 896 bp, Homo sapiens
gtcagctcaccgcaacctccacctcttaaaaggcttttgatggcaaaatttgagtctcaatgcaggccctagaataacagccccagcaactgtacatccattaattcattaaatcctttggccaggcgtggtgctcatgcctagctaatttttttgtatttttagtagagatggggtttcaccgtgttagacaggatggtctcgaactcctgaccttgtgatccgcccgcctcggcctcccaaagtgctgggattacaggtgtgagccaccgcgcccggcctggcagaaccttcttaacaagagggtccctccagcacatctttccgagagctaagttggtggggaaaacagactttgcactcatttggccgactgcctgagcagggtctgggaaaaatgcctttaaccccacctctgattccttgctcctatgctagaagactagcacatctatccctactgaacaaggagcttgtctggggttagggcactctcatcaaaaggcatctttgatgtttttgagctggcgcacagccagatctacagggaggctaaacttgaggctgctgaggcgactgagcaggttgagggcactctcaaagcctgtgtgtgccatgtagctccagggctggtagtgaggctcgatgagtgacccggacttgcagatgaggttcacccaggacaccagacgctgctcattcagtgccatgcacaccaaggccttcaattctgagtctgcactgcgcttaaaagggtcatgctctgtcagcaccatgtggatggctgtcagtaggctctgtttgggggtgacaacagtgcctcccgtaacaggaagggcgaaggactgggagagcttccgggctggggattccacataagcacggccgttcttagc

SEQ ID NO: 280259 - DNA, 2182 bp, Homo sapiens
tgaagtacccaagtccccgagggcgcgccttccccgggaatttaattcaggacaataatgttttattgagcgcctattgtgaatcagacactgagcagtaagcgtcggagaaacagtctatgcatttctgaagaccccacggtgaagggctgcaaggatgaagctgtcccagagtatctccagagtgcagatcccttggctgccaggtcatgttctctcttcctctcaactgctctcccgaccatataaggagaggcagctgctgggggcgtccccaggatctaaagatagcggcccctgcctggaactctaaatgccaccctggagcgggagccgcaatggcacggtgagtgtttccggctccggtgctccccctggcccttggcacgaggtggagattccctgctccaagtcttctgggcgctccaggttctgtgaggccccacgggagccccggacccctggtctctgtaactgtggggtgagggaaggcagcacgcccggaccttgtggtacgacaggcccaggtatgtgttcatggagttttgtgttgaggacagcaccgatgtccacgtgcttattgaggatcaccgcattgtgttcagctgcaagaatgccgatggagtggagttgtacaatgagattgagttctatgccaaagtgaactccaaggactcccaggataagcgctcttcccgctctattacttgttttgtgagaaaatggaaggaaaaggtggcctggccgcggcttaccaaggaggatatcaagccagtgtggctgtctgtggactttgataactggagagactgggaaggggatgaagagatggagctggctcatgtggaacattatgcagagcttttgaagaaggtcagcaccaagagacctccacctgccatggatgatttggatttcaccaccaccgtggtctcttgctgtcccgcggagctgcagactgaagggagcaacggcaagaaagaagtgctgagcggtttccaagtggtgctggaagacacagtgcttttccctgagggcgggggacagcctgatgaccgtggtacaatcaatgacatctctgtgctgagagtgactcgccgtggggaacaggctgatcatttcacccagacacccctggatccaggaagccaggttctggtccgggtagattgggagcggaggtttgaccacatgcagcagcattcagggcagcatctcatcacggcagttgctgaccatctatttaagctgaagacaacatcatgggagttagggagatttcggagtgcgattgagctggacaccccctctatgactgcagagcaagtagctgccattgagcagagcgtcaatgaaaaaatcagagatcggctgcctgtgaatgtccgagaactgagcctggatgatcctgaggtggagcaggtgagtggccggggtttgcctgatgatcatgctgggcccattcgggttgttaacatcgagggcgttgattccaacatgtgctgtgggacccatgtgagcaatctcagtgaccttcaggtcattaagattctgggcactgagaaggggaaaaagaacagaaccaacctgatatttctgtctgggaaccgggtgctgaagtggatggagagaagtcatggaactgaaaaagcactgactgctctgcttaagtgtggagcagaggatcatgtggaagcagtgaaaaagctccagaactccaccaagatcctgcagaagaataacctgaatctgctcagagacctggctgtgcacattgcccatagcctcaggaacagtccagactggggaggtgtggtcatattacacaggaaggagggtgattcagagttcatgaatatcattgccaatgagattgggtcagaggagaccctcctgttcttaactgtgggcgatgagaaaggtggtggactcttcttactggcagggccacctgcgtctgtggagaccctggggcccagggtggctgaggtcctggaaggcaaaggagcagggaagaaaggccgttttcagggcaaggccaccaagatgagccggcggatggaggcgcaggcgcttctccaggactacatcagcacgcagagtgctaaggagtgagggcttagggcactcacctcctgtttccacaggaatcttttggtcaataaaatagattgactcagaa

SEQ ID NO: 280260 - DNA, 1348 bp, Homo sapiens
ccaggcttctctgcgcgtgcgcctcctcacacgcctgcaggtatggcgttctggtgtcagcgtgacagttatgcccgagagttcaccaccaccgtggtctcttgctgtcccgcggagctgcagactgaagggagcaacggcaagaaagaagtgctgagcggtttccaagtggtgctggaagacacagtgcttttccctgagggcgggggacagcctgatgaccgtggtacaatcaatgacatctctgtgctgagagtgactcgccgtggggaacaggctgatcatttcacccagacacccctggatccaggaagccaggttctggtccgggtagattgggagcggaggtttgaccacatgcagcagcattcagggcagcatctcatcacggcagttgctgaccatctatttaagctgaagacaacatcatgggagttagggagatttcggagtgcgattgagctggacaccccctctatgactgcagagcaagtagctgccattgagcagagcgtcaatgaaaaaatcagagatcggctgcctgtgaatgtccgagaactgagcctggatgatcctgaggtggagcaggtgagtggccggggtttgcctgatgatcatgctgggcccattcgggttgttaacatcgagggcgttgattccaacatgtgctgtgggacccatgtgagcaatctcagtgaccttcaggtcattaagattctgggcactgagaaggggaaaaagaacagaaccaacctgatatttctgtctgggaaccgggtgctgaagtggatggagagaagtcatggaactgaaaaagcactgactgctctgcttaagtgtggagcagaggatcatgtggaagcagtgaaaaagctccagaactccaccaagatcctgcagaagaataacctgaatctgctcagagacctggctgtgcacattgcccatagcctcaggaacagtccagactggggaggtgtggtcatattacacaggaaggagggtgattcagagttcatgaatatcattgccaatgagattgggtcagaggagaccctcctgttcttaactgtgggcgatgagaaaggtggtggactcttcttactggcagggccacctgcgtctgtggagaccctggggcccagggtggctgaggtcctggaaggcaaaggagcagggaagaaaggccgttttcagggcaaggccaccaagatgagccggcggatggaggcgcaggcgcttctccaggactacatcagcacgcagagtgctaaggagtgagggcttagggcactcacctcctgtttccacaggaatcttttggtcaataaaatagattgactcagaa

SEQ ID NO: 280261 - DNA, 2037 bp, Homo sapiens
tgaagtacccaagtccccgagggcgcgccttccccgggaatttaattcaggacaataatgttttattgagcgcctattgtgaatcagacactgagcagtaagcgtcggagaaacagtctatgcatttctgaagaccccacggtgaagggctgcaaggatgaagctgtcccagagtatctccagagtgcagatcccttggctgccaggtcatgttctctcttcctctcaactgctctcccgaccatataaggagaggcagctgctgggggcgtccccaggatctaaagatagcggcccctgcctggaactctaaatgccaccctggagcgggagccgcaatggcacggcagcacgcccggaccttgtggtacgacaggcccaggtatgtgttcatggagttttgtgttgaggacagcaccgatgtccacgtgcttattgaggatcaccgcattgtgttcagctgcaagaatgccgatggagtggagttgtacaatgagattgagttctatgccaaagtgaactccaaggactcccaggataagcgctcttcccgctctattacttgttttgtgagaaaatggaaggaaaaggtggcctggccgcggcttaccaaggaggatatcaagccagtgtggctgtctgtggactttgataactggagagactgggaaggggatgaagagatggagctggctcatgtggaacattatgcagagcttttgaagaaggtcagcaccaagagacctccacctgccatggatgatttggatttcaccaccaccgtggtctcttgctgtcccgcggagctgcagactgaagggagcaacggcaagaaagaagtgctgagcggtttccaagtggtgctggaagacacagtgcttttccctgagggcgggggacagcctgatgaccgtggtacaatcaatgacatctctgtgctgagagtgactcgccgtggggaacaggctgatcatttcacccagacacccctggatccaggaagccaggttctggtccgggtagattgggagcggaggtttgaccacatgcagcagcattcagggcagcatctcatcacggcagttgctgaccatctatttaagctgaagacaacatcatgggagttagggagatttcggagtgcgattgagctggacaccccctctatgactgcagagcaagtagctgccattgagcagagcgtcaatgaaaaaatcagagatcggctgcctgtgaatgtccgagaactgagcctggatgatcctgaggtggagcaggtgagtggccggggtttgcctgatgatcatgctgggcccattcgggttgttaacatcgagggcgttgattccaacatgtgctgtgggacccatgtgagcaatctcagtgaccttcaggtcattaagattctgggcactgagaaggggaaaaagaacagaaccaacctgatatttctgtctgggaaccgggtgctgaagtggatggagagaagtcatggaactgaaaaagcactgactgctctgcttaagtgtggagcagaggatcatgtggaagcagtgaaaaagctccagaactccaccaagatcctgcagaagaataacctgaatctgctcagagacctggctgtgcacattgcccatagcctcaggaacagtccagactggggaggtgtggtcatattacacaggaaggagggtgattcagagttcatgaatatcattgccaatgagattgggtcagaggagaccctcctgttcttaactgtgggcgatgagaaaggtggtggactcttcttactggcagggccacctgcgtctgtggagaccctggggcccagggtggctgaggtcctggaaggcaaaggagcagggaagaaaggccgttttcagggcaaggccaccaagatgagccggcggatggaggcgcaggcgcttctccaggactacatcagcacgcagagtgctaaggagtgagggcttagggcactcacctcctgtttccacaggaatcttttggtcaataaaatagattgactcagaa

SEQ ID NO: 280262 - DNA, 2092 bp, Homo sapiens
tgaagtacccaagtccccgagggcgcgccttccccgggaatttaattcaggacaataatgttttattgagcgcctattgtgaatcagacactgagcagtaagcgtcggagaaacagtctatgcatttctgaagaccccacggtgaagggctgcaaggatgaagctgtcccagagtatctccagagtgcagatcccttggctgccaggtcatgttctctcttcctctcaactgctctcccgaccatataaggagaggcagctgctgggggcgtccccaggatctaaagatagcggcccctgcctggaactctaaatgccaccctggagcgggagccgcaatggcacggtgagtgtttccggctccggtgctccccctggcccttggcacgaggtggagattccctgctccaagtcttctgggcgctccaggttctgtgaggccccacgggagccccggacccctggtctctgtaactgtggggtgagggaaggcagcacgcccggaccttgtggtacgacaggcccaggtatgtgttcatggagttttgtgttgaggacagcaccgatgtccacgtgcttattgaggatcaccgcattgtgttcagctgcaagaatgccgatggagtggagttgtacaatgagattgagttctatgccaaagtgaactccaaggactcccaggataagcgctcttcccgctctattacttgttttgtgagaaaatggaaggaaaaggtggcctggccgcggcttaccaaggaggatatcaagcttttgaagaaggtcagcaccaagagacctccacctgccatggatgatttggatttcaccaccaccgtggtctcttgctgtcccgcggagctgcagactgaagggagcaacggcaagaaagaagtgctgagcggtttccaagtggtgctggaagacacagtgcttttccctgagggcgggggacagcctgatgaccgtggtacaatcaatgacatctctgtgctgagagtgactcgccgtggggaacaggctgatcatttcacccagacacccctggatccaggaagccaggttctggtccgggtagattgggagcggaggtttgaccacatgcagcagcattcagggcagcatctcatcacggcagttgctgaccatctatttaagctgaagacaacatcatgggagttagggagatttcggagtgcgattgagctggacaccccctctatgactgcagagcaagtagctgccattgagcagagcgtcaatgaaaaaatcagagatcggctgcctgtgaatgtccgagaactgagcctggatgatcctgaggtggagcaggtgagtggccggggtttgcctgatgatcatgctgggcccattcgggttgttaacatcgagggcgttgattccaacatgtgctgtgggacccatgtgagcaatctcagtgaccttcaggtcattaagattctgggcactgagaaggggaaaaagaacagaaccaacctgatatttctgtctgggaaccgggtgctgaagtggatggagagaagtcatggaactgaaaaagcactgactgctctgcttaagtgtggagcagaggatcatgtggaagcagtgaaaaagctccagaactccaccaagatcctgcagaagaataacctgaatctgctcagagacctggctgtgcacattgcccatagcctcaggaacagtccagactggggaggtgtggtcatattacacaggaaggagggtgattcagagttcatgaatatcattgccaatgagattgggtcagaggagaccctcctgttcttaactgtgggcgatgagaaaggtggtggactcttcttactggcagggccacctgcgtctgtggagaccctggggcccagggtggctgaggtcctggaaggcaaaggagcagggaagaaaggccgttttcagggcaaggccaccaagatgagccggcggatggaggcgcaggcgcttctccaggactacatcagcacgcagagtgctaaggagtgagggcttagggcactcacctcctgtttccacaggaatcttttggtcaataaaatagattgactcagaa

SEQ ID NO: 280263 - DNA, 1495 bp, Homo sapiens
ccaggcttctctgcgcgtgcgcctcctcacacgcctgcaggtatggcgttctggtgtcagcgtgacagttatgcccgagagttcaccaccaccgtggtctcttgctgtcccgcggagctgcagactgaagggagcaacggcaagaaagaagtgctgagcggtttccaagtggtgctggaagacacagtgcttttccctgagggcgggggacagcctgatgaccgtggtacaatcaatgacatctctgtgctgagagtgactcgccgtggggaacaggctgatcatttcacccagacacccctggatccaggaagccaggttctggtccgggtagattgggagcggaggtttgaccacatgcagcagcattcagggcagcatctcatcacggcagttgctgaccatctatttaagctgaagacaacatcatgggagttagggagatttcggagtgcgattgagctggacaccccctctatgactgcagagcaagtagctgccattgagcagagcgtcaatgaaaaaatcagagatcggctgcctgtgaatgtccgagaactgagcctggatgatcctgaggtggagcaggtgagtggccggggtttgcctgatgatcatgctgggcccattcgggttgttaacatcgagggcgttgattccaacatgtgctgtgggacccatgtgagcaatctcagtgaccttcaggtcattaagattctgggcactgagaaggggaaaaagaacagaaccaacctgatatttctgtctgggaaccgggtgctgaagtggatggagagaagtcatggaactgaaaaagcactgactgctctgcttaagtgtggagcagaggatcatgtggaagcagtgaaaaagctccagaactccaccaagatcctgcagaagaataacctgaatctgctcagagacctggctgtgcacattgcccatagcctcaggaacagtccagactggggaggtgtggtcatattacacaggagaccctcctgttcttaactgtgggcgatgagaaaggtggtggactcttcttactggcagggccacctgcgtctgtggagaccctggggcccagggtggctgaggtcctggaaggcaaaggagcagggaagaaaggccgttttcagggcaaggccaccaagatgagccggcggatggaggcgcaggcgcttctccaggactacatcagcacgcagagtgctaaggagtgagggcttagggcactcacctcctgtttccacaggaatcttttggtcaataaaatagattgactcagaaaaaaaaagaaagacacaaaacaacaacagtgttggggcgcacctagggcccagaagagagaaggtgaagaaaaccacgtcagttgggacagcgggggcaccacaaggaaacggggaaacaggggcaccatagcgaggtacacaagggaaacaccggggaacagagaacgaagacggaggaacacacaaccaattaaaaggag

SEQ ID NO: 280264 - DNA, 1293 bp, Homo sapiens
ccaggcttctctgcgcgtgcgcctcctcacacgcctgcaggtatggcgttctggtgtcagcgtgacagttatgcccgagagttcaccaccaccgtggtctcttgctgtcccgcggagctgcagactgaagggagcaacggcaagaaagaagtgctgagcggtttccaagtggtgctggaagacacagtgcttttccctgagggcgggggacagcctgatgaccgtggtacaatcaatgacatctctgtgctgagagtgactcgccgtggggaacaggctgatcatttcacccagacacccctggatccaggaagccaggttctggtccgggtagattgggagcggaggtttgaccacatgcagcagcattcagggcagcatctcatcacggcagttgctgaccatctatttaagctgaagacaacatcatgggagttagggagatttcggagtgcgattgagctggacaccccctctatgactgcagagcaagtagctgccattgagcagagcgtcaatgaaaaaatcagagatcggctgcctgtgaatgtccgagaactgagcctggatgatcctgaggtggagcaggtgagtggccggggtttgcctgatgatcatgctgggcccattcgggttgttaacatcgagggcgttgattccaacatgtgctgtgggacccatgtgagcaatctcagtgaccttcaggtcattaagattctgggcactgagaaggggaaaaagaacagaaccaacctgatatttctgtctgggaaccgggtgctgaagtggatggagagaagtcatggaactgaaaaagcactgactgctctgcttaagtgtggagcagaggatcatgtggaagcagtgaaaaagctccagaactccaccaagatcctgcagaagaataacctgaatctgctcagagacctggctgtgcacattgcccatagcctcaggaacagtccagactggggaggtgtggtcatattacacaggagaccctcctgttcttaactgtgggcgatgagaaaggtggtggactcttcttactggcagggccacctgcgtctgtggagaccctggggcccagggtggctgaggtcctggaaggcaaaggagcagggaagaaaggccgttttcagggcaaggccaccaagatgagccggcggatggaggcgcaggcgcttctccaggactacatcagcacgcagagtgctaaggagtgagggcttagggcactcacctcctgtttccacaggaatcttttggtcaataaaatagattgactcagaa

SEQ ID NO: 280265 - DNA, 1673 bp, Homo sapiens
tgaagtacccaagtccccgagggcgcgccttccccgggaatttaattcaggacaataatgttttattgagcgcctattgtgaatcagacactgagcagtaagcgtcggagaaacagtctatgcatttctgaagaccccacggtgaagggctgcaaggatgaagctgtcccagagtatctccagagtgcagatcccttggctgccaggtcatgttctctcttcctctcaactgctctcccgaccatataaggagaggcagctgctgggggcgtccccaggatctaaagatagcggcccctgcctggaactctaaatgccaccctggagcgggagccgcaatggcacggcagcacgcccggaccttgtggtacgacaggcccaggtatgtgttcatggagttttgtgttgaggacagcaccgatgtccacgtgcttattgaggatcaccgcattgtgttcagctgcaagaatgccgatggagtggagttgtacaatgagattgagttctatgccaaagtgaactccaaggactcccaggataagcgctcttcccgctctattacttgttttgtgagaaaatggaaggaaaaggtggcctggccgcggcttaccaaggaggatatcaagccagtgtggctgtctgtggactttgataactggagagactgggaaggggatgaagagatggagctggctcatggcagcatctcatcacggcagttgctgaccatctatttaagctgaagacaacatcatgggagttagggagatttcggagtgcgattgagctggacaccccctctatgactgcagagcaagtagctgccattgagcagagcgtcaatgaaaaaatcagagatcggctgcctgtgaatgtccgagaactgagcctggatgatcctgaggtggagcaggtgagtggccggggtttgcctgatgatcatgctgggcccattcgggttgttaacatcgagggcgttgattccaacatgtgctgtgggacccatgtgagcaatctcagtgaccttcaggtcattaagattctgggcactgagaaggggaaaaagaacagaaccaacctgatatttctgtctgggaaccgggtgctgaagtggatggagagaagtcatggaactgaaaaagcactgactgctctgcttaagtgtggagcagaggatcatgtggaagcagtgaaaaagctccagaactccaccaagatcctgcagaagaataacctgaatctgctcagagacctggctgtgcacattgcccatagcctcaggaacagtccagactggggaggtgtggtcatattacacaggaaggagggtgattcagagttcatgaatatcattgccaatgagattgggtcagaggagaccctcctgttcttaactgtgggcgatgagaaaggtggtggactcttcttactggcagggccacctgcgtctgtggagaccctggggcccagggtggctgaggtcctggaaggcaaaggagcagggaagaaaggccgttttcagggcaaggccaccaagatgagccggcggatggaggcgcaggcgcttctccaggactacatcagcacgcagagtgctaaggagtgagggcttagggcactcacctcctgtttccacaggaatcttttggtcaataaaatagattgactcagaa

SEQ ID NO: 280266 - DNA, 1981 bp, Homo sapiens
tgaagtacccaagtccccgagggcgcgccttccccgggaatttaattcaggacaataatgttttattgagcgcctattgtgaatcagacactgagcagtaagcgtcggagaaacagtctatgcatttctgaagaccccacggtgaagggctgcaaggatgaagctgtcccagagtatctccagagtgcagatcccttggctgccaggtcatgttctctcttcctctcaactgctctcccgaccatataaggagaggcagctgctgggggcgtccccaggatctaaagatagcggcccctgcctggaactctaaatgccaccctggagcgggagccgcaatggcacggcagcacgcccggaccttgtggtacgacaggcccaggtatgtgttcatggagttttgtgttgaggacagcaccgatgtccacgtgcttattgaggatcaccgcattgtgttcagctgcaagaatgccgatggagtggagttgtacaatgagattgagttctatgccaaagtgaactccaaggactcccaggataagcgctcttcccgctctattacttgttttgtgagaaaatggaaggaaaaggtggcctggccgcggcttaccaaggaggatatcaagccagtgtggctgtctgtggactttgataactggagagactgggaaggggatgaagagatggagctggctcatgtggaacattatgcagagcttttgaagaaggtcagcaccaagagacctccacctgccatggatgatttggatttcaccaccaccgtggtctcttgctgtcccgcggagctgcagactgaagggagcaacggcaagaaagaagtgctgagcggtttccaagtggtgctggaagacacagtgcttttccctgagggcgggggacagcctgatgaccgtggtacaatcaatgacatctctgtgctgagagtgactcgccgtggggaacaggctgatcatttcacccagacacccctggatccaggaagccaggttctggtccgggtagattgggagcggaggtttgaccacatgcagcagcattcagggcagcatctcatcacggcagttgctgaccatctatttaagctgaagacaacatcatgagcaagtagctgccattgagcagagcgtcaatgaaaaaatcagagatcggctgcctgtgaatgtccgagaactgagcctggatgatcctgaggtggagcaggtgagtggccggggtttgcctgatgatcatgctgggcccattcgggttgttaacatcgagggcgttgattccaacatgtgctgtgggacccatgtgagcaatctcagtgaccttcaggtcattaagattctgggcactgagaaggggaaaaagaacagaaccaacctgatatttctgtctgggaaccgggtgctgaagtggatggagagaagtcatggaactgaaaaagcactgactgctctgcttaagtgtggagcagaggatcatgtggaagcagtgaaaaagctccagaactccaccaagatcctgcagaagaataacctgaatctgctcagagacctggctgtgcacattgcccatagcctcaggaacagtccagactggggaggtgtggtcatattacacaggaaggagggtgattcagagttcatgaatatcattgccaatgagattgggtcagaggagaccctcctgttcttaactgtgggcgatgagaaaggtggtggactcttcttactggcagggccacctgcgtctgtggagaccctggggcccagggtggctgaggtcctggaaggcaaaggagcagggaagaaaggccgttttcagggcaaggccaccaagatgagccggcggatggaggcgcaggcgcttctccaggactacatcagcacgcagagtgctaaggagtgagggcttagggcactcacctcctgtttccacaggaatcttttggtcaataaaatagattgactcagaa

SEQ ID NO: 280267 - DNA, 810 bp, Homo sapiens
cgctggagcgagaacagatgatagagcctggatgatctgaggtggagcaggtgagtggccggggtttgcctgatgatcatgctgggcccattcgggttgttaacatcgagggcgttgattccaacatgtgctgtgggacccatgtgagcaatctcagtgaccttcaggtcattaagattctgggcactgagaaggggaaaaagaacagaaccaacctgatatttctgtctgggaaccgggtgctgaagtggatggagagaagtcatggaactgaaaaagcactgactgctctgcttaagtgtggagcagaggatcatgtggaagcagtgaaaaagctccagaactccaccaagatcctgcagaagaataacctgaatctgctcagagacctggctgtgcacattgcccatagcctcaggaacagtccagactggggaggtgtggtcatattacacaggaaggagggtgattcagagttcatgaatatcattgccaatgagattgggtcagaggagaccctcctgttcttaactgtgggcgatgagaaaggtggtggactcttcttactggcagggccacctgcgtctgtggagaccctggggcccagggtggctgaggtcctggaaggcaaaggagcagggaagaaaggccgttttcagggcaaggccaccaagatgagccggcggatggaggcgcaggcgcttctccaggactacatcagcacgcagagtgctaaggagtgagggcttagggcactcacctcctgtttccacaggaatcttttggtcaataaaatagattgactcagaa

SEQ ID NO: 280268 - DNA, 2124 bp, Homo sapiens
tgaagtacccaagtccccgagggcgcgccttccccgggaatttaattcaggacaataatgttttattgagcgcctattgtgaatcagacactgagcagtaagcgtcggagaaacagtctatgcatttctgaagaccccacggtgaagggctgcaaggatgaagctgtcccagagtatctccagagtgcagatcccttggctgccaggtcatgttctctcttcctctcaactgctctcccgaccatataaggagaggcagctgctgggggcgtccccaggatctaaagatagcggcccctgcctggaactctaaatgccaccctggagcgggagccgcaatggcacggcagcacgcccggaccttgtggtacgacaggcccaggtatgtgttcatggagttttgtgttgaggacagcaccgatgtccacgtgcttattgaggatcaccgcattgtgttcagctgcaagaatgccgatggagtggagttgtacaatgagattgagttctatgccaaagtgaactccaaggactcccaggataagcgctcttcccgctctattacttgttttgtgagaaaatggaaggaaaaggtggcctggccgcggcttaccaaggaggatatcaagccagtgtggctgtctgtggactttgataactggagagactgggaaggggatgaagagatggagctggctcatgtggaacattatgcagagcttttgaagaaggtcagcaccaagagacctccacctgccatggatgatttggatttcaccaccaccgtggtctcttgctgtcccgcggagctgcagactgaagggagcaacggcaagaaagaagtgctgagcggtttccaagtggtgctggaagacacagtgcttttccctgagggcgggggacagcctgatgaccgtggtacaatcaatgacatctctgtgctgagagtgactcgccgtggggaacaggctgatcatttcacccagacacccctggatccaggaagccaggttctggtccgggtagattgggagcggaggtttgaccacatgcagcagcattcagggcagcatctcatcacggcagttgctgaccatctatttaagctgaagacaacatcatgagcaagtagctgccattgagcagagcgtcaatgaaaaaatcagagatcggctgcctgtgaatgtccgagaactgagcctggatgatcctgaggtggagcaggtgagtggccggggtttgcctgatgatcatgctgggcccattcgggttgttaacatcgagggcgttgattccaacatgtgctgtgggacccatgtgagcaatctcagtgaccttcaggtcattaagattctgggcactgagaaggggaaaaagaacagaaccaacctgatatttctgtctgggaaccgggtgctgaagtggatggagagaagtcatggaactgaaaaagcactgactgctctgcttaattgcctaagagacctcctcagaatatctcctggtccctgactgcagggaggcaccatagcaagaaggaaattattgatttatgtccccaacatcagaaacgactgggaagctgcgcaggtctcctctgacctttctctttcaggtgtggagcagaggatcatgtggaagcagtgaaaaagctccagaactccaccaagatcctgcagaagaataacctgaatctgctcagagacctggctgtgcacattgcccatagcctcaggaacagtccagactggggaggtgtggtcatattacacaggaaggagggtgattcagagttcatgaatatcattgccaatgagattgggtcagaggagaccctcctgttcttaactgtgggcgatgagaaaggtggtggactcttcttactggcagggccacctgcgtctgtggagaccctggggcccagggtggctgaggtcctggaaggcaaaggagcagggaagaaaggccgttttcagggcaaggccaccaagatgagccggcggatggaggcgcaggcgcttctccaggactacatcagcacgcagagtgctaaggagtgagggcttagggcactcacctcctgtttccacaggaatcttttggtcaataaaatagattgactcagaa

SEQ ID NO: 280269 - DNA, 1292 bp, Homo sapiens
ccaggcttctctgcgcgtgcgcctcctcacacgcctgcaggtatggcgttctggtgtcagcgtgacagttatgcccgagagttcaccaccaccgtggtctcttgctgtcccgcggagctgcagactgaagggagcaacggcaagaaagaagtgctgagcggtttccaagtggtgctggaagacacagtgcttttccctgagggcgggggacagcctgatgaccgtggtacaatcaatgacatctctgtgctgagagtgactcgccgtggggaacaggctgatcatttcacccagacacccctggatccaggaagccaggttctggtccgggtagattgggagcggaggtttgaccacatgcagcagcattcagggcagcatctcatcacggcagttgctgaccatctatttaagctgaagacaacatcatgggagttagggagatttcggagtgcgattgagctggacaccccctctatgactgcagagcaagtagctgccattgagcagagcgtcaatgaaaaaatcagagatcggctgcctgtgaatgtccgagaactgagcctggatgatcctgaggtggagcaggtgagtggccggggtttgcctgatgatcatgctgggcccattcgggttgttaacatcgagggcgttgattccaacatgtgctgtgggacccatgtgagcaatctcagtgaccttcaggtcattaagattctgggcactgagaaggggaaaaagaacagaaccaacctgatatttctgtctgggaaccgggtgctgaagtggatggagagaagtcatggaactgaaaaagcactgactgctctgcttaaaagtatgcctgtttcagtaccttcgattacctcccatttctgagattttcgacataatctcttaccctgggctgggattacaggtgtgagccaccatgcccagcctatgtgcaagtgttttcaagaaagattcctagaagtcatctactcttcttatccctctcccagtccctggaaaaagactcagagctgcccttgtttttttttgtgacttttccctcaaagtctccctgactatacctctgttccccagggtggctgaggtcctggaaggcaaaggagcagggaagaaaggccgttttcagggcaaggccaccaagatgagccggcggatggaggcgcaggcgcttctccaggactacatcagcacgcagagtgctaaggagtgagggcttagggcactcacctcctgtttccacaggaatcttttggtcaataaaatagattgactcagaa

SEQ ID NO: 280270 - DNA, 1188 bp, Homo sapiens
aggaagattaaaacccctttaaaaggccatttaaaacctttatctctaacagtttcttaatgtataaaggttacacacttttatcaagacaaagcaaagttaacagcttcttaatgtataaaggatacatagttttatgtacacaaatcaaaggttctacatatgctagtgctccatacccaccttaaaaaaaaaaaaaaaaaaaaaagatcaagtgctttggatagtaaatcagaaccacgaaaagtggttaattcctttgtatgttttctcccagttgcctaagagacctcctcagaatatctcctggtccctgactgcagggaggcaccatagcaagaaggaaattattgatttatgtccccaacatcagaaacgactgggaagctgcgcaggtctcctctgacctttctctttcaggtgtggagcagaggatcatgtggaagcagtgaaaaagctccagaactccaccaagatcctgcagaagaataacctgaatctgctcagagacctggctgtgcacattgcccatagcctcaggaacagtccagactggggaggtgtggtcatattacacaggtgagaaattaggagctggacacaaggaaggggaactgtgttgggcttagggctcagtgtcttctctatatgcaatgtacagtgggaggtggattgctcactggtattctcaagcagtactctctcttggctaagggatatgggactttatgtgtacataggcagcaaggccagcctcagaaggaggggccaggcttcctgcagtttcacagccaccactccaacctgggtctcatgtctgtgtcctttgttgtaggaaggagggtgattcagagttcatgaatatcattgccaatgagattgggtcagaggagaccctcctgttcttaactgtgggcgatgagaaaggtggtggactcttcttactggcagggccacctgcgtctgtggagaccctggggcccagggtggctgaggtcctggaaggcaaaggagcagggaagaaaggccgttttcagggcaaggccaccaagatgagccggcggatggaggcgcaggcgcttctccaggactacatcagcacgcagagtgctaaggagtgagggcttagggcactcacctcctgtttccacaggaatcttttggtcaataaaatagattgactcagaa

SEQ ID NO: 280271 - DNA, 428 bp, Homo sapiens
cggttgtgctggtcccagtctggtgaggaggcaaaggacgggtcttggtgagggaggtgtggtcatattacacaggaaggagggtgattcagagttcatgaatatcattgccaatgagattgggtcagaggagaccctcctgttcttaactgtgggcgatgagaaaggtggtggactcttcttactggcagggccacctgcgtctgtggagaccctggggcccagggtggctgaggtcctggaaggcaaaggagcagggaagaaaggccgttttcagggcaaggccaccaagatgagccggcggatggaggcgcaggcgcttctccaggactacatcagcacgcagagtgctaaggagtgagggcttagggcactcacctcctgtttccacaggaatcttttggtcaataaaatagattgactcagaa

SEQ ID NO: 280272 - DNA, 1063 bp, Homo sapiens
gtgcagtggcacgatcttggctcactgcgacctccgcctcccaggctcaagcaattctcctgcctcagcctcccgagtagctgggactacaggtgcccgtcaccacgcccggataatttttgtatttttactagagacgaggtttcaccatattggccaggctggtctcgaactcctgaccttgtgatcctcctgcctcggccttccaaagtgctgagattacaggcatgagccaccacgcctggccggagggtaggacttctgagattttcagactctatcatgcctagctttgtgtgtagattggcaggttcctggtcaaaggagtgcagttgggaggactagggacctactgaccctcttttccccaggcgtgctcccatgcatatgcccacactctcccacacactcctgctcctgccctcctggcctgtgactcttggtgcctcttcttgcagccagtgtggctgtctgtggactttgataactggagagactgggaaggggatgaagagatggagctggctcatgtggaacattatgcagagcttttgaagaaggtcagcaccaagagacctccacctgccatggatgatttggatgatgattctgacagtgctgatgatgcaacaagtaattaactttctgtgacgcaaagctgggaaggcagctgtggctattttccagttgttctagaaagctagcgcctaggcctttgtcagcgctttggctgtgcaccaagttcttctgagatctctgaactttcctagaagctctttattaagggtcgtccttcaagcttgtcttcctcctaggcacttgactatggctccacatcagatgcagggtcggggaggggtagactggtagggcttctgatttcttactgattggtttctaatctctgtgtttaggccacttgattatttgagtatgtgtgtgtatgtggcaaaacaaaagccaaagaagaatgcagattatagaaatctctactatgtgtgcatatggggcaaagcaaaaagccaaagaagaaacagattataataaatctctaggaactgtt

SEQ ID NO: 280273 - DNA, 1841 bp, Homo sapiens
tgaagtacccaagtccccgagggcgcgccttccccgggaatttaattcaggacaataatgttttattgagcgcctattgtgaatcagacactgagcagtaagcgtcggagaaacagtctatgcatttctgaagaccccacggtgaagggctgcaaggatgaagctgtcccagagtatctccagagtgcagatcccttggctgccaggtcatgttctctcttcctctcaactgctctcccgaccatataaggagaggcagctgctgggggcgtccccaggatctaaagatagcggcccctgcctggaactctaaatgccaccctggagcgggagccgcaatggcacggcagcacgcccggaccttgtggtacgacaggcccaggtatgtgttcatggagttttgtgttgaggacagcaccgatgtccacgtgcttattgaggatcaccgcattgtgttcagctgcaagaatgccgatggagtggagttgtacaatgagattgagttctatgccaaagtgaactccaaggactcccaggataagcgctcttcccgctctattacttgttttgtgagaaaatggaaggaaaaggtggcctggccgcggcttaccaaggaggatatcaagccagtgtggctgtctgtggactttgataactggagagactgggaaggggatgaagagatggagctggctcatgtggaacattatgcagagcttttgaagaaggtcagcaccaagagacctccacctgccatggatgatttggatgatgattctgacagtgctgatgatgcaacaagtaattaactttctgtgacgcaaagctgggaaggcagctgtggctattttccagttgttctagaaagctagcgcctaggcctttgtcagcgctttggctgtgcaccaagttcttctgagatctctgaactttcctagaagctctttattaagggtcgtccttcaagcttgtcttcctcctaggcacttgactatggctccacatcagatgcagggtcggggaggggtagactggtagggcttctgatttcttactgattggtttctaatctctgtgtttaggccacttgattatttgagtatgtgtgtgtatgtggcaaaacaaaagccaaagaagaatgcagattatagaaatctctactatgtgtgcatatggggcaaagcaaaaagccaaagaagaaacagattataataaatctctaggaactgttctctgtctgtttccttcttgtacttattcctcctggtggcaagcctcttctccctctagtaaccaagctggggtgcttcctcttgcccagatttgtgctctgatttcttacagctaattctgtcatctctagaaccagccacttcagcttcctgcacactctagaaatctctttatacttttttttttttttttttccgagatggagtcttgctctgtcgcccaggctggagtgcagtggtgcagtctctgttcactgcaacctccaccttctgggttcaagcaattctcctgcctcagcctcccaagtagatgggactacagatgtgcaccaccaggcccagctaatttttgtatttttagcagagatggggtttcaccatgttggccaggctggtctcgaactcctgacctcaagtaatccacccacctcagcctcccaaagtgctaggattacatgtatgagccaccacacccggccctctttatacttttaaaactgattgttactctagttaatgtctatgtttatttgtccaacagctattctatttgtccataaacttttttgagtgcctaatatgtacagttgactgtaacttaaacaaaat

SEQ ID NO: 280274 - DNA, 1378 bp, Homo sapiens
tgaagtacccaagtccccgagggcgcgccttccccgggaatttaattcaggacaataatgttttattgagcgcctattgtgaatcagacactgagcagtaagcgtcggagaaacagtctatgcatttctgaagaccccacggtgaagggctgcaaggatgaagctgtcccagagtatctccagagtgcagatcccttggctgccaggtcatgttctctcttcctctcaactgctctcccgaccatataaggagaggcagctgctgggggcgtccccaggatctaaagatagcggcccctgcctggaactctaaatgccaccctggagcgggagccgcaatggcacggcagcacgcccggaccttgtggtacgacaggcccaggtatgtgttcatggagttttgtgttgaggacagcaccgatgtccacgtgcttattgaggatcaccgcattgtgttcagctgcaagaatgccgatggagtggagttgtacaatgagattgagttctatgccaaagtgaactccaaggactcccaggataagcgctcttcccgctctattacttgttttgtgagaaaatggaaggaaaaggtggcctggccgcggcttaccaaggaggatatcaagccagtgtggctgtctgtggactttgataactggagagactgggaaggggatgaagagatggagctggctcatgtggaacattatgcagagcttttgaagaaggtcagcaccaagagacctccacctgccatggatgatttggatttcaccaccaccgtggtctcttgctgtcccgcggagctgcagactgaagggagcaacggcaagaaagaagtgctgagcggtttccaagtggtgctggaagacacagtgcttttccctgagggcgggggacagcctgatgaccgtggtacaatcaatgacatctctgtgctgagagtgactcgccgtggggaacaggctgatcatttcacccagacacccctggatccaggaagccaggttctggtccgggtagattgggagcggaggtttgaccacatgcagcagcattcagggcagcatctcatcacggcagttgctgaccatctatttaagctgaagacaacatcatgggttaaacagttgctgaacttaagggcatgacaaaaaggactcctctctctgacccaggtaggcaaaatgctttgggtgtgaggtaaaaaaaatgggtaagagcagctgtacagagtggggtgaaatgttaaacagggtgcagtgcccaagggctacgaaccaggtccagcgcaagcctgagaccacaggaggcacccacagctcacaaaggcgtctcgcctgattggccagggcaggatctgccgcctcttctcggt

SEQ ID NO: 280275 - DNA, 596 bp, Homo sapiens
  misc_feature (587)..(587): n is a, c, g, or t
  misc_feature (589)..(589): n is a, c, g, or t
  misc_feature (591)..(593): n is a, c, g, or t
tgaagtacccaagtccccgagggcgcgccttccccgggaatttaattcaggacaataatgttttattgagcgcctattgtgaatcagacactgagcagtaagcgtcggagaaacagtctatgcatttctgaagaccccacggtgaagggctgcaaggatgaagctgtcccagagtatctccagagtgcagatcccttggctgccaggtcatgttctctcttcctctcaactgctctcccgaccatataaggagaggcagctgctgggggcgtccccaggatctaaagatagcggcccctgcctggaactctaaatgccaccctggagcgggagccgcaatggcacggtgagtgtttccggctccggtgctccccctggcccttggcacgaggtggagattccctgctccaagtcttctgggcgctccaggttctgtgaggccccacgggagccccggacccctggtctctgtaactgtggggtgagggaaggtgtgacctgaatgttctccctgacctcctagtttcctagtcttgcacgttctattcttcccaggttcacattcaccacacccacccactcctgtnantnnnttc

SEQ ID NO: 280276 - DNA, 268 bp, Homo sapiens
gtttacttatttccaccagcctgatgaccgtggtacaatcaatgacatctctgtgctgagagtgactcgccgtggggaacaggctgatcatttcacccagacacccctggatccaggaagccaggttctggtccgggtagattgggagcggaggtttgaccacatgcagcagcattcagggcagcatctcatcacggcagttgctgaccatctatttaagctgaagacaacatcatgcgcggatcatgctcgatcatgctcatcacgc

SEQ ID NO: 280277 - DNA, 1550 bp, Homo sapiens
ccaggcttctctgcgcgtgcgcctcctcacacgcctgcaggtatggcgttctggtgtcagcgtgacagttatgcccgagagttcaccaccaccgtggtctcttgctgtcccgcggagctgcagactgaagggagcaacggcaagaaagaagtgctgagcggtttccaagtggtgctggaagacacagtgcttttccctgagggcgggggacagcctgatgaccgtggtacaatcaatgacatctctgtgctgagagtgactcgccgtggggaacaggctgatcatttcacccagacacccctggatccaggaagccaggttctggtccgggtagattgggagcggaggtttgaccacatgcagcagcattcagggcagcatctcatcacggcagttgctgaccatctatttaagctgaagacaacatcatgggagttagggagatttcggagtgcgattgagctggacaccccctctatgactgcagagcaagtagctgccattgagcagagcgtcaatgaaaaaatcagagatcggctgcctgtgaatgtccgagaactgagcctggatgatcctgaggtggagcaggtgagtggccggggtttgcctgatgatcatgctgggcccattcgggttgttaacatcgagggcgttgattccaacatgtgctgtgggacccatgtgagcaatctcagtgaccttcaggtcattaagattctgggcactgagaaggggaaaaagaacagaaccaacctgatatttctgtctgggaaccgggtgctgaagtggatggagagaagtcatggaactgaaaaagcactgactgctctgcttaagtgtggagcagaggatcatgtggaagcagtgaaaaagctccagaactccaccaagatcctgcagaagaataacctgaatctgctcagagacctggctgtgcacattgcccatagcctcaggaacagtccagactggggaggtgtggtcatattacacaggaaggagggtgattcagagttcatgaatatcattgccaatgagattgggtcagaggagaccctcctgttcttaactgtgggcgatgagaaaggtggtggactcttcttactggcagggccacctgcgtctgtggagaccctggggcccagggtggctgaggtcctggaaggcaaaggagcagggaagaaaggccgttttcagggcaaggccaccaagatgagccggcggatggaggcgcaggcgcttctccaggactacatcagcacgcagagtgctaaggagtgagggcttagggcactcacctcctgtttccacaggaatcttttggtcaataaaatagattgactcagaaaaaaaaaatacgtgaaacacgaatacaatgagtacgaatagatgaaaaatcacaaaaacaggataaccgaacaacaaaagaagaaaaacagaagagggggcgggtgggtaaaaaattaccccggggggcgcccgatgtgccacaccgcagttgttttaaaaaaagggccccgccatgggggtggacaataaaacaagagcgg

SEQ ID NO: 280278 - DNA, 1307 bp, Homo sapiens
ccaggcttctctgcgcgtgcgcctcctcacacgcctgcagttcaccaccaccgtggtctcttgctgtcccgcggagctgcagactgaagggagcaacggcaagaaagaagtgctgagcggtttccaagtggtgctggaagacacagtgcttttccctgagggcgggggacagcctgatgaccgtggtacaatcaatgacatctctgtgctgagagtgactcgccgtggggaacaggctgatcatttcacccagacacccctggatccaggaagccaggttctggtccgggtagattgggagcggaggtttgaccacatgcagcagcattcagggcagcatctcatcacggcagttgctgaccatctatttaagctgaagacaacatcatgggagttagggagatttcggagtgcgattgagctggacaccccctctatgactgcagagcaagtagctgccattgagcagagcgtcaatgaaaaaatcagagatcggctgcctgtgaatgtccgagaactgagcctggatgatcctgaggtggagcaggtgagtggccggggtttgcctgatgatcatgctgggcccattcgggttgttaacatcgagggcgttgattccaacatgtgctgtgggacccatgtgagcaatctcagtgaccttcaggtcattaagattctgggcactgagaaggggaaaaagaacagaaccaacctgatatttctgtctgggaaccgggtgctgaagtggatggagagaagtcatggaactgaaaaagcactgactgctctgcttaagtgtggagcagaggatcatgtggaagcagtgaaaaagctccagaactccaccaagatcctgcagaagaataacctgaatctgctcagagacctggctgtgcacattgcccatagcctcaggaacagtccagactggggaggtgtggtcatattacacaggaaggagggtgattcagagttcatgaatatcattgccaatgagattgggtcagaggagaccctcctgttcttaactgtgggcgatgagaaaggtggtggactcttcttactggcagggccacctgcgtctgtggagaccctggggcccagggtggctgaggtcctggaaggcaaaggagcagggaagaaaggccgttttcagggcaaggccaccaagatgagccggcggatggaggcgcaggcgcttctccaggactacatcagcacgcagagtgctaaggagtgagggcttagggcactcacctcctgtttccacaggaatcttttggtcaataaaatagattgactcagaa

SEQ ID NO: 280279 - DNA, 1491 bp, Homo sapiens
ccaggcttctctgcgcgtgcgcctcctcacacgcctgcaggtatggcgttctggtgtcagcgtgacagttatgcccgagagttcaccaccaccgtggtctcttgctgtcccgcggagctgcagactgaagggagcaacggcaagaaagaagtgctgagcggtttccaagtggtgctggaagacacagtgcttttccctgagggcgggggacagcctgatgaccgtggtacaatcaatgacatctctgtgctgagagtgactcgccgtggggaacaggctgatcatttcacccagacacccctggatccaggaagccaggttctggtccgggtagattgggagcggaggtttgaccacatgcagcagcattcagggcagcatctcatcacggcagttgctgaccatctatttaagctgaagacaacatcatgggagttagggagatttcggagtgcgattgagctggacaccccctctatgactgcagagcaagtagctgccattgagcagagcgtcaatgaaaaaatcagagatcggctgcctgtgaatgtccgagaactgagcctggatgatcctgaggtggagcaggtgagtggccggggtttgcctgatgatcatgctgggcccattcgggttgttaacatcgagggcgttgattccaacatgtgctgtgggacccatgtgagcaatctcagtgaccttcaggtcattaagattctgggcactgagaaggggaaaaagaacagaaccaacctgatatttctgtctgggaaccgggtgctgaagtggatggagagaagtcatggaactgaaaaagcactgactgctctgcttaattgcctaagagacctcctcagaatatctcctggtccctgactgcagggaggcaccatagcaagaaggaaattattgatttatgtccccaacatcagaaacgactgggaagctgcgcaggtctcctctgacctttctctttcaggtgtggagcagaggatcatgtggaagcagtgaaaaagctccagaactccaccaagatcctgcagaagaataacctgaatctgctcagagacctggctgtgcacattgcccatagcctcaggaacagtccagactggggaggtgtggtcatattacacaggaaggagggtgattcagagttcatgaatatcattgccaatgagattgggtcagaggagaccctcctgttcttaactgtgggcgatgagaaaggtggtggactcttcttactggcagggccacctgcgtctgtggagaccctggggcccagggtggctgaggtcctggaaggcaaaggagcagggaagaaaggccgttttcagggcaaggccaccaagatgagccggcggatggaggcgcaggcgcttctccaggactacatcagcacgcagagtgctaaggagtgagggcttagggcactcacctcctgtttccacaggaatcttttggtcaataaaatagattgactcagaa

SEQ ID NO: 280280 - DNA, 1198 bp, Homo sapiens
ccaggcttctctgcgcgtgcgcctcctcacacgcctgcaggtatggcgttctggtgtcagcgtgacagttatgcccgagagttcaccaccaccgtggtctcttgctgtcccgcggagctgcagactgaagggagcaacggcaagaaagaagtgctgagcggtttccaagtggtgctggaagacacagtgcttttccctgagggcgggggacagcctgatgaccgtggtacaatcaatgacatctctgtgctgagagtgactcgccgtggggaacaggctgatcatttcacccagacacccctggatccaggaagccaggttctggtccgggtagattgggagcggaggtttgaccacatgcagcagcattcagggcagcatctcatcacggcagttgctgaccatctatttaagctgaagacaacatcatgggagttagggagatttcggagtgcgattgagctggacaccccctctatgactgcagagcaagtagctgccattgagcagagcgtcaatgaaaaaatcagagatcggctgcctgtgaatgtccgagaactgagcctggatgatcctgaggtggagcaggtgagtggccggggtttgcctgatgatcatgctgggcccattcgggttgttaacatcgagggcgttgattccaacatgtgctgtgggacccatgtgagcaatctcagtgaccttcaggtcattaagattctgggcactgagaaggggaaaaagaacagaaccaacctgatatttctgtctgggaaccgggtgctgaagtggatggagagaagtcatggaactgaaaaagcactgactgctctgcttaagtgtggagcagaggatcatgtggaagcagtgaaaaagctccagaactccaccaagatcctgcagaagaataacctgaatctgctcagagacctggctgtgcacattgcccatagcctcaggaacagtccagactggggaggtgtggtcatattacacagggtggctgaggtcctggaaggcaaaggagcagggaagaaaggccgttttcagggcaaggccaccaagatgagccggcggatggaggcgcaggcgcttctccaggactacatcagcacgcagagtgctaaggagtgagggcttagggcactcacctcctgtttccacaggaatcttttggtcaataaaatagattgactcagaa

SEQ ID NO: 280281 - DNA, 1764 bp, Homo sapiens
ccaggcttctctgcgcgtgcgcctcctcacacgcctgcaggtatggcgttctggtgtcagcgtgacagttatgcccgagagttcaccaccaccgtggtctcttgctgtcccgcggagctgcagactgaagggagcaacggcaagaaagaagtgctgagcggtttccaagtggtgctggaagacacagtgcttttccctgagggcgggggacagcctgatgaccgtggtacaatcaatgacatctctgtgctgagagtgactcgccgtggggaacaggctgatcatttcacccagacacccctggatccaggaagccaggttctggtccgggtagattgggagcggaggtttgaccacatgcagcagcattcagggcagcatctcatcacggcagttgctgaccatctatttaagctgaagacaacatcatgggagttagggagatttcggagtgcgattgagctggacaccccctctatgactgcagagcaagtagctgccattgagcagagcgtcaatgaaaaaatcagagatcggctgcctgtgaatgtccgagaactgagcctggatgatcctgaggtggagcaggtgagtggccggggtttgcctgatgatcatgctgggcccattcgggttgttaacatcgagggcgttgattccaacatgtgctgtgggacccatgtgagcaatctcagtgaccttcaggtcattaagattctgggcactgagaaggggaaaaagaacagaaccaacctgatatttctgtctgggaaccgggtgctgaagtggatggagagaagtcatggaactgaaaaagcactgactgctctgcttaagtgtggagcagaggatcatgtggaagcagtgaaaaagctccagaactccaccaagatcctgcagaagaataacctgaatctgctcagagacctggctgtgcacattgcccatagcctcaggaacagtccagactggggaggtgtggtcatattacacaggtgagaaattaggagctggacacaaggaaggggaactgtgttgggcttagggctcagtgtcttctctatatgcaatgtacagtgggaggtggattgctcactggtattctcaagcagtactctctcttggctaagggatatgggactttatgtgtacataggcagcaaggccagcctcagaaggaggggccaggcttcctgcagtttcacagccaccactccaacctgggtctcatgtctgtgtcctttgttgtaggaaggagggtgattcagagttcatgaatatcattgccaatgagattgggtcagaggtaagaggagcatgagattctctaccccggcctggatagagacctagggagacataagtgaggggcgctagtttagccaaagtccctccacatgaacacatgaggaggaggaaatagccattcattcaaagattcctagaagtcatctactcttcttatccctctcccagtccctggaaaaagactcagagctgcccttgtttttttttgtgacttttccctcaaagtctccctgactatacctctgttccccagggtggctgaggtcctggaaggcaaaggagcagggaagaaaggccgttttcagggcaaggccaccaagatgagccggcggatggaggcgcaggcgcttctccaggactacatcagcacgcagagtgctaaggagtgagggcttagggcactcacctcctgtttccacaggaatcttttggtcaataaaatagattgactcagaa

SEQ ID NO: 280282 - DNA, 969 bp, Homo sapiens
  misc_feature (4)..(4): n is a, c, g, or t
gganaccctttccctgatcgctccatctatttaagctgaagacaacatcatgggagttagggagatttcggagtgcgattgagctggacaccccctctatgactgcagagcaagtagctgccattgagcagagcgtcaatgaaaaaatcagagatcggctgcctgtgaatgtccgagaactgagcctggatgatcctgaggtggagcaggtgagtggccggggtttgcctgatgatcatgctgggcccattcgggttgttaacatcgagggcgttgattccaacatgtgctgtgggacccatgtgagcaatctcagtgaccttcaggtcattaagattctgggcactgagaaggggaaaaagaacagaaccaacctgatatttctgtctgggaaccgggtgctgaagtggatggagagaagtcatggaactgaaaaagcactgactgctctgcttaagtgtggagcagaggatcatgtggaagcagtgaaaaagctccagaactccaccaagatcctgcagaagaataacctgaatctgctcagagacctggctgtgcacattgcccatagcctcaggaacagtccagactggggaggtgtggtcatattacacaggaaggagggtgattcagagttcatgaatatcattgccaatgagattgggtcagaggagaccctcctgttcttaactgtgggcgatgagaaaggtggtggactcttcttactggcagggccacctgcgtctgtggagaccctggggcccagggtggctgaggtcctggaaggcaaaggagcagggaagaaaggccgttttcagggcaaggccaccaagatgagccggcggatggaggcgcaggcgcttctccaggactacatcagcacgcagagtgctaaggagtgagggcttagggcactcacctcctgtttccacaggaatcttttggtcaataaaatagattgactcagaa

SEQ ID NO: 280283 - DNA, 1114 bp, Homo sapiens
ccaggcttctctgcgcgtgcgcctcctcacacgcctgcaggtatggcgttctggtgtcagcgtgacagttatgcccgagagttcaccaccaccgtggtctcttgctgtcccgcggagctgcagactgaagggagcaacggcaagaaagaagtgctgagcggtttccaagtggtgctggaagacacagtgcttttccctgagggcgggggacagcctgatgaccgtggtacaatcaatgacatctctgtgctgagagtgactcgccgtggggaacaggctgatcatttcacccagacacccctggatccaggaagccaggttctggtccgggtagattgggagcggaggtttgaccacatgcagcagcattcagggcagcatctcatcacggcagttgctgaccatctatttaagctgaagacaacatcatgggagttagggagatttcggagtgcgattgagctggacaccccctctatgactgcagagcaagtagctgccattgagcagagcgtcaatgaaaaaatcagagatcggctgcctgtgaatgtccgagaactgagcctggatgatcctgaggtggagcaggtgagtggccggggtttgcctgatgatcatgctgggcccattcgggttgttaacatcgagggcgttgattccaacatgtgctgtgggacccatgtgagcaatctcagtgaccttcaggtcattaagattctgggcactgagaaggggaaaaagaacagaaccaacctgatatttctgtctgggaaccgggtgctgaagtggatggagagaagtcatggaactgaaaaagcactgactgctctgcttaatgtgggcgatgagaaaggtggtggactcttcttactggcagggccacctgcgtctgtggagaccctggggcccagggtggctgaggtcctggaaggcaaaggagcagggaagaaaggccgttttcagggcaaggccaccaagatgagccggcggatggaggcgcaggcgcttctccaggactacatcagcacgcagagtgctaaggagtgagggcttagggcactcacctcctgtttccacaggaatcttttggtcaataaaatagattgactcagaa

SEQ ID NO: 280284 - DNA, 1500 bp, Homo sapiens
tgaagtacccaagtccccgagggcgcgccttccccgggaatttaattcaggacaataatgttttattgagcgcctattgtgaatcagacactgagcagtaagcgtcggagaaacagtctatgcatttctgaagaccccacggtgaagggctgcaaggatgaagctgtcccagagtatctccagagtgcagatcccttggctgccaggtcatgttctctcttcctctcaactgctctcccgaccatataaggagaggcagctgctgggggcgtccccaggatctaaagatagcggcccctgcctggaactctaaatgccaccctggagcgggagccgcaatggcacggcagcacgcccggaccttgtggtacgacaggcccaggtatgtgttcatggagttttgtgttgaggacagcaccgatgtccacgtgcttattgaggatcaccgcattgtgttcagctgcaagaatgccgatggagtggagttgtacaatgagattgagttctatgccaaagtgaactccaaggactcccaggataagcgctcttcccgctctattacttgttttgtgagaaaatggaaggaaaaggtggcctggccgcggcttaccaaggaggatatcaagccagtgtggctgtctgtggactttgataactggagagactgggaaggggatgaagagatggagctggctcatgtggaacattatgcagagcttttgaagaaggtcagcaccaagagacctccacctgccatggatgatttggatttcaccaccaccgtggtctcttgctgtcccgcggagctgcagactgaagggagcaacggcaagaaagaagtgctgagcggtttccaagtggtgctggaagacacagtgcttttccctgagggcgggggacagcctgatgaccgtggtacaatcaatgacatctctgtgctgagagtgactcgccgtggggaacaggctgatcatttcacccagacacccctggatccaggaagccaggttctggtccgggtagattgggagcggaggtttgaccacatgcagcagcattcagggcagcatctcatcacggcagttgctgaccatctatttaagctgaagacaacatcatgggagttagggagatttcggagtgcgattgagctggacaccccctctatgactgcagagcaagtagctgccattgagcagagcgtcaatgaaaaaatcagagatcggctgcctgtgaatgtccgagaactgagcctggatgatcctgaggtggagcaggttgttggagcagaaggatcatgtgggaagccgtgaaaagctccagaaatccacaagattctggaggaagaataacctgaatctgctcagagaccttggtgtgcatttgccatagctcagggaacagtccgatgggagggggggccaataccagggaccccctgtttttatgggggaagaagggggggccctttgggggcccgttttgtaccccgcactgttg

SEQ ID NO: 280285 - DNA, 1231 bp, Homo sapiens
tgaagtacccaagtccccgagggcgcgccttccccgggaatttaattcaggacaataatgttttattgagcgcctattgtgaatcagacactgagcagtaagcgtcggagaaacagtctatgcatttctgaagaccccacggtgaagggctgcaaggatgaagctgtcccagagtatctccagagtgcagatcccttggctgccaggtcatgttctctcttcctctcaactgctctcccgaccatataaggagaggcagctgctgggggcgtccccaggatctaaagatagcggcccctgcctggaactctaaatgccaccctggagcgggagccgcaatggcacggcagcacgcccggaccttgtggtacgacaggcccaggtatgtgttcatggagttttgtgttgaggacagcaccgatgtccacgtgcttattgaggatcaccgcattgtgttcagctgcaagaatgccgatggagtggagttgtacaatgagattgagttctatgccaaagtgaactccaaggactcccaggataagcgctcttcccgctctattacttgttttgtgagaaaatggaaggaaaaggtggcctggccgcggcttaccaaggaggatatcaagccagtgtggctgtctgtggactttgataactggagagactgggaaggggatgaagagatggagctggctcatgtggaacattatgcagagcttttgaagaaggtcagcaccaagagacctccacctgccatggatgatttggatgatgattctgacagtgctgatgatgcaacaagtaattaactttctgtgacgcaaagctgggaaggcagctgtggctattttccagttgttctagaaagctagcgcctaggcctttgtcagcgctttggctgtgcaccaagttcttctgagatctctgaactttcctagaagctctttattaagggtcgtccttcaagcttgtcttcctcctaggcacttgactatggctccacatcagatgcagggtcggggaggggtagactggtagggcttctgatttcttactgattggtttctaatctctgtgtttaggccacttgattatttgagtatgtgtgtgtatgtggcaaaacaaaagccaaagaagaatgcagattatagaaatctctactatgtgtgcatatggggcaaagcaaaaagccaaagaagaaacagattataataaatctctaggaactgtt

SEQ ID NO: 280286 - DNA, 1222 bp, Homo sapiens
tgaagtacccaagtccccgagggcgcgccttccccgggaatttaattcaggacaataatgttttattgagcgcctattgtgaatcagacactgagcagtaagcgtcggagaaacagtctatgcatttctgaagaccccacggtgaagggctgcaaggatgaagctgtcccagagtatctccagagtgcagatcccttggctgccaggtcatgttctctcttcctctcaactgctctcccgaccatataaggagaggcagctgctgggggcgtccccaggatctaaagatagcggcccctgcctggaactctaaatgccaccctggagcgggagccgcaatggcacggcagcacgcccggaccttgtggtacgacaggcccaggtatgtgttcatggagttttgtgttgaggacagcaccgatgtccacgtgcttattgaggatcaccgcattgtgttcagctgcaagaatgccgatggagtggagttgtacaatgagattgagttctatgccaaagtgaactccaaggactcccaggataagcgctcttcccgctctattacttgttttgtgagaaaatggaaggaaaaggtggcctggccgcggcttaccaaggaggatatcaagccagtgtggctgtctgtggactttgataactggagagactgggaaggggatgaagagatggagctggctcatgtggaacattatgcagagcttttgaagaaggtcagcaccaagagacctccacctgccatggatgatttggatttcaccaccaccgtggtctcttgctgtcccgcggagctgcagactgaagggagcaacggcaagaaagaagtgctgagcggtttccaagtggtgctggaagacacagtgcttttccctgagggcgggggacagcctgatgaccgtggtacaatcaatgacatctctgtgctgagagtgactcgccgtggggaacaggctgatcatttcacccagacacccctggatccaggaagccaggttctggtccgggtagattgggagcggaggtttgaccacatgcagcagcattcaggtaaaggctgggatgggggacataacaccggagcagttgccatgtatggggatgctgtgatgactgagacgtagttgggttctctaggagttaaccttttggaaaagacagactattcagaatcagctgtaattcaggaaggatatcctaaatgttataa

SEQ ID NO: 280287 - DNA, 1904 bp, Homo sapiens
caatatgctcctagtaggtgctggtgaatctggaggtagctacgggatcagggaccagcagtgaaaagtgtacaaactgtatgtgtgtttggattctgccctgtcaactacctgcatgtggcctcaggtaccatcatccaaaaacattgtggctacatgtagatcatgtgcacgtgtttacgaaaccattccccatagccatagccacaggcctcagtcgattgggccagaaggtgcccccactattggcggagaacttagcttcagaattcaccctaaggttcccttagtccccatccccaccacacccccaggtcttgccagagccacctctccccacatgaccccccaagaaagacagccctgtattctaactcaacctgcagcatgccccgcactgccttataagacagttgaggagcggacatcagaaccacctctgaagccctttgttcttttttttctaggtacaggcaccaacctctttgcacagtgagcagcaggactcgctacttctctccacctactcacaacagccagggaccctgggctacccccaaccacccccagcacagccccagcccctacgtcctccccgaagggtcagcagtctgtctgagtcgtcaggcctccagcagccgccccgataatgccccggcactgaagtcgggacacaatcagctttaaccaatggatgaggggggtggccacaggagatggggagaggagtctgaactaaacccctggcttttgtgcacactgcatacgtttcagaactcctggatggtaaccatctctggagtgcagcgcttgctgcagtggaaatgatcaggaatactgaccgtgtttctcttgcctccgaggttcttgggcacactctatagccatactggacaggaaccaggtgccccgtgtaggcatcgtcggtcggtttgccgtcagagatggcgcatctcgctgcatcccccgagagtacaccggttgctctagccacctgcggcccgcccatctgcgctagctggccttcacgctcttgatcgtctttcctttgtattggagaaggactgggtcagagatctgttggagagagagaataaagagattatttttcattatttttaaatggttgtttttgttttaatttgcacagctacacagaggaaataacttaggcactttctgttttttttaaaaaaataataaggtctcatggcttcatttagagaccacagtaacaacagcagcccaccaatcagagaagctggttgttattaaccaagctacagattcacactttctggcctaaaccctaatgggatgaggcttttcaccccaggccatgctggtggtgattttttagcccctaaataaaacactggactatttcctgtttacttcattgattgcaactacaaaggtggactcaaagcaaagcacaatcatgccagccaacattccagaattctgctgagaactccaagtctgtgaggggagaggttttacaagccagacaggcctgggggactgcagtccccaaggagaccctgccacatgctggccctttgagtgagaatgctgcatctttctacatatcttcatgagaatactgagaattggattttccttttcaaaatgcactttgctttttttgtatgttttgttatgttgagatgtttctaaagaaaagattttatgtaattataagatgaagcgtagtgaattgtacagctgttgtaataatgacctatttctatataaaataaaattgtatggcttatgtgtaaattattttgtatctgagataccagttccttttcccaaatataaaagtataaaagttttcttgtgtttttctgtgagtgaaaattttgtaataaattaacaaatttgtacaaaaaaaactg

SEQ ID NO: 280288 - DNA, 876 bp, Homo sapiens
ctgacactgagcttggggcatcacaggtgctccatgtccaccagtggagtaaatgaactatttctaggcagctcagagcaagaaagttcttactggcacagggaatgcaaaggaggtgcacactggtgaggtacccatgaccccaacttcacaggcatttctattctgctcccagatgttcctgcagcagccagctgtatccctgagcttcagcagcacccagcgacctgaggctcagcagcagctacagcaaaggtcagctgcagtgactcagccccagctcggggcgggcccccaacttccagggcagatctcctctgcccaggtcacaagccagcacctgctcagagaatcaagtgtgatatcaacccaggtaaatgtgctccttgccagcttcactccttgcctctagagcagacaccctcttgcagtttgggacatacttgattcctgcagcctacgtgaactgaggcctactgccctgttccgttatggactgagggtagatttgggagtgagccttcttttccttcttctgttaaagtcactttgaaaccccaagttgtattggcttccttctgtgttttataaatgtccacctcagtcccttgctctcgtgcttaaagatatcactcggctgaaatgttcacctttgatgctgacttagggttggaggcagatatggccatcccagagacccactggcagctgaatgtcccaacactcaacgtccatggtccccgccatctactctggttttaaccattacccacatgagcagccactgctgttcactgtcccttgccccaggtgccccctgctcctccaggcgccccctgctcctccaggcccccactgctcctccaggtctccctg

SEQ ID NO: 280289 - DNA, 4015 bp, Homo sapiens
gtttgccgcgcgagcagccggcctctcgcaggagccgagggacccgcgcggctgcggcccaggagcggcggccgcggagcccggagacccgcagccgcggcggcggcggcggcggcggcagcagctagagcagcgcctcccgccgccgcccgggaggagctcgccgcgcccgctcgccgcctcgtctcccagcggcggcgggaggcgcgtctccccggcccagtccgcgcccggccccgcggggccgctccggcccgctccgaggaaaaactgcatagaaaatctaatggatgaagatgagaaagacagagccaagagagcttctcgaaacaagtctgagaagaagcgtcgggaccagttcaatgttctcatcaaagagctcagttccatgctccctggcaacacgcggaaaatggacaaaaccaccgtgttggaaaaggtcatcggatttttgcagaaacacaatgaagtctcagcgcaaacggaaatctgtgacattcagcaagactggaagccttcattcctcagtaatgaagaattcacccagctgatgttggaggcattagatggcttcattatcgcagtgacaacagacggcagcatcatctatgtctctgacagtatcacgcctctccttgggcatttaccgtcggatgtcatggatcagaatttgttaaatttcctcccagaacaagaacattcagaagtttataaaatcctttcttcccatatgcttgtgacggattccccctccccagaatacttaaaatctgacagcgatttagagttttattgccatcttctcagaggcagcttgaacccaaaggaatttccaacttatgaatacataaaatttgtaggaaattttcgctcttacaacaatgtgcctagcccctcctgtaatggttttgacaacaccctttcaagaccttgccgggtgccactaggaaaggaggtttgcttcattgccaccgttcgtctggcaacaccacaattcttaaaggaaatgtgcatagttgacgaacctttagaggaattcacttcaaggcatagcttggaatggaaatttttatttctggatcacagagcacctccaatcataggatacctgccttttgaagtgctgggaacctcaggctatgactactaccacattgatgacctggagctcctggccaggtgtcaccagcacctgatgcagtttggcaaagggaagtcgtgttgctaccggtttctgaccaaaggtcagcagtggatctggctgcagactcactactacatcacctaccatcagtggaactccaagcccgagttcatcgtgtgcacacactcggtggtcagttacgcagatgtccgggtggaaaggaggcaggagctggctctggaagacccgccatccgaggccctccactcctcagcactaaaggacaagggctcaagcctggaacctcggcagcactttaacgcactcgacgtgggtgcctcgggccttaataccagtcattcgccatcggcgtcctcaagaagttcccacaaatcctcgcacacagccatgtcagaacccacctccactcccaccaagctgatggcagaggccagcaccccggctttgccaagatcagccaccctgccccaagagttacctgtccccgggctcagccaggcagccaccatgccggcccctctgccttccccatcgtcctgcgacctcacacagcagctcctgcctcagaccgttctgcagagcacgcccgctcccatggcacagttttcggcacagttcagcatgttccagaccatcaaagaccagctagagcagcggacgcggatcctgcaggccaatatccggtggcaacaggaagagctccacaagatccaggagcagctctgcctggtccaggactccaacgtccagatgttcctgcagcagccagctgtatccctgagcttcagcagcacccagcgacctgaggctcagcagcagctacagcaaaggtcagctgcagtgactcagccccagctcggggcgggcccccaacttccagggcagatctcctctgcccaggtcacaagccagcacctgctcagagaatcaagtgtgatatcaacccagggtccaaagccaatgagaagctcacagctaatgcagagcagcggccgctctggaagcagcctagtgtccccgttcagcagcgccacagctgcgctcccgccaagtctgaatctgaccacacctgcttccacctcccaggatgccagccagtgccagcccagcccagacttcagccatgatcggcagctcaggctgttgctgagccagcccatccagcccatgatgcccgggtcctgtgacgcaaggcagccctcggaagtcagcaggacgggacggcaagtcaagtacgcccagagccagaccgtgtttcaaaatccagacgcacaccccgccaacagcagcagcgccccgatgcccgtcctgctgatggggcaggcggtgctccaccccagcttccctgcctcccaaccatcgcccctgcagcctgcacaggcccggcagcagccaccgcagcactacctgcaggtacaggcaccaacctctttgcacagtgagcagcaggactcgctacttctctccacctactcacaacagccagggaccctgggctacccccaaccacccccagcacagccccagcccctacgtcctccccgaagggtcagcagtctgtctgagtcgtcaggcctccagcagccgccccgataatgccccggcactgaagtcgggacacaatcagctttaaccaatggatgaggggggtggccacaggagatggggagaggagtctgaactaaacccctggcttttgtgcacactgcatacgtttcagaactcctggatggtaaccatctctggagtgcagcgcttgctgcagtggaaatgatcaggaatactgaccgtgtttctcttgcctccgaggttcttgggcacactctatagccatactggacaggaaccaggtgccccgtgtaggcatcgtcggtcggtttgccgtcagagatggcgcatctcgctgcatcccccgagagtacaccggttgctctagccacctgcggcccgcccatctgcgctagctggccttcacgctcttgatcgtctttcctttgtattggagaaggactgggtcagagatctgttggagagagagaataaagagattatttttcattatttttaaatggttgtttttgttttaatttgcacagctacacagaggaaataacttaggcactttctgttttttttaaaaaaataataaggtctcatggcttcatttagagaccacagtaacaacagcagcccaccaatcagagaagctggttgttattaaccaagctacagattcacactttctggcctaaaccctaatgggatgaggcttttcaccccaggccatgctggtggtgattttttagcccctaaataaaacactggactatttcctgtttacttcattgattgcaactacaaaggtggactcaaagcaaagcacaatcatgccagccaacattccagaattctgctgagaactccaagtctgtgaggggagaggttttacaagccagacaggcctgggggactgcagtccccaaggagaccctgccacatgctggccctttgagtgagaatgctgcatctttctacatatcttcatgagaatactgagaattggattttccttttcaaaatgcactttgctttttttgtatgttttgttatgttgagatgtttctaaagaaaagattttatgtaattataagatgaagcgtagtgaattgtacagctgttgtaataatgacctatttctatataaaataaaattgtatggcttatgtgtaaattattttgtatctgagataccagttccttttcccaaatataaaagtataaaagttttcttgtgtttttctgtgagtgaaaattttgtaataaattaacaaatttgtacaaaaaaaactg

SEQ ID NO: 280290 - DNA, 3807 bp, Homo sapiens
gtttgccgcgcgagcagccggcctctcgcaggagccgagggacccgcgcggctgcggcccaggagcggcggccgcggagcccggagacccgcagccgcggcggcggcggcggcggcggcagcagctagagcagcgcctcccgccgccgcccgggaggagctcgccgcgcccgctcgccgcctcgtctcccagcggcggcgggaggcgcgtctccccggcccagtccgcgcccggccccgcggggccgctccggcccgctccgaggaaaaactgcatagaaaatctaatggatgaagatgagaaagacagagccaagagagcttctcgaaacaagtctgagaagaagcgtcgggaccagttcaatgttctcatcaaagagctcagttccatgctccctggcaacacgcggaaaatggacaaaaccaccgtgttggaaaaggtcatcggatttttgcagaaacacaatgaagtctcagcgcaaacggaaatctgtgacattcagcaagactggaagccttcattcctcagtaatgaagaattcacccagctgatgttggaggcattagatggcttcattatcgcagtgacaacagacggcagcatcatctatgtctctgacagtatcacgcctctccttgggcatttaccgtcggatgtcatggatcagaatttgttaaatttcctcccagaacaagaacattcagaagtttataaaatcctttcttcccatatgcttgtgacggattccccctccccagaatacttaaaatctgacagcgatttagagttttattgccatcttctcagaggcagcttgaacccaaaggaatttccaacttatgaatacataaaatttgtaggaaattttcgctcttacaacaatgtgcctagcccctcctgtaatggttttgacaacaccctttcaagaccttgccgggtgccactaggaaaggaggtttgcttcattgccaccgttcgtctggcaacaccacaattcttaaaggaaatgtgcatagttgacgaacctttagaggaattcacttcaaggcatagcttggaatggaaatttttatttctggatcacagagcacctccaatcataggatacctgccttttgaagtgctgggaacctcaggctatgactactaccacattgatgacctggagctcctggccaggtgtcaccagcacctgatgcagtttggcaaagggaagtcgtgttgctaccggtttctgaccaaaggtcagcagtggatctggctgcagactcactactacatcacctaccatcagtggaactccaagcccgagttcatcgtgtgcacacactcggtggtcagttacgcagatgtccgggtggaaaggaggcaggagctggctctggaagacccgccatccgaggccctccactcctcagcactaaaggacaagggctcaagcctggaacctcggcagcactttaacgcactcgacgtgggtgcctcgggccttaataccagtcattcgccatcggcgtcctcaagaagttcccacaaatcctcgcacacagccatgtcagaacccacctccactcccaccaagctgatggcagaggccagcaccccggctttgccaagatcagccaccctgccccaagagttacctgtccccgggctcagccaggcagccaccatgccggcccctctgccttccccatcgtcctgcgacctcacacagcagctcctgcctcagaccgttctgcagagcacgcccgctcccatggcacagttttcggcacagttcagcatgttccagaccatcaaagaccagctagagcagcggacgcggatcctgcaggccaatatccggtggcaacaggaagagctccacaagatccaggagcagctctgcctggtccaggactccaacgtccagatgttcctgcagcagccagctgtatccctgagcttcagcagcacccagcgacctgaggctcagcagcagctacagcaaaggtcagctgcagtgactcagccccagctcggggcgggcccccaacttccagggcagatctcctctgcccaggtcacaagccagcacctgctcagagaatcaagtgtgatatcaacccagggtccaaagccaatgagaagctcacagctaatgcagagcagcggccgctctggaagcagcctagtgtccccgttcagcagcgccacagctgcgctcccgccaagtctgaatctgaccacacctgcttccacctcccaggatgccagccagtgccagcccagcccagacttcagccatgatcggcagctcaggctgttgctgagccagcccatccagcccatgatgcccgggtcctgtgacgcaaggcagccctcggaagtcagcaggacgggacggcaagtcaagtacgcccagagccagaccgtgtttcaaaatccagacgcacaccccgccaacagcagcagcgccccgatgcccgtcctgctgatggggcaggcggtgctccaccccagcttccctgcctcccaaccatcgcccctgcagcctgcacaggcccggcagcagccaccgcagcactacctgcaggtacaggcaccaacctctttgcacagtgagcagcaggactcgctacttctctccacctactcacaacagccagggaccctgggctacccccaaccacccccagcacagccccagcccctacgtcctccccgaagggtcagcagtctgtctgagtcgtcaggcctccagcagccgccccgataatgccccggcactgaagtcgggacacaatcagctttaaccaatggatgaggggggtggccacaggagatggggagaggagtctgaactaaacccctggcttttgtgcacactgcatacgtttcagaactcctggatggtaaccatctctggagtgcagcgcttgctgcagtggaaatgatcaggaatactgaccgtgtttctcttgcctccgaggttcttgggcacactctatagccatactggacaggaaccaggtgccccgtgtaggcatcgtcggtcggtttgccgtcagagatggcgcatctcgctgcatcccccgagagtacaccggttgctctagccacctgcggcccgcccatctgcgctagctggccttcacgctcttgatcgtctttcctttgtattggagaaggactgggtcagagatctgttggagagagagaataaagagattatttttcattatttttaaatggttgtttttgttttaatttgcacagctacacagaggaaataacttaggcactttctgttttttttaaaaaaataataaggtctcatggcttcatttagagaccacagtaacaacagcagcccaccaatcagagaagctggttgttattaaccaagctacagattcacactttctggcctaaaccctaatgggatgaggcttttcaccccaggccatgctggtggtgattttttagcccctaaataaaacactggactatttcctgtgcctaagaagctgctcatgatggctggtatcgatgactgctacacctcagcccggggctgcactgccaccctgggcaacttcgccaaggccacctttgatgccatttctaagacctacagctacctgacccccgacctctggaaggagactgtattcaccaagtctccctatcaggagttcactgaccacctcgtcaagacccacaccagagtctccgtgcagcggactcaggctccagctgtggctacaacatagggtttttatacaagaaaaataaagtgaattaagcgtgttactgttaaaa

SEQ ID NO: 280291 - DNA, 3192 bp, Homo sapiens
gtttgccgcgcgagcagccggcctctcgcaggagccgagggacccgcgcggctgcggcccaggagcggcggccgcggagcccggagacccgcagccgcggcggcggcggcggcggcggcagcagctagagcagcgcctcccgccgccgcccgggaggagctcgccgcgcccgctcgccgcctcgtctcccagcggcggcgggaggcgcgtctccccggcccagtccgcgcccggccccgcggggccgctccggcccgctccgaggaaaaactgcatagaaaatctaatggatgaagatgagaaagacagagccaagagagcttctcgaaacaagtctgagaagaagcgtcgggaccagttcaatgttctcatcaaagagctcagttccatgctccctggcaacacgcggaaaatggacaaaaccaccgtgttggaaaaggtcatcggatttttgcagaaacacaatgaagtctcagcgcaaacggaaatctgtgacattcagcaagactggaagccttcattcctcagtaatgaagaattcacccagctgatgttggaggcattagatggcttcattatcgcagtgacaacagacggcagcatcatctatgtctctgacagtatcacgcctctccttgggcatttaccgtcggatgtcatggatcagaatttgttaaatttcctcccagaacaagaacattcagaagtttataaaatcctttcttcccatatgcttgtgacggattccccctccccagaatacttaaaatctgacagcgatttagagttttattgccatcttctcagaggcagcttgaacccaaaggaatttccaacttatgaatacataaaatttgtaggaaattttcgctcttacaacaatgtgcctagcccctcctgtaatggttttgacaacaccctttcaagaccttgccgggtgccactaggaaaggaggtttgcttcattgccaccgttcgtctggcaacaccacaattcttaaaggaaatgtgcatagttgacgaacctttagaggaattcacttcaaggcatagcttggaatggaaatttttatttctggatcacagagcacctccaatcataggatacctgccttttgaagtgctgggaacctcaggctatgactactaccacattgatgacctggagctcctggccaggtgtcaccagcacctgatgcagtttggcaaagggaagtcgtgttgctaccggtttctgaccaaaggtcagcagtggatctggctgcagactcactactacatcacctaccatcagtggaactccaagcccgagttcatcgtgtgcacacactcggtggtcagttacgcagatgtccgggtggaaaggaggcaggagctggctctggaagacccgccatccgaggccctccactcctcagcactaaaggacaagggctcaagcctggaacctcggcagcactttaacgcactcgacgtgggtgcctcgggccttaataccagtcattcgccatcggcgtcctcaagaagttcccacaaatcctcgcacacagccatgtcagaacccacctccactcccaccaagctgatggcagaggccagcaccccggctttgccaagatcagccaccctgccccaagagttacctgtccccgggctcagccaggcagccaccatgccggcccctctgccttccccatcgtcctgcgacctcacacagcagctcctgcctcagaccgttctgcagagcacgcccgctcccatggcacagttttcggcacagttcagcatgttccagaccatcaaagaccagctagagcagcggacgcggatcctgcaggccaatatccggtggcaacaggaagagctccacaagatccaggagcagctctgcctggtccaggactccaacgtccagatgttcctgcagcagccagctgtatccctgagcttcagcagcacccagcgacctgaggctcagcagcagctacagcaaaggtcagctgcagtgactcagccccagctcggggcgggcccccaacttccagggcagatctcctctgcccaggtcacaagccagcacctgctcagagaatcaagtgtgatatcaacccagggtccaaagccaatgagaagctcacagctaatgcagagcagcggccgctctggaagcagcctagtgtccccgttcagcagcgccacagctgcgctcccgccaagtctgaatctgaccacacctgcttccacctcccaggatgccagccagtgccagcccagcccagacttcagccatgatcggcagctcaggctgttgctgagccagcccatccagcccatgatgcccgggtcctgtgacgcaaggcagccctcggaagtcagcaggacgggacggcaagtcaagtacgcccagagccagaccgtgtttcaaaatccagacgcacaccccgccaacagcagcagcgccccgatgcccgtcctgctgatggggcaggcggtgctccaccccagcttccctgcctcccaaccatcgcccctgcagcctgcacaggcccggcagcagccaccgcagcactacctgcaggtacaggcaccaacctctttgcacagtgagcagcaggactcgctacttctctccacctactcacaacagccagggaccctgggctacccccaaccacccccagcacagccccagcccctacgtcctccccgaagggtcagcagtctgtctgagtcgtcaggcctccagcagccgccccgataatgccccggcactgaagtcgggacacaatcagctttaaccaatggatgaggggggtggccacaggagatggggagaggagtctgaactaaacccctggcttttgtgcacactgcatacgtttcagaactcctggatggtaaccatctctggagtgcagcgcttgctgcagtggaaatgatcaggaatactgaccgtgtttctcttgcctccgaggttcttgggcacactctatagccatactggacaggaaccaggtgccccgtgtaggcatcgtcggtcggtttgccgtcagagatggcgcatctcgctgcatcccccgagaagactacccggtgggctcatagaccaccatagcggtccgaccccatatagcacttggctggaccatcaatcgctcattgatacggtacatttatttagttattgggaaa

SEQ ID NO: 280292 - DNA, 4094 bp, Homo sapiens
gtttgccgcgcgagcagccggcctctcgcaggagccgagggacccgcgcggctgcggcccaggagcggcggccgcggagcccggagacccgcagccgcggcggcggcggcggcggcggcagcagctagagcagcgcctcccgccgccgcccgggaggagctcgccgcgcccgctcgccgcctcgtctcccagcggcggcgggaggcgcgtctccccggcccagtccgcgcccggccccgcggggccgctccggcccgctccgaggaaaaactgcatagaaaatctaatggatgaagatgagaaagacagagccaagagagcttctcgaaacaagtctgagaagaagcgtcgggaccagttcaatgttctcatcaaagagctcagttccatgctccctggcaacacgcggaaaatggacaaaaccaccgtgttggaaaaggtcatcggatttttgcagaaacacaatgaagtctcagcgcaaacggaaatctgtgacattcagcaagactggaagccttcattcctcagtaatgaagaattcacccagctgatgttggaggcattagatggcttcattatcgcagtgacaacagacggcagcatcatctatgtctctgacagtatcacgcctctccttgggcatttaccgtcggatgtcatggatcagaatttgttaaatttcctcccagaacaagaacattcagaagtttataaaatcctttcttcccatatgcttgtgacggattccccctccccagaatacttaaaatctgacagcgatttagagttttattgccatcttctcagaggcagcttgaacccaaaggaatttccaacttatgaatacataaaatttgtaggaaattttcgctcttacaacaatgaaggtcagtccgttctccacagttgccctggaggcagggaccaagtcccacagagaagactctgccgaggctactgcagtgcctagcccctcctgtaatggttttgacaacaccctttcaagaccttgccgggtgccactaggaaaggaggtttgcttcattgccaccgttcgtctggcaacaccacaattcttaaaggaaatgtgcatagttgacgaacctttagaggaattcacttcaaggcatagcttggaatggaaatttttatttctggatcacagagcacctccaatcataggatacctgccttttgaagtgctgggaacctcaggctatgactactaccacattgatgacctggagctcctggccaggtgtcaccagcacctgatgcagtttggcaaagggaagtcgtgttgctaccggtttctgaccaaaggtcagcagtggatctggctgcagactcactactacatcacctaccatcagtggaactccaagcccgagttcatcgtgtgcacacactcggtggtcagttacgcagatgtccgggtggaaaggaggcaggagctggctctggaagacccgccatccgaggccctccactcctcagcactaaaggacaagggctcaagcctggaacctcggcagcactttaacgcactcgacgtgggtgcctcgggccttaataccagtcattcgccatcggcgtcctcaagaagttcccacaaatcctcgcacacagccatgtcagaacccacctccactcccaccaagctgatggcagaggccagcaccccggctttgccaagatcagccaccctgccccaagagttacctgtccccgggctcagccaggcagccaccatgccggcccctctgccttccccatcgtcctgcgacctcacacagcagctcctgcctcagaccgttctgcagagcacgcccgctcccatggcacagttttcggcacagttcagcatgttccagaccatcaaagaccagctagagcagcggacgcggatcctgcaggccaatatccggtggcaacaggaagagctccacaagatccaggagcagctctgcctggtccaggactccaacgtccagatgttcctgcagcagccagctgtatccctgagcttcagcagcacccagcgacctgaggctcagcagcagctacagcaaaggtcagctgcagtgactcagccccagctcggggcgggcccccaacttccagggcagatctcctctgcccaggtcacaagccagcacctgctcagagaatcaagtgtgatatcaacccagggtccaaagccaatgagaagctcacagctaatgcagagcagcggccgctctggaagcagcctagtgtccccgttcagcagcgccacagctgcgctcccgccaagtctgaatctgaccacacctgcttccacctcccaggatgccagccagtgccagcccagcccagacttcagccatgatcggcagctcaggctgttgctgagccagcccatccagcccatgatgcccgggtcctgtgacgcaaggcagccctcggaagtcagcaggacgggacggcaagtcaagtacgcccagagccagaccgtgtttcaaaatccagacgcacaccccgccaacagcagcagcgccccgatgcccgtcctgctgatggggcaggcggtgctccaccccagcttccctgcctcccaaccatcgcccctgcagcctgcacaggcccggcagcagccaccgcagcactacctgcaggtacaggcaccaacctctttgcacagtgagcagcaggactcgctacttctctccacctactcacaacagccagggaccctgggctacccccaaccacccccagcacagccccagcccctacgtcctccccgaagggtcagcagtctgtctgagtcgtcaggcctccagcagccgccccgataatgccccggcactgaagtcgggacacaatcagctttaaccaatggatgaggggggtggccacaggagatggggagaggagtctgaactaaacccctggcttttgtgcacactgcatacgtttcagaactcctggatggtaaccatctctggagtgcagcgcttgctgcagtggaaatgatcaggaatactgaccgtgtttctcttgcctccgaggttcttgggcacactctatagccatactggacaggaaccaggtgccccgtgtaggcatcgtcggtcggtttgccgtcagagatggcgcatctcgctgcatcccccgagagtacaccggttgctctagccacctgcggcccgcccatctgcgctagctggccttcacgctcttgatcgtctttcctttgtattggagaaggactgggtcagagatctgttggagagagagaataaagagattatttttcattatttttaaatggttgtttttgttttaatttgcacagctacacagaggaaataacttaggcactttctgttttttttaaaaaaataataaggtctcatggcttcatttagagaccacagtaacaacagcagcccaccaatcagagaagctggttgttattaaccaagctacagattcacactttctggcctaaaccctaatgggatgaggcttttcaccccaggccatgctggtggtgattttttagcccctaaataaaacactggactatttcctgtttacttcattgattgcaactacaaaggtggactcaaagcaaagcacaatcatgccagccaacattccagaattctgctgagaactccaagtctgtgaggggagaggttttacaagccagacaggcctgggggactgcagtccccaaggagaccctgccacatgctggccctttgagtgagaatgctgcatctttctacatatcttcatgagaatactgagaattggattttccttttcaaaatgcactttgctttttttgtatgttttgttatgttgagatgtttctaaagaaaagattttatgtaattataagatgaagcgtagtgaattgtacagctgttgtaataatgacctatttctatataaaataaaattgtatggcttatgtgtaaattattttgtatctgagataccagttccttttcccaaatataaaagtataaaagttttcttgtgtttttctgtgagtgaaaattttgtaataaattaacaaatttgtacaaaaaaaactg

SEQ ID NO: 280293 - DNA, 3877 bp, Homo sapiens
gtttgccgcgcgagcagccggcctctcgcaggagccgagggacccgcgcggctgcggcccaggagcggcggccgcggagcccggagacccgcagccgcggcggcggcggcggcggcggcagcagctagagcagcgcctcccgccgccgcccgggaggagctcgccgcgcccgctcgccgcctcgtctcccagcggcggcgggaggcgcgtctccccggcccagtccgcgcccggccccgcggggccgctccggcccgctccgaggaaaaactgcatagaaaatctaatggatgaagatgagaaagacagagccaagagagcttctcgaaacaagtctgagaagaagcgtcgggaccagttcaatgttctcatcaaagagctcagttccatgctccctggcaacacgcggaaaatggacaaaaccaccgtgttggaaaaggtcatcggatttttgcagaaacacaatgaagtctcagcgcaaacggaaatctgtgacattcagcaagactggaagccttcattcctcagtaatgaagaattcacccagctgatgttggaggcattagatggcttcattatcgcagtgacaacagacggcagcatcatctatgtctctgacagtatcacgcctctccttgggcatttaccgtcggatgtcatggatcagaatttgttaaatttcctcccagaacaagaacattcagaagtttataaaatcctttcttcccatatgcttgtgacggattccccctccccagaatacttaaaatctgacagcgatttagagttttattgccatcttctcagaggcagcttgaacccaaaggaatttccaacttatgaatacataaaatttgtaggaaattttcgctcttacaacaatgtgcctagcccctcctgtaatggttttgacaacaccctttcaagaccttgccgggtgccactaggaaaggaggtttgcttcattgccaccgttcgtctggcaacaccacaattcttaaaggaaatgtgcatagttgacgaacctttagaggaattcacttcaaggcatagcttggaatggaaatttttatttctggatcacagagcacctccaatcataggatacctgccttttgaagtgctgggaacctcaggctatgactactaccacattgatgacctggagctcctggccaggtgtcaccagcacctgatgcagtttggcaaagggaagtcgtgttgctaccggtttctgaccaaaggtcagcagtggatctggctgcagactcactactacatcacctaccatcagtggaactccaagcccgagttcatcgtgtgcacacactcggtggtcagttacgcagatgtccgggtggaaaggaggcaggagctggctctggaagacccgccatccgaggccctccactcctcagcactaaaggacaagggctcaagcctggaacctcggcagcactttaacgcactcgacgtgggtgcctcgggccttaataccagtcattcgccatcggcgtcctcaagaagttcccacaaatcctcgcacacagccatgtcagaacccacctccactcccaccaagctgatggcagaggccagcaccccggctttgccaagatcagccaccctgccccaagagttacctgtccccgggctcagccaggcagccaccatgccggcccctctgccttccccatcgtcctgcgacctcacacagcagctcctgcctcagaccgttctgcagagcacgcccgctcccatggcacagttttcggcacagttcagcatgttccagaccatcaaagaccagctagagcagcggacgcggatcctgcaggccaatatccggtggcaacaggaagagctccacaagatccaggagcagctctgcctggtccaggactccaacgtccagatgttcctgcagcagccagctgtatccctgagcttcagcagcacccagcgacctgaggctcagcagcagctacagcaaaggtcagctgcagtgactcagccccagctcggggcgggcccccaacttccagggcagatctcctctgcccaggtcacaagccagcacctgctcagagaatcaagtgtgatatcaacccaggatgccagccagtgccagcccagcccagacttcagccatgatcggcagctcaggctgttgctgagccagcccatccagcccatgatgcccgggtcctgtgacgcaaggcagccctcggaagtcagcaggacgggacggcaagtcaagtacgcccagagccagaccgtgtttcaaaatccagacgcacaccccgccaacagcagcagcgccccgatgcccgtcctgctgatggggcaggcggtgctccaccccagcttccctgcctcccaaccatcgcccctgcagcctgcacaggcccggcagcagccaccgcagcactacctgcaggtacaggcaccaacctctttgcacagtgagcagcaggactcgctacttctctccacctactcacaacagccagggaccctgggctacccccaaccacccccagcacagccccagcccctacgtcctccccgaagggtcagcagtctgtctgagtcgtcaggcctccagcagccgccccgataatgccccggcactgaagtcgggacacaatcagctttaaccaatggatgaggggggtggccacaggagatggggagaggagtctgaactaaacccctggcttttgtgcacactgcatacgtttcagaactcctggatggtaaccatctctggagtgcagcgcttgctgcagtggaaatgatcaggaatactgaccgtgtttctcttgcctccgaggttcttgggcacactctatagccatactggacaggaaccaggtgccccgtgtaggcatcgtcggtcggtttgccgtcagagatggcgcatctcgctgcatcccccgagagtacaccggttgctctagccacctgcggcccgcccatctgcgctagctggccttcacgctcttgatcgtctttcctttgtattggagaaggactgggtcagagatctgttggagagagagaataaagagattatttttcattatttttaaatggttgtttttgttttaatttgcacagctacacagaggaaataacttaggcactttctgttttttttaaaaaaataataaggtctcatggcttcatttagagaccacagtaacaacagcagcccaccaatcagagaagctggttgttattaaccaagctacagattcacactttctggcctaaaccctaatgggatgaggcttttcaccccaggccatgctggtggtgattttttagcccctaaataaaacactggactatttcctgtttacttcattgattgcaactacaaaggtggactcaaagcaaagcacaatcatgccagccaacattccagaattctgctgagaactccaagtctgtgaggggagaggttttacaagccagacaggcctgggggactgcagtccccaaggagaccctgccacatgctggccctttgagtgagaatgctgcatctttctacatatcttcatgagaatactgagaattggattttccttttcaaaatgcactttgctttttttgtatgttttgttatgttgagatgtttctaaagaaaagattttatgtaattataagatgaagcgtagtgaattgtacagctgttgtaataatgacctatttctatataaaataaaattgtatggcttatgtgtaaattattttgtatctgagataccagttccttttcccaaatataaaagtataaaagttttcttgtgtttttctgtgagtgaaaattttgtaataaattaacaaatttgtacaaaaaaaactg

SEQ ID NO: 280294 - DNA, 3357 bp, Homo sapiens
gtttgccgcgcgagcagccggcctctcgcaggagccgagggacccgcgcggctgcggcccaggagcggcggccgcggagcccggagacccgcagccgcggcggcggcggcggcggcggcagcagctagagcagcgcctcccgccgccgcccgggaggagctcgccgcgcccgctcgccgcctcgtctcccagcggcggcgggaggcgcgtctccccggcccagtccgcgcccggccccgcggggccgctccggcccgctccgaggaaaaactgcatagaaaatctaatggatgaagatgagaaagacagagccaagagagcttctcgaaacaagtctgagaagaagcgtcgggaccagttcaatgttctcatcaaagagctcagttccatgctccctggcaacacgcggaaaatggacaaaaccaccgtgttggaaaaggtcatcggatttttgcagaaacacaatgaagtctcagcgcaaacggaaatctgtgacattcagcaagactggaagccttcattcctcagtaatgaagaattcacccagctgatgttggaggcattagatggcttcattatcgcagtgacaacagacggcagcatcatctatgtctctgacagtatcacgcctctccttgggcatttaccgtcggatgtcatggatcagaatttgttaaatttcctcccagaacaagaacattcagaagtttataaaatcctttcttcccatatgcttgtgacggattccccctccccagaatacttaaaatctgacagcgatttagagttttattgccatcttctcagaggcagcttgaacccaaaggaatttccaacttatgaatacataaaatttgtaggaaattttcgctcttacaacaatgaaggtcagtccgttctccacagttgccctggaggcagggaccaagtcccacagagaagactctgccgaggctactgcagtgcctagcccctcctgtaatggttttgacaacaccctttcaagaccttgccgggtgccactaggaaaggaggtttgcttcattgccaccgttcgtctggcaacaccacaattcttaaaggaaatgtgcatagttgacgaacctttagaggaattcacttcaaggcatagcttggaatggaaatttttatttctggatcacagagcacctccaatcataggatacctgccttttgaagtgctgggaacctcaggctatgactactaccacattgatgacctggagctcctggccaggtgtcaccagcacctgatgcagtttggcaaagggaagtcgtgttgctaccggtttctgaccaaaggtcagcagtggatctggctgcagactcactactacatcacctaccatcagtggaactccaagcccgagttcatcgtgtgcacacactcggtggtcagttacgcagatgtccgggtggaaaggaggcaggagctggctctggaagacccgccatccgaggccctccactcctcagcactaaaggacaagggctcaagcctggaacctcggcagcactttaacgcactcgacgtgggtgcctcgggccttaataccagtcattcgccatcggcgtcctcaagaagttcccacaaatcctcgcacacagccatgtcagaacccacctctgttgctgagccagcccatccagcccatgatgcccgggtcctgtgacgcaaggcagccctcggaagtcagcaggacgggacggcaagtcaagtacgcccagagccagaccgtgtttcaaaatccagacgcacaccccgccaacagcagcagcgccccgatgcccgtcctgctgatggggcaggcggtgctccaccccagcttccctgcctcccaaccatcgcccctgcagcctgcacaggcccggcagcagccaccgcagcactacctgcaggtacaggcaccaacctctttgcacagtgagcagcaggactcgctacttctctccacctactcacaacagccagggaccctgggctacccccaaccacccccagcacagccccagcccctacgtcctccccgaagggtcagcagtctgtctgagtcgtcaggcctccagcagccgccccgataatgccccggcactgaagtcgggacacaatcagctttaaccaatggatgaggggggtggccacaggagatggggagaggagtctgaactaaacccctggcttttgtgcacactgcatacgtttcagaactcctggatggtaaccatctctggagtgcagcgcttgctgcagtggaaatgatcaggaatactgaccgtgtttctcttgcctccgaggttcttgggcacactctatagccatactggacaggaaccaggtgccccgtgtaggcatcgtcggtcggtttgccgtcagagatggcgcatctcgctgcatcccccgagagtacaccggttgctctagccacctgcggcccgcccatctgcgctagctggccttcacgctcttgatcgtctttcctttgtattggagaaggactgggtcagagatctgttggagagagagaataaagagattatttttcattatttttaaatggttgtttttgttttaatttgcacagctacacagaggaaataacttaggcactttctgttttttttaaaaaaataataaggtctcatggcttcatttagagaccacagtaacaacagcagcccaccaatcagagaagctggttgttattaaccaagctacagattcacactttctggcctaaaccctaatgggatgaggcttttcaccccaggccatgctggtggtgattttttagcccctaaataaaacactggactatttcctgtttacttcattgattgcaactacaaaggtggactcaaagcaaagcacaatcatgccagccaacattccagaattctgctgagaactccaagtctgtgaggggagaggttttacaagccagacaggcctgggggactgcagtccccaaggagaccctgccacatgctggccctttgagtgagaatgctgcatctttctacatatcttcatgagaatactgagaattggattttccttttcaaaatgcactttgctttttttgtatgttttgttatgttgagatgtttctaaagaaaagattttatgtaattataagatgaagcgtagtgaattgtacagctgttgtaataatgacctatttctatataaaataaaattgtatggcttatgtgtaaattattttgtatctgagataccagttccttttcccaaatataaaagtataaaagttttcttgtgtttttctgtgagtgaaaattttgtaataaattaacaaatttgtacaaaaaaaactg

SEQ ID NO: 280295 - DNA, 2275 bp, Homo sapiens
ctgacactgagcttggggcatcacaggtgctccatgtccaccagtggagtaaatgaactatttctaggcagctcagagcaagaaagttcttactggcacagggaatgcaaaggaggtgcacactggtgaggtacccatgaccccaacttcacaggcatttctattctgctcccagatgttcctgcagcagccagctgtatccctgagcttcagcagcacccagcgacctgaggctcagcagcagctacagcaaaggtcagctgcagtgactcagccccagctcggggcgggcccccaacttccagggcagatctcctctgcccaggtcacaagccagcacctgctcagagaatcaagtgtgatatcaacccagggtccaaagccaatgagaagctcacagctaatgcagagcagcggccgctctggaagcagcctagtgtccccgttcagcagcgccacagctgcgctcccgccaagtctgaatctgaccacacctgcttccacctcccaggatgccagccagtgccagcccagcccagacttcagccatgatcggcagctcaggctgttgctgagccagcccatccagcccatgatgcccgggtcctgtgacgcaaggcagccctcggaagtcagcaggacgggacggcaagtcaagtacgcccagagccagaccgtgtttcaaaatccagacgcacaccccgccaacagcagcagcgccccgatgcccgtcctgctgatggggcaggcggtgctccaccccagcttccctgcctcccaaccatcgcccctgcagcctgcacaggcccggcagcagccaccgcagcactacctgcaggtacaggcaccaacctctttgcacagtgagcagcaggactcgctacttctctccacctactcacaacagccagggaccctgggctacccccaaccacccccagcacagccccagcccctacgtcctccccgaagggtcagcagtctgtctgagtcgtcaggcctccagcagccgccccgataatgccccggcactgaagtcgggacacaatcagctttaaccaatggatgaggggggtggccacaggagatggggagaggagtctgaactaaacccctggcttttgtgcacactgcatacgtttcagaactcctggatggtaaccatctctggagtgcagcgcttgctgcagtggaaatgatcaggaatactgaccgtgtttctcttgcctccgaggttcttgggcacactctatagccatactggacaggaaccaggtgccccgtgtaggcatcgtcggtcggtttgccgtcagagatggcgcatctcgctgcatcccccgagagtacaccggttgctctagccacctgcggcccgcccatctgcgctagctggccttcacgctcttgatcgtctttcctttgtattggagaaggactgggtcagagatctgttggagagagagaataaagagattatttttcattatttttaaatggttgtttttgttttaatttgcacagctacacagaggaaataacttaggcactttctgttttttttaaaaaaataataaggtctcatggcttcatttagagaccacagtaacaacagcagcccaccaatcagagaagctggttgttattaaccaagctacagattcacactttctggcctaaaccctaatgggatgaggcttttcaccccaggccatgctggtggtgattttttagcccctaaataaaacactggactatttcctgtttacttcattgattgcaactacaaaggtggactcaaagcaaagcacaatcatgccagccaacattccagaattctgctgagaactccaagtctgtgaggggagaggttttacaagccagacaggcctgggggactgcagtccccaaggagaccctgccacatgctggccctttgagtgagaatgctgcatctttctacatatcttcatgagaatactgagaattggattttccttttcaaaatgcactttgctttttttgtatgttttgttatgttgagatgtttctaaagaaaagattttatgtaattataagatgaagcgtagtgaattgtacagctgttgtaataatgacctatttctatataaaataaaattgtatggcttatgtgtaaattattttgtatctgagataccagttccttttcccaaatataaaagtataaaagttttcttgtgtttttctgtgagtgaaaattttgtaataaattaacaaatttgtacaaaaaaaactg

SEQ ID NO: 280296 - DNA, 1179 bp, Homo sapiens
cccagaagtgattttggatgggaaatgagcaacagacaagtttgcatgcacctgttgcagacaagatgcaggctatgaatacagagagcgcttcggcccactcactgcccttaggggcttggggtggggtgcagagaggttcttgggcacactctatagccatactggacaggaaccaggtgccccgtgtaggcatcgtcggtcggtttgccgtcagagatggcgcatctcgctgcatcccccgagagtacaccggttgctctagccacctgcggcccgcccatctgcgctagctggccttcacgctcttgatcgtctttcctttgtattggagaaggactgggtcagagatctgttggagagagagaataaagagattatttttcattatttttaaatggttgtttttgttttaatttgcacagctacacagaggaaataacttaggcactttctgttttttttaaaaaaataataaggtctcatggcttcatttagagaccacagtaacaacagcagcccaccaatcagagaagctggttgttattaaccaagctacagattcacactttctggcctaaaccctaatgggatgaggcttttcaccccaggccatgctggtggtgattttttagcccctaaataaaacactggactatttcctgtttacttcattgattgcaactacaaaggtggactcaaagcaaagcacaatcatgccagccaacattccagaattctgctgagaactccaagtctgtgaggggagaggttttacaagccagacaggcctgggggactgcagtccccaaggagaccctgccacatgctggccctttgagtgagaatgctgcatctttctacatatcttcatgagaatactgagaattggattttccttttcaaaatgcactttgctttttttgtatgttttgttatgttgagatgtttctaaagaaaagattttatgtaattataagatgaagcgtagtgaattgtacagctgttgtaataatgacctatttctatataaaataaaattgtatggcttatgtgtaaattattttgtatctgagataccagttccttttcccaaatataaaagtataaaagttttcttgtgtttttctgtgagtgaaaattttgtaataaattaacaaatttgtacaaaaaaaactg

SEQ ID NO: 280297 - DNA, 2616 bp, Homo sapiens
gtttgccgcgcgagcagccggcctctcgcaggagccgagggacccgcgcggctgcggcccaggagcggcggccgcggagcccggagacccgcagccgcggcggcggcggcggcggcggcagcagctagagcagcgcctcccgccgccgcccgggaggagctcgccgcgcccgctcgccgcctcgtctcccagcggcggcgggaggcgcgtctccccggcccagtccgcgcccggccccgcggggccgctccggcccgctccgaggaaaaactgcatagaaaatctaatggatgaagatgagaaagacagagccaagagagcttctcgaaacaagtctgagaagaagcgtcgggaccagttcaatgttctcatcaaagagctcagttccatgctccctggcaacacgcggaaaatggacaaaaccaccgtgttggaaaaggtcatcggatttttgcagaaacacaatgaagtctcagcgcaaacggaaatctgtgacattcagcaagactggaagccttcattcctcagtaatgaagaattcacccagctgatgttggaggcattagatggcttcattatcgcagtgacaacagacggcagcatcatctatgtctctgacagtatcacgcctctccttgggcatttaccgtcggatgtcatggatcagaatttgttaaatttcctcccagaacaagaacattcagaagtttataaaatcctttcttcccatatgcttgtgacggattccccctccccagaatacttaaaatctgacagcgatttagagttttattgccatcttctcagaggcagcttgaacccaaaggaatttccaacttatgaatacataaaatttgtaggaaattttcgctcttacaacaatgtgcctagcccctcctgtaatggttttgacaacaccctttcaagaccttgccgggtgccactaggaaaggaggtttgcttcattgccaccgttcgtctggcaacaccacaattcttaaaggaaatgtgcatagttgacgaacctttagaggaattcacttcaaggcatagcttggaatggaaatttttatttctggatcacagagcacctccaatcataggatacctgccttttgaagtgctgggaacctcaggctatgactactaccacattgatgacctggagctcctggccaggtgtcaccagcacctgatgcagtttggcaaagggaagtcgtgttgctaccggtttctgaccaaaggtcagcagtggatctggctgcagactcactactacatcacctaccatcagtggaactccaagcccgagttcatcgtgtgcacacactcggtggtcagttacgcagatgtccgggtggaaaggaggcaggagctggctctggaagacccgccatccgaggccctccactcctcagcactaaaggacaagggctcaagcctggaacctcggcagcactttaacgcactcgacgtgggtgcctcgggccttaataccagtcattcgccatcggcgtcctcaagaagttcccacaaatcctcgcacacagccatgtcagaacccacctccactcccaccaagctgatggcagaggccagcaccccggctttgccaagatcagccaccctgccccaagagttacctgtccccgggctcagccaggcagccaccatgccggcccctctgccttccccatcgtcctgcgacctcacacagcagctcctgcctcagaccgttctgcagagcacgcccgctcccatggcacagttttcggcacagttcagcatgttccagaccatcaaagaccagctagagcagcggacgcggatcctgcaggccaatatccggtggcaacaggaagagctccacaagatccaggagcagctctgcctggtccaggactccaacgtccagatgttcctgcagcagccagctgtatccctgagcttcagcagcacccagcgacctgaggctcagcagcagctacagcaaaggtcagctgcagtgactcagccccagctcggggcgggcccccaacttccagggcagatctcctctgcccaggtcacaagccagcacctgctcagagaatcaagtgtgatatcaacccaggtaaatgtgctccttgccagcttcactccttgcctctagagcagacaccctcttgcagtttgggacatacttgattcctgcagcctacgtgaactgaggcctactgccctgttccgttatggactgagggtagatttgggagtgagccttcttttccttcttctgttaaagtcactttgaaaccccaagttgtattggcttccttctgtgttttataaatgtccacctcagtcccttgctctcgtgcttaaagatatcactcggctgaaatgttcacctttgatgctgacttagggttggaggcagatatggccatcccagagacccactggcagctgaatgtcccaacactcaacgtccatggtccccgccatctactctggttttaaccattacccacatgagcagccactgctgttcactgtcccttgccccaggtgccccctgctcctccaggcgccccctgctcctccaggcccccactgctcctccaggtctccctg

SEQ ID NO: 280298 - DNA, 1173 bp, Homo sapiens
gtttgccgcgcgagcagccggcctctcgcaggagccgagggacccgcgcggctgcggcccaggagcggcggccgcggagcccggagacccgcagccgcggcggcggcggcggcggcggcagcagctagagcagcgcctcccgccgccgcccgggaggagctcgccgcgcccgctcgccgcctcgtctcccagcggcggcgggaggcgcgtctccccggcccagtccgcgcccggccccgcggggccgctccggcccgctccgaggaaaaactgcatagaaaatctaatggatgaagatgagaaagacagagccaagagagcttctcgaaacaagtctgagaagaagcgtcgggaccagttcaatgttctcatcaaagagctcagttccatgctccctggcaacacgcggaaaatggacaaaaccaccgtgttggaaaaggtcatcggatttttgcagaaacacaatgaagtctcagcgcaaacggaaatctgtgacattcagcaagactggaagccttcattcctcagtaatgaagaattcacccagctgatgttggaggcattagatggcttcattatcgcagtgacaacagacggcagcatcatctatgtctctgacagtatcacgcctctccttgggcatttaccgtcggatgtcatggatcagaatttgttaaatttcctcccagaacaagaacattcagaagtttataaaatcctttcttcccatatgcttgtgacggattccccctccccagaatacttaaaatctgacagcgatttagagttttattgccatcttctcagaggcagcttgaacccaaaggaatttccaacttatgaatacataaaatttgtaggaaattttcgctcttacaacaatgtgcctagcccctcctgtaatggttttgacaacaccctttcaagaccttgccgggtgccactaggaaaggaggtttgcttcattgccaccgttcgtctggcaacaccacaattcttaaaggaaatgtgcatagttgacgaacctttagaggaattcacttcaaggcatagcttggaatggaaatttttatttctggatcacagagcacctccaatcataggatacctgccttttgaagtgctgggaacctcaggctatgactagagtggccggtaccgagctcgatcgta

SEQ ID NO: 280299 - DNA, 173 bp, Homo sapiens
ataactctttcatctgattatgtttttcggctccaccttgaagttttcggcacagttcagcatgttccagaccatcaaagaccagctagagcagcggacgcggatcctgcaggccaatatccggtggcaacaggaagagctccacaagatccaggagcagctctgcctggtcc

SEQ ID NO: 280300 - DNA, 540 bp, Homo sapiens
actgtttgatgtgtgtgtttcaggacaagggctcaagcctggaacctcggcagcactttaacgcactcgacgtgggtgcctcgggccttaataccagtcattcgccatcggcgtcctcaagaagttcccacaaatcctcgcacacagccatgtcagaacccacctccactcccaccaagctgatggcagaggccagcaccccggctttgccaagatcagccaccctgccccaagagttacctgtccccgggctcagccaggcagccaccatgccggcccctctgccttccccatcgtcctgcgacctcacacagcagctcctgcctcagaccgttctgcagagcacgcccgctcccatggcacagttttcggcacagttcagcatgttccagaccatcaaagaccagctagagcagcggacgcggatcctgcaggccaatatccggtggcaacaggaagagctccacaagatccaggagcagctctgcctggtccaggactccaacgtccaggcacatctgctcactgcctccacctacg

SEQ ID NO: 280301 - DNA, 3962 bp, Homo sapiens
gtttgccgcgcgagcagccggcctctcgcaggagccgagggacccgcgcggctgcggcccaggagcggcggccgcggagcccggagacccgcagccgcggcggcggcggcggcggcggcagcagctagagcagcgcctcccgccgccgcccgggaggagctcgccgcgcccgctcgccgcctcgtctcccagcggcggcgggaggcgcgtctccccggcccagtccgcgcccggccccgcggggccgctccggcccgctccgaggaaaaactgcatagaaaatctaatggatgaagatgagaaagacagagccaagagagcttctcgaaacaagtctgagaagaagcgtcgggaccagttcaatgttctcatcaaagagctcagttccatgctccctggcaacacgcggaaaatggacaaaaccaccgtgttggaaaaggtcatcggatttttgcagaaacacaatgaagtctcagcgcaaacggaaatctgtgacattcagcaagactggaagccttcattcctcagtaatgaagaattcacccagctgatgttggaggcattagatggcttcattatcgcagtgacaacagacggcagcatcatctatgtctctgacagtatcacgcctctccttgggcatttaccgtcggatgtcatggatcagaatttgttaaatttcctcccagaacaagaacattcagaagtttataaaatcctttcttcccatatgcttgtgacggattccccctccccagaatacttaaaatctgacagcgatttagagttttattgccatcttctcagaggcagcttgaacccaaaggaatttccaacttatgaatacataaaatttgtaggaaattttcgctcttacaacaatgtgcctagcccctcctgtaatggttttgacaacaccctttcaagaccttgccgggtgccactaggaaaggaggtttgcttcattgccaccgttcgtctggcaacaccacaattcttaaaggaaatgtgcatagttgacgaacctttagaggaattcacttcaaggcatagcttggaatggaaatttttatttctggatcacagagcacctccaatcataggatacctgccttttgaagtgctgggaacctcaggctatgactactaccacattgatgacctggagctcctggccaggtgtcaccagcacctgatgcagtttggcaaagggaagtcgtgttgctaccggtttctgaccaaaggtcagcagtggatctggctgcagactcactactacatcacctaccatcagtggaactccaagcccgagttcatcgtgtgcacacactcggtggtcagttacgcagatgtccgggtggaaaggaggcaggagctggctctggaagacccgccatccgaggccctccactcctcagcactaaaggacaagggctcaagcctggaacctcggcagcactttaacgcactcgacgtgggtgcctcgggccttaataccagtcattcgccatcggcgtcctcaagaagttcccacaaatcctcgcacacagccatgtcagaacccacctccactcccaccaagctgatggcagaggccagcaccccggctttgccaagatcagccaccctgccccaagagttacctgtccccgggctcagccaggcagccaccatgccggcccctctgccttccccatcgtcctgcgacctcacacagcagctcctgcctcagaccgttctgcagagcacgcccgctcccatggcacagttttcggcacagttcagcatgttccagaccatcaaagaccagctagagcagcggacgcggatcctgcaggccaatatccggtggcaacaggaagagctccacaagatccaggagcagctctgcctggtccaggactccaacgtccagatgttcctgcagcagccagctgtatccctgagcttcagcagcacccagcgacctgaggctcagcagcagctacagcaaaggtcagctgcagtgactcagccccagctcggggcgggcccccaacttccagggcagatctcctctgcccaggtcacaagccagcacctgctcagagaatcaagtgtgatatcaacccagggtccaaagccaatgagaagctcacagctaatgcagagcagcggccgctctggaagcagcctagtgtccccgttcagcagcgccacagctgcgctcccgccaagtctgaatctgaccacacctgcttccacctcccaggatgccagccagtgccagcccagcccagacttcagccatgatcggcagctcaggctgttgctgagccagcccatccagcccatgatgcccgggtcctgtgacgcaaggcagccctcggaagtcagcaggacgggacggcaagtcaagtacgcccagagccagaccgtgtttcaaaatccagacgcacaccccgccaacagcagcagcgccccgatgcccgtcctgctgatggggcaggcggtgctccaccccagcttccctgcctcccaaccatcgcccctgcagcctgcacaggcccggcagcagccaccgcagcactacctgcaggtacaggcaccaacctctttgcacagtgagcagcaggactcgctacttctctccacctactcacaacagccagggaccctgggctacccccaaccacccccagcacagccccagcccctacgtcctccccgaagggtcagcagtctgtctgagtcgtcaggcctccagcagccgccccgataatgccccggcactgaagtcgggacacaatcagctttaaccaatggatgaggggggtggccacaggagatggggagaggagtctgaactaaacccctggcttttgtgcacactgcatacgtttcagaactcctggatggtaaccatctctggagtgcagcgcttgctgcagtggaaatgatcaggaatactgaccgtgtttctcttgcctccgaggttcttgggcacactctatagccatactggacaggaaccaggtgccccgtgtaggcatcgtcggtcggtttgccgtcagagatggcgcatctcgctgcatcccccgagagtacaccggttgctctagccacctgcggcccgcccatctgcgctagctggccttcacgctcttgatcgtctttcctttgtattggagaaggactgggtcagagatctgttggagagagagaataaagagattatttttcattatttttaaatggttgtttttgttttaatttgcacagctacacagaggaaataacttaggcactttctgttttttttaaaaaacaatcagagaagctggttgttattaaccaagctacagattcacactttctggcctaaaccctaatgggatgaggcttttcaccccaggccatgctggtggtgattttttagcccctaaataaaacactggactatttcctgtttacttcattgattgcaactacaaaggtggactcaaagcaaagcacaatcatgccagccaacattccagaattctgctgagaactccaagtctgtgaggggagaggttttacaagccagacaggcctgggggactgcagtccccaaggagaccctgccacatgctggccctttgagtgagaatgctgcatctttctacatatcttcatgagaatactgagaattggattttccttttcaaaatgcactttgctttttttgtatgttttgttatgttgagatgtttctaaagaaaagattttatgtaattataagatgaagcgtagtgaattgtacagctgttgtaataatgacctatttctatataaaataaaattgtatggcttatgtgtaaattattttgtatctgagataccagttccttttcccaaatataaaagtataaaagttttcttgtgtttttctgtgagtgaaaattttgtaataaattaacaaatttgtacaaaaaaaactg

SEQ ID NO: 280302 - DNA, 3619 bp, Homo sapiens
gtttgccgcgcgagcagccggcctctcgcaggagccgagggacccgcgcggctgcggcccaggagcggcggccgcggagcccggagacccgcagccgcggcggcggcggcggcggcggcagcagctagagcagcgcctcccgccgccgcccgggaggagctcgccgcgcccgctcgccgcctcgtctcccagcggcggcgggaggcgcgtctccccggcccagtccgcgcccggccccgcggggccgctccggcccgctccgaggaaaaactgcatagaaaatctaatggatgaagatgagaaagacagagccaagagagcttctcgaaacaagtctgagaagaagcgtcgggaccagttcaatgttctcatcaaagagctcagttccatgctccctggcaacacgcggaaaatggacaaaaccaccgtgttggaaaaggtcatcggatttttgcagaaacacaatgaagtctcagcgcaaacggaaatctgtgacattcagcaagactggaagccttcattcctcagtaatgaagaattcacccagctgatgttggaggcattagatggcttcattatcgcagtgacaacagacggcagcatcatctatgtctctgacagtatcacgcctctccttgggcatttaccgtcggatgtcatggatcagaatttgttaaatttcctcccagaacaagaacattcagaagtttataaaatcctttcttcccatatgcttgtgacggattccccctccccagaatacttaaaatctgacagcgatttagagttttattgccatcttctcagaggcagcttgaacccaaaggaatttccaacttatgaatacataaaatttgtaggaaattttcgctcttacaacaatgtgcctagcccctcctgtaatggttttgacaacaccctttcaagaccttgccgggtgccactaggaaaggaggtttgcttcattgccaccgttcgtctggcaacaccacaattcttaaaggaaatgtgcatagttgacgaacctttagaggaattcacttcaaggcatagcttggaatggaaatttttatttctggatcacagagcacctccaatcataggatacctgccttttgaagtgctgggaacctcaggctatgactactaccacattgatgacctggagctcctggccaggtgtcaccagcacctgatgcagtttggcaaagggaagtcgtgttgctaccggtttctgaccaaaggtcagcagtggatctggctgcagactcactactacatcacctaccatcagtggaactccaagcccgagttcatcgtgtgcacacactcggtggtcagttacgcagatgtccgggtggaaaggaggcaggagctggctctggaagacccgccatccgaggccctccactcctcagcactaaaggacaagggctcaagcctggaacctcggcagcactttaacgcactcgacgtgggtgcctcgggccttaataccagtcattcgccatcggcgtcctcaagaagttcccacaaatcctcgcacacagccatgtcagaacccacctccactcccaccaagctgatggcagaggccagcaccccggctttgccaagatcagccaccctgccccaagagttacctgtccccgggctcagccaggcagccaccatgccggcccctctgccttccccatcgtcctgcgacctcacacagcagctcctgcctcagaccgttctgcagagcacgcccgctcccatggcacagttttcggcacagttcagcatgttccagaccatcaaagaccagctagagcagcggacgcggatcctgcaggccaatatccggtggcaacaggaagagctccacaagatccaggagcagctctgcctggtccaggactccaacgtccagatgttcctgcagcagccagctgtatccctgagcttcagcagcacccagcgacctgaggctcagcagcagctacagcaaaggtcagctgcagtgactcagccccagctcggggcgggcccccaacttccagggcagatctcctctgcccaggtcacaagccagcacctgctcagagaatcaagtgtgatatcaacccagggtccaaagccaatgagaagctcacagctaatgcagagcagcggccgctctggaagcagcctagtgtccccgttcagcagcgccacagctgcgctcccgccaagtctgaatctgaccacacctgcttccacctcccaggatgccagccagtgccagcccagcccagacttcagccatgatcggcagctcaggctgttgctgagccagcccatccagcccatgatgcccgggtcctgtgacgcaaggcagccctcggaagtcagcaggacgggacggcaagtcaagtacgcccagagccagaccgtgtttcaaaatccagacgcacaccccgccaacagcagcagcgccccgatgcccgtcctgctgatggggcaggcggtgctccaccccagcttccctgcctcccaaccatcgcccctgcagcctgcacaggcccggcagcagccaccgcagcactacctgcaggttcttgggcacactctatagccatactggacaggaaccaggtgccccgtgtaggcatcgtcggtcggtttgccgtcagagatggcgcatctcgctgcatcccccgagagtacaccggttgctctagccacctgcggcccgcccatctgcgctagctggccttcacgctcttgatcgtctttcctttgtattggagaaggactgggtcagagatctgttggagagagagaataaagagattatttttcattatttttaaatggttgtttttgttttaatttgcacagctacacagaggaaataacttaggcactttctgttttttttaaaaaaataataaggtctcatggcttcatttagagaccacagtaacaacagcagcccaccaatcagagaagctggttgttattaaccaagctacagattcacactttctggcctaaaccctaatgggatgaggcttttcaccccaggccatgctggtggtgattttttagcccctaaataaaacactggactatttcctgtttacttcattgattgcaactacaaaggtggactcaaagcaaagcacaatcatgccagccaacattccagaattctgctgagaactccaagtctgtgaggggagaggttttacaagccagacaggcctgggggactgcagtccccaaggagaccctgccacatgctggccctttgagtgagaatgctgcatctttctacatatcttcatgagaatactgagaattggattttccttttcaaaatgcactttgctttttttgtatgttttgttatgttgagatgtttctaaagaaaagattttatgtaattataagatgaagcgtagtgaattgtacagctgttgtaataatgacctatttctatataaaataaaattgtatggcttatgtgtaaattattttgtatctgagataccagttccttttcccaaatataaaagtataaaagttttcttgtgtttttctgtgagtgaaaattttgtaataaattaacaaatttgtacaaaaaaaactg

SEQ ID NO: 280303 - DNA, 3706 bp, Homo sapiens
gtttgccgcgcgagcagccggcctctcgcaggagccgagggacccgcgcggctgcggcccaggagcggcggccgcggagcccggagacccgcagccgcggcggcggcggcggcggcggcagcagctagagcagcgcctcccgccgccgcccgggaggagctcgccgcgcccgctcgccgcctcgtctcccagcggcggcgggaggcgcgtctccccggcccagtccgcgcccggccccgcggggccgctccggcccgctccgaggaaaaactgcatagaaaatctaatggatgaagatgagaaagacagagccaagagagcttctcgaaacaagtctgagaagaagcgtcgggaccagttcaatgttctcatcaaagagctcagttccatgctccctggcaacacgcggaaaatggacaaaaccaccgtgttggaaaaggtcatcggatttttgcagaaacacaatgaagtctcagcgcaaacggaaatctgtgacattcagcaagactggaagccttcattcctcagtaatgaagaattcacccagctgatgttggaggcattagatggcttcattatcgcagtgacaacagacggcagcatcatctatgtctctgacagtatcacgcctctccttgggcatttaccgtcggatgtcatggatcagaatttgttaaatttcctcccagaacaagaacattcagaagtttataaaatcctttcttcccatatgcttgtgacggattccccctccccagaatacttaaaatctgacagcgatttagagttttattgccatcttctcagaggcagcttgaacccaaaggaatttccaacttatgaatacataaaatttgtaggaaattttcgctcttacaacaatgtgatgcagtttggcaaagggaagtcgtgttgctaccggtttctgaccaaaggtcagcagtggatctggctgcagactcactactacatcacctaccatcagtggaactccaagcccgagttcatcgtgtgcacacactcggtggtcagttacgcagatgtccgggtggaaaggaggcaggagctggctctggaagacccgccatccgaggccctccactcctcagcactaaaggacaagggctcaagcctggaacctcggcagcactttaacgcactcgacgtgggtgcctcgggccttaataccagtcattcgccatcggcgtcctcaagaagttcccacaaatcctcgcacacagccatgtcagaacccacctccactcccaccaagctgatggcagaggccagcaccccggctttgccaagatcagccaccctgccccaagagttacctgtccccgggctcagccaggcagccaccatgccggcccctctgccttccccatcgtcctgcgacctcacacagcagctcctgcctcagaccgttctgcagagcacgcccgctcccatggcacagttttcggcacagttcagcatgttccagaccatcaaagaccagctagagcagcggacgcggatcctgcaggccaatatccggtggcaacaggaagagctccacaagatccaggagcagctctgcctggtccaggactccaacgtccagatgttcctgcagcagccagctgtatccctgagcttcagcagcacccagcgacctgaggctcagcagcagctacagcaaaggtcagctgcagtgactcagccccagctcggggcgggcccccaacttccagggcagatctcctctgcccaggtcacaagccagcacctgctcagagaatcaagtgtgatatcaacccagggtccaaagccaatgagaagctcacagctaatgcagagcagcggccgctctggaagcagcctagtgtccccgttcagcagcgccacagctgcgctcccgccaagtctgaatctgaccacacctgcttccacctcccaggatgccagccagtgccagcccagcccagacttcagccatgatcggcagctcaggctgttgctgagccagcccatccagcccatgatgcccgggtcctgtgacgcaaggcagccctcggaagtcagcaggacgggacggcaagtcaagtacgcccagagccagaccgtgtttcaaaatccagacgcacaccccgccaacagcagcagcgccccgatgcccgtcctgctgatggggcaggcggtgctccaccccagcttccctgcctcccaaccatcgcccctgcagcctgcacaggcccggcagcagccaccgcagcactacctgcaggtacaggcaccaacctctttgcacagtgagcagcaggactcgctacttctctccacctactcacaacagccagggaccctgggctacccccaaccacccccagcacagccccagcccctacgtcctccccgaagggtcagcagtctgtctgagtcgtcaggcctccagcagccgccccgataatgccccggcactgaagtcgggacacaatcagctttaaccaatggatgaggggggtggccacaggagatggggagaggagtctgaactaaacccctggcttttgtgcacactgcatacgtttcagaactcctggatggtaaccatctctggagtgcagcgcttgctgcagtggaaatgatcaggaatactgaccgtgtttctcttgcctccgaggttcttgggcacactctatagccatactggacaggaaccaggtgccccgtgtaggcatcgtcggtcggtttgccgtcagagatggcgcatctcgctgcatcccccgagagtacaccggttgctctagccacctgcggcccgcccatctgcgctagctggccttcacgctcttgatcgtctttcctttgtattggagaaggactgggtcagagatctgttggagagagagaataaagagattatttttcattatttttaaatggttgtttttgttttaatttgcacagctacacagaggaaataacttaggcactttctgttttttttaaaaaaataataaggtctcatggcttcatttagagaccacagtaacaacagcagcccaccaatcagagaagctggttgttattaaccaagctacagattcacactttctggcctaaaccctaatgggatgaggcttttcaccccaggccatgctggtggtgattttttagcccctaaataaaacactggactatttcctgtttacttcattgattgcaactacaaaggtggactcaaagcaaagcacaatcatgccagccaacattccagaattctgctgagaactccaagtctgtgaggggagaggttttacaagccagacaggcctgggggactgcagtccccaaggagaccctgccacatgctggccctttgagtgagaatgctgcatctttctacatatcttcatgagaatactgagaattggattttccttttcaaaatgcactttgctttttttgtatgttttgttatgttgagatgtttctaaagaaaagattttatgtaattataagatgaagcgtagtgaattgtacagctgttgtaataatgacctatttctatataaaataaaattgtatggcttatgtgtaaattattttgtatctgagataccagttccttttcccaaatataaaagtataaaagttttcttgtgtttttctgtgagtgaaaattttgtaataaattaacaaatttgtacaaaaaaaactg

SEQ ID NO: 280304 - DNA, 4150 bp, Homo sapiens
  misc_feature (1651)..(1651): n is a, c, g, or t
  misc_feature (1664)..(1664): n is a, c, g, or t
gtttgccgcgcgagcagccggcctctcgcaggagccgagggacccgcgcggctgcggcccaggagcggcggccgcggagcccggagacccgcagccgcggcggcggcggcggcggcggcagcagctagagcagcgcctcccgccgccgcccgggaggagctcgccgcgcccgctcgccgcctcgtctcccagcggcggcgggaggcgcgtctccccggcccagtccgcgcccggccccgcggggccgctccggcccgctccgaggaaaaactgcatagaaaatctaatggatgaagatgagaaagacagagccaagagagcttctcgaaacaagtctgagaagaagcgtcgggaccagttcaatgttctcatcaaagagctcagttccatgctccctggcaacacgcggaaaatggacaaaaccaccgtgttggaaaaggtcatcggatttttgcagaaacacaatgaagtctcagcgcaaacggaaatctgtgacattcagcaagactggaagccttcattcctcagtaatgaagaattcacccagctgatgttggaggcattagatggcttcattatcgcagtgacaacagacggcagcatcatctatgtctctgacagtatcacgcctctccttgggcatttaccgtcggatgtcatggatcagaatttgttaaatttcctcccagaacaagaacattcagaagtttataaaatcctttcttcccatatgcttgtgacggattccccctccccagaatacttaaaatctgacagcgatttagagttttattgccatcttctcagaggcagcttgaacccaaaggaatttccaacttatgaatacataaaatttgtaggaaattttcgctcttacaacaatgaaggtcagtccgttctccacagttgccctggaggcagggaccaagtcccacagagaagactctgccgaggctactgcagtgcctagcccctcctgtaatggttttgacaacaccctttcaagaccttgccgggtgccactaggaaaggaggtttgcttcattgccaccgttcgtctggcaacaccacaattcttaaaggaaatgtgcatagttgacgaacctttagaggaattcacttcaaggcatagcttggaatggaaatttttatttctggatcacagagcacctccaatcataggatacctgccttttgaagtgctgggaacctcaggctatgactactaccacattgatgacctggagctcctggccaggtgtcaccagcacctgatgcagtttggcaaagggaagtcgtgttgctaccggtttctgaccaaaggtcagcagtggatctggctgcagactcactactacatcacctaccatcagtggaactccaagcccgagttcatcgtgtgcacacactcggtggtcagttacgcagatgtccgggtggaaaggaggcaggagctggctctggaagacccgccatccgaggccctccactcctcagcactaaaggacaagggctcaagcctggaacctcggcagcactttaacgcactcgacgtgggtgcctcgggccttaataccagtcattcgccatcggcgtcctcaagaagttcccacaaatcctcgcacacagccatgtcagaacccacctgccnccccaattttggnttttccaaagggaaaaaaaacccccccaaacctccaaacccactcccaccaagctgatggcagaggccagcaccccggctttgccaagatcagccaccctgccccaagagttacctgtccccgggctcagccaggcagccaccatgccggcccctctgccttccccatcgtcctgcgacctcacacagcagctcctgcctcagaccgttctgcagagcacgcccgctcccatggcacagttttcggcacagttcagcatgttccagaccatcaaagaccagctagagcagcggacgcggatcctgcaggccaatatccggtggcaacaggaagagctccacaagatccaggagcagctctgcctggtccaggactccaacgtccagatgttcctgcagcagccagctgtatccctgagcttcagcagcacccagcgacctgaggctcagcagcagctacagcaaaggtcagctgcagtgactcagccccagctcggggcgggcccccaacttccagggcagatctcctctgcccaggtcacaagccagcacctgctcagagaatcaagtgtgatatcaacccagggtccaaagccaatgagaagctcacagctaatgcagagcagcggccgctctggaagcagcctagtgtccccgttcagcagcgccacagctgcgctcccgccaagtctgaatctgaccacacctgcttccacctcccaggatgccagccagtgccagcccagcccagacttcagccatgatcggcagctcaggctgttgctgagccagcccatccagcccatgatgcccgggtcctgtgacgcaaggcagccctcggaagtcagcaggacgggacggcaagtcaagtacgcccagagccagaccgtgtttcaaaatccagacgcacaccccgccaacagcagcagcgccccgatgcccgtcctgctgatggggcaggcggtgctccaccccagcttccctgcctcccaaccatcgcccctgcagcctgcacaggcccggcagcagccaccgcagcactacctgcaggtacaggcaccaacctctttgcacagtgagcagcaggactcgctacttctctccacctactcacaacagccagggaccctgggctacccccaaccacccccagcacagccccagcccctacgtcctccccgaagggtcagcagtctgtctgagtcgtcaggcctccagcagccgccccgataatgccccggcactgaagtcgggacacaatcagctttaaccaatggatgaggggggtggccacaggagatggggagaggagtctgaactaaacccctggcttttgtgcacactgcatacgtttcagaactcctggatggtaaccatctctggagtgcagcgcttgctgcagtggaaatgatcaggaatactgaccgtgtttctcttgcctccgaggttcttgggcacactctatagccatactggacaggaaccaggtgccccgtgtaggcatcgtcggtcggtttgccgtcagagatggcgcatctcgctgcatcccccgagagtacaccggttgctctagccacctgcggcccgcccatctgcgctagctggccttcacgctcttgatcgtctttcctttgtattggagaaggactgggtcagagatctgttggagagagagaataaagagattatttttcattatttttaaatggttgtttttgttttaatttgcacagctacacagaggaaataacttaggcactttctgttttttttaaaaaaataataaggtctcatggcttcatttagagaccacagtaacaacagcagcccaccaatcagagaagctggttgttattaaccaagctacagattcacactttctggcctaaaccctaatgggatgaggcttttcaccccaggccatgctggtggtgattttttagcccctaaataaaacactggactatttcctgtttacttcattgattgcaactacaaaggtggactcaaagcaaagcacaatcatgccagccaacattccagaattctgctgagaactccaagtctgtgaggggagaggttttacaagccagacaggcctgggggactgcagtccccaaggagaccctgccacatgctggccctttgagtgagaatgctgcatctttctacatatcttcatgagaatactgagaattggattttccttttcaaaatgcactttgctttttttgtatgttttgttatgttgagatgtttctaaagaaaagattttatgtaattataagatgaagcgtagtgaattgtacagctgttgtaataatgacctatttctatataaaataaaattgtatggcttatgtgtaaattattttgtatctgagataccagttccttttcccaaatataaaagtataaaagttttcttgtgtttttctgtgagtgaaaattttgtaataaattaacaaatttgtacaaaaaaaactg

SEQ ID NO: 280305 - DNA, 1973 bp, Homo sapiens
gggaggtttcctggagagatggcccagggttgagtccaagtcttacctttctcattgaaatgatgctccagggtccaaagccaatgagaagctcacagctaatgcagagcagcggccgctctggaagcagcctagtgtccccgttcagcagcgccacagctgcgctcccgccaagtctgaatctgaccacacctgcttccacctcccaggatgccagccagtgccagcccagcccagacttcagccatgatcggcagctcaggctgttgctgagccagcccatccagcccatgatgcccgggtcctgtgacgcaaggcagccctcggaagtcagcaggacgggacggcaagtcaagtacgcccagagccagaccgtgtttcaaaatccagacgcacaccccgccaacagcagcagcgccccgatgcccgtcctgctgatggggcaggcggtgctccaccccagcttccctgcctcccaaccatcgcccctgcagcctgcacaggcccggcagcagccaccgcagcactacctgcaggtacaggcaccaacctctttgcacagtgagcagcaggactcgctacttctctccacctactcacaacagccagggaccctgggctacccccaaccacccccagcacagccccagcccctacgtcctccccgaagggtcagcagtctgtctgagtcgtcaggcctccagcagccgccccgataatgccccggcactgaagtcgggacacaatcagctttaaccaatggatgaggggggtggccacaggagatggggagaggagtctgaactaaacccctggcttttgtgcacactgcatacgtttcagaactcctggatggtaaccatctctggagtgcagcgcttgctgcagtggaaatgatcaggaatactgaccgtgtttctcttgcctccgaggttcttgggcacactctatagccatactggacaggaaccaggtgccccgtgtaggcatcgtcggtcggtttgccgtcagagatggcgcatctcgctgcatcccccgagagtacaccggttgctctagccacctgcggcccgcccatctgcgctagctggccttcacgctcttgatcgtctttcctttgtattggagaaggactgggtcagagatctgttggagagagagaataaagagattatttttcattatttttaaatggttgtttttgttttaatttgcacagctacacagaggaaataacttaggcactttctgttttttttaaaaaaataataaggtctcatggcttcatttagagaccacagtaacaacagcagcccaccaatcagagaagctggttgttattaaccaagctacagattcacactttctggcctaaaccctaatgggatgaggcttttcaccccaggccatgctggtggtgattttttagcccctaaataaaacactggactatttcctgtttacttcattgattgcaactacaaaggtggactcaaagcaaagcacaatcatgccagccaacattccagaattctgctgagaactccaagtctgtgaggggagaggttttacaagccagacaggcctgggggactgcagtccccaaggagaccctgccacatgctggccctttgagtgagaatgctgcatctttctacatatcttcatgagaatactgagaattggattttccttttcaaaatgcactttgctttttttgtatgttttgttatgttgagatgtttctaaagaaaagattttatgtaattataagatgaagcgtagtgaattgtacagctgttgtaataatgacctatttctatataaaataaaattgtatggcttatgtgtaaattattttgtatctgagataccagttccttttcccaaatataaaagtataaaagttttcttgtgtttttctgtgagtgaaaattttgtaataaattaacaaatttgtacaaaaaaaactg

SEQ ID NO: 280306 - DNA, 2074 bp, Homo sapiens
gtttgccgcgcgagcagccggcctctcgcaggagccgagggacccgcgcggctgcggcccaggagcggcggccgcggagcccggagacccgcagccgcggcggcggcggcggcggcggcagcagctagagcagcgcctcccgccgccgcccgggaggagctcgccgcgcccgctcgccgcctcgtctcccagcggcggcgggaggcgcgtctccccggcccagtccgcgcccggccccgcggggccgctccggcccgctccgaggaaaaactgcatagaaaatctaatggatgaagatgagaaagacagagccaagagagcttctcgaaacaagtctgagaagaagcgtcgggaccagttcaatgttctcatcaaagagctcagttccatgctccctggcaacacgcggaaaatggacaaaaccaccgtgttggaaaaggtcatcggatttttgcagaaacacaatgaagtctcagcgcaaacggaaatctgtgacattcagcaagactggaagccttcattcctcagtaatgaagaattcacccagctgatgttggagagccatttcagagactgtgaagaatccaggtgccatgtcttagtggccaggatgttccctttctaaaatgaggacagagcccaggagataacccatcatgtccctagggaactgctaatgccctccagatgtgactcccgtcttcttccctcttctctctaagaggcacaaaaccagactccaggaggactcacatagctgtgaagtttgaaaaaacaaaattgacctggctgaaaaaacaaaattgacctggctgcagaccagccaagctggtaaaagtatcagctggcaaagactgtggctaccagcattggagcagttgcactcaaaaggagccaaagtgcctgtggcctgcggaatagggagcttgtggaatttctgaattttaatcagaaaagcaatctcttctcttagcccagaggttgtcccaaggaacacaagaaatgttccatctgattcaggaatttgcagaaagggaaggtttcgtttccctctaatgtgtggcggttagaaaattctgggccattatggcacctttggaaacaccccagtcaaaatcaccattccatggataggggcacagcactttgcaatcacttgctgttgaatccctttcagatgctactgatgggacttccagaaccacagccagctttcttaaagcaatgactcagtgcagttctcatagagttgatggaaatgccaatgagctgatgaaagttatctcccgtctataaataccttcagctttttaacacccgcttgctttagacactcaggagggacatgggctcactgtgcaagacgatttgcactgcccttgcttttcccagctttccaatctgctttttccagaaaagtctcactgatgtcatcaacagtgcccttaccccttaaaaaaattcacctcctagagggcttcatagatgactttaaaacatttttagaaaaatacctgggaaggaaaagttactgggatgtacttcttcgtttactgtaactcaaatctaacccagcatttctcaatcttgcactatggtcattttggacctggtagttcttcgtcgtggggactctcctgcatattacaggatgtttggcagcactagatgccaaagtcacccactccagtggtgacaatcaaaaatgcctccagacattaccaaaattgcccccagttgagaaccactgatgtcatccaagaggacgaggtccatttaagaaacgtacttgaatctgtttttcagtctaaatcctaccagctgtcggtgtaaaataataaatgagtctagtgttaattttcctggtgaaaagaactctttcccctttcggcatggtataaaggtgcccttcatgcactgctcgtggcctcttccgggttcccgctgccatgcacttcagccacaccctcctaatgtgaaagaatgaattgtccacacagattctcagacatcacgtgaccatctagttgagtgcatgcaacatgtttccagagctttctaagcacatatttca

SEQ ID NO: 280307 - DNA, 1177 bp, Homo sapiens
gtttgccgcgcgagcagccggcctctcgcaggagccgagggacccgcgcggctgcggcccaggagcggcggccgcggagcccggagacccgcagccgcggcggcggcggcggcggcggcagcagctagagcagcgcctcccgccgccgcccgggaggagctcgccgcgcccgctcgccgcctcgtctcccagcggcggcgggaggcgcgtctccccggcccagtccgcgcccggccccgcggggccgctccggcccgctccgaggaaaaactgcatagaaaatctaatggatgaagatgagaaagacagagccaagagagcttctcgaaacaagtctgagaagaagcgtcgggaccagttcaatgttctcatcaaagagctcagttccatgctccctggcaacacgcggaaaatggacaaaaccaccgtgttggaaaaggtcatcggatttttgcagaaacacaatgaagtctcagcgcaaacggaaatctgtgacattcagcaagactggaagccttcattcctcagtaatgaagaattcacccagctgatgttggaggcattagatggcttcattatcgcagtgacaacagacggcagcatcatctatgtctctgacagtatcacgcctctccttgggcatttaccgtcggatgtcatggatcagaatttgttaaatttcctcccagaacaagaacattcagaagtttataaaatcctttcttcccatatgcttgtgacggattccccctccccagaatacttaaaatctgacagcgatttagagttttattgccatcttctcagaggcagcttgaacccaaaggaatttccaacttatgaatacataaaatttgtaggaaattttcgctcttacaacaatgtgatgcagtttggcaaagggaagtcgtgttgctaccggtttctgaccaaaggtcagcagtggatctggctgcagactcactactacatcacctaccatcagtggaactccaagcccgagttcatcgtgtgcacacactcggtggtcagttacgcagatgtccgggtggaaaggaggcaggagctggctctggaagacccgccatccgaggccctccactcctcagcactaaaggacaagcctaagccgggaaccgcgcagcgggagctcgtgtgagctgaccgcagcagcagc

SEQ ID NO: 280308 - DNA, 191 bp, Homo sapiens
taaattggtgagaactaatggttctttattttcttagtattaatagccttttatcataaatggcaagattcgaaatcagctcattactactaattggttatatatttttctgaaaagtaccctgggtttcatcctgttgtttagagagtttccacgaagggaatatattaagacttgctgcacactgtcgg

SEQ ID NO: 280309 - DNA, 213 bp, Homo sapiens
taaattggtgagaactaatggttctttattttcttagtattaatagccttttatcataaatggcaagattcgaaatcagctcattactactaattggttatatatttttctgaaaagtaccctgggtttaactgtaaacttgtttgttttgcacaaaactacaaattagttttctgaagttattatctgtgaatatatatatatatatattta

SEQ ID NO: 280310 - DNA, 521 bp, Homo sapiens
cctcatccgcaaaatgagacatggggtgagattaacactacgctcttcccttaacaacctcaggctctctgatactgtccactgcaacacagatctcaaacaccggtttaccccacacccaaatatggtggttacttctagactttgaccattttgcttgcctagttctcagctctccggtaagaaaagacagccatgcctgacttctgttgtgaaagggaacacagagggcatcgtcatggggattccgaaaatgggtccagttttggccagggggacccctggagcttgcccattggacttggagctaaaagcatcttagcaactaagacagccggtctttatagcctggatgaaatttgtatctatttcccagatggacaagagcctagaagatcccagccttgccactgggtatgagcacaggacagggggacgctcaatgctaaggctgccagagaaaatacaggacttccggttaaatttgaatttcaaataaacaagtaatttttaaagtataa

SEQ ID NO: 280311 - DNA, 448 bp, Homo sapiens
tctcccttctcttccccctccagcctccactccttcgcccgctcactcaccctctccctctcccgctgccccccctttctcccccacctctttgtttcagctgagaaccagctcctcgggacagttcccacactgcagtgcctctggtgaggagacagcgccactgaggcctcctctgaactcccaaaatgtgacctatgccatcaccgaggccgcaggaacaagaggtgggtgtccatgacattggtacctgtcatccctgtgtgcagcaggtgtgccccaccctggaggcagcagaagaagatggacaagagcctagaagatcccagccttgccactgggtatgagcacaggacagggggacgctcaatgctaaggctgccagagaaaatacaggacttccggttaaatttgaatttcaaataaacaagtaatttttaaagtataa

SEQ ID NO: 280312 - DNA, 380 bp, Homo sapiens
aattgtgtgaagaatgatgttggtagtttgataggaatacagttgaatctgtaggttgctttgagcagtgtggccattttaacaatactgattattccaattcatgagcatggaatgtttttccatttatctgtgtcatctgtgatttctctcagcagtgttctgtagtttttcttgtagagatctttcacctccttggttagatgtattcctaggtatttagtgtgtgtgtgtggctattgtaagtgagattgcgttcttgatttggctctcagtttaaatgttattggaaaacatgttccttaaaaggacatttcactttgggggaatatagaaggggggcttttcctgtgggcatttgctcactgactcatttctgt

SEQ ID NO: 280313 - DNA, 651 bp, Homo sapiens
ggtcgctctaggaaagcggcggaggaccctctatggtcccgggcccacccgaaagcgttgttcgtttcttcctgtggttttgttttctcctccccccaactcggaaggcgtcctgtgacccccgggacctcaagagctgtaaccgcccctgtgtgtggtcgaggcttttgaaaccaaactctagcctctccaacctagaaactgcatactttccacaaaatttgagatttttgagaccctggtacttttcacgaagtcaccttaattatcaccaaaaagctcctgcaagatgggagtggttatactccatttacaggaaaggaaccaaggctcagagaagaaatgtgctccgttcaccgtgtgctcctcctcagccatcctggccgtgctcagtcatctgaccagctgacctccgtgttcccccactccctggggagctcctccgccttttggcttccaatgctattgctgcatgctgaagactcccgcattgggagctgtctctgcatatggcaaagcacaaagctgaatgaggtctggacaaagaagctccactcgcaatctagagagtatctggactattgcagtgattaaatgaggggaagtattgaaagtcattgaaagtcatccccacccactagaggagagaaa

SEQ ID NO: 280314 - DNA, 1564 bp, Homo sapiens
aaaggttgctcaatcgcagatggaccaatggtgaaagcacacctgaacaaaggaaaagcagacatatttatcccttacacatttgggttgtccttactgctgtgtcctgcatccattggctggagcggaacctcacactcttaaactgatacccaatttgctaatagcctaaaacttcctaaataggtttgagacttaaatacctctctactaaaagggaaatggataaaaaggctcctcctcagccatcctggccgtgctcagtcatctgaccagctgacctccgtgttcccccactccctggggagctcctccgccttttggcttccaatgctattgctgcatgctgaagactcccgcattggtaactccagtctgactgtgggacataaatgttattgaactttagacttgtatatcgaactgattactcaagagctgcatttgcatgtgtaatggacatcccaaacctaacataccccccaaatgaattcctgatatctacctaacctgttcttgcaacagtcttcttcccagggatgggtgaagatcccatcatctttccagttgctcaagccaaaaaccttgatgtcactgttgtctcttctttttttcatccaaaattcacctgtgatttatccacaaattctgtcggcttcatcgttaaaatatattcattatcaagccactttcaacacttccactgctataaccaccaagccaccttcatccaccttctggattattatattggcttccagacgggttgccctacagtctattcacggccccagagtaatcctcttaaacctaagttagatcatgtcattcatttgttcaaaaccttcaaaggcttcccaacttattagagcaaagccaaggacctcgcagtggcacccgatgcctctcatgatctgtctctttagttctttattgtgtctgcagtgctgaaaacagtgctcagcagggaacagacactcagtaaatagctgttgaatgaatgaatttataagatgccttattgtttacaaagtacttttacatcttatcttctggttattcatcttcaccatagtctcatgaagcacagattatcatatctgtcttgcaaatcagtaaactgaagcaagagaggctgacctgcctgaagtaatacagtggtttgttggtggaggctaaactaagtcataggttcattctcttaagttggggctttctgctctgtagggagctgtctctgcatatggcaaagcacaaagctgaatgaggtctggacaaagaagctccactcgcaatctagagagtatctggactattgcagtgattaaatgaggtaatgtaaggcacttagcacaatgtataacacagaagaaatgagagtcgttgttacttttattattaaattgttataagttggttgatgctggtggttggagagtttggggtaaagggcaatggccagagatctagaaatggtttaggaaaagcgtcaggagcaaacatgacccgttgggactgtctgctctatgtacactaaaataaaaagataatttttaaaaagcca

SEQ ID NO: 280315 - DNA, 1693 bp, Homo sapiens
ggtcgctctaggaaagcggcggaggaccctctatggtcccgggcccacccgaaagcgttgttcgtttcttcctgtggttttgttttctcctccccccaactcggaaggcgtcctgtgacccccgggacctcaagagctgtaaccgcccctgtgtgtggtcgaggcttttgaaaccaaactctagcctctccaacctagaaactgcatactttccacaaaatttgagatttttgagaccctggtacttttcacgaagtcaccttaattatcaccaaaaagctcctgcaagatgggagtggttatactccatttacaggaaaggaaccaaggctcagagaagaaatgtgctccgttcaccgtgtgctcctcctcagccatcctggccgtgctcagtcatctgaccagctgacctccgtgttcccccactccctggggagctcctccgccttttggcttccaatgctattgctgcatgctgaagactcccgcattggtaactccagtctgactgtgggacataaatgttattgaactttagacttgtatatcgaactgattactcaagagctgcatttgcatgtgtaatggacatcccaaacctaacataccccccaaatgaattcctgatatctacctaacctgttcttgcaacagtcttcttcccagggatgggtgaagatcccatcatctttccagttgctcaagccaaaaaccttgatgtcactgttgtctcttctttttttcatccaaaattcacctgtgatttatccacaaattctgtcggcttcatcgttaaaatatattcattatcaagccactttcaacacttccactgctataaccaccaagccaccttcatccaccttctggattattatattggcttccagacgggttgccctacagtctattcacggccccagagtaatcctcttaaacctaagttagatcatgtcattcatttgttcaaaaccttcaaaggcttcccaacttattagagcaaagccaaggacctcgcagtggcacccgatgcctctcatgatctgtctctttagttctttattgtgtctgcagtgctgaaaacagtgctcagcagggaacagacactcagtaaatagctgttgaatgaatgaatttataagatgccttattgtttacaaagtacttttacatcttatcttctggttattcatcttcaccatagtctcatgaagcacagattatcatatctgtcttgcaaatcagtaaactgaagcaagagaggctgacctgcctgaagtaatacagtggtttgttggtggaggctaaactaagtcataggttcattctcttaagttggggctttctgctctgtagggagctgtctctgcatatggcaaagcacaaagctgaatgaggtctggacaaagaagctccactcgcaatctagagagtatctggactattgcagtgattaaatgaggtaatgtaaggcacttagcacaatgtataacacagaagaaatgagagtcgttgttacttttattattaaattgttataagttggttgatgctggtggttggagagtttggggtaaagggcaatggccagagatctagaaatggtttaggaaaagcgtcaggagcaaacatgacccgttgggactgtctgctctatgtacactaaaataaaaagataatttttaaaaagcca

SEQ ID NO: 280316 - DNA, 466 bp, Homo sapiens
atcttggctcactgcaacttctgcctcccaggttcaagcgattctcctgcctcagcctccttagttaggattacaggtgcccgccactgtgcccgactaatttttgtatttttagtagagacagggtttcgccatgttggccaggcttgtctcaaactcctgacctcaggtgatccgcccgcctcggcctcccaaagtgctgggattacagatgtgagccactgcacccggcctgatcattttttaataacattgttctcctcctcctcctttaagagacagggtctcactgtgctgcccaggctggcctcaaactcctgggctcaagcagtcctccccactcagactcctgagtagctgggactacaaacacaccaccacgctcagctaactccccatctcttaatccctatccctacaccattcccaaactttcccaaatcaaagattaaccagacagagaaaa

SEQ ID NO: 280317 - DNA, 901 bp, Homo sapiens
gtgccagtccctggacagctacgacgccatgaatatcttgcccaagaagagctggcacgtccggaacaaggacaatgtcgcccgcgtgcggcgtgacgaggcccaggcccgggaggaggagaaggagcgtgagcggagggtgctgctggctcagcaagaggcccgtacagaattcctacggaagaaagccagacatcagaactcactgcctgagcttgaagcagcagaggcgggagccccaggttctggccctgtggacctgtttcgggagctgctggaggaagggaaaggagtgatcagaggcaataaagagtacgaggaagaaaagcgacaggagaaagagaggcaagagaaagctctgggcatcctgacatacctgggccagagtgcagcggaggcacagactcaacccccttggtaccagctacccccagggcgagggggccccccgcccggcccagccccagatgagaagatcaagagccgtctggaccctctgcgggagatgcagaagcatctggggaagaagagacagcacggcggtgatgaaggcagtcgcagcagaaaggaaaaggaggggtctgagaagcagcgacccaaggagcctccatccctggaccagcttcgagctgaacgtctgcggagggaagcagctgagaggtctcgggcagaggccctgctggcccgggtccaaggccgggcactacaggagggtcagccggaagaagacgagacggatgaccggcggcggcggtacaactcccaattcaacccccagctggcccggcgcccccgccagcaggaccctcaccttactcactgactcctgagggggtacaggagaggccgctgctgccagccgtcatataaaactatttattcataaatattttccaaaatg

SEQ ID NO: 280318 - DNA, 1040 bp, Homo sapiens
attatctgacacctgtccgtcccaccttggatagtacaaaagtgacaagaggatgctaaaagttttaaaggggctgttggaaaatacgagctgggaaacatgtagagctaaatatgagctcaggtcaatattaaaattggaagtaggtcacagaatcccaaccccacatatttggatccagcccttggtgagtgggccttggactgtacttcacaatcccatcttcacctgcagttgtccggccaacatggccccttcccgcctgccctttcctaaccacctccactctctctagtgaagacgctgagctcgcagccatgctggttgcacactgccattttctacaggttctcaagtgcatgggctgccaagagggttgggtgtttacatttatttttaatagaaatggggtcgtacccggggcatctcttttcttcatactgcaatgttgctagatacacaatcagacaccagagggttgggcattcttgcaataccttaacagtgctgaaacctgcagcatggtactaaggaagttaaagttagaatgtaaccactttatttaaaaggtttttttctttaatttaaatgaaatggggttgaagtgaacatgatcttgttgaccatgttcgtgaattatagatgcaacatgcattggtagaatcgtgtgatggtcttttgtgatacttaatttttacatatcccagtctctgtatgtatctgcacaaagaaaaaacaaactcctgctttgctcttattgaagggttcccaggactgcgtgtctgctcctgagctctgttttaagtatgtgtatcctttgcttgtattttgtattaaaaaagtaagaaaaagaaccctttattgttgagcatgttggcattgtcccgtttatttttttctctttttgggacatatgaagcaagttattctttttctgtatctttttttcttttgtaaactttttgtttttttcttgtttaaaattggctttataaaagggcttttataacccaccccccccccaaaaaaaagaaatgggg

SEQ ID NO: 280319 - DNA, 3128 bp, Homo sapiens
  misc_feature (3125)..(3128): n is a, c, g, or t
cagataccgtcctcacaatacctgcccagaaagacgagaaagaggaggaagaattcctccttccaccaggaattctgtgggaagcacataagatttcatgctactagtttattcccaagagaagctaccaaagcctggtaactctaccaactctaacttttgtgcctgtaagttctcttctcctgggattacaactaattgaaacaggaattcaaaggagtctcggaggactgtaagaagaatgcttcgaggccgatccctctctgtaacatccctgggtgggcttccccagtgggaagtcgaagaacttcctgtggaggagttactgctctttgaagttgcttgggaagtgaccaataaagttggaggcatctatactgtgattcagacaaaggccaaaacaacagcagatgaatggggagagaactattttctgataggtccatattttgagcataatatgaagactcaggtggaacagtgtgaacctgtaaatgatgctgtcagaagagcagtggacgcaatgaataagcatggctgccaggtgcattttggaagatggctgatagaaggaagtccttatgtggtactttttgacataggctattcagcttggaatctggacaggtggaagggtgacctctgggaagcatgcagtgtcggcattccttatcatgaccgagaagccaatgatatgctgatatttggatctttaactgcctggttcttaaaagaggtgacagatcatgcagatggtaaatatgtcgttgcccaattccatgaatggcaggctggaattggactgatcctttctcgagccaggaaacttcctattgccacaatatttacaacccacgctacactacttgggaggtatctctgtgcagcaaatattgatttctacaaccatcttgataagtttaacattgacaaagaggctggggaaaggcagatttaccaccggtactgcatggagcgagcttccgttcattgcgctcacgtgttcaccacggtttctgaaataacagcaatagaagctgaacatatgctgaagagaaagcctgatgtagttactccaaacggcttgaatgttaagaaattttcagcagtgcatgagtttcaaaatctacatgccatgtacaaggccagaatccaagattttgttcgaggtcatttctatggtcatctcgactttgatcttgaaaagactttgttccttttcattgctgggaggtatgagttttcaaacaaaggagctgacatcttcctagaatccttatccaggctaaatttcctgctgaggatgcataaaagtgacatcacagtgatggtgtttttcattatgcctgccaagacaaataatttcaacgtggaaaccctgaaaggacaagcagtgcgaaaacagctgtgggatgttgcacattctgtgaaggaaaagtttggaaaaaaactctatgatgcattattaagaggagaaattcctgacctgaacgatattttagatcgagatgatctaacaattatgaaaagagccatcttttcaactcagcgacagtcattgcccccagtgaccacgcacaacatgattgatgactccaccgaccccatcctcagcaccattagacggattggacttttcaacaaccgcacagatagagtcaaggtgattttgcacccagagtttctatcctccaccagtcccttactacccatggactatgaagagtttgttagaggttgtcatcttggagtatttccatcatactatgaaccctggggttatactccagctgaatgcactgtgatgggtatccccagtgtgaccacgaatctctccgggtttggctgtttcatgcaggagcacgtggctgatcctactgcttacggtatttacatcgttgacaggcggttccgttctccagatgattcttgcaatcagctgactaagtttctctatggattttgcaaacagtcacgccgccaaaggattatccagaggaacagaactgagaggctctcagatcttctggattggagatacttaggcagatattaccagcatgccagacacctgacattaagcagagcttttccagataaattccatgtggaactaacatcaccaccaacgacagaaggatttaaatatcccaggccttcctcagtaccaccttctccttcagggtctcaggcctccagtcctcagagcagtgatgtggaagatgaagtggaggatgagagatacgatgaggaagaggaggctgaaagggatcggttaaatatcaagtcaccattttcactgagccacgttcctcatgggaagaaaaagctgcatggtgaatataagaactgaattctacatgtgctgcatgaagagctaatttaaaaaagcaaagtaagactaattatttaaaataaaaatgccacaaatttcattttctccttctaagtattacaatggagtttattctctgcctaaaaagtggaagaaattgagtgaatgataattttgtaatttaggataagatccaagttattttccccaactcttgtttcccccataaagttaggcatgaggaggagcactcattaaaggcagaagacggaaaagtgtttttaaaatggtgaatttaagtggtaagtattttctcttactctgtttatttttaaatgatcatcataatcctttgcttactatttatgcagcttctctaccccaccacacaaatttcccatttcccccccgaaaaccttgatcttacccatgaatgtgcactacctacattttttaaatagctaggtttttactgattattttcatttttcacatgcatcagaaccatgatttagatgtagttttgcagagacaaaaatccatgagtgaatagctatcctaagtccatattttgatgcatattaatggacatttatgtcacttttgaaatctagaattgatgttgtaattaatgcaagatattaccatgtacatggtaccaccatcttactgtaacatttttctattgtttaaatagaaagcctttttaaaatttggtcaatcttcatagatgataacttgtaaaatccaagtaaataaacacattaatatttaataacttaaaaaaaannnn

SEQ ID NO: 280320 - DNA, 624 bp, Homo sapiens
  misc_feature (621)..(624): n is a, c, g, or t
cccttctaagtataccagtaaggataagattattttccccaactcttgtttcccccataaagttaggcatgaggaggagcactcattaaaggcagaagacggaaaagtgtttttaaaatggtgaatttaagtggtaagtattttctcttactctgtttatttttaaatgatcatcataatcctttgcttactatttatgcagcttctctaccccaccacacaaatttcccatttcccccccgaaaaccttgatcttacccatgaatgtgcactacctacattttttaaatagctaggtttttactgattattttcatttttcacatgcatcagaaccatgatttagatgtagttttgcagagacaaaaatccatgagtgaatagctatcctaagtccatattttgatgcatattaatggacatttatgtcacttttgaaatctagaattgatgttgtaattaatgcaagatattaccatgtacatggtaccaccatcttactgtaacatttttctattgtttaaatagaaagcctttttaaaatttggtcaatcttcatagatgataacttgtaaaatccaagtaaataaacacattaatatttaataacttaaaaaaaannnn

SEQ ID NO: 280321 - DNA, 377 bp, Homo sapiens
  misc_feature (374)..(377): n is a, c, g, or t
accgcactatttatgcagcttctctaccccaccacacaaacccaaatagctaggtactgattattttcatttttcacatgcatcagaaccatgatttagatgtagttttgcagagacaaaaatccatgagtgaatagctatcctaagtccatattttgatgcatattaatggacatttatgtcacttttgaaatctagaattgatgttgtaattaatgcaagatattaccatgtacatggtaccaccatcttactgtaacatttttctattgtttaaatagaaagcctttttaaaatttggtcaatcttcatagatgataacttgtaaaatccaagtaaataaacacattaatatttaataacttaaaaaaaannnn

SEQ ID NO: 280322 - DNA, 3090 bp, Homo sapiens
  misc_feature (3087)..(3090): n is a, c, g, or t
cagataccgtcctcacaatacctgcccagaaagacgagaaagaggaggaagaattcctccttccaccaggaattctgtgggaagcacataagatttcatgctactagtttattcccaagagaagctaccaaagcctggtaactctaccaactctaacttttgtgcctgtaagttctcttctcctgggattacaactaattgaaacaggaattcaaaggagtctcggaggactgtaagaagaatgcttcgaggccgatccctctctgtaacatccctgggtgggcttccccagtgggaagtcgaagaacttcctgtggaggagttactgctctttgaagttgcttgggaagtgaccaataaagttggaggcatctatactgtgattcagacaaaggccaaaacaacagcagatgaatggggagagaactattttctgataggtccatattttgagcataatatgaagactcaggtggaacagtgtgaacctgtaaatgatgctgtcagaagagcagtggacgcaatgaataagcatggctgccaggtgcattttggaagatggctgatagaaggaagtccttatgtggtactttttgacataggctattcagcttggaatctggacaggtggaagggtgacctctgggaagcatgcagtgtcggcattccttatcatgaccgagaagccaatgatatgctgatatttggatctttaactgcctggttcttaaaagaggtgacagatcatgcagatggtaaatatgtcgttgcccaattccatgaatggcaggctggaattggactgatcctttctcgagccaggaaacttcctattgccacaatatttacaacccacgctacactacttgggaggtatctctgtgcagcaaatattgatttctacaaccatcttgataagtttaacattgacaaagaggctggggaaaggcagatttaccaccggtactgcatggagcgagcttccgttcattgcgctcacgtgttcaccacggtttctgaaataacagcaatagaagctgaacatatgctgaagagaaagcctgtcagcagtgcatgagtttcaaaatctacatgccatgtacaaggccagaatccaagattttgttcgaggtcatttctatggtcatctcgactttgatcttgaaaagactttgttccttttcattgctgggaggtatgagttttcaaacaaaggagctgacatcttcctagaatccttatccaggctaaatttcctgctgaggatgcataaaagtgacatcacagtgatggtgtttttcattatgcctgccaagacaaataatttcaacgtggaaaccctgaaaggacaagcagtgcgaaaacagctgtgggatgttgcacattctgtgaaggaaaagtttggaaaaaaactctatgatgcattattaagaggagaaattcctgacctgaacgatattttagatcgagatgatctaacaattatgaaaagagccatcttttcaactcagcgacagtcattgcccccagtgaccacgcacaacatgattgatgactccaccgaccccatcctcagcaccattagacggattggacttttcaacaaccgcacagatagagtcaaggtgattttgcacccagagtttctatcctccaccagtcccttactacccatggactatgaagagtttgttagaggttgtcatcttggagtatttccatcatactatgaaccctggggttatactccagctgaatgcactgtgatgggtatccccagtgtgaccacgaatctctccgggtttggctgtttcatgcaggagcacgtggctgatcctactgcttacggtatttacatcgttgacaggcggttccgttctccagatgattcttgcaatcagctgactaagtttctctatggattttgcaaacagtcacgccgccaaaggattatccagaggaacagaactgagaggctctcagatcttctggattggagatacttaggcagatattaccagcatgccagacacctgacattaagcagagcttttccagataaattccatgtggaactaacatcaccaccaacgacagaaggatttaaatatcccaggccttcctcagtaccaccttctccttcagggtctcaggcctccagtcctcagagcagtgatgtggaagatgaagtggaggatgagagatacgatgaggaagaggaggctgaaagggatcggttaaatatcaagtcaccattttcactgagccacgttcctcatgggaagaaaaagctgcatggtgaatataagaactgaattctacatgtgctgcatgaagagctaatttaaaaaagcaaagtaagactaattatttaaaataaaaatgccacaaatttcattttctccttctaagtattacaatggagtttattctctgcctaaaaagtggaagaaattgagtgaatgataattttgtaatttaggataagatccaagttattttccccaactcttgtttcccccataaagttaggcatgaggaggagcactcattaaaggcagaagacggaaaagtgtttttaaaatggtgaatttaagtggtaagtattttctcttactctgtttatttttaaatgatcatcataatcctttgcttactatttatgcagcttctctaccccaccacacaaatttcccatttcccccccgaaaaccttgatcttacccatgaatgtgcactacctacattttttaaatagctaggtttttactgattattttcatttttcacatgcatcagaaccatgatttagatgtagttttgcagagacaaaaatccatgagtgaatagctatcctaagtccatattttgatgcatattaatggacatttatgtcacttttgaaatctagaattgatgttgtaattaatgcaagatattaccatgtacatggtaccaccatcttactgtaacatttttctattgtttaaatagaaagcctttttaaaatttggtcaatcttcatagatgataacttgtaaaatccaagtaaataaacacattaatatttaataacttaaaaaaaannnn

SEQ ID NO: 280323 - DNA, 1420 bp, Homo sapiens
cagataccgtcctcacaatacctgcccagaaagacgagaaagaggaggaagaattcctccttccaccaggaattctgtgggaagcacataagatttcatgctactagtttattcccaagagaagctaccaaagcctggtaactctaccaactctaacttttgtgcctgtaagttctcttctcctgggattacaactaattgaaacaggaattcaaaggagtctcggaggactgtaagaagaatgcttcgaggccgatccctctctgtaacatccctgggtgggcttccccagtgggaagtcgaagaacttcctgtggaggagttactgctctttgaagttgcttgggaagtgaccaataaagttggaggcatctatactgtgattcagacaaaggccaaaacaacagcagatgaatggggagagaactattttctgataggtccatattttgagcataatatgaagactcaggtggaacagtgtgaacctgtaaatgatgctgtcagaagagcagtggacgcaatgaataagcatggctgccaggtgcattttggaagatggctgatagaaggaagtccttatgtggtactttttgacataggctattcagcttggaatctggacaggtggaagggtgacctctgggaagcatgcagtgtcggcattccttatcatgaccgagaagccaatgatatgctgatatttggatctttaactgcctggttcttaaaagaggtgacagatcatgcagatggtaaatatgtcgttgcccaattccatgaatggcaggctggaattggactgatcctttctcgagccaggaaacttcctattgccacaatatttacaacccacgctacactacttgggaggtatctctgtgcagcaaatattgatttctacaaccatcttgataagtttaacattgacaaagaggctggggaaaggcagatttaccaccggtactgcatggagcgagcttccgttcattgcgctcacgtgttcaccacggtttctgaaataacagcaatagaagctgaacatatgctgaagagaaagcctgatgtagttactccaaacggcttgaatgttaagaaattttcagcagtgcatgagtttcaaaatctacatgccatgtacaaggccagaatccaagattttgttcgaggtcatttctatggtcatctcgactttgatcttgaaaagactttgttccttttcattgctgggaggtatgagttttcaaacaaaggagctgacatcttcctagaatccttatccaggctaaatttcctgctgagggtaagaaagctctaggacatggtataacactcttgtagggagaactttcttctgtgggaagtgaagaattttttggcttcttaaatagttttcaagagaataaacgataatcgtatt

SEQ ID NO: 280324 - DNA, 3074 bp, Homo sapiens
  misc_feature (3071)..(3074): n is a, c, g, or t
cagataccgtcctcacaatacctgcccagaaagacgagaaagaggaggaagaattcctccttccaccaggaattctgtgggaagcacataagatttcatgctactagtttattcccaagagaagctaccaaagcctggtaactctaccaactctaacttttgtgcctgtaagttctcttctcctgggattacaactaattgaaacaggaattcaaaggagtctcggaggactgtaagaagaatgcttcgaggccgatccctctctgtaacatccctgggtgggcttccccagtgggaagtcgaagaacttcctgtggaggagttactgctctttgaagttgcttgggaagtgaccaataaagttggaggcatctatactgtgattcagacaaaggccaaaacaacagcagatgaatggggagagaactattttctgataggtccatattttgagcataatatgaagactcaggtggaacagtgtgaacctgtaaatgatgctgtcagaagagcagtggacgcaatgaataagcatggctgccaggtgcattttggaagatggctgatagaaggaagtccttatgtggtactttttgacataggctattcagcttggaatctggacaggtggaagggtgacctctgggaagcatgcagtgtcggcattccttatcatgaccgagaagccaatgatatgctgatatttggatctttaactgcctggttcttaaaagaggtgacagatcatgcagatggtaaatatgtcgttgcccaattccatgaatggcaggctggaattggactgatcctttctcgagccaggaaacttcctattgccacaatatttacaacccacgctacactacttgggaggtatctctgtgcagcaaatattgatttctacaaccatcttgataagtttaacattgacaaagaggctggggaaaggcagatttaccaccggtactgcatggagcgagcttccgttcattgcgctcacgtgttcaccacggtttctgaaataacagcaatagaagctgaacatatgctgaagagaaagcctgatgtagttactccaaacggcttgaatgttaagaaattttcagcagtgcatgagtttcaaaatctacatgccatgtacaaggccagaatccaagattttgttcgaggtcatttctatggtcatctcgactttgatcttgaaaagactttgttccttttcattgctgggaggtatgagttttcaaacaaaggagctgacatcttcctagaatccttatccaggctaaatttcctgctgaggatgcataaaagtgacatcacagtgatggtgtttttcattatgcctgccaagacaaataatttcaacgtggaaaccctgaaaggacaagcagtgcgaaaacagctgtgggatgttgcacattctgtgaaggaaaagtttggaaaaaaactctatgatgcattattaagaggagaaattcctgacctgaacgatattttagatcgagatgatctaacaattatgaaaagagccatcttttcaactcagcgacagtcattgcccccagtgaccacgcacaacatgattgatgactccaccgaccccatcctcagcaccattagacggattggacttttcaacaaccgcacagatagagtcaaggtgattttgcacccagagtttctatcctccaccagtcccttactacccatggactatgaagagtttgttagaggttgtcatcttggagtatttccatcatactatgaaccctggggttatactccagctgaatgcactgtgatgggtatccccagtgtgaccacgaatctctccgggtttggctgtttcatgcaggagcacgtggctgatcctactgcttacggtatttacatcgttgacaggcggttccgttctccagatgattcttgcaatcagctgactaagtttctctatggattttgcaaacagtcacgccgccaaaggattatccagaggaacagaactgagaggctctcagatcttctggattggagatacttaggcagatattaccagcatgccagacacctgacattaagcagagcttttccagataaattccatgtggaactaacatcaccaccaacgacagaaggatttaaatatcccaggccttcctcagtaccaccttctccttcagggtctcaggcctccagtcctcagagcagtgatgtggaagatgaagtggaggatgagagatacgatgaggaagaggaggctgaaagggatcggttaaatatcaagtcaccattttcactgagccacgttcctcatgggaagaaaaagctgcatggtgaatataagaactgaattctacatgtgctgcatgaagagctaatttaaaaaagcaaagtaagactaattatttaaaataaaaatgccacaaatttcattttctccttctaagtattacaatggagtttattctctgcctaattattttccccaactcttgtttcccccataaagttaggcatgaggaggagcactcattaaaggcagaagacggaaaagtgtttttaaaatggtgaatttaagtggtaagtattttctcttactctgtttatttttaaatgatcatcataatcctttgcttactatttatgcagcttctctaccccaccacacaaatttcccatttcccccccgaaaaccttgatcttacccatgaatgtgcactacctacattttttaaatagctaggtttttactgattattttcatttttcacatgcatcagaaccatgatttagatgtagttttgcagagacaaaaatccatgagtgaatagctatcctaagtccatattttgatgcatattaatggacatttatgtcacttttgaaatctagaattgatgttgtaattaatgcaagatattaccatgtacatggtaccaccatcttactgtaacatttttctattgtttaaatagaaagcctttttaaaatttggtcaatcttcatagatgataacttgtaaaatccaagtaaataaacacattaatatttaataacttaaaaaaaannnn

SEQ ID NO: 280325 - DNA, 3668 bp, Homo sapiens
  misc_feature (2247)..(2247): n is a, c, g, or t
  misc_feature (2607)..(2607): n is a, c, g, or t
  misc_feature (3247)..(3247): n is a, c, g, or t
tttatgtatttatttatttgagacggagtttcgctcttgttgcccaggctggaatgtaatggtgcgatctcggctcaccgcagcctctgcctccggggttcaagcgattatcctgcctcagcctccagagtagctgggattacaggcatgcgctgccacgcccggctgattttgtatttttagtagaggcggggtttcaccatgttggccaggctggtctccaactcccgacctcaggtgatccgcctgcttcggcctcccaaaatgctgggattacaggcgtgagccactgcgcccggcctgagaaggggggttttattgggcagaggagatcagcagtggattcaaaggaggcttggaaggaggcaagggtgtcacagagtgggatccttcagggcctgggtatgatgcctgcactaacctcactggacagtagcgtaggctagacaagattttagagatgtgttgtgaccagctgcactccaggaaaactgtttacattatatcttacctcattcatccagcctttgcatttttgtttgcttgtttttgagacagagtctttttctgtcgcccaggctggagtgcagtggcacaatcttggctcactgcaatctccgcctcctgggttcaagcaattctcctgcctcagcctcctgagtagctgggataacaggcacccgccaccatgccctgcccattttttaaattatttttagtggagatggggtttcaccatgttggcctggctggtctcaaactcctgacctcagatgatctacccaccttggccccttggcctcccaaagtgctggaattacaggcgtgagccaccacgcctggcccagcctatgcattttttttttttttttttttttttgagatggagtcttgcaccgtagcctaagctggagtgcagtggtgcgatctcggctcaccgcaacctccgcctcccgggtcctggttcaagcaattttcttgcctcagcctcctgagtagctgggattacaggaacgtgccaccatgcccagctaatttttgtatttttagtagagacggggtttcaccatgttggccaggctggtcttgaactcgtgacctcatgatccgctcacctcggcctcccaaagtgctgggattacaggcatgagccactgacgcctggccagcctatgcatttttaagaaattattctgtattaggtgctgtgctaaacattgggcactacagtgaccaaaacagactgaattccccaagagccaaagaccagtgagggagaccaacaagaaacaggaaatgcaaaagagaccattattactcactatgactaagggccacaaatggggtacgttgatggagagtgatttgttaagagactacagagggaggacagactaccaagaggggggccaggaaagctcctctgacgaggtggtatttcagcccaaactggaagaatgagaaagagctagccagccatcagaatagtccagaagagatggggagcactacactcactacactttggcctgagaaaatagcatgggattggaggaggctgggggaacaccacttctgccgacctgggcaggaggcattgagggcttgagaaagggcaatggcagtagcagtagaaaggacagggtaggagcagggactttgcaggtggaatcattaggtcttatcaacagatatgggcaagcaaagccaggggagaattgatggtaatgctgaggtttggagccaggctagatgggacagtggtgggtgatgcaaaggaaagaggtcaggaagcagggccagacgtggggagaaggtgtgggggtttggtttccatcttgccgagtctgccggaatgtggatgggaagaccaagaggaggagcaaggggcagaggggaagggaatcttaaagaagtcctggatgccacactcttcttccttcctcctcttccctctcctcagaggtctcactcgtggttcttcatttcctgccctgcctccatctcctctgggtgctgggaaagtggaggattagctgaagttttgcttctcggggcctgtctgaatctccattgctttctgggaggacataattcacctgtcctagcttcttatcatcttacatttccctgtagccactgggacatatgtggtgttccttcctagctcctgtctcctcctcatgcctttgctgggtatgggcatgttagggggaaggtcattgctgtcagaggggcactgacttnctaatggtgttacccaaggtgaatgttggagacacagtcgcgatgctgcccaagtcccggcgagccctaactatccaggagatcgctgcgctggccaggtcctccctgcatggtatgcagcccctcccatgtttctggccactttgtcctttctcctcccgtttgcacatccctttggaactgtttcctgtgagtacatgctggggtctcccctttcttcccttgctcaggtgaatctcagccccttctcccacccaaaggttcacatggatcctaactactgccacccttccacctccctgcacctgtgctccctggcctggtcctttaccaggcttctccaccctcccctatctccangtatttcccaggtggtgaaggaccacgtgaccaagcctaccgccatggcccagggccgagtggctcacctcattgagtggaagggctggagcaagccgagtgactcacctgctgccctggaatcagccttttcctcctattcagacctcagcgagggcgaacaagaggctcgctttgcagcaggtggatggcagaaaggggataagctacactcttggcacagggctgctttctttctttattttatttaatttttttttgagacggagtctcactctgtcgcccaggctggagtgcagtgatgcaatctcagctcactgcaacctctgccaccccagttcaagcgattctcctgcctcagcctcccaagtagctgggattacagttgcctgccaccgtgcctggctaatttttgtagttttagtagagatggggtttcaccgtctaggccaggctggtcttgaactcctgacctagtgatccacctgcctcggcctcccaaagtgctgggattacaggcataagccaccacacccggccagggctgctttcttatctcctcgggtctgacatgggggttggagtcttcccataccctgtttctcctctctcctgtcttcaagctgagccctagacttanctcaccttctctgcttatgcattctgtccctgcgacaggagtggctgagcagtttgccatcgcggaagccaagctccgagcatggtcttcggtggatggcgaggactccactgatgactcctatgatgaggactttgctgggggaatggacacaggtgagggacatcctgggctagggctgtggtggacccacctgatagaccttggcattctttcagagccacatccagaacactctcagcctttgcaaggggagggagagggacagactcagtccaggcaggcctggacactccagggacaggaaggctgtccacactcatgggtgggaaatgagcagacagaaatggattcgttcctttcccacaggtgctgaggcttctctgcctgtctgcacagttgtgccttgcagtcctcaaaa

SEQ ID NO: 280326 - DNA, 673 bp, Homo sapiens
tgaggtttcctggaaggttgggccctcagatgggcttgataggtgccttcctggtccggagaaaagggagattagtgataggacatccttgctaggctctgctctcctaccagaatgattcaagcccctgtgtggggaaggcttttgggtttcgggttgtttatagctggagaatccctttatggcttgaaggtgtcatctgtaaaatgaaggggctggatgcatgaagggaggttttgcgaccccgtgtagtgtgactgggctggcttagtgagtgttcgccgcccctgccttcaggtggcagtcggctctgggaggagaggaccggcattttcgaacccggtccaggccgcctctgcgtggctgtgacgtcgctgcgccccgcctactttgggtggtgacgcggcggtcacgcccccgcgcttacgtcaccggcccggttccctctccggggagcggcggcggacgcgcggctcccacccctcccctctcacgggctctcccctccccagtgtggccgcgaccctaccctctgcaaggcgatggcccgcgccccgagcgcaggctagcgtgcctgggtgcccggccatgggctgtatcggctctcggagcccggcgggtcagggtaagaggcggaggccgggtacgggttggggagtcgggctgcggccgc

SEQ ID NO: 280327 - DNA, 2638 bp, Homo sapiens
gggaatgggcctcagctccccgagtcccagagagcttggctgagccctggtgttcccacctcctcagagccatgaggcaggaatgttctccttatgtgactaggcacaggttccaaatggggaggggactggctcagcatccggagccaaaacaggaatagaactggaagctgagcctggagcggttctgggcttttggttctctgcatcaacacagccagcatgcctatgatttctgtgctgggcaaaatgtttctgtggcagcgtgaagggcctggaggacgatggacttgtcagacaagtcgcagagtgtcctcggaccccgcttgggctgtggagtggatcgaacttcctcggggtctctctctatcctctttgggatctgctcgaaccctccgaggctggagcaggtcctcccgcccttcctcggtggacagtcaggacttgccagaggtgaatgttggagacacagtcgcgatgctgcccaagtcccggcgagccctaactatccaggagatcgctgcgctggccaggtcctccctgcatggtatttcccaggtggtgaaggaccacgtgaccaagcctaccgccatggcccagggccgagtggctcacctcattgagtggaagggctggagcaagccgagtgactcacctgctgccctggaatcagccttttcctcctattcagacctcagcgagggcgaacaagaggctcgctttgcagcaggagtggctgagcagtttgccatcgcggaagccaagctccgagcatggtcttcggtggatggcgaggactccactgatgactcctatgatgaggactttgctgggggaatggacacagacatggctgggcagctgcccctggggccgcacctccaggacctgttcaccggccaccggttctcccggcctgtgcgccagggctccgtggagcctgagagcgactgctcacagaccgtgtccccagacaccctgtgctctagtctgtgcagcctggaggatgggttgttgggctccccggcccggctggcctcccagctgctgggcgatgagctgcttctcgccaaactgccccccagccgggaaagtgccttccgcagcctgggcccactggaggcccaggactcactctacaactcgcccctcacagagtcctgcctttcccccgcggaggaggagccagccccctgcaaggactgccagccactctgcccaccactaacgggcagctgggaacggcagcggcaagcctctgacctggcctcttctggggtggtgtccttagatgaggatgaggcagagccagaggaacagtgacccacatcatgcctggcagtggcatgcatcccccggctgctgccaggggcagagcctctgtgcccaagtgtgggctcaaggctcccagcagagctccacagcctagagggctcctgggagcgctcgcttctccgttgtgtgttttgcatgaaagtgtttggagaggaggcaggggctgggctgggggcgcatgtcctgcccccactcccggggcttgccgggggttgcccggggcctctggggcatggctacagctgtggcagacagtgatgttcatgttcttaaaatgccacacacacatttcctcctcggataatgtgaaccactaagggggttgtgactgggctgtgtgagggtggggtgggagggggcccagcaaccccccaccctccccatgcctctctcttctctgcttttcttctcacttccgagtccatgtgcagtgcttgatagaatcacccccacctggaggggctggctcctgccctcccggagcctatgggttgagccgtccctcaagggcccctgcccagctgggctcgtgctgtgcttcattcacctctccatcgtctctaaatcttcctcttttttcctaaagacagaaggtttttggtctgttttttcagtcggatcttctcttctctgggaggctttggaatgatgaaagcatgtaccctccacccttttcctggccccctaatggggcctgggccctttcccaacccctcctaggatgtgcgggcagtgtgctggcgcctcacagccagccgggctgcccattcacgcagagctctctgagcgggaggtggaagaaaggatggctctggttgccacagagctgggacttcatgttcttctagagagggccacaagagggccacaggggtggccgggagttgtcagctgatgcctgctgagaggcaggaattgtgccagtgagtgacagtcatgagggagtgtctcttcttggggaggaaagaaggtagagcctttctgtctgaatgaaaggccaaggctacagtacagggccccgccccagccagggtgttaatgcccacgtagtggaggcctctggcagatcctgcattccaaggtcactggactgtacgtttttatggttgtgggaagggtgggtggctttagaattaagggccttgtaggctttggcaggtaagagggcccaaggtaagaacgagagccaacgggcacaagcattctatatataagtggctcattaggtgtttattttgttctatttaagaatttgttttattaaattaatataaaaatctttgtaaatctctaaaaacatctg

SEQ ID NO: 280328 - DNA, 2871 bp, Homo sapiens
tgaggtttcctggaaggttgggccctcagatgggcttgataggtgccttcctggtccggagaaaagggagattagtgataggacatccttgctaggctctgctctcctaccagaatgattcaagcccctgtgtggggaaggcttttgggtttcgggttgtttatagctggagaatccctttatggcttgaaggtgtcatctgtaaaatgaaggggctggatgcatgaagggaggttttgcgaccccgtgtagtgtgactgggctggcttagtgagtgttcgccgcccctgccttcaggtggcagtcggctctgggaggagaggaccggcattttcgaacccggtccaggccgcctctgcgtggctgtgacgtcgctgcgccccgcctactttgggtggtgacgcggcggtcacgcccccgcgcttacgtcaccggcccggttccctctccggggagcggcggcggacgcgcggctcccacccctcccctctcacgggctctcccctccccagtgtggccgcgaccctaccctctgcaaggcgatggcccgcgccccgagcgcaggctagcgtgcctgggtgcccggccatgggctgtatcggctctcggagcccggcgggtcaggcatttctggggaccaacagctggccgaggctcagggatagagacggctgctccagctaaaggtgaatgttggagacacagtcgcgatgctgcccaagtcccggcgagccctaactatccaggagatcgctgcgctggccaggtcctccctgcatggtatttcccaggtggtgaaggaccacgtgaccaagcctaccgccatggcccagggccgagtggctcacctcattgagtggaagggctggagcaagccgagtgactcacctgctgccctggaatcagccttttcctcctattcagacctcagcgagggcgaacaagaggctcgctttgcagcaggagtggctgagcagtttgccatcgcggaagccaagctccgagcatggtcttcggtggatggcgaggactccactgatgactcctatgatgaggactttgctgggggaatggacacagacatggctgggcagctgcccctggggccgcacctccaggacctgttcaccggccaccggttctcccggcctgtgcgccagggctccgtggagcctgagagcgactgctcacagaccgtgtccccagacaccctgtgctctagtctgtgcagcctggaggatgggttgttgggctccccggcccggctggcctcccagctgctgggcgatgagctgcttctcgccaaactgccccccagccgggaaagtgccttccgcagcctgggcccactggaggcccaggactcactctacaactcgcccctcacagagtcctgcctttcccccgcggaggaggagccagccccctgcaaggactgccagccactctgcccaccactaacgggcagctgggaacggcagcggcaagcctctgacctggcctcttctggggtggtgtccttagatgaggatgaggcagagccagaggaacagtgacccacatcatgcctggcagtggcatgcatcccccggctgctgccaggggcagagcctctgtgcccaagtgtgggctcaaggctcccagcagagctccacagcctagagggctcctgggagcgctcgcttctccgttgtgtgttttgcatgaaagtgtttggagaggaggcaggggctgggctgggggcgcatgtcctgcccccactcccggggcttgccgggggttgcccggggcctctggggcatggctacagctgtggcagacagtgatgttcatgttcttaaaatgccacacacacatttcctcctcggataatgtgaaccactaagggggttgtgactgggctgtgtgagggtggggtgggagggggcccagcaaccccccaccctccccatgcctctctcttctctgcttttcttctcacttccgagtccatgtgcagtgcttgatagaatcacccccacctggaggggctggctcctgccctcccggagcctatgggttgagccgtccctcaagggcccctgcccagctgggctcgtgctgtgcttcattcacctctccatcgtctctaaatcttcctcttttttcctaaagacagaaggtttttggtctgttttttcagtcggatcttctcttctctgggaggctttggaatgatgaaagcatgtaccctccacccttttcctggccccctaatggggcctgggccctttcccaacccctcctaggatgtgcgggcagtgtgctggcgcctcacagccagccgggctgcccattcacgcagagctctctgagcgggaggtggaagaaaggatggctctggttgccacagagctgggacttcatgttcttctagagagggccacaagagggccacaggggtggccgggagttgtcagctgatgcctgctgagaggcaggaattgtgccagtgagtgacagtcatgagggagtgtctcttcttggggaggaaagaaggtagagcctttctgtctgaatgaaaggccaaggctacagtacagggccccgccccagccagggtgttaatgcccacgtagtggaggcctctggcagatcctgcattccaaggtcactggactgtacgtttttatggttgtgggaagggtgggtggctttagaattaagggccttgtaggctttggcaggtaagagggcccaaggtaagaacgagagccaacgggcacaagcattctatatataagtggctcattaggtgtttattttgttctatttaagaatttgttttattaaattaatataaaaatctttgtaaatctctaaaaacatctg

SEQ ID NO: 280329 - DNA, 2810 bp, Homo sapiens
tgaggtttcctggaaggttgggccctcagatgggcttgataggtgccttcctggtccggagaaaagggagattagtgataggacatccttgctaggctctgctctcctaccagaatgattcaagcccctgtgtggggaaggcttttgggtttcgggttgtttatagctggagaatccctttatggcttgaaggtgtcatctgtaaaatgaaggggctggatgcatgaagggaggttttgcgaccccgtgtagtgtgactgggctggcttagtgagtgttcgccgcccctgccttcaggtggcagtcggctctgggaggagaggaccggcattttcgaacccggtccaggccgcctctgcgtggctgtgacgtcgctgcgccccgcctactttgggtggtgacgcggcggtcacgcccccgcgcttacgtcaccggcccggttccctctccggggagcggcggcggacgcgcggctcccacccctcccctctcacgggctctcccctccccagtgtggccgcgaccctaccctctgcaaggcgatggcccgcgccccgagcgcaggctagcgtgcctgggtgcccggccatgggctgtatcggctctcggagcccggcgggtcagggtgaatgttggagacacagtcgcgatgctgcccaagtcccggcgagccctaactatccaggagatcgctgcgctggccaggtcctccctgcatggtatttcccaggtggtgaaggaccacgtgaccaagcctaccgccatggcccagggccgagtggctcacctcattgagtggaagggctggagcaagccgagtgactcacctgctgccctggaatcagccttttcctcctattcagacctcagcgagggcgaacaagaggctcgctttgcagcaggagtggctgagcagtttgccatcgcggaagccaagctccgagcatggtcttcggtggatggcgaggactccactgatgactcctatgatgaggactttgctgggggaatggacacagacatggctgggcagctgcccctggggccgcacctccaggacctgttcaccggccaccggttctcccggcctgtgcgccagggctccgtggagcctgagagcgactgctcacagaccgtgtccccagacaccctgtgctctagtctgtgcagcctggaggatgggttgttgggctccccggcccggctggcctcccagctgctgggcgatgagctgcttctcgccaaactgccccccagccgggaaagtgccttccgcagcctgggcccactggaggcccaggactcactctacaactcgcccctcacagagtcctgcctttcccccgcggaggaggagccagccccctgcaaggactgccagccactctgcccaccactaacgggcagctgggaacggcagcggcaagcctctgacctggcctcttctggggtggtgtccttagatgaggatgaggcagagccagaggaacagtgacccacatcatgcctggcagtggcatgcatcccccggctgctgccaggggcagagcctctgtgcccaagtgtgggctcaaggctcccagcagagctccacagcctagagggctcctgggagcgctcgcttctccgttgtgtgttttgcatgaaagtgtttggagaggaggcaggggctgggctgggggcgcatgtcctgcccccactcccggggcttgccgggggttgcccggggcctctggggcatggctacagctgtggcagacagtgatgttcatgttcttaaaatgccacacacacatttcctcctcggataatgtgaaccactaagggggttgtgactgggctgtgtgagggtggggtgggagggggcccagcaaccccccaccctccccatgcctctctcttctctgcttttcttctcacttccgagtccatgtgcagtgcttgatagaatcacccccacctggaggggctggctcctgccctcccggagcctatgggttgagccgtccctcaagggcccctgcccagctgggctcgtgctgtgcttcattcacctctccatcgtctctaaatcttcctcttttttcctaaagacagaaggtttttggtctgttttttcagtcggatcttctcttctctgggaggctttggaatgatgaaagcatgtaccctccacccttttcctggccccctaatggggcctgggccctttcccaacccctcctaggatgtgcgggcagtgtgctggcgcctcacagccagccgggctgcccattcacgcagagctctctgagcgggaggtggaagaaaggatggctctggttgccacagagctgggacttcatgttcttctagagagggccacaagagggccacaggggtggccgggagttgtcagctgatgcctgctgagaggcaggaattgtgccagtgagtgacagtcatgagggagtgtctcttcttggggaggaaagaaggtagagcctttctgtctgaatgaaaggccaaggctacagtacagggccccgccccagccagggtgttaatgcccacgtagtggaggcctctggcagatcctgcattccaaggtcactggactgtacgtttttatggttgtgggaagggtgggtggctttagaattaagggccttgtaggctttggcaggtaagagggcccaaggtaagaacgagagccaacgggcacaagcattctatatataagtggctcattaggtgtttattttgttctatttaagaatttgttttattaaattaatataaaaatctttgtaaatctctaaaaacatctg

SEQ ID NO: 280330 - DNA, 2291 bp, Homo sapiens
agcgaagcgagggagggagagcaagctaagaaacacccagcaggtgctcccccgcctaggcctggctggaggctactggcgccaccctgggggccctgtcagccaggtgaatgttggagacacagtcgcgatgctgcccaagtcccggcgagccctaactatccaggagatcgctgcgctggccaggtcctccctgcatggtatttcccaggtggtgaaggaccacgtgaccaagcctaccgccatggcccagggccgagtggctcacctcattgagtggaagggctggagcaagccgagtgactcacctgctgccctggaatcagccttttcctcctattcagacctcagcgagggcgaacaagaggctcgctttgcagcaggagtggctgagcagtttgccatcgcggaagccaagctccgagcatggtcttcggtggatggcgaggactccactgatgactcctatgatgaggactttgctgggggaatggacacagacatggctgggcagctgcccctggggccgcacctccaggacctgttcaccggccaccggttctcccggcctgtgcgccagggctccgtggagcctgagagcgactgctcacagaccgtgtccccagacaccctgtgctctagtctgtgcagcctggaggatgggttgttgggctccccggcccggctggcctcccagctgctgggcgatgagctgcttctcgccaaactgccccccagccgggaaagtgccttccgcagcctgggcccactggaggcccaggactcactctacaactcgcccctcacagagtcctgcctttcccccgcggaggaggagccagccccctgcaaggactgccagccactctgcccaccactaacgggcagctgggaacggcagcggcaagcctctgacctggcctcttctggggtggtgtccttagatgaggatgaggcagagccagaggaacagtgacccacatcatgcctggcagtggcatgcatcccccggctgctgccaggggcagagcctctgtgcccaagtgtgggctcaaggctcccagcagagctccacagcctagagggctcctgggagcgctcgcttctccgttgtgtgttttgcatgaaagtgtttggagaggaggcaggggctgggctgggggcgcatgtcctgcccccactcccggggcttgccgggggttgcccggggcctctggggcatggctacagctgtggcagacagtgatgttcatgttcttaaaatgccacacacacatttcctcctcggataatgtgaaccactaagggggttgtgactgggctgtgtgagggtggggtgggagggggcccagcaaccccccaccctccccatgcctctctcttctctgcttttcttctcacttccgagtccatgtgcagtgcttgatagaatcacccccacctggaggggctggctcctgccctcccggagcctatgggttgagccgtccctcaagggcccctgcccagctgggctcgtgctgtgcttcattcacctctccatcgtctctaaatcttcctcttttttcctaaagacagaaggtttttggtctgttttttcagtcggatcttctcttctctgggaggctttggaatgatgaaagcatgtaccctccacccttttcctggccccctaatggggcctgggccctttcccaacccctcctaggatgtgcgggcagtgtgctggcgcctcacagccagccgggctgcccattcacgcagagctctctgagcgggaggtggaagaaaggatggctctggttgccacagagctgggacttcatgttcttctagagagggccacaagagggccacaggggtggccgggagttgtcagctgatgcctgctgagaggcaggaattgtgccagtgagtgacagtcatgagggagtgtctcttcttggggaggaaagaaggtagagcctttctgtctgaatgaaaggccaaggctacagtacagggccccgccccagccagggtgttaatgcccacgtagtggaggcctctggcagatcctgcattccaaggtcactggactgtacgtttttatggttgtgggaagggtgggtggctttagaattaagggccttgtaggctttggcaggtaagagggcccaaggtaagaacgagagccaacgggcacaagcattctatatataagtggctcattaggtgtttattttgttctatttaagaatttgttttattaaattaatataaaaatctttgtaaatctctaaaaacatctg

SEQ ID NO: 280331 - DNA, 1866 bp, Homo sapiens
tgaggtttcctggaaggttgggccctcagatgggcttgataggtgccttcctggtccggagaaaagggagattagtgataggacatccttgctaggctctgctctcctaccagaatgattcaagcccctgtgtggggaaggcttttgggtttcgggttgtttatagctggagaatccctttatggcttgaaggtgtcatctgtaaaatgaaggggctggatgcatgaagggaggttttgcgaccccgtgtagtgtgactgggctggcttagtgagtgttcgccgcccctgccttcaggtggcagtcggctctgggaggagaggaccggcattttcgaacccggtccaggccgcctctgcgtggctgtgacgtcgctgcgccccgcctactttgggtggtgacgcggcggtcacgcccccgcgcttacgtcaccggcccggttccctctccggggagcggcggcggacgcgcggctcccacccctcccctctcacgggctctcccctccccagtgtggccgcgaccctaccctctgcaaggcgatggcccgcgccccgagcgcaggctagcgtgcctgggtgcccggccatgggctgtatcggctctcggagcccggcgggtcaggcatttctggggaccaacagctggccgaggctcagggatagagacggctgctccagctaaaggtgaatgttggagacacagtcgcgatgctgcccaagtcccggcgagccctaactatccaggagatcgctgcgctggccaggtcctccctgcatggtatttcccaggtggtgaaggaccacgtgaccaaacagtgatgttcatgttcttaaaatgccacacacacatttcctcctcggataatgtgaaccactaagggggttgtgactgggctgtgtgagggtggggtgggagggggcccagcaaccccccaccctccccatgcctctctcttctctgcttttcttctcacttccgagtccatgtgcagtgcttgatagaatcacccccacctggaggggctggctcctgccctcccggagcctatgggttgagccgtccctcaagggcccctgcccagctgggctcgtgctgtgcttcattcacctctccatcgtctctaaatcttcctcttttttcctaaagacagaaggtttttggtctgttttttcagtcggatcttctcttctctgggaggctttggaatgatgaaagcatgtaccctccacccttttcctggccccctaatggggcctgggccctttcccaacccctcctaggatgtgcgggcagtgtgctggcgcctcacagccagccgggctgcccattcacgcagagctctctgagcgggaggtggaagaaaggatggctctggttgccacagagctgggacttcatgttcttctagagagggccacaagagggccacaggggtggccgggagttgtcagctgatgcctgctgagaggcaggaattgtgccagtgagtgacagtcatgagggagtgtctcttcttggggaggaaagaaggtagagcctttctgtctgaatgaaaggccaaggctacagtacagggccccgccccagccagggtgttaatgcccacgtagtggaggcctctggcagatcctgcattccaaggtcactggactgtacgtttttatggttgtgggaagggtgggtggctttagaattaagggccttgtaggctttggcaggtaagagggcccaaggtaagaacgagagccaacgggcacaagcattctatatataagtggctcattaggtgtttattttgttctatttaagaatttgttttattaaattaatataaaaatctttgtaaatctctaaaaacatctg

SEQ ID NO: 280332 - DNA, 1113 bp, Homo sapiens
gggaatgggcctcagctccccgagtcccagagagcttggctgagccctggtgttcccacctcctcagagccatgaggcaggaatgttctccttatgtgactaggcacaggttccaaatggggaggggactggctcagcatccggagccaaaacaggaatagaactggaagctgagcctggagcggttctgggcttttggttctctgcatcaacacagccagcatgcctatgatttctgtgctgggcaaaatgtttctgtggcagcgtgaagggcctggaggacgatggacttgtcagacaagtcgcagagtgtcctcggaccccgcttgggctgtggagtggatcgaacttcctcggggtctctctctatcctctttgggatctgctcgaaccctccgaggctggagcaggtcctcccgcccttcctcggtggacagtcaggacttgccagaggtgaatgttggagacacagtcgcgatgctgcccaagtcccggcgagccctaactatccaggagatcgctgcgctggccaggtcctccctgcatggtatttcccaggtggtgaaggaccacgtgaccaagcctaccgccatggcccagggccgagtggctcacctcattgagtggaagggctggagcaagccgagtgactcacctgctgccctggaatcagccttttcctcctattcagacctcagcgagggcgaacaagaggctcgctttgcagcaggagtggctgagcagtttgccatcgcggaagccaagctccgagcatggtcttcggtggatggcgaggactccactgatgactcctatgatgaggactttgctgggggaatggacacaggtgagggacatcctgggctagggctgtggtggacccacctgatagaccttggcattctttcagagccacatccagaacactctcagcctttgcaaggggagggagagggacagactcagtccaggcaggcctggacactccagggacaggaaggctgtccacactcatgggtgggaaatgagcagacagaaatggattcgttcctttcccacaggtgctgaggcttctctgcctgtctgcacagttgtgccttgcagtcctcaaaa

SEQ ID NO: 280333 - DNA, 3014 bp, Homo sapiens
tgaggtttcctggaaggttgggccctcagatgggcttgataggtgccttcctggtccggagaaaagggagattagtgataggacatccttgctaggctctgctctcctaccagaatgattcaagcccctgtgtggggaaggcttttgggtttcgggttgtttatagctggagaatccctttatggcttgaaggtgtcatctgtaaaatgaaggggctggatgcatgaagggaggttttgcgaccccgtgtagtgtgactgggctggcttagtgagtgttcgccgcccctgccttcaggtggcagtcggctctgggaggagaggaccggcattttcgaacccggtccaggccgcctctgcgtggctgtgacgtcgctgcgccccgcctactttgggtggtgacgcggcggtcacgcccccgcgcttacgtcaccggcccggttccctctccggggagcggcggcggacgcgcggctcccacccctcccctctcacgggctctcccctccccagtgtggccgcgaccctaccctctgcaaggcgatggcccgcgccccgagcgcaggctagcgtgcctgggtgcccggccatgggctgtatcggctctcggagcccggcgggtcaggcatttctggggaccaacagctggccgaggctcagggatagagacggctgctccagctaaagtgtcctcggaccccgcttgggctgtggagtggatcgaacttcctcggggtctctctctatcctctttgggatctgctcgaaccctccgaggctggagcaggtcctcccgcccttcctcggtggacagtcaggacttgccagaggtgaatgttggagacacagtcgcgatgctgcccaagtcccggcgagccctaactatccaggagatcgctgcgctggccaggtcctccctgcatggtatttcccaggtggtgaaggaccacgtgaccaagcctaccgccatggcccagggccgagtggctcacctcattgagtggaagggctggagcaagccgagtgactcacctgctgccctggaatcagccttttcctcctattcagacctcagcgagggcgaacaagaggctcgctttgcagcaggagtggctgagcagtttgccatcgcggaagccaagctccgagcatggtcttcggtggatggcgaggactccactgatgactcctatgatgaggactttgctgggggaatggacacagacatggctgggcagctgcccctggggccgcacctccaggacctgttcaccggccaccggttctcccggcctgtgcgccagggctccgtggagcctgagagcgactgctcacagaccgtgtccccagacaccctgtgctctagtctgtgcagcctggaggatgggttgttgggctccccggcccggctggcctcccagctgctgggcgatgagctgcttctcgccaaactgccccccagccgggaaagtgccttccgcagcctgggcccactggaggcccaggactcactctacaactcgcccctcacagagtcctgcctttcccccgcggaggaggagccagccccctgcaaggactgccagccactctgcccaccactaacgggcagctgggaacggcagcggcaagcctctgacctggcctcttctggggtggtgtccttagatgaggatgaggcagagccagaggaacagtgacccacatcatgcctggcagtggcatgcatcccccggctgctgccaggggcagagcctctgtgcccaagtgtgggctcaaggctcccagcagagctccacagcctagagggctcctgggagcgctcgcttctccgttgtgtgttttgcatgaaagtgtttggagaggaggcaggggctgggctgggggcgcatgtcctgcccccactcccggggcttgccgggggttgcccggggcctctggggcatggctacagctgtggcagacagtgatgttcatgttcttaaaatgccacacacacatttcctcctcggataatgtgaaccactaagggggttgtgactgggctgtgtgagggtggggtgggagggggcccagcaaccccccaccctccccatgcctctctcttctctgcttttcttctcacttccgagtccatgtgcagtgcttgatagaatcacccccacctggaggggctggctcctgccctcccggagcctatgggttgagccgtccctcaagggcccctgcccagctgggctcgtgctgtgcttcattcacctctccatcgtctctaaatcttcctcttttttcctaaagacagaaggtttttggtctgttttttcagtcggatcttctcttctctgggaggctttggaatgatgaaagcatgtaccctccacccttttcctggccccctaatggggcctgggccctttcccaacccctcctaggatgtgcgggcagtgtgctggcgcctcacagccagccgggctgcccattcacgcagagctctctgagcgggaggtggaagaaaggatggctctggttgccacagagctgggacttcatgttcttctagagagggccacaagagggccacaggggtggccgggagttgtcagctgatgcctgctgagaggcaggaattgtgccagtgagtgacagtcatgagggagtgtctcttcttggggaggaaagaaggtagagcctttctgtctgaatgaaaggccaaggctacagtacagggccccgccccagccagggtgttaatgcccacgtagtggaggcctctggcagatcctgcattccaaggtcactggactgtacgtttttatggttgtgggaagggtgggtggctttagaattaagggccttgtaggctttggcaggtaagagggcccaaggtaagaacgagagccaacgggcacaagcattctatatataagtggctcattaggtgtttattttgttctatttaagaatttgttttattaaattaatataaaaatctttgtaaatctctaaaaacatctg

SEQ ID NO: 280334 - DNA, 3509 bp, Homo sapiens
  misc_feature (1563)..(1563): n is a, c, g, or t
tgaggtttcctggaaggttgggccctcagatgggcttgataggtgccttcctggtccggagaaaagggagattagtgataggacatccttgctaggctctgctctcctaccagaatgattcaagcccctgtgtggggaaggcttttgggtttcgggttgtttatagctggagaatccctttatggcttgaaggtgtcatctgtaaaatgaaggggctggatgcatgaagggaggttttgcgaccccgtgtagtgtgactgggctggcttagtgagtgttcgccgcccctgccttcaggtggcagtcggctctgggaggagaggaccggcattttcgaacccggtccaggccgcctctgcgtggctgtgacgtcgctgcgccccgcctactttgggtggtgacgcggcggtcacgcccccgcgcttacgtcaccggcccggttccctctccggggagcggcggcggacgcgcggctcccacccctcccctctcacgggctctcccctccccagtgtggccgcgaccctaccctctgcaaggcgatggcccgcgccccgagcgcaggctagcgtgcctgggtgcccggccatgggctgtatcggctctcggagcccggcgggtcaggcatttctggggaccaacagctggccgaggctcagggatagagacggctgctccagctaaagtgtcctcggaccccgcttgggctgtggagtggatcgaacttcctcggggtctctctctatcctctttgggatctgctcgaaccctccgaggctggagcaggtcctcccgcccttcctcggtggacagtcaggacttgccagaggtgaatgttggagacacagtcgcgatgctgcccaagtcccggcgagccctaactatccaggagatcgctgcgctggccaggtcctccctgcatggtatttcccaggtggtgaaggaccacgtgaccaagcctaccgccatggcccagggccgagtggctcacctcattgagtggaagggctggagcaagccgagtgactcacctgctgccctggaatcagccttttcctcctattcagacctcagcgagggcgaacaagaggctcgctttgcagcaggtggatggcagaaaggggataagctacactcttggcacagggctgctttctttctttattttatttaatttttttttgagacggagtctcactctgtcgcccaggctggagtgcagtgatgcaatctcagctcactgcaacctctgccaccccagttcaagcgattctcctgcctcagcctcccaagtagctgggattacagttgcctgccaccgtgcctggctaatttttgtagttttagtagagatggggtttcaccgtctaggccaggctggtcttgaactcctgacctagtgatccacctgcctcggcctcccaaagtgctgggattacaggcataagccaccacacccggccagggctgctttcttatctcctcgggtctgacatgggggttggagtcttcccataccctgtttctcctctctcctgtcttcaagctgagccctagacttanctcaccttctctgcttatgcattctgtccctgcgacaggagtggctgagcagtttgccatcgcggaagccaagctccgagcatggtcttcggtggatggcgaggactccactgatgactcctatgatgaggactttgctgggggaatggacacagacatggctgggcagctgcccctggggccgcacctccaggacctgttcaccggccaccggttctcccggcctgtgcgccagggctccgtggagcctgagagcgactgctcacagaccgtgtccccagacaccctgtgctctagtctgtgcagcctggaggatgggttgttgggctccccggcccggctggcctcccagctgctgggcgatgagctgcttctcgccaaactgccccccagccgggaaagtgccttccgcagcctgggcccactggaggcccaggactcactctacaactcgcccctcacagagtcctgcctttcccccgcggaggaggagccagccccctgcaaggactgccagccactctgcccaccactaacgggcagctgggaacggcagcggcaagcctctgacctggcctcttctggggtggtgtccttagatgaggatgaggcagagccagaggaacagtgacccacatcatgcctggcagtggcatgcatcccccggctgctgccaggggcagagcctctgtgcccaagtgtgggctcaaggctcccagcagagctccacagcctagagggctcctgggagcgctcgcttctccgttgtgtgttttgcatgaaagtgtttggagaggaggcaggggctgggctgggggcgcatgtcctgcccccactcccggggcttgccgggggttgcccggggcctctggggcatggctacagctgtggcagacagtgatgttcatgttcttaaaatgccacacacacatttcctcctcggataatgtgaaccactaagggggttgtgactgggctgtgtgagggtggggtgggagggggcccagcaaccccccaccctccccatgcctctctcttctctgcttttcttctcacttccgagtccatgtgcagtgcttgatagaatcacccccacctggaggggctggctcctgccctcccggagcctatgggttgagccgtccctcaagggcccctgcccagctgggctcgtgctgtgcttcattcacctctccatcgtctctaaatcttcctcttttttcctaaagacagaaggtttttggtctgttttttcagtcggatcttctcttctctgggaggctttggaatgatgaaagcatgtaccctccacccttttcctggccccctaatggggcctgggccctttcccaacccctcctaggatgtgcgggcagtgtgctggcgcctcacagccagccgggctgcccattcacgcagagctctctgagcgggaggtggaagaaaggatggctctggttgccacagagctgggacttcatgttcttctagagagggccacaagagggccacaggggtggccgggagttgtcagctgatgcctgctgagaggcaggaattgtgccagtgagtgacagtcatgagggagtgtctcttcttggggaggaaagaaggtagagcctttctgtctgaatgaaaggccaaggctacagtacagggccccgccccagccagggtgttaatgcccacgtagtggaggcctctggcagatcctgcattccaaggtcactggactgtacgtttttatggttgtgggaagggtgggtggctttagaattaagggccttgtaggctttggcaggtaagagggcccaaggtaagaacgagagccaacgggcacaagcattctatatataagtggctcattaggtgtttattttgttctatttaagaatttgttttattaaattaatataaaaatctttgtaaatctctaaaaacatctg

SEQ ID NO: 280335 - DNA, 2278 bp, Homo sapiens
gttcaggaagtcatcaccttctcttgtcagggcatttctggggaccaacagctggccgaggctcagggatagagacggctgctccagctaaaggtgaatgttggagacacagtcgcgatgctgcccaagtcccggcgagccctaactatccaggagatcgctgcgctggccaggtcctccctgcatggtatttcccaggtggtgaaggaccacgtgaccaagcctaccgccatggcccagggccgagtggctcacctcattgagtggaagggctggagcaagccgagtgactcacctgctgccctggaatcagccttttcctcctattcagacctcagcgagggcgaacaagaggctcgctttgcagcaggagtggctgagcagtttgccatcgcggaagccaagctccgagcatggtcttcggtggatggcgaggactccactgatgactcctatgatgaggactttgctgggggaatggacacagacatggctgggcagctgcccctggggccgcacctccaggacctgttcaccggccaccggttctcccggcctgtgcgccagggctccgtggagcctgagagcgactgctcacagaccgtgtccccagacaccctgtgctctagtctgtgcagcctggaggatgggttgttgggctccccggcccggctggcctcccagctgctgggcgatgagctgcttctcgccaaactgccccccagccgggaaagtgccttccgcagcctgggcccactggaggcccaggactcactctacaactcgcccctcacagagtcctgcctttcccccgcggaggaggagccagccccctgcaaggactgccagccactctgcccaccactaacgggcagctgggaacggcagcggcaagcctctgacctggcctcttctggggtggtgtccttagatgaggatgaggcagagccagaggaacagtgacccacatcatgcctggcagtggcatgcatcccccggctgctgccaggggcagagcctctgtgcccaagtgtgggctcaaggctcccagcagagctccacagcctagagggctcctgggagcgctcgcttctccgttgtgtgttttgcatgaaagtgtttggagaggaggcaggggctgggctgggggcgcatgtcctgcccccactcccggggcttgccgggggttgcccggggcctctggggcatggctacagctgtggcagacagtgatgttcatgttcttaaaatgccacacacacatttcctcctcggataatgtgaaccactaagggggttgtgactgggctgtgtgagggtggggtgggagggggcccagcaaccccccaccctccccatgcctctctcttctctgcttttcttctcacttccgagtccatgtgcagtgcttgatagaatcacccccacctggaggggctggctcctgccctcccggagcctatgggttgagccgtccctcaagggcccctgcccagctgggctcgtgctgtgcttcattcacctctccatcgtctctaaatcttcctcttttttcctaaagacagaaggtttttggtctgttttttcagtcggatcttctcttctctgggaggctttggaatgatgaaagcatgtaccctccacccttttcctggccccctaatggggcctgggccctttcccaacccctcctaggatgtgcgggcagtgtgctggcgcctcacagccagccgggctgcccattcacgcagagctctctgagcgggaggtggaagaaaggatggctctggttgccacagagctgggacttcatgttcttctagagagggccacaagagggccacaggggtggccgggagttgtcagctgatgcctgctgagaggcaggaattgtgccagtgagtgacagtcatgagggagtgtctcttcttggggaggaaagaaggtagagcctttctgtctgaatgaaaggccaaggctacagtacagggccccgccccagccagggtgttaatgcccacgtagtggaggcctctggcagatcctgcattccaaggtcactggactgtacgtttttatggttgtgggaagggtgggtggctttagaattaagggccttgtaggctttggcaggtaagagggcccaaggtaagaacgagagccaacgggcacaagcattctatatataagtggctcattaggtgtttattttgttctatttaagaatttgttttattaaattaatataaaaatctttgtaaatctctaaaaacatctg

SEQ ID NO: 280336 - DNA, 1219 bp, Homo sapiens
acctgaagcccgtttactttccaggctggagacttggcaacaacgtgggaatggggaacgggcccgagttaagtcactggcttagccaaggtcacagctggcatctgggtgaacagcgctgcacggtgtccgcggtgcctctagggggcggggcttccggctggcgctgaccggcttccggcggagcgggcgggaggtggggcggagttgctgctcgggggcctctgggtggagggggattcagacgccgcgtctggtgtgtccctttctccttcctgaccttcctcagtctgcagctcttttctccaccgcgcgcccgcctcagccgttcagccctgagctggcgggtggacgggcatggatccaggcggtgggagcagtctgcgaagtcagggtaggaaggctacacaaaggaggcgacatcccagcccggtcctcaggaataagcgggcgtgcccgtgtggtgtggacggtgaggggacactgtattaagtgccttatctgcattatcattgaatcttcatagcaatcgattgtgatgggtactggtcatctccccgggttgtagatgaggaaactgaggcctcagtaactttgctttagtcagtaaatgataagagtcagcaaatgaattcccaagcgtagactcggccgtaccgctgctctaccttgctaataacgacctacctgtaagcgacatttttgacaaaatgtcctttaaacatcttttgtgctcagctctgtattcgtgggccctccaaagggggtacaggcaggtagaagcctccgtccctaccttataggttgtatatatctgaactggtcgactaaagatgcaaagcgaagtgctccagtgagtgtggtacaggttgttgagatgaaggagagatggcaatcagctaaagttactgaatacgtcaggaaggaggctggtttcagctggctgtgattgggaggatcaatgcgaggacattccgagtcggaaacagccaaggcgaagactcacaggtgggtgaagggagtaaacatggctttggaaatatttccagttttctctgaccaactcgtttatcacctagccgtcacatagatcacaccaagaagctgattgatttacggtcacatttctttcatgttgctttggaaaagatactgaagcctcgggcaacataatgagaccccgtctctacaaaaaaaaaaaaaaaagaaagaaaagaaa

SEQ ID NO: 280337 - DNA, 863 bp, Homo sapiens
gaaggctctcaaaaggattgctacagagacacaatgctggacagttatgagaacacggtcccacagggatccttcttacagctctccatgatgcctcagagagctggaaatgatccacctggggtttcaaatgcaagtgaaatggaaatggagataagtaacatgagagaaaagtttcttatgagtgtaacaaagttagtagaaagcaaaagttacaacagcaaggtattttccaaagaaaagtactttcaaacaataaaggaagttaaagaagctaaagaaaaagggaagaagtcatcacgtgattatcgccgtgcagcaaaatatgatgtgatctctgtacagggcacagagaaactgatagaggctactcatggagaacgtgatcgaatacggtattatgtacataaggaagagttgtttgatattcttcatgatacacatctcagtattggacatggtgggcggacacgcatgctcaaggagctgcaaggaaaatatgggaatgtcaccaaagaagttattgtcttatatctgactctgtgtaaacagtgccaccagaagaacccagtacccaagagaggccttgcaccaaagcccatgacttttaaggacatagactccacatgccaagttgaaatacttgacatgcagtccagtgccgatggtgagttcaagttcattttatactaccaggatcactcaaccaagtttattattttacggccattaagaaccaaacaggcccatgaggtggtcagtgtctgttagatattttcacaattcttggtacacccagtgtgttagactctgacagtggcgttgagttcacaaaccaggttgttcatgagctcaatgagttg

SEQ ID NO: 280338 - DNA, 1804 bp, Homo sapiens
acctgaagcccgtttactttccaggctggagacttggcaacaacgtgggaatggggaacgggcccgagttaagtcactggcttagccaaggtcacagctggcatctgggtgaacagcgctgcacggtgtccgcggtgcctctagggggcggggcttccggctggcgctgaccggcttccggcggagcgggcgggaggtggggcggagttgctgctcgggggcctctgggtggagggggattcagacgccgcgtctggtgtgtccctttctccttcctgaccttcctcagtctgcagctcttttctccaccgcgcgcccgcctcagccgttcagccctgagctggcgggtggacgggcatggatccaggcggtgggagcagtctgcgaagtcagggtaggaaggctacacaaaggaggcgacatcccagcccggtcctcaggaataagcgggcgtgcccgtgtggtgtggacggtgaggggacactgtattaagtgccttatctgcattatcattgaatcttcatagcaatcgattgtgatgggtactggtcatctccccgggttgtagatgaggaaactgaggcctcagtaactttgctttagtcagtaaatgataagagtcagcaaatgaattcccaagcgtagactcggccgtaccgctgctctaccttgctaataacgacctacctgtaagcgacatttttgacaaaatgtcctttaaacatcttttgtgctcagctctgtattcgtgggccctccaaagggggtacaggcaggtagaagcctccgtccctaccttataggttgtatatatctgaactggtcgactaaagatgcaaagcgaagtgctccagtgagtgtggtacaggttgttgagatgaaggagagatggcaatcagctaaagttactgaatacgtcaggaaggaggctggtttcagctggctgtgattgggaggatcaatgcgaggacattccgagtcggaaacagccaaggcgaagactcacaggatccttcttacagctctccatgatgcctcagagagctggaaatgatccacctggggtttcaaatgcaagtgaaatggaaatggagataagtaacatgagagaaaagtttcttatgagtgtaacaaagttagtagaaagcaaaagttacaacagcaaggtattttccaaagaaaagtactttcaaacaataaaggaagttaaagaagctaaagaaaaagggaagaagtcatcacgtgattatcgccgtgcagcaaaatatgatgtgatctctgtacagggcacagagaaactgatagaggctactcatggagaacgtgatcgaatacggtattatgtacataaggaagagttgtttgatattcttcatgatacacatctcagtattggacatggtgggcggacacgcatgctcaaggagctgcaaggaaaatatgggaatgtcaccaaagaagttattgtcttatatctgactctgtgtaaacagtgccaccagaagaacccagtacccaagagaggccttgcaccaaagcccatgacttttaaggacatagactccacatgccaagttgaaatacttgacatgcagtccagtgccgatggtgagttcaagttcattttatactaccaggatcactcaaccaagtttattattttacggccattaagaaccaaacaggcccatgaggtggtcagtgtctgttagatattttcacaattcttggtacacccagtgtgttagactctgacagtggcgttgagttcacaaaccaggttgttcatgagctcaatgagttg

SEQ ID NO: 280339 - DNA, 1291 bp, Homo sapiens
tgcaatagagaaagagtttaattcatgcagagccagaacgagagaccagagttaactactcaaatcattctcccggaaaatttagggatgggagtttttttaaggataatttggcaggtagggggccagggagtggggcgtgttgacaggtcgtatcagagatgaaggcatagggagttgaagctgtcttcttgctctgagttggttcctggatgggggccacaagatcagatgagccagtttattgatctgggtggcaccagcggatccatcagtgcagggtcttataggttgtatatatctgaactggtcgactaaagatgcaaagcgaagtgctccagtgagtgtggtacaggttgttgagatgaaggagagatggcaatcagctaaagttactgaatacgtcaggaaggaggctggtttcagctggctgtgattgggaggatcaatgcgaggacattccgagtcggaaacagccaaggcgaagactcacaggatccttcttacagctctccatgatgcctcagagagctggaaatgatccacctggggtttcaaatgcaagtgaaatggaaatggagataagtaacatgagagaaaagtttcttatgagtgtaacaaagttagtagaaagcaaaagttacaacagcaaggtattttccaaagaaaagtactttcaaacaataaaggaagttaaagaagctaaagaaaaagggaagaagtcatcacgtgattatcgccgtgcagcaaaatatgatgtgatctctgtacagggcacagagaaactgatagaggctactcatggagaacgtgatcgaatacggtattatgtacataaggaagagttgtttgatattcttcatgatacacatctcagtattggacatggtgggcggacacgcatgctcaaggagctgcaaggaaaatatgggaatgtcaccaaagaagttattgtcttatatctgactctgtgtaaacagtgccaccagaagaacccagtacccaagagaggccttgcaccaaagcccatgacttttaaggacatagactccacatgccaagttgaaatacttgacatgcagtccagtgccgatggtgagttcaagttcattttatactaccaggatcactcaaccaagtttattattttacggccattaagaaccaaacaggcccatgaggtggtcagtgtctgttagatattttcacaattcttggtacacccagtgtgttagactctgacagtggcgttgagttcacaaaccaggttgttcatgagctcaatgagttg

SEQ ID NO: 280340 - DNA, 976 bp, Homo sapiens
ccccgaacacggaaaaaaaaggcgcagtgggggttctgctgtgtttgcaagtgagggtcgtgagtgcaacgggcgcaaggcattaaggccagtgtgttagtgcgcgggcaggctcgcgtggtgctggggttgctgtgtgagcggccctcgtggctcgggaggtgctgtgtttgcgcaggcgtgcgcccctggcgtcgggactgggactccggatttctgtggcgactgaggcgctcttacctttgcgtcctgatctccaagcaagcacactgaccttcttcaggcaaatacgcactgttaattttccagaaagttctgtgagtaaggtttatacctctcgagtctgccactagatgccgccaaatcccagcaaaggattggctgtttggtccctgggattctgggattttgtttccctcccccctcccctttctgatttgctgaacggtaatatctataggcatcatggatatcgttcattcctaggaaaaaataaaatcaacttctgtaaatagcactagtaggcaggggactgtgacccaagatccaaataattttgctcatttctttccttttctccttgggttaaaaaaaaaaaaaggcccctctccatccctcttttcttttgtccttgccttgtttaatcaaagagttaatgaatgacgcaagcactgatgctgaagatcctaaccctttttcctcaccttttcaaatgctcgcaactcacccaaactgaaaatacagatagctgttccgtcagtaaagatagataagaactcatcagtaaaacctggaccctggtattgaaaactgattttccttttctcttgaaatttgtatcagatatgtgtttttgcaccctattttctgtagtggtattggtaaactttattgtgtctttggagtaagagaaagagacctaattgtaaacctcattccaccacttactagtctcagtaccctgggcaaatgattt

SEQ ID NO: 280341 - DNA, 2367 bp, Homo sapiens
gggggcagatcctggggagaatggaggagcacacagaggcaggctcggcaccagagatgggggcccagaaggccctgattgacaatcctgctgacatcctagtcattgctgcatatttcctgctggtcattggcgttggcttgtggtccatgtgcagaaccaacagaggcactgtgggcggctacttcctggcaggacgcagcatggtgtggtggccggttggggcctctctcttcgccagcaacatcggcagtggccactttgtgggcctggcagggactggcgctgcaagtggcttggctgttgctggattcgagtggaatgcgctcttcgtggtgctgctactgggctggctgtttgcacccgtgtacctgacagcgggggtcatcacgatgccacagtacctgcgcaagcgcttcggcggccgccgcatccgcctctacctgtctgtgctctcccttttcctgtacatcttcaccaagatctcagtggacatgttctccggagctgtattcatccagcaggctctgggctggaacatctatgcctccgtcatcgcgcttctgggcatcaccatgatttacacggtgacaggagggctggccgcgctgatgtacacggacacggtacagaccttcgtcattctggggggcgcctgcatcctcatgggttacgccttccacgaggtgggcgggtattcgggtctcttcgacaaatacctgggagcagcgacttcgctgacggtgtccgaggatccagccgtgggaaacatctccagcttctgctatcgaccccggcccgactcctaccacctgctccggcaccccgtgaccggggatctgccgtggcccgcgctgctcctcggactcacaatcgtctcgggctggtactggtgcagcgaccaggtcatcgtgcagcgctgcctggccgggaagagcctgacccacatcaaggcgggctgcatcctgtgtgggtacctgaagctgacgcccatgtttctcatggtcatgccaggcatgatcagccgcattctgtacccagacgaggtggcgtgcgtggtgcctgaggtgtgcaggcgcgtgtgcggcacggaggtgggctgctccaacatcgcctacccgcggctcgtcgtgaagctcatgcccaacggtctgcgcggactcatgctggcggtcatgctggccgcgctcatgtcctcgctggcctccatcttcaacagcagcagcacgctcttcaccatggacatctacacgcgcctgcggccacgcgccggcgaccgcgagctgctgctggtgggacggctctgggtggtgttcatcgtggtagtgtcggtggcctggcttcccgtggtgcaggcggcacagggcgggcagctcttcgattacatccaggcagtctctagctacctggcaccgcccgtgtccgccgtcttcgtgctggcgctcttcgtgccgcgcgttaatgagcagggcgccttctggggactcatcgggggcctgctgatgggcctggcacgcctgattcccgagttctccttcggctcgggcagctgtgtgcagccctcggcgtgcccagctttcctctgcggcgtgcactacctctacttcgccattgtgctgttcttctgctctggcctcctcaccctcacggtctccctgtgcaccgcgcccatccccagaaagcacctccaccgcctggtcttcagtctccggcatagcaaggaggaacgggaggacctggatgctgatgagcagcaaggctcctcactccctgtacagaatgggtgcccagagagtgccatggagatgaatgagccccaggccccggcaccaagcctcttccgccagtgcctgctctggttttgtggaatgagcagaggtggggtgggcagtcctccgccccttacccaggaggaggcagcggcagcagccaggcggctggaggacatcagcgaggacccgagctgggcccgtgtggtcaacctcaatgccctgctcatgatggcagtggccgtgttcctctggggcttctatgcctaagaccaactgcgttggacaccataagccacagcctcacaggaagtgggggtgaggagcctgcggtgctccccagaaaaggggaaggggcagtggggtgagaaggtcctggctccccttctcccggccttcctctgcctggggcccactgcatctgattggcagtcacttcccatgagggcctggcccacccgctgcagttgccctaaggaaaaataaagctgcctttcccctgtccaaaaaaaacaaaaaataaacataaacaacaacaaaaaaaacaaggcggcacataaagaaaaaacacacaaaaggacacaaataacaacacaac

SEQ ID NO: 280342 - DNA, 3172 bp, Homo sapiens
gggggcagatcctggggagaatggaggagcacacagaggcaggctcggcaccagagatgggggcccagaaggccctgattgacaatcctgctgacatcctagtcattgctgcatatttcctgctggtcattggcgttggcttgtggtccatgtgcagaaccaacagaggcactgtgggcggctacttcctggcaggacgcagcatggtgtggtggccggttggggcctctctcttcgccagcaacatcggcagtggccactttgtgggcctggcagggactggcgctgcaagtggcttggctgttgctggattcgagtggaatgtgaggccctcttttttccaataaccccaccctcagtgagaacacctggaagggtcacaccttggggaaactccaggaaagggggaatgagactggcagtgggacttcccaactgcggggtgtgactgggctgggagtggaggtcatacatctagccaggaagcagaggggtgcaggggtgaccactgttggtcctgcttctgacttgccatgtgagccagcctgcaccagccactgcctctgggagcttccatttattcctctctgagtggggtgagcagcctcaaagccagggaagcacctgctcagatgcgctccgaagctgtggtctgtgaggaatttggggccaagttaaagccctttgcagaagagaggagcagagacaaagctctgggactgaggctcctgttggaggggagattgggctttgagctcagggcttcctggaggaggagactgctgagctgatccttgagggacacaaggtttgggtggctttggctcaggtcagtctgaggggtctatgctggggttcatatctagatgatcatagggacaacattgggaaaaacgggccagaagtgatagcctggggagacaaggagggctccagttaagagcccaggagggtgtcagctctgttccttggtgcccagggccccggggccatcacctgcagttgtcctctgggccccagatgtggcccttcccagggccacttgcttggagtagcaccttcacgaagaggtcagatcctcagggatgagggcaaagccaccctcagcggcagtactgccccccgtaggcgctcttcgtggtgctgctactgggctggctgtttgcacccgtgtacctgacagcgggggtcatcacgatgccacagtacctgcgcaagcgcttcggcggccgccgcatccgcctctacctgtctgtgctctcccttttcctgtacatcttcaccaagatctcagtggacatgttctccggagctgtattcatccagcaggctctgggctggaacatctatgcctccgtcatcgcgcttctgggcatcaccatgatttacacggtgacaggagggctggccgcgctgatgtacacggacacggtacagaccttcgtcattctggggggcgcctgcatcctcatgggttacgccttccacgaggtgggcgggtattcgggtctcttcgacaaatacctgggagcagcgacttcgctgacggtgtccgaggatccagccgtgggaaacatctccagcttctgctatcgaccccggcccgactcctaccacctgctccggcaccccgtgaccggggatctgccgtggcccgcgctgctcctcggactcacaatcgtctcgggctggtactggtgcagcgaccaggtcatcgtgcagcgctgcctggccgggaagagcctgacccacatcaaggcgggctgcatcctgtgtgggtacctgaagctgacgcccatgtttctcatggtcatgccaggcatgatcagccgcattctgtacccagacgaggtggcgtgcgtggtgcctgaggtgtgcaggcgcgtgtgcggcacggaggtgggctgctccaacatcgcctacccgcggctcgtcgtgaagctcatgcccaacggtctgcgcggactcatgctggcggtcatgctggccgcgctcatgtcctcgctggcctccatcttcaacagcagcagcacgctcttcaccatggacatctacacgcgcctgcggccacgcgccggcgaccgcgagctgctgctggtgggacggctctgggtggtgttcatcgtggtagtgtcggtggcctggcttcccgtggtgcaggcggcacagggcgggcagctcttcgattacatccaggcagtctctagctacctggcaccgcccgtgtccgccgtcttcgtgctggcgctcttcgtgccgcgcgttaatgagcagggcgccttctggggactcatcgggggcctgctgatgggcctggcacgcctgattcccgagttctccttcggctcgggcagctgtgtgcagccctcggcgtgcccagctttcctctgcggcgtgcactacctctacttcgccattgtgctgttcttctgctctggcctcctcaccctcacggtctccctgtgcaccgcgcccatccccagaaagcacctccaccgcctggtcttcagtctccggcatagcaaggaggaacgggaggacctggatgctgatgagcagcaaggctcctcactccctgtacagaatgggtgcccagagagtgccatggagatgaatgagccccaggccccggcaccaagcctcttccgccagtgcctgctctggttttgtggaatgagcagaggtggggtgggcagtcctccgccccttacccaggaggaggcagcggcagcagccaggcggctggaggacatcagcgaggacccgagctgggcccgtgtggtcaacctcaatgccctgctcatgatggcagtggccgtgttcctctggggcttctatgcctaagaccaactgcgttggacaccataagccacagcctcacaggaagtgggggtgaggagcctgcggtgctccccagaaaaggggaaggggcagtggggtgagaaggtcctggctccccttctcccggccttcctctgcctggggcccactgcatctgattggcagtcacttcccatgagggcctggcccacccgctgcagttgccctaaggaaaaataaagctgcctttcccctgtccaaaaaaaacaaaaaataaacataaacaacaacaaaaaaaacaaggcggcacataaagaaaaaacacacaaaaggacacaaataacaacacaac

SEQ ID NO: 280343 - DNA, 2043 bp, Homo sapiens
gggggcagatcctggggagaatggaggagcacacagaggcaggctcggcaccagagatgggggcccagaaggccctgattgacaatcctgctgacatcctagtcattgctgcatatttcctgctggtcattggcgttggcttgtggtccatgtgcagaaccaacagaggcactgtgggcggctacttcctggcaggacgcagcatggtgtggtggccggttggggcctctctcttcgccagcaacatcggcagtggccactttgtgggcctggcagggactggcgctgcaagtggcttggctgttgctggattcgagtggaatgtgaggccctcttttttccaataaccccaccctcagtgagaacacctggaagggtcacaccttggggaaactccaggaaagggggaatgagactggcagtgggacttcccaactgcggggtgtgactgggctgggagtggaggtcatacatctagccaggaagcagaggggtgcaggggtgaccactgttggtcctgcttctgacttgccatgtgagccagcctgcaccagccactgcctctgggagcttccatttattcctctctgagtggggtgagcagcctcaaagccagggaagcacctgctcagatgcgctccgaagctgtggtctgtgaggaatttggggccaagttaaagccctttgcagaagagaggagcagagacaaagctctgggactgaggctcctgttggaggggagattgggctttgagctcagggcttcctggaggaggagactgctgagctgatccttgagggacacaaggtttgggtggctttggctcaggtcagtctgaggggtctatgctggggttcatatctagatgatcatagggacaacattgggaaaaacgggccagaagtgatagcctggggagacaaggagggctccagttaagagcccaggagggtgtcagctctgttccttggtgcccagggccccggggccatcacctgcagttgtcctctgggccccagatgtggcccttcccagggccacttgcttggagtagcaccttcacgaagaggtcagatcctcagggatgagggcaaagccaccctcagcggcagtactgccccccgtaggcgctcttcgtggtgctgctactgggctggctgtttgcacccgtgtacctgacagcgggggtcatcacgatgccacagtacctgcgcaagcgcttcggcggccgccgcatccgcctctacctgtctgtgctctcccttttcctgtacatcttcaccaagatctcagtggacatgttctccggagctgtattcatccagcaggctctgggctggaacatctatgcctccgtcatcgcgcttctgggcatcaccatgatttacacggtgacaggagggctggccgcgctgatgtacacggacacggtacagaccttcgtcattctggggggcgcctgcatcctcatgggttacgccttccacgaggtgggcgggtattcgggtctcttcgacaaatacctgggagcagcgacttcgctgacggtgtccgaggatccagccgtgggaaacatctccagcttctgctatcgaccccggcccgactcctaccacctgctccggcaccccgtgaccggggatctgccgtggcccgcgctgctcctcggactcacaatcgtctcgggctggtactggtgcagcgaccaggtcatcgtgcagcgctgcctggccgggaagagcctgacccacatcaaggcgggctgcatcctgtgtgggtacctgaagctgacgcccatgtttctcatggtcatgccaggcatgatcagccgcattctgtacccagacgaggtggcgtgcgtggtgcctgaggtgtgcaggcgcgtgtagatgtccatggtgaagagcgtgctgctgctgttgaagatggaggccagcgaggacatgagcgcggccagcatgaccgccagcatgagtccgcgcagaccgttgggcatgagcttcacgacgagccggggtaggcgatgttggagcaggtggtag

SEQ ID NO: 280344 - DNA, 1739 bp, Homo sapiens
gggggcagatcctggggagaatggaggagcacacagaggcaggctcggcaccagagatgggggcccagaaggccctgattgacaatcctgctgacatcctagtcattgctgcatatttcctgctggtcattggcgttggcttgtggtccatgtgcagaaccaacagaggcactgtgggcggctacttcctggcaggacgcagcatggtgtggtggccggttggggcctctctcttcgccagcaacatcggcagtggccactttgtgggcctggcagggactggcgctgcaagtggcttggctgttgctggattcgagtggaatgtgaggccctcttttttccaataaccccaccctcagtgagaacacctggaagggtcacaccttggggaaactccaggaaagggggaatgagactggcagtgggacttcccaactgcggggtgtgactgggctgggagtggaggtcatacatctagccaggaagcagaggggtgcaggggtgaccactgttggtcctgcttctgacttgccatgtgagccagcctgcaccagccactgcctctgggagcttccatttattcctctctgagtggggtgagcagcctcaaagccagggaagcacctgctcagatgcgctccgaagctgtggtctgtgaggaatttggggccaagttaaagccctttgcagaagagaggagcagagacaaagctctgggactgaggctcctgttggaggggagattgggctttgagctcagggcttcctggaggaggagactgctgagctgatccttgagggacacaaggtttgggtggctttggctcaggtcagtctgaggggtctatgctggggttcatatctagatgatcatagggacaacattgggaaaaacgggccagaagtgatagcctggggagacaaggagggctccagttaagagcccaggagggtgtcagctctgttccttggtgcccagggccccggggccatcacctgcagttgtcctctgggccccagatgtggcccttcccagggccacttgcttggagtagcaccttcacgaagaggtcagatcctcagggatgagggcaaagccaccctcagcggcagtactgccccccgtaggcgctcttcgtggtgctgctactgggctggctgtttgcacccgtgtacctgacagcgggggtcatcacgatgccacagtacctgcgcaagcgcttcggcggccgccgcatccgcctctacctgtctgtgctctcccttttcctgtacatcttcaccaagatctcagtggacatgttctccggagctgtattcatccagcaggctctgggctggaacatctatgcctccgtcatcgcgcttctgggcatcaccatgatttacacggtgacaggagggctggccgcgctgatgtacacggacacggtacagaccttcgtcattctggggggcgcctgcatcctcatgggttacgccttccacgaggagaaatacaatatgcttttgaaatgactagctttaaagaaaaaagtcctgagcttcctaccccagttgtgggatattactccaaaacaactcaagaacccaaattatcttactgcctgattaaatgtaaccactctagctttttaaagacacattcctgttactcacattaatccatctccctcacgtttcaggtttgctggaaggaaaagtagagaaataatggagtagagaagtgggagaatcca

SEQ ID NO: 280345 - DNA, 2374 bp, Homo sapiens
tgatatgacctgattcagctaaacaaagctggggagcgggaatgagacctgggggacttgtcggctcagtgcccctgagtccatgtgcagaaccaacagaggcactgtgggcggctacttcctggcaggacgcagcatggtgtggtggccggtgagacgggctgggccgggaacgggaggggcctggagaagcagccctgctcactccctcctctggccacccaggttggggcctctctcttcgccagcaacatcggcagtggccactttgtgggcctggcagggactggcgctgcaagtggcttggctgttgctggattcgagtggaatgcgctcttcgtggtgctgctactgggctggctgtttgcacccgtgtacctgacagcgggggtcatcacgatgccacagtacctgcgcaagcgcttcggcggccgccgcatccgcctctacctgtctgtgctctcccttttcctgtacatcttcaccaagatctcagtggacatgttctccggagctgtattcatccagcaggctctgggctggaacatctatgcctccgtcatcgcgcttctgggcatcaccatgatttacacggtgacaggagggctggccgcgctgatgtacacggacacggtacagaccttcgtcattctggggggcgcctgcatcctcatgggttacgccttccacgaggtgggcgggtattcgggtctcttcgacaaatacctgggagcagcgacttcgctgacggtgtccgaggatccagccgtgggaaacatctccagcttctgctatcgaccccggcccgactcctaccacctgctccggcaccccgtgaccggggatctgccgtggcccgcgctgctcctcggactcacaatcgtctcgggctggtactggtgcagcgaccaggtcatcgtgcagcgctgcctggccgggaagagcctgacccacatcaaggcgggctgcatcctgtgtgggtacctgaagctgacgcccatgtttctcatggtcatgccaggcatgatcagccgcattctgtacccagacgaggtggcgtgcgtggtgcctgaggtgtgcaggcgcgtgtgcggcacggaggtgggctgctccaacatcgcctacccgcggctcgtcgtgaagctcatgcccaacggtctgcgcggactcatgctggcggtcatgctggccgcgctcatgtcctcgctggcctccatcttcaacagcagcagcacgctcttcaccatggacatctacacgcgcctgcggccacgcgccggcgaccgcgagctgctgctggtgggacggctctgggtggtgttcatcgtggtagtgtcggtggcctggcttcccgtggtgcaggcggcacagggcgggcagctcttcgattacatccaggcagtctctagctacctggcaccgcccgtgtccgccgtcttcgtgctggcgctcttcgtgccgcgcgttaatgagcagggcgccttctggggactcatcgggggcctgctgatgggcctggcacgcctgattcccgagttctccttcggctcgggcagctgtgtgcagccctcggcgtgcccagctttcctctgcggcgtgcactacctctacttcgccattgtgctgttcttctgctctggcctcctcaccctcacggtctccctgtgcaccgcgcccatccccagaaagcacctccaccgcctggtcttcagtctccggcatagcaaggaggaacgggaggacctggatgctgatgagcagcaaggctcctcactccctgtacagaatgggtgcccagagagtgccatggagatgaatgagccccaggccccggcaccaagcctcttccgccagtgcctgctctggttttgtggaatgagcagaggtggggtgggcagtcctccgccccttacccaggaggaggcagcggcagcagccaggcggctggaggacatcagcgaggacccgagctgggcccgtgtggtcaacctcaatgccctgctcatgatggcagtggccgtgttcctctggggcttctatgcctaagaccaactgcgttggacaccataagccacagcctcacaggaagtgggggtgaggagcctgcggtgctccccagaaaaggggaaggggcagtggggtgagaaggtcctggctccccttctcccggccttcctctgcctggggcccactgcatctgattggcagtcacttcccatgagggcctggcccacccgctgcagttgccctaaggaaaaataaagctgcctttcccctgtccaaaaaaaacaaaaaataaacataaacaacaacaaaaaaaacaaggcggcacataaagaaaaaacacacaaaaggacacaaataacaacacaac

SEQ ID NO: 280346 - DNA, 2300 bp, Homo sapiens
tgatatgacctgattcagctaaacaaagctggggagcgggaatgagacctgggggacttgtcggctcagtgcccctgagtccatgtgcagaaccaacagaggcactgtgggcggctacttcctggcaggacgcagcatggtgtggtggccggttggggcctctctcttcgccagcaacatcggcagtggccactttgtgggcctggcagggactggcgctgcaagtggcttggctgttgctggattcgagtggaatgcgctcttcgtggtgctgctactgggctggctgtttgcacccgtgtacctgacagcgggggtcatcacgatgccacagtacctgcgcaagcgcttcggcggccgccgcatccgcctctacctgtctgtgctctcccttttcctgtacatcttcaccaagatctcagtggacatgttctccggagctgtattcatccagcaggctctgggctggaacatctatgcctccgtcatcgcgcttctgggcatcaccatgatttacacggtgacaggagggctggccgcgctgatgtacacggacacggtacagaccttcgtcattctggggggcgcctgcatcctcatgggttacgccttccacgaggtgggcgggtattcgggtctcttcgacaaatacctgggagcagcgacttcgctgacggtgtccgaggatccagccgtgggaaacatctccagcttctgctatcgaccccggcccgactcctaccacctgctccggcaccccgtgaccggggatctgccgtggcccgcgctgctcctcggactcacaatcgtctcgggctggtactggtgcagcgaccaggtcatcgtgcagcgctgcctggccgggaagagcctgacccacatcaaggcgggctgcatcctgtgtgggtacctgaagctgacgcccatgtttctcatggtcatgccaggcatgatcagccgcattctgtacccagacgaggtggcgtgcgtggtgcctgaggtgtgcaggcgcgtgtgcggcacggaggtgggctgctccaacatcgcctacccgcggctcgtcgtgaagctcatgcccaacggtctgcgcggactcatgctggcggtcatgctggccgcgctcatgtcctcgctggcctccatcttcaacagcagcagcacgctcttcaccatggacatctacacgcgcctgcggccacgcgccggcgaccgcgagctgctgctggtgggacggctctgggtggtgttcatcgtggtagtgtcggtggcctggcttcccgtggtgcaggcggcacagggcgggcagctcttcgattacatccaggcagtctctagctacctggcaccgcccgtgtccgccgtcttcgtgctggcgctcttcgtgccgcgcgttaatgagcagggcgccttctggggactcatcgggggcctgctgatgggcctggcacgcctgattcccgagttctccttcggctcgggcagctgtgtgcagccctcggcgtgcccagctttcctctgcggcgtgcactacctctacttcgccattgtgctgttcttctgctctggcctcctcaccctcacggtctccctgtgcaccgcgcccatccccagaaagcacctccaccgcctggtcttcagtctccggcatagcaaggaggaacgggaggacctggatgctgatgagcagcaaggctcctcactccctgtacagaatgggtgcccagagagtgccatggagatgaatgagccccaggccccggcaccaagcctcttccgccagtgcctgctctggttttgtggaatgagcagaggtggggtgggcagtcctccgccccttacccaggaggaggcagcggcagcagccaggcggctggaggacatcagcgaggacccgagctgggcccgtgtggtcaacctcaatgccctgctcatgatggcagtggccgtgttcctctggggcttctatgcctaagaccaactgcgttggacaccataagccacagcctcacaggaagtgggggtgaggagcctgcggtgctccccagaaaaggggaaggggcagtggggtgagaaggtcctggctccccttctcccggccttcctctgcctggggcccactgcatctgattggcagtcacttcccatgagggcctggcccacccgctgcagttgccctaaggaaaaataaagctgcctttcccctgtccaaaaaaaacaaaaaataaacataaacaacaacaaaaaaaacaaggcggcacataaagaaaaaacacacaaaaggacacaaataacaacacaac

SEQ ID NO: 280347 - DNA, 598 bp, Homo sapiens
atgtttctcatggtcatgccaggcatgatcagccgcattctgtacccaggtaacatccctgccccgcccctttcctgtgccagcaaccgggcgcccgtcgcccagttccgtcaccctcctaagactcggcagtttgggcccggagtcccgcctccctccgggggtcgcacgcctcctctgctaggattcccagtccccacctcctgggattcccagaccaggccccgtcctaacggcgcggtggcctctctctggcagacgaggtggcgtgcgtggtgcctgaggtgtgcaggcgcgtgtgcggcacggaggtgggctgctccaacatcgcctacccgcggctcgtcgtgaagctcatgcccaacggtaagggcagccccgggccacaggcgcaagctcgctgcggagcccgctgctgggaggggtcgtccctcgcgcagctgcagccgccctggacccccagtggccccagcctcacggctgccgtcggcccgcaggtctgcgcggactcatgctggcggtcatgctggccgcgctcatgtcctcgctggcctccatcttcaacagcagcagcacgctcttcaccatggacatctac

SEQ ID NO: 280348 - DNA, 850 bp, Homo sapiens
tagatcagcctatatgccctggacaaacttggctgcaatgtgtgctcacacttgaagagtcaggcttttttgtttctggcctccaaggaattttctcattttccttccagcacagctatgtattaataaatgtattttaaaactatttttaatattttacccaacatttttagttgagcagtttctatgactatctagtttgtcatattgctagaaatgaaacactcaaatcttggtataagattttagtagcctactatctaatattgtggcagcatgattttgtgatcagcaaacctttagaatgttttatgcttctgtgtctggtttaataatagctgaaaaagcatcttcacctaaaaatgtttattttagatattagcagtttatgacattgtttactttgtattaactttagctagtgaaatttttttcttttattactttaaggaggtaactgagttctatgttcaaaatgaaaattcagtggacaagtggggaaaacctttagtgattgataaactcaaggtaagaaaatctttaacgctagaaaattcatatgcaagtgttttttgagatcctagaccttagttttgttgttgctattgttatatatgtagaagaaaattatatcaataataacctttaaaaaagaagtattactagatcttacatacaatacgctaaggaggtccatattggtggatgagaacaccccttcactggtcacgggcaaattggtactttctttttgccccggtggaagggcagggggttgccctaatacactcgtttcctcccacgggaaaagcccgtgggcacccgggcggcgccaaacgaaccccccggg

SEQ ID NO: 280349 - DNA, 351 bp, Homo sapiens
tttttagatttgcattccgatcttgggtttattcaacacaattcttccactctacacaacaaagtacaaacacaatgtcatctaaaatgctacaaaggtataaaactcaaaagagaaattttatagtactgactgtacaatgaaagcaaaaaagaaaaaaaaataaaagcaatgtacatggacactctgggcagtgctggcgctaagaaagagattgcaatgatcaaagtggctgccccacgggctgtcagcaaaatcgttgactgggccatccaggtgtgcggaggtgctggtgtttcccaggattaccctctggctaacatgtgagtagatgtcatttaagaatcatct

SEQ ID NO: 280350 - DNA, 3974 bp, Homo sapiens
tgggactccggccgccaacgctcccagcccgggccttcgccgccgccttcgccccacgttgctcggctgggcccgcgaggggtacgtggggaggcacctcgccgctgccttcctagcccagagcccctggggacgtgcacccagcgcctcacagacagacaacgtctccgagactcccacaggccttcctcggagccgcttccggtgcgttcgcagacatcgctccccctcatcaaaaacctggctctttcggcttccttcctcgctgggccggctaaacccggccgcagcagcaccggggtgataagtgtccagggcaggaggccagcgatgttgccttgctaaccgggtatctaagagaaacagggtctttttattcttaggctcgacagtctgacggccctttttctgaacgggaccctgcaggtcttccgcctgctgttgcattaaatttgggggtggaagaggcttctgcgttgttccttacccgcaacgatgaccatggctttgccttctttaaaattgaggcctccaactctgacgctgactggagaattgaaacccgaacacacattgggctcttttggcacttgactagagctaaaacctcgggattcagcgggcaagcgttgctcagcaacggcgcgtaggctgtgtgcggttggctggagccagaccccaccccggcctcggcccatgctctagaggggacgttgccccaatcctgaaggacttcggcactcgagacctgtggatgccgcgttgctgtggcctgcgggggtgatcatgaagccaggtgctactggcgagtccgatttggccgaagtgctgccccagcacaagttcgacagcaagtccctggaggcctacctaaaccagcacttgtctggctttggggccgaacgtgaggctacgctgaccattgcccagtacagagcaggaaagtccaatccaaccttttatctccagaagggctttcaaacatatgtgctcaggaaaaaaccaccaggttcacttcttcctaaagcacatcagattgatagagaatttaaagtccagaaagccttgttttcaattggattccccgttcccaagcctatactgtactgcagtgatacttctgtcattggaacagaattttacgtaatggaacatgtgcagggtcgaatcttccgtgatttaacaattcctggacttagcccagcagaacgttcagccatatatgtggccacggtagaaacattggctcagttacattccttgaatatacagtcactgcagctggaaggatatggtataggtgctgggtactgcaaaagacaggtatcaacctggacaaagcaatatcaagctgcagctcatcaggacatccctgccatgcaacagctatcggagtggctaatgaagaacttgcccgataatgacaatgaagagaatttgattcatggagatttcagactagataacatagttttccaccctaaagagtgtcgagttatagcagtgctggattgggagctgtcaaccattggtcatcctttgtcagacttagctcatttttccctgttctacttttggccaaggacagttccaatgataaatcaaggttcttatagtgaaaactcagggataccatcaatggaagaactgatttcaatatattgccgctgcaggggaattaattctattcttcctaactggaatttctttcttgccctttcatattttaagatggctggaatagcacagggagtatatagcagatatcttctgggaaataattcatctgaggatagctttttatttgccaatattgtgcaacctctggcagaaactggactacaactctccaaacgaactttcagtactgtactaccacagattgatactactggacagttgtttgtacagactcggaaaggtcaggaagttcttattaaggtgaagcatttcatgaaacaacacattcttccagctgaaaaggaggtaactgagttctatgttcaaaatgaaaattcagtggacaagtggggaaaacctttagtgattgataaactcaaggaaatggccaaagtcgagggtctctggaacttgtttttgccagctgtcagcggactcagccacgtggactatgccttgattgctgaagaaacaggaaaatgcttttttgctccagatgtctttaactgccaagcaccagacacagggaatatggaggttctgcacctgtatggaagtgaggaacagaagaaacagtggcttgagcctcttcttcaagggaacattacctcttgcttctgtatgacagaacctgatgtagcttcaagtgatgccacgaatattgaatgcagcatccaacgagatgaagatagctatgtaattaacggcaaaaaatggtggagcagtggagctgggaatcccaagtgcaaaattgcaattgttttgggaagaactcaaaatacttctctctccagacacaaacagcacagcatgattcttgttcccatgaacacacctggagtaaaaataataaggcctttgtcagtttttggctacacagataattttcatggaggacattttgagatccattttaatcaagtgcgagttcctgccacaaatctaatactaggtgaaggtaggggatttgaaatttcccaaggccgccttggacctggcagaatccaccactgtatgagaacagtaggtttggcggaacgcgctttgcagatcatgtgtgagcgggcaacacaaaggatagctttcaagaagaagttgtatgcacatgaggttgtggctcactggattgctgaaagccgcattgccattgagaagatccgcttgttgactctgaaagctgctcacagcatggacactctgggcagtgctggcgctaagaaagagattgcaatgatcaaagtggctgccccacgggctgtcagcaaaatcgttgactgggccatccaggtgtgcggaggtgctggtgtttcccaggattaccctctggctaacatgtatgctataacccgagttttgcgtttagcagatggacctgacgaagttcatctttcagcaatcgcaacaatggagctgcgggaccaagccaaaagactgacagccaagatataaggagggtggcactgccacatcccactggcagaaactctcctttatacaaacttcattggctccaacatttgaatctcatatttttgtagcagtttgagcacagggttaattattcatttgtggtaaagattatagcatctattttgatcagtgggttttattatttcaagggtcacacagggttaagttcagtaagaaatgctgtagctgttgtcattcaatctagtgcctccttgaggccaggagttcaggaccagcctgggcaacatagcgagacccccattgctacaaaaaatttaaaaatgaaacaagtgtggtggcacatgcttgtagtcctagctacttgggaggctgaggcaggaggattgcttgagtctaggagtttgaggttacagtaagctgtgatcgtgacatggcctccagcctgggtgaccgagtgagactgtttctaaaaataaaaacaaaaaataaatttcttcttgaggtggggtggaggtggggagcaagaatttgacctggctctgatccctggtgtgttgtgtgggcctctttaacgtttgccactgagccttaacctcactgtacttcactgtacttcacacgcattggtgttaacattttaatcttagaagaccctgacccactgagggtttgttgtgagaattgctgaagccacgtagaagcaccttgaaatctgtaaaaccacaagaaagtactttataaaaggtatccttatttgaagtggataaatcttgtaactcgaaaagttgtgatttagaagacaggattgtttttgaacattaggaattaaaggctatatctggtccttaaaaaaatgtaatttg

SEQ ID NO: 280351 - DNA, 3836 bp, Homo sapiens
tgggactccggccgccaacgctcccagcccgggccttcgccgccgccttcgccccacgttgctcggctgggcccgcgaggggtacgtggggaggcacctcgccgctgccttcctagcccagagcccctggggacgtgcacccagcgcctcacagacagacaacgtctccgagactcccacaggccttcctcggagccgcttccggtgcgttcgcagacatcgctccccctcatcaaaaacctggctctttcggcttccttcctcgctgggccggctaaacccggccgcagcagcaccggggtgataagtgtccagggcaggaggccagcgatgttgccttgctaaccgggtatctaagagaaacagggtctttttattcttaggctcgacagtctgacggccctttttctgaacgggaccctgcaggtcttccgcctgctgttgcattaaatttgggggtggaagaggcttctgcgttgttccttacccgcaacgatgaccatggctttgccttctttaaaattgaggcctccaactctgacgctgactggagaattgaaacccgaacacacattgggctcttttggcacttgactagagctaaaacctcgggattcagcgggcaagcgttgctcagcaacggcgcgtaggctgtgtgcggttggctggagccagaccccaccccggctgctgccccagcacaagttcgacagcaagtccctggaggcctacctaaaccagcacttgtctggctttggggccgaacgtgaggctacgctgaccattgcccagtacagagcaggaaagtccaatccaaccttttatctccagaagggctttcaaacatatgtgctcaggaaaaaaccaccaggttcacttcttcctaaagcacatcagattgatagagaatttaaagtccagaaagccttgttttcaattggattccccgttcccaagcctatactgtactgcagtgatacttctgtcattggaacagaattttacgtaatggaacatgtgcagggtcgaatcttccgtgatttaacaattcctggacttagcccagcagaacgttcagccatatatgtggccacggtagaaacattggctcagttacattccttgaatatacagtcactgcagctggaaggatatggtataggtgctgggtactgcaaaagacaggtatcaacctggacaaagcaatatcaagctgcagctcatcaggacatccctgccatgcaacagctatcggagtggctaatgaagaacttgcccgataatgacaatgaagagaatttgattcatggagatttcagactagataacatagttttccaccctaaagagtgtcgagttatagcagtgctggattgggagctgtcaaccattggtcatcctttgtcagacttagctcatttttccctgttctacttttggccaaggacagttccaatgataaatcaaggttcttatagtgaaaactcagggataccatcaatggaagaactgatttcaatatattgccgctgcaggggaattaattctattcttcctaactggaatttctttcttgccctttcatattttaagatggctggaatagcacagggagtatatagcagatatcttctgggaaataattcatctgaggatagctttttatttgccaatattgtgcaacctctggcagaaactggactacaactctccaaacgaactttcagtactgtactaccacagattgatactactggacagttgtttgtacagactcggaaaggtcaggaagttcttattaaggtgaagcatttcatgaaacaacacattcttccagctgaaaaggaggtaactgagttctatgttcaaaatgaaaattcagtggacaagtggggaaaacctttagtgattgataaactcaaggaaatggccaaagtcgagggtctctggaacttgtttttgccagctgtcagcggactcagccacgtggactatgccttgattgctgaagaaacaggaaaatgcttttttgctccagatgtctttaactgccaagcaccagacacagggaatatggaggttctgcacctgtatggaagtgaggaacagaagaaacagtggcttgagcctcttcttcaagggaacattacctcttgcttctgtatgacagaacctgatgtagcttcaagtgatgccacgaatattgaatgcagcatccaacgagatgaagatagctatgtaattaacggcaaaaaatggtggagcagtggagctgggaatcccaagtgcaaaattgcaattgttttgggaagaactcaaaatacttctctctccagacacaaacagcacagcatgattcttgttcccatgaacacacctggagtaaaaataataaggcctttgtcagtttttggctacacagataattttcatggaggacattttgagatccattttaatcaagtgcgagttcctgccacaaatctaatactaggtgaaggtaggggatttgaaatttcccaaggccgccttggacctggcagaatccaccactgtatgagaacagtaggtttggcggaacgcgctttgcagatcatgtgtgagcgggcaacacaaaggatagctttcaagaagaagttgtatgcacatgaggttgtggctcactggattgctgaaagccgcattgccattgagaagatccgcttgttgactctgaaagctgctcacagcatggacactctgggcagtgctggcgctaagaaagagattgcaatgatcaaagtggctgccccacgggctgtcagcaaaatcgttgactgggccatccaggtgtgcggaggtgctggtgtttcccaggattaccctctggctaacatgtatgctataacccgagttttgcgtttagcagatggacctgacgaagttcatctttcagcaatcgcaacaatggagctgcgggaccaagccaaaagactgacagccaagatataaggagggtggcactgccacatcccactggcagaaactctcctttatacaaacttcattggctccaacatttgaatctcatatttttgtagcagtttgagcacagggttaattattcatttgtggtaaagattatagcatctattttgatcagtgggttttattatttcaagggtcacacagggttaagttcagtaagaaatgctgtagctgttgtcattcaatctagtgcctccttgaggccaggagttcaggaccagcctgggcaacatagcgagacccccattgctacaaaaaatttaaaaatgaaacaagtgtggtggcacatgcttgtagtcctagctacttgggaggctgaggcaggaggattgcttgagtctaggagtttgaggttacagtaagctgtgatcgtgacatggcctccagcctgggtgaccgagtgagactgtttctaaaaataaaaacaaaaaataaatttcttcttgaggtggggtggaggtggggagcaagaatttgacctggctctgatccctggtgtgttgtgtgggcctctttaacgtttgccactgagccttaacctcactgtacttcactgtacttcacacgcattggtgttaacattttaatcttagaagaccctgacccactgagggtttgttgtgagaattgctgaagccacgtagaagcaccttgaaatctgtaaaaccacaagaaagtactttataaaaggtatccttatttgaagtggataaatcttgtaactcgaaaagttgtgatttagaagacaggattgtttttgaacattaggaattaaaggctatatctggtccttaaaaaaatgtaatttg

SEQ ID NO: 280352 - DNA, 4584 bp, Homo sapiens
tgggactccggccgccaacgctcccagcccgggccttcgccgccgccttcgccccacgttgctcggctgggcccgcgaggggtacgtggggaggcacctcgccgctgccttcctagcccagagcccctggggacgtgcacccagcgcctcacagacagacaacgtctccgagactcccacaggccttcctcggagccgcttccggtgcgttcgcagacatcgctccccctcatcaaaaacctggctctttcggcttccttcctcgctgggccggctaaacccggccgcagcagcaccggggtgataagtgtccagggcaggaggccagcgatgttgccttgctaaccgggtatctaagagaaacagggtctttttattcttaggctcgacagtctgacggccctttttctgaacgggaccctgcaggtcttccgcctgctgttgcattaaatttgggggtggaagaggcttctgcgttgttccttacccgcaacgatgaccatggctttgccttctttaaaattgaggcctccaactctgacgctgactggagaattgaaacccgaacacacattgggctcttttggcacttgactagagctaaaacctcgggattcagcgggcaagcgttgctcagcaacggcgcgtaggctgtgtgcggttggctggagccagaccccaccccggcctcggcccatgctctagaggggacgttgccccaatcctgaaggacttcggcactcgagacctgtggatgccgcgttgctgtggcctgcgggggtgatcatgaagccaggtgctactggcgagtccgatttggccgaagtgctgccccagcacaagttcgacagcaagtccctggaggcctacctaaaccagcacttgtctggctttggggccgaacgtgaggctacgctgaccattgcccagtacagagcaggaaagtccaatccaaccttttatctccagaagggctttcaaacatatgtgctcaggaaaaaaccaccaggttcacttcttcctaaagcacatcagattgatagagaatttaaagtccagaaagccttgttttcaattggattccccgttcccaagcctatactgtactgcagtgatacttctgtcattggaacagaattttacgtaatggaacatgtgcagggtcgaatcttccgtgatttaacaattcctggacttagcccagcagaacgttcagccatatatgtggccacggtagaaacattggctcagttacattccttgaatatacagtcactgcagctggaaggatatggtataggtgctgggtactgcaaaagacaggtatcaacctggacaaagcaatatcaagctgcagctcatcaggacatccctgccatgcaacagctatcggagtggctaatgaagaacttgcccgataatgacaatgaagagaatttgattcatggagatttcagactagataacatagttttccaccctaaagagtgtcgagttatagcagtgctggattgggagctgtcaaccattggtcatcctttgtcagacttagctcatttttccctgttctacttttggccaaggacagttccaatgataaatcaaggttcttatagtgaaaactcagggataccatcaatggaagaactgatttcaatatattgccgctgcaggggaattaattctattcttcctaactggaatttctttcttgccctttcatattttaagatggctggaatagcacagggagtatatagcagatatcttctgggaaataattcatctgaggatagctttttatttgccaatattgtgcaacctctggcagaaactggactacaactctccaaacgaactttcagtactgtactaccacagattgatactactggacagttgtttgtacagactcggaaaggtcaggaagttcttattaaggtgaagcatttcatgaaacaacacattcttccagctgaaaaggaggtaactgagttctatgttcaaaatgaaaattcagtggacaagtggggaaaacctttagtgattgataaactcaaggaaatggccaaagtcgagggtctctggaacttgtttttgccagctgtcagcggactcagccacgtggactatgccttgattgctgaagaaacaggaaaatgcttttttgctccagatgtctttaactgccaagcaccagacacagggaatatggaggttctgcacctgtatggaagtgaggaacagaagaaacagtggcttgagcctcttcttcaagggaacattacctcttgcttctgtatgacagaacctgatgtagcttcaagtgatgccacgaatattgaatgcagcatccaacgagatgaagatagctatgtaattaacggcaaaaaatggtggagcagtggagctgggaatcccaagtgcaaaattgcaattgttttgggaagaactcaaaatacttctctctccaggtaattaaacaattctgattgagaaacctgtgtaggaatgagccagtcttcctcctatctaggtaatttacttaaaattcactgtttggactcacaaatcataatgtaagatatgagagtaaatgtcatatatttgtatttcacaagtattttctaacaggtgtttttggaaaacattatagggagtattgctgaacattcttcgctgtggaattttcagtattagaaagtgttgctaaattatcaaagctgtttggattaaattatcagacaaattttttcagacctgtgtaatgaagtgattagatgtttagatcaaaggcaataatcttgaaatgtttaattatatatataagttcccagttaccattgttgagcagtgagaagcttcaatcaaacaactcatttattttcaaatcattgtttctgttccagatcacagcctgcatcagactatgttggtgtacgtcttttacacagttcccattccagtcatcactgcttacatgactacatgaaaacatcaaaaagacaattgtgattctgcttattatctgttttatttttcttcttagcaaactttttctaatacaatttttcttttgactagacacaaacagcacagcatgattcttgttcccatgaacacacctggagtaaaaataataaggcctttgtcagtttttggctacacagataattttcatggaggacattttgagatccattttaatcaagtgcgagttcctgccacaaatctaatactaggtgaaggtaggggatttgaaatttcccaaggccgccttggacctggcagaatccaccactgtatgagaacagtaggtttggcggaacgcgctttgcagatcatgtgtgagcgggcaacacaaaggatagctttcaagaagaagttgtatgcacatgaggttgtggctcactggattgctgaaagccgcattgccattgagaagatccgcttgttgactctgaaagctgctcacagcatggacactctgggcagtgctggcgctaagaaagagattgcaatgatcaaagtggctgccccacgggctgtcagcaaaatcgttgactgggccatccaggtgtgcggaggtgctggtgtttcccaggattaccctctggctaacatgtatgctataacccgagttttgcgtttagcagatggacctgacgaagttcatctttcagcaatcgcaacaatggagctgcgggaccaagccaaaagactgacagccaagatataaggagggtggcactgccacatcccactggcagaaactctcctttatacaaacttcattggctccaacatttgaatctcatatttttgtagcagtttgagcacagggttaattattcatttgtggtaaagattatagcatctattttgatcagtgggttttattatttcaagggtcacacagggttaagttcagtaagaaatgctgtagctgttgtcattcaatctagtgcctccttgaggccaggagttcaggaccagcctgggcaacatagcgagacccccattgctacaaaaaatttaaaaatgaaacaagtgtggtggcacatgcttgtagtcctagctacttgggaggctgaggcaggaggattgcttgagtctaggagtttgaggttacagtaagctgtgatcgtgacatggcctccagcctgggtgaccgagtgagactgtttctaaaaataaaaacaaaaaataaatttcttcttgaggtggggtggaggtggggagcaagaatttgacctggctctgatccctggtgtgttgtgtgggcctctttaacgtttgccactgagccttaacctcactgtacttcactgtacttcacacgcattggtgttaacattttaatcttagaagaccctgacccactgagggtttgttgtgagaattgctgaagccacgtagaagcaccttgaaatctgtaaaaccacaagaaagtactttataaaaggtatccttatttgaagtggataaatcttgtaactcgaaaagttgtgatttagaagacaggattgtttttgaacattaggaattaaaggctatatctggtccttaaaaaaatgtaatttg

SEQ ID NO: 280353 - DNA, 4505 bp, Homo sapiens
tgggactccggccgccaacgctcccagcccgggccttcgccgccgccttcgccccacgttgctcggctgggcccgcgaggggtacgtggggaggcacctcgccgctgccttcctagcccagagcccctggggacgtgcacccagcgcctcacagacagacaacgtctccgagactcccacaggccttcctcggagccgcttccggtgcgttcgcagacatcgctccccctcatcaaaaacctggctctttcggcttccttcctcgctgggccggctaaacccggccgcagcagcaccggggtgataagtgtccagggcaggaggccagcgatgttgccttgctaaccgggtatctaagagaaacagggtctttttattcttaggctcgacagtctgacggccctttttctgaacgggaccctgcaggtcttccgcctgctgttgcattaaatttgggggtggaagaggcttctgcgttgttccttacccgcaacgatgaccatggctttgccttctttaaaattgaggcctccaactctgacgctgactggagaattgaaacccgaacacacattgggctcttttggcacttgactagagctaaaacctcgggattcagcgggcaagcgttgctcagcaacggcgcgtaggctgtgtgcggttggctggagccagaccccaccccggcctcggcccatgctctagaggggacgttgccccaatcctgaaggacttcggcactcgagacctgtggatgccgcgttgctgtggcctgcgggggtgatcatgaagccaggtgctactggcgagtccgatttggccgaagtgctgccccagcacaagttcgacagcaagtccctggaggcctacctaaaccagcacttgtctggctttggggccgaacgtgaggctacgctgaccattgcccagtacagagcaggaaagtccaatccaaccttttatctccagaagggctttcaaacatatgtgctcaggaaaaaaccaccaggttcacttcttcctaaagcacatcagattgatagagaatttaaagtccagaaagccttgttttcaattggattccccgttcccaagcctatactgtactgcagtgatacttctgtcattggaacagaattttacgtaatggaacatgtgcagggtcgaatcttccgtgatttaacaattcctggacttagcccagcagaacgttcagccatatatgtggccacggtagaaacattggctcagttacattccttgaatatacagtcactgcagctggaaggatatggtataggtgctgggtactgcaaaagacaggtatcaacctggacaaagcaatatcaagctgcagctcatcaggacatccctgccatgcaacagctatcggagtggctaatgaagaacttgcccgataatgacaatgaagagaatttgattcatggagatttcagactagataacatagttttccaccctaaagagtgtcgagttatagcagtgctggattgggagctgtcaaccattggtcatcctttgtcagacttagctcatttttccctgttctacttttggccaaggacagttccaatgataaatcaaggttcttatagtgaaaactcagggataccatcaatggaagaactgatttcaatatattgccgctgcaggggaattaattctattcttcctaactggaatttctttcttgccctttcatattttaagatggctggaatagcacagggagtatatagcagatatcttctgggaaataattcatctgaggatagctttttatttgccaatattgtgcaacctctggcagaaactggactacaactctccaaacgaactttcagtactgtactaccacagattgatactactggacagttgtttgtacagactcggaaaggtcaggaagttcttattaaggtgaagcatttcatgaaacaacacattcttccagctgaaaaggaggtaactgagttctatgttcaaaatgaaaattcagtggacaagtggggaaaacctttagtgattgataaactcaaggaaatggccaaagtcgagggtctctggaacttgtttttgccagctgtcagcggactcagccacgtggactatgccttgattgctgaagaaacaggaaaatgcttttttgctccagatgtctttaactgccaagcaccagacacagggaatatggaggttctgcacctgtatggaagtgaggaacagaagaaacagtggcttgagcctcttcttcaagggaacattacctcttgcttctgtatgacagaacctgatgtagcttcaagtgatgccacgaatattgaatgcagcatccaacgagatgaagatagctatgtaattaacggcaaaaaatggtggagcagtggagctgggaatcccaagtgcaaaattgcaattgttttgggaagaactcaaaatacttctctctccaggtaattaaacaattctgattgagaaacctgtgtaggaatgagccagtcttcctcctatctaggtaatttacttaaaattcactgtttggactcacaaatcataatgtaagatatgagagtaaatgtcatatatttgtatttcacaagtattttctaacaggtgtttttggaaaacattatagggagtattgctgaacattcttcgctgtggaattttcagtattagaaagtgttgctaaattatcaaagctgtttggattaaattatcagacaaattttttcagacctgtgtaatgaagtgattagatgtttagatcaaaggcaataatcttgaaatgtttaattatatatataagttcccagttaccattgttgagcagtgagaagcttcaatcaaacaactcatttattttcaaatcattgtttctgttccagatcacagcctgcatcagactatgttggtgtacgtcttttacacagttcccattccagtcatcactgcttacatgactacatgaaaacatcaaaaagacaattgtgattctgcttattatctgttttatttttcttcttagcaaactttttctaatacaatttttcttttgactagacacaaacagcacagcatgattcttgttcccatgaacacacctggagtaaaaataataaggcctttgtcagtttttggctacacagataattttcatggaggacattttgagatccattttaatcaagtgcgagttcctgccacaaatctaatactaggtgaaggtaggggatttgaaatttcccaaggccgccttggacctggcagaatccaccactgtatgagaacagtaggtttggcggaacgcgctttgcagatcatgtgtgagcgggcaacacaaaggatagctttcaagaagaagttgtatgcacatgaggttgtggctcactggattgctgaaagccgcattgccattgagaagatccgcttgttgactctgaaagctgctcacagcatggacactctgggcagtgctggcgctaagaaagagattgcaatgatcaaagtggctgccccacgggctgtcagcaaaatcgttgactgggccatccagatggacctgacgaagttcatctttcagcaatcgcaacaatggagctgcgggaccaagccaaaagactgacagccaagatataaggagggtggcactgccacatcccactggcagaaactctcctttatacaaacttcattggctccaacatttgaatctcatatttttgtagcagtttgagcacagggttaattattcatttgtggtaaagattatagcatctattttgatcagtgggttttattatttcaagggtcacacagggttaagttcagtaagaaatgctgtagctgttgtcattcaatctagtgcctccttgaggccaggagttcaggaccagcctgggcaacatagcgagacccccattgctacaaaaaatttaaaaatgaaacaagtgtggtggcacatgcttgtagtcctagctacttgggaggctgaggcaggaggattgcttgagtctaggagtttgaggttacagtaagctgtgatcgtgacatggcctccagcctgggtgaccgagtgagactgtttctaaaaataaaaacaaaaaataaatttcttcttgaggtggggtggaggtggggagcaagaatttgacctggctctgatccctggtgtgttgtgtgggcctctttaacgtttgccactgagccttaacctcactgtacttcactgtacttcacacgcattggtgttaacattttaatcttagaagaccctgacccactgagggtttgttgtgagaattgctgaagccacgtagaagcaccttgaaatctgtaaaaccacaagaaagtactttataaaaggtatccttatttgaagtggataaatcttgtaactcgaaaagttgtgatttagaagacaggattgtttttgaacattaggaattaaaggctatatctggtccttaaaaaaatgtaatttg

SEQ ID NO: 280354 - DNA, 4063 bp, Homo sapiens
tgggactccggccgccaacgctcccagcccgggccttcgccgccgccttcgccccacgttgctcggctgggcccgcgaggggtacgtggggaggcacctcgccgctgccttcctagcccagagcccctggggacgtgcacccagcgcctcacagacagacaacgtctccgagactcccacaggccttcctcggagccgcttccggtgcgttcgcagacatcgctccccctcatcaaaaacctggctctttcggcttccttcctcgctgggccggctaaacccggccgcagcagcaccggggtgataagtgtccagggcaggaggccagcgatgttgccttgctaaccgggtatctaagagaaacagggtctttttattcttaggctcgacagtctgacggccctttttctgaacgggaccctgcaggtcttccgcctgctgttgcattaaatttgggggtggaagaggcttctgcgttgttccttacccgcaacgatgaccatggctttgccttctttaaaattgaggcctccaactctgacgctgactggagaattgaaacccgaacacacattgggctcttttggcacttgactagagctaaaacctcgggattcagcgggcaagcgttgctcagcaacggcgcgtaggctgtgtgcggttggctggagccagaccccaccccggcctcggcccatgctctagaggggacgttgccccaatcctgaaggacttcggcactcgagacctgtggatgccgcgttgctgtggcctgcgggggtgatcatgaagccaggtgctactggcgagtccgatttggccgaagtgctgccccagcacaagttcgacagcaagtccctggaggcctacctaaaccagcacttgtctggctttggggccgaacgtgaggctacgctgaccattgcccagtacagagcaggaaagtccaatccaaccttttatctccagaagggctttcaaacatatgtgctcaggaaaaaaccaccaggttcacttcttcctaaagcacatcagattgatagagaatttaaagtccagaaagccttgttttcaattggattccccgttcccaagcctatactgtactgcagtgatacttctgtcattggaacagaattttacgtaatggaacatgtgcagggtcgaatcttccgtgatttaacaattcctggacttagcccagcagaacgttcagccatatatgtggccacggtagaaacattggctcagttacattccttgaatatacagtcactgcagctggaaggatatggtataggtgctgggtactgcaaaagacaggtatcaacctggacaaagcaatatcaagctgcagctcatcaggacatccctgccatgcaacagctatcggagtggctaatgaagaacttgcccgataatgacaatgaagagaatttgattcatggagatttcagactagataacatagttttccaccctaaagagtgtcgagttatagcagtgctggattgggagctgtcaaccattggtcatcctttgtcagacttagctcatttttccctgttctacttttggccaaggacagttccaatgataaatcaaggttcttatagtgaaaactcagggataccatcaatggaagaactgatttcaatatattgccgctgcaggggaattaattctattcttcctaactggaatttctttcttgccctttcatattttaagatggctggaatagcacagggagtatatagcagatatcttctgggaaataattcatctgaggatagctttttatttgccaatattgtgcaacctctggcagaaactggactacaactctccaaacgaactttcagtactgtactaccacagattgatactactggacagttgtttgtacagactcggaaaggtcaggaagttcttattaaggtgaagcatttcatgaaacaacacattcttccagctgaaaaggaggtaactgagttctatgttcaaaatgaaaattcagtggacaagtggggaaaacctttagtgattgataaactcaaggaaatggccaaagtcgagggtctctggaacttgtttttgccagctgtcagcggactcagccacgtggactatgccttgattgctgaagaaacaggaaaatgcttttttgctccagatgtctttaactgccaagcaccagacacagggaatatggaggttctgcacctgtatggaagtgaggaacagaagaaacagtggcttgagcctcttcttcaagggaacattacctcttgcttctgtatgacagaacctgatgtagcttcaagtgatgccacgaatattgaatgcagcatccaacgagatgaagatagctatgtaattaacggcaaaaaatggtggagcagtggagctgggaatcccaagtgcaaaattgcaattgttttgggaagaactcaaaatacttctctctccaggtaattaaacaattctgattgagaaacctgtgtaggaatgagccagtcttcctcctatctaggtaatttacttaaaattcactgtttggactcacaaatcataatgtaagatatgagagtaaatgtcatatatttgtatttcacaagtattttctaacaggtgtttttggaaaacattatagggagtattgctgaacattcttcgctgtggaattttcagtattagaaagtgttgctaaattatcaaagctgtttggattaaattatcagacaaattttttcagacctgtgtaatgaagtgattagatgtttagatcaaaggcaataatcttgaaatgtttaattatatatataagttcccagttaccattgttgagcagtgagaagcttcaatcaaacaactcatttattttcaaatcattgtttctgttccagatcacagcctgcatcagactatgttggtgtacgtcttttacacagttcccattccagtcatcactgcttacatgactacatgaaaacatcaaaaagacaattgtgattctgcttattatctgttttatttttcttcttagcaaactttttctaatacaatttttcttttgactagacacaaacagcacagcatgattcttgttcccatgaacacacctggagtaaaaataataaggcctttgtcagtttttggctacacagataattttcatggaggacattttgagatccattttaatcaagtgcgagttcctgccacaaatctaatactaggtgaaggtaggggatttgaaatttcccaaggccgccttggacctggcagaatccaccactgtatgagaacagtaggtttggcggaacgcgctttgcagatcatgtgtgagcgggcaacacaaaggatagctttcaagaagaagttgtatgcacatgaggttgtggctcactggattgctgaaagccgcattgccattgagaagatccgcttgttgactctgaaagctgctcacagcatggacactctgggcagtgctggcgctaagaaagagattgcaatgatcaaagtggctgccccacgggctgtcagcaaaatcgttgactgggccatccaggtgtgcggaggtgctggtgtttcccaggattaccctctggctaacatgtatgctataacccgagttttgcgtttagcagatggacctgacgaagttcatctttcagcaatcgcaacaatggagctgcgggaccaagccaaaagactgacagccaagatataaggagggtggcactgccacatcccactggcagaaactctcctttatacaaacttcattggctccaacatttgaatctcatatttttgtagcagtttgagcagcgttggccaacgctctcacaagttatttggacacacaggcaactgagcaatgcaaggggtgtcacagtaataaggaaaggaataagaataggaagtaaaaatctttaggttttcttgtttcgtagttgttcttgggtaattttcgattatttaggtgtttgcctgctagtttcattttaaagacagggtcttcttaaagatcggctatcaacttcagaaatag

SEQ ID NO: 280355 - DNA, 2529 bp, Homo sapiens
tgggactccggccgccaacgctcccagcccgggccttcgccgccgccttcgccccacgttgctcggctgggcccgcgaggggtacgtggggaggcacctcgccgctgccttcctagcccagagcccctggggacgtgcacccagcgcctcacagacagacaacgtctccgagactcccacaggccttcctcggagccgcttccggtgcgttcgcagacatcgctccccctcatcaaaaacctggctctttcggcttccttcctcgctgggccggctaaacccggccgcagcagcaccggggtgataagtgtccagggcaggaggccagcgatgttgccttgctaaccgggtatctaagagaaacagggtctttttattcttaggctcgacagtctgacggccctttttctgaacgggaccctgcaggtcttccgcctgctgttgcattaaatttgggggtggaagaggcttctgcgttgttccttacccgcaacgatgaccatggctttgccttctttaaaattgaggcctccaactctgacgctgactggagaattgaaacccgaacacacattgggctcttttggcacttgactagagctaaaacctcgggattcagcgggcaagcgttgctcagcaacggcgcgtaggctgtgtgcggttggctggagccagaccccaccccggcctcggcccatgctctagaggggacgttgccccaatcctgaaggacttcggcactcgagacctgtggatgccgcgttgctgtggcctgcgggggtgatcatgaagccaggtgctactggcgagtccgatttggccgaagtgctgccccagcacaagttcgacagcaagtccctggaggcctacctaaaccagcacttgtctggctttggggccgaacgtgaggctacgctgaccattgcccagtacagagcaggaaagtccaatccaaccttttatctccagaagggctttcaaacatatgtgctcaggaaaaaaccaccaggttcacttcttcctaaagcacatcagattgatagagaatttaaagtccagaaagccttgttttcaattggattccccgttcccaagcctatactgtactgcagtgatacttctgtcattggaacagaattttacgtaatggaacatgtgcagggtcgaatcttccgtgatttaacaattcctggacttagcccagcagaacgttcagccatatatgtggccacggtagaaacattggctcagttacattccttgaatatacagtcactgcagctggaaggatatggtataggtgctgggtactgcaaaagacaggtatcaacctggacaaagcaatatcaagctgcagctcatcaggacatccctgccatgcaacagctatcggagtggctaatgaagaacttgcccgataatgacaatgaagagaatttgattcatggagatttcagactagataacatagttttccaccctaaagagtgtcgagttatagcagtgctggattgggagctgtcaaccattggtcatcctttgtcagacttagctcatttttccctgttctacttttggccaaggacagttccaatgataaatcaaggttcttatagtgaaaactcagggataccatcaatggaagaactgatttcaatatattgccgctgcaggggaattaattctattcttcctaactggaatttctttcttgccctttcatattttaagatggctggaatagcacagggagtatatagcagatatcttctgggaaataattcatctgaggatagctttttatttgccaatattgtgcaacctctggcagaaactggactacaactctccaaacgaactttcagtactgtactaccacagattgatactactggacagttgtttgtacagactcggaaaggtcaggaagttcttattaaggtgaagcatttcatgaaacaacacattcttccagctgaaaaggaggtaactgagttctatgttcaaaatgaaaattcagtggacaagtggggaaaacctttagtgattgataaactcaaggaaatggccaaagtcgagggtctctggaacttgtttttgccagctgtcagcggactcagccacgtggactatgccttgattgctgaagaaacaggaaaatgcttttttgctccagatgtctttaactgccaagcaccagacacagggaatatggaggttctgcacctgtatggaagtgaggaacagaagaaacagtggcttgagcctcttcttcaagggaacattacctcttgcttctgtatgacagaacctgatgtagcttcaagtgatgccacgaatattgaatgcagcatccaacgagatgaagatagctatgtaattaacggcaaaaaatggtggagcagtgcaaagaaaagaaggctctgaagaaagacaccacatagaagaattgctttcattatgtaaaaaccgggtgccaacttttttaaatgactctttttatcattaaagttacttaaaaagttccaa

SEQ ID NO: 280356 - DNA, 1635 bp, Homo sapiens
  misc_feature (1502)..(1502): n is a, c, g, or t
  misc_feature (1505)..(1505): n is a, c, g, or t
tgggactccggccgccaacgctcccagcccgggccttcgccgccgccttcgccccacgttgctcggctgggcccgcgaggggtacgtggggaggcacctcgccgctgccttcctagcccagagcccctggggacgtgcacccagcgcctcacagacagacaacgtctccgagactcccacaggccttcctcggagccgcttccggtgcgttcgcagacatcgctccccctcatcaaaaacctggctctttcggcttccttcctcgctgggccggctaaacccggccgcagcagcaccggggtgataagtgtccagggcaggaggccagcgatgttgccttgctaaccgggtatctaagagaaacagggtctttttattcttaggctcgacagtctgacggccctttttctgaacgggaccctgcaggtcttccgcctgctgttgcattaaatttgggggtggaagaggcttctgcgttgttccttacccgcaacgatgaccatggctttgccttctttaaaattgaggcctccaactctgacgctgactggagaattgaaacccgaacacacattgggctcttttggcacttgactagagctaaaacctcgggattcagcgggcaagcgttgctcagcaacggcgcgtaggctgtgtgcggttggctggagccagaccccaccccggcctcggcccatgctctagaggggacgttgccccaatcctgaaggacttcggcactcgagacctgtggatgccgcgttgctgtggcctgcgggggtgatcatgaagccaggtgctactggcgagtccgatttggccgaagtgctgccccagcacaagttcgacagcaagtccctggaggcctacctaaaccagcacttgtctggctttggggccgaacgtgaggctacgctgaccattgcccagtacagagcaggaaagtccaatccaaccttttatctccagaagggctttcaaacatatgtgctcaggaaaaaaccaccaggttcacttcttcctaaagcacatcagattgatagagaatttaaagtccagaaagccttgttttcaattggattccccgttcccaagcctatactgtactgcagtgatacttctgtcattggaacagaattttacgtaatggaacatgtgcagggtcgaatcttccgtgatttaacaattcctggacttagcccagcagaacgttcagccatatatgtggccacggtagaaacattggctcagttacattccttgaatatacagtcactgcagctggaaggatatggtataggtgctgggtactgcaaaagacaggtatcaacctggacaaagcaatatcaagctgcagctcatcaggacatccctgccatgcaacagctatcggagtggctaatgaagaacttgcccgataatgacaatgaagagaatttgattcatggagatttcagactagataacatagttttccaccctaaagagtgttcgagttatangcngtgctggatggggagcctgcaaccatggtcctccttggcgacttgtcaatttccgttctacttgggcccggccgtccctggtacacacggttcctcggcaaccggggtcccccaggcgcaacgcgtccta

SEQ ID NO: 280357 - DNA, 3920 bp, Homo sapiens
tgggactccggccgccaacgctcccagcccgggccttcgccgccgccttcgccccacgttgctcggctgggcccgcgaggggtacgtggggaggcacctcgccgctgccttcctagcccagagcccctggggacgtgcacccagcgcctcacagacagacaacgtctccgagactcccacaggccttcctcggagccgcttccggtgcgttcgcagacatcgctccccctcatcaaaaacctggctctttcggcttccttcctcgctgggccggctaaacccggccgcagcagcaccggggtgataagtgtccagggcaggaggccagcgatgttgccttgctaaccgggtatctaagagaaacagggtctttttattcttaggctcgacagtctgacggccctttttctgaacgggaccctgcaggtcttccgcctgctgttgcattaaatttgggggtggaagaggcttctgcgttgttccttacccgcaacgatgaccatggctttgccttctttaaaattgaggcctccaactctgacgctgactggagaattgaaacccgaacacacattgggctcttttggcacttgactagagctaaaacctcgggattcagcgggcaagcgttgctcagcaacggcgcgtaggctgtgtgcggttggctggagccagaccccaccccggcctcggcccatgctctagaggggacgttgccccaatcctgaaggacttcggcactcgagacctgtggatgccgcgttgctgtggcctgcgggggtgatcatgaagccaggtgctactggcgagtccgatttggccgaagtgctgccccagcacaagttcgacagcaagtccctggaggcctacctaaaccagcacttgtctggctttggggccgaacgtgaggctacgctgaccattgcccagtacagagcaggaaagtccaatccaaccttttatctccagaagggctttcaaacatatgtgctcaggaaaatccagaaagccttgttttcaattggattccccgttcccaagcctatactgtactgcagtgatacttctgtcattggaacagaattttacgtaatggaacatgtgcagggtcgaatcttccgtgatttaacaattcctggacttagcccagcagaacgttcagccatatatgtggccacggtagaaacattggctcagttacattccttgaatatacagtcactgcagctggaaggatatggtataggtgctgggtactgcaaaagacaggtatcaacctggacaaagcaatatcaagctgcagctcatcaggacatccctgccatgcaacagctatcggagtggctaatgaagaacttgcccgataatgacaatgaagagaatttgattcatggagatttcagactagataacatagttttccaccctaaagagtgtcgagttatagcagtgctggattgggagctgtcaaccattggtcatcctttgtcagacttagctcatttttccctgttctacttttggccaaggacagttccaatgataaatcaaggttcttatagtgaaaactcagggataccatcaatggaagaactgatttcaatatattgccgctgcaggggaattaattctattcttcctaactggaatttctttcttgccctttcatattttaagatggctggaatagcacagggagtatatagcagatatcttctgggaaataattcatctgaggatagctttttatttgccaatattgtgcaacctctggcagaaactggactacaactctccaaacgaactttcagtactgtactaccacagattgatactactggacagttgtttgtacagactcggaaaggtcaggaagttcttattaaggtgaagcatttcatgaaacaacacattcttccagctgaaaaggaggtaactgagttctatgttcaaaatgaaaattcagtggacaagtggggaaaacctttagtgattgataaactcaaggaaatggccaaagtcgagggtctctggaacttgtttttgccagctgtcagcggactcagccacgtggactatgccttgattgctgaagaaacaggaaaatgcttttttgctccagatgtctttaactgccaagcaccagacacagggaatatggaggttctgcacctgtatggaagtgaggaacagaagaaacagtggcttgagcctcttcttcaagggaacattacctcttgcttctgtatgacagaacctgatgtagcttcaagtgatgccacgaatattgaatgcagcatccaacgagatgaagatagctatgtaattaacggcaaaaaatggtggagcagtggagctgggaatcccaagtgcaaaattgcaattgttttgggaagaactcaaaatacttctctctccagacacaaacagcacagcatgattcttgttcccatgaacacacctggagtaaaaataataaggcctttgtcagtttttggctacacagataattttcatggaggacattttgagatccattttaatcaagtgcgagttcctgccacaaatctaatactaggtgaaggtaggggatttgaaatttcccaaggccgccttggacctggcagaatccaccactgtatgagaacagtaggtttggcggaacgcgctttgcagatcatgtgtgagcgggcaacacaaaggatagctttcaagaagaagttgtatgcacatgaggttgtggctcactggattgctgaaagccgcattgccattgagaagatccgcttgttgactctgaaagctgctcacagcatggacactctgggcagtgctggcgctaagaaagagattgcaatgatcaaagtggctgccccacgggctgtcagcaaaatcgttgactgggccatccaggtgtgcggaggtgctggtgtttcccaggattaccctctggctaacatgtatgctataacccgagttttgcgtttagcagatggacctgacgaagttcatctttcagcaatcgcaacaatggagctgcgggaccaagccaaaagactgacagccaagatataaggagggtggcactgccacatcccactggcagaaactctcctttatacaaacttcattggctccaacatttgaatctcatatttttgtagcagtttgagcacagggttaattattcatttgtggtaaagattatagcatctattttgatcagtgggttttattatttcaagggtcacacagggttaagttcagtaagaaatgctgtagctgttgtcattcaatctagtgcctccttgaggccaggagttcaggaccagcctgggcaacatagcgagacccccattgctacaaaaaatttaaaaatgaaacaagtgtggtggcacatgcttgtagtcctagctacttgggaggctgaggcaggaggattgcttgagtctaggagtttgaggttacagtaagctgtgatcgtgacatggcctccagcctgggtgaccgagtgagactgtttctaaaaataaaaacaaaaaataaatttcttcttgaggtggggtggaggtggggagcaagaatttgacctggctctgatccctggtgtgttgtgtgggcctctttaacgtttgccactgagccttaacctcactgtacttcactgtacttcacacgcattggtgttaacattttaatcttagaagaccctgacccactgagggtttgttgtgagaattgctgaagccacgtagaagcaccttgaaatctgtaaaaccacaagaaagtactttataaaaggtatccttatttgaagtggataaatcttgtaactcgaaaagttgtgatttagaagacaggattgtttttgaacattaggaattaaaggctatatctggtccttaaaaaaatgtaatttg

SEQ ID NO: 280358 - DNA, 4466 bp, Homo sapiens
tgggactccggccgccaacgctcccagcccgggccttcgccgccgccttcgccccacgttgctcggctgggcccgcgaggggtacgtggggaggcacctcgccgctgccttcctagcccagagcccctggggacgtgcacccagcgcctcacagacagacaacgtctccgagactcccacaggccttcctcggagccgcttccggtgcgttcgcagacatcgctccccctcatcaaaaacctggctctttcggcttccttcctcgctgggccggctaaacccggccgcagcagcaccggggtgataagtgtccagggcaggaggccagcgatgttgccttgctaaccgggtatctaagagaaacagggtctttttattcttaggctcgacagtctgacggccctttttctgaacgggaccctgcaggtcttccgcctgctgttgcattaaatttgggggtggaagaggcttctgcgttgttccttacccgcaacgatgaccatggctttgccttctttaaaattgaggcctccaactctgacgctgactggagaattgaaacccgaacacacattgggctcttttggcacttgactagagctaaaacctcgggattcagcgggcaagcgttgctcagcaacggcgcgtaggctgtgtgcggttggctggagccagaccccaccccggcctcggcccatgctctagaggggacgttgccccaatcctgaaggacttcggcactcgagacctgtggatgccgcgttgctgtggcctgcgggggtgatcatgaagccaggtgctactggcgagtccgatttggccgaagtgctgccccagcacaagttcgacagcaagtccctggaggcctacctaaaccagcacttgtctggctttggggccgaacgtgaggctacgctgaccattgcccagtacagagcaggaaagtccaatccaaccttttatctccagaagggctttcaaacatatgtgctcaggaaaaaaccaccaggttcacttcttcctaaagcacatcagattgatagagaatttaaagtccagaaagccttgttttcaattggattccccgttcccaagcctatactgtactgcagtgatacttctgtcattggaacagaattttacgtaatggaacatgtgcagggtcgaatcttccgtgatttaacaattcctggacttagcccagcagaacgttcagccatatatgtggccacggtagaaacattggctcagttacattccttgaatatacagtcactgcagctggaaggatatggtataggtgctgggtactgcaaaagacaggtatcaacctggacaaagcaatatcaagctgcagctcatcaggacatccctgccatgcaacagctatcggagtggctaatgaagaacttgcccgataatgacaatgaagagaatttgattcatggagatttcagactagataacatagttttccaccctaaagagtgtcgagttatagcagtgctggattgggagctgtcaaccattggtcatcctttgtcagacttagctcatttttccctgttctacttttggccaaggacagttccaatgataaatcaaggttcttatagtgaaaactcagggataccatcaatggaagaactgatttcaatatattgccgctgcaggggaattaattctattcttcctaactggaatttctttcttgccctttcatattttaagatggctggaatagcacagggagtatatagcagatatcttctgggaaataattcatctgaggatagctttttatttgccaatattgtgcaacctctggcagaaactggactacaactctccaaacgaactttcagtactgtactaccacagattgatactactggacagttgtttgtacagactcggaaaggtcaggaagttcttattaaggtgaagcatttcatgaaacaacacattcttccagctgaaaagcagctgtcagcggactcagccacgtggactatgccttgattgctgaagaaacaggaaaatgcttttttgctccagatgtctttaactgccaagcaccagacacagggaatatggaggttctgcacctgtatggaagtgaggaacagaagaaacagtggcttgagcctcttcttcaagggaacattacctcttgcttctgtatgacagaacctgatgtagcttcaagtgatgccacgaatattgaatgcagcatccaacgagatgaagatagctatgtaattaacggcaaaaaatggtggagcagtggagctgggaatcccaagtgcaaaattgcaattgttttgggaagaactcaaaatacttctctctccaggtaattaaacaattctgattgagaaacctgtgtaggaatgagccagtcttcctcctatctaggtaatttacttaaaattcactgtttggactcacaaatcataatgtaagatatgagagtaaatgtcatatatttgtatttcacaagtattttctaacaggtgtttttggaaaacattatagggagtattgctgaacattcttcgctgtggaattttcagtattagaaagtgttgctaaattatcaaagctgtttggattaaattatcagacaaattttttcagacctgtgtaatgaagtgattagatgtttagatcaaaggcaataatcttgaaatgtttaattatatatataagttcccagttaccattgttgagcagtgagaagcttcaatcaaacaactcatttattttcaaatcattgtttctgttccagatcacagcctgcatcagactatgttggtgtacgtcttttacacagttcccattccagtcatcactgcttacatgactacatgaaaacatcaaaaagacaattgtgattctgcttattatctgttttatttttcttcttagcaaactttttctaatacaatttttcttttgactagacacaaacagcacagcatgattcttgttcccatgaacacacctggagtaaaaataataaggcctttgtcagtttttggctacacagataattttcatggaggacattttgagatccattttaatcaagtgcgagttcctgccacaaatctaatactaggtgaaggtaggggatttgaaatttcccaaggccgccttggacctggcagaatccaccactgtatgagaacagtaggtttggcggaacgcgctttgcagatcatgtgtgagcgggcaacacaaaggatagctttcaagaagaagttgtatgcacatgaggttgtggctcactggattgctgaaagccgcattgccattgagaagatccgcttgttgactctgaaagctgctcacagcatggacactctgggcagtgctggcgctaagaaagagattgcaatgatcaaagtggctgccccacgggctgtcagcaaaatcgttgactgggccatccaggtgtgcggaggtgctggtgtttcccaggattaccctctggctaacatgtatgctataacccgagttttgcgtttagcagatggacctgacgaagttcatctttcagcaatcgcaacaatggagctgcgggaccaagccaaaagactgacagccaagatataaggagggtggcactgccacatcccactggcagaaactctcctttatacaaacttcattggctccaacatttgaatctcatatttttgtagcagtttgagcacagggttaattattcatttgtggtaaagattatagcatctattttgatcagtgggttttattatttcaagggtcacacagggttaagttcagtaagaaatgctgtagctgttgtcattcaatctagtgcctccttgaggccaggagttcaggaccagcctgggcaacatagcgagacccccattgctacaaaaaatttaaaaatgaaacaagtgtggtggcacatgcttgtagtcctagctacttgggaggctgaggcaggaggattgcttgagtctaggagtttgaggttacagtaagctgtgatcgtgacatggcctccagcctgggtgaccgagtgagactgtttctaaaaataaaaacaaaaaataaatttcttcttgaggtggggtggaggtggggagcaagaatttgacctggctctgatccctggtgtgttgtgtgggcctctttaacgtttgccactgagccttaacctcactgtacttcactgtacttcacacgcattggtgttaacattttaatcttagaagaccctgacccactgagggtttgttgtgagaattgctgaagccacgtagaagcaccttgaaatctgtaaaaccacaagaaagtactttataaaaggtatccttatttgaagtggataaatcttgtaactcgaaaagttgtgatttagaagacaggattgtttttgaacattaggaattaaaggctatatctggtccttaaaaaaatgtaatttg

SEQ ID NO: 280359 - DNA, 4127 bp, Homo sapiens
tgggactccggccgccaacgctcccagcccgggccttcgccgccgccttcgccccacgttgctcggctgggcccgcgaggggtacgtggggaggcacctcgccgctgccttcctagcccagagcccctggggacgtgcacccagcgcctcacagacagacaacgtctccgagactcccacaggccttcctcggagccgcttccggtgcgttcgcagacatcgctccccctcatcaaaaacctggctctttcggcttccttcctcgctgggccggctaaacccggccgcagcagcaccggggtgataagtgtccagggcaggaggccagcgatgttgccttgctaaccgggtatctaagagaaacagggtctttttattcttaggctcgacagtctgacggccctttttctgaacgggaccctgcaggtcttccgcctgctgttgcattaaatttgggggtggaagaggcttctgcgttgttccttacccgcaacgatgaccatggctttgccttctttaaaattgaggcctccaactctgacgctgactggagaattgaaacccgaacacacattgggctcttttggcacttgactagagctaaaacctcgggattcagcgggcaagcgttgctcagcaacggcgcgtaggctgtgtgcggttggctggagccagaccccaccccggcctcggcccatgctctagaggggacgttgccccaatcctgaaggacttcggcactcgagacctgtggatgccgcgttgctgtggcctgcgggggtgatcatgaagccaggtgctactggcgagtccgatttggccgaagtgctgccccagcacaagttcgacagcaagtccctggaggcctacctaaaccagcacttgtctggctttggggccgaacgtgaggctacgctgaccattgcccagtacagagcaggaaagtccaatccaaccttttatctccagaagggctttcaaacatatgtgctcaggaaaaaaccaccaggttcacttcttcctaaagcacatcagattgatagagaatttaaagtccagaaagccttgttttcaattggattccccgttcccaagcctatactgtactgcagtgatacttctgtcattggaacagaattttacgtaatggaacatgtgcagggtcgaatcttccgtgatttaacaattcctggacttagcccagcagaacgttcagccatatatgtggccacggtagaaacattggctcagttacattccttgaatatacagtcactgcagctggaaggatatggtataggtgctgggtactgcaaaagacaggtatcaacctggacaaagcaatatcaagctgcagctcatcaggacatccctgccatgcaacagctatcggagtggctaatgaagaacttgcccgataatgacaatgaagagaatttgattcatggagatttcagactagataacatagttttccaccctaaagagtgtcgagttatagcagtgctggattgggagctgtcaaccattggtcatcctttgtcagacttagctcatttttccctgttctacttttggccaaggacagttccaatgataaatcaaggttcttatagtgaaaactcagggataccatcaatggaagaactgatttcaatatattgccgctgcaggggaattaattctattcttcctaactggaatttctttcttgccctttcatattttaagatggctggaatagcacagggagtatatagcagatatcttctgggaaataattcatctgaggatagctttttatttgccaatattgtgcaacctctggcagaaactggactacaactctccaaacgaactttcagtactgtactaccacagattgatactactggacagttgtttgtacagactcggaaaggtcaggaagttcttattaaggtgaagcatttcatgaaacaacacattcttccagctgaaaaggaggtaactgagttctatgttcaaaatgaaaattcagtggacaagtggggaaaacctttagtgattgataaactcaaggaaatggccaaagtcgagggtctctggaacttgtttttgccagctgtcagcggactcagccacgtggactatgccttgattgctgaagaaacaggaaaatgcttttttgctccagatgtctttaactgccaagcaccagacacagggaatatggaggttctgcacctgtatggaagtgaggaacagaagaaacagtggcttgagcctcttcttcaagggaacattacctcttgcttctgtatgacagaacctgatgtagcttcaagtgatgccacgaatattgaatgcagcatccaacgagatgaagatagctatgtaattaacggcaaaaaatggtggagcagtggagctgggaatcccaagtgcaaaattgcaattgttttgggaagaactcaaaatacttctctctccaggtaattaaacaattctgattgagaaacctgtgtaggaatgagccagtcttcctcctatctaggtaatttacttaaaattcactgtttggactcacaaatcataatgtaagatatgagagtaaatgtcatatatttgtatttcacaagtattttctaacaggtgtttttggaaaacattatagggagtattgctgaacattcttcgctgtggaattttcagtattagaaagtgttgctaaattatcaaagctgtttggattaaattatcagacaaattttttcagacctgtgtaatgaagtgattagatgtttagatcaaaggcaataatcttgaaatgtttaattatatatataagttcccagttaccattgttgagcagtgagaagcttcaatcaaacaactcatttattttcaaatcattgtttctgttccagatcacagcctgcatcagactatgttggtgtacgtcttttacacagttcccattccagtcatcactgcttacatgactacatgaaaacatcaaaaagacaattgtgattctgcttattatctgttttatttttcttcttagcaaactttttctaatacaatttttcttttgactagacacaaacagcacagcatgattcttgttcccatgaacacacctggagtaaaaataataaggcctttgtcagtttttggctacacagataattttcatggaggacattttgagatccattttaatcaagtgcgagttcctgccacaaatctaatactaggtgaaggtaggggatttgaaatttcccaaggccgccttggacctggcagaatccaccactgtatgagaacagtaggtttggcggaacgcgctttgcagatcatgtgtgagcgggcaacacaaaggatagctttcaagaagaagttgtatgcacatgaggttgtggctcactggattgctgaaagccgcattgccattgagaagatccgcttgttgactctgaaagctgctcacagcatggacactctgggcagtgctggcgctaagaaagagattgcaatgatcaaagtggctgccccacgggctgtcagcaaaatcgttgactgggccatccaggtgtgcggaggtgctggtgtttcccaggattaccctctggctaacatgtatgctataacccgagttttgcgtttagcagatggacctgacgaagttcatctttcagcaatcgcaacaatggagctgcgggaccaagccaaaagactgacagccaagatataaggagggtggcactgccacatcccactggcagaaactctcctttatacaaacttcattggctccaacatttgaatctcatatttttgtagcagtttgagcacagggttaattattcatttgtggtaaagattatagcatctattttgatcagtgggttttattatttcaagggtcacacagggttaagttcagtaagaaatgctgtagctgttgtcattcaatctagtgcctccttgaggccaggagttcaggaccagcctgggcaacatagcgagaccccatgggtactttcaaatgcaggggggggcccaggctggagcctaacaactggaggcgaggcggaggatgctgaactagagttggggtacgaaccggatcgctgggcccc

SEQ ID NO: 280360 - DNA, 2333 bp, Homo sapiens
tgggactccggccgccaacgctcccagcccgggccttcgccgccgccttcgccccacgttgctcggctgggcccgcgaggggtacgtggggaggcacctcgccgctgccttcctagcccagagcccctggggacgtgcacccagcgcctcacagacagacaacgtctccgagactcccacaggccttcctcggagccgcttccggtgcgttcgcagacatcgctccccctcatcaaaaacctggctctttcggcttccttcctcgctgggccggctaaacccggccgcagcagcaccggggtgataagtgtccagggcaggaggccagcgatgttgccttgctaaccgggtatctaagagaaacagggtctttttattcttaggctcgacagtctgacggccctttttctgaacgggaccctgcaggtcttccgcctgctgttgcattaaatttgggggtggaagaggcttctgcgttgttccttacccgcaacgatgaccatggctttgccttctttaaaattgaggcctccaactctgacgctgactggagaattgaaacccgaacacacattgggctcttttggcacttgactagagctaaaacctcgggattcagcgggcaagcgttgctcagcaacggcgcgtaggctgtgtgcggttggctggagccagaccccaccccggcctcggcccatgctctagaggggacgttgccccaatcctgaaggacttcggcactcgagacctgtggatgccgcgttgctgtggcctgcgggggtgatcatgaagccaggtgctactggcgagtccgatttggccgaagtgctgccccagcacaagttcgacagcaagtccctggaggcctacctaaaccagcacttgtctggctttggggccgaacgtgaggctacgctgaccattgcccagtacagagcaggaaagtccaatccaaccttttatctccagaagggctttcaaacatatgtgctcaggaaaaaaccaccaggttcacttcttcctaaagcacatcagattgatagagaatttaaagtccagaaagccttgttttcaattggattccccgttcccaagcctatactgtactgcagtgatacttctgtcattggaacagaattttacgtaatggaacatgtgcagggtcgaatcttccgtgatttaacaattcctggacttagcccagcagaacgttcagccatatatgtggccacggtagaaacattggctcagttacattccttgaatatacagtcactgcagctggaaggatatggtataggtgctgggtactgcaaaagacaggtatcaacctggacaaagcaatatcaagctgcagctcatcaggacatccctgccatgcaacagctatcggagtggctaatgaagaacttgcccgataatgacaatgaagagaatttgattcatggagatttcagactagataacatagttttccaccctaaagagtgtcgagttatagcagtgctggattgggagctgtcaaccattggtcatcctttgtcagacttagctcatttttccctgttctacttttggccaaggacagttccaatgataaatcaaggttcttatagtgaaaactcagggataccatcaatggaagaactgatttcaatatattgccgctgcaggggaattaattctattcttcctaactggaatttctttcttgccctttcatattttaagatggctggaatagcacagggagtatatagcagatatcttctgggaaataattcatctgaggatagctttttatttgccaatattgtgcaacctctggcagaaactggactacaactctccaaacgaactttcagtactgtactaccacagattgatactactggacagttgtttgtacagactcggaaaggtcaggaagttcttattaaggtgaagcatttcatgaaacaacacattcttccagctgaaaaggaggtaactgagttctatgttcaaaatgaaaattcagtggacaagtggggaaaacctttagtgattgataaactcaaggaaatggccaaagtcgagggtctctggaacttgtttttgccagctgtcagcggactcagccacgtggactatgccttgattgctgaagaaacaggaaaatgcttttttgctccagatgtctttaactgccaagcaccagtttactacattaattgaaaacataattttttctaatattttgatcagtgtttaaaatttctatatatgataagaatgtgtttttatacaaagttattgacttatgaatttagctataattttacttttcagtt

SEQ ID NO: 280361 - DNA, 910 bp, Homo sapiens
cctccgccggggctctgcccgctcgcctgctcgcctggtgggggagaggggagcggggccgacacaggactgcagttgacagcagataactgaaagctcggaaagcgaaaccgtggataagcaggggaactgtggcatcccatttaaaattgcttctgaagagaagcatgaggttacatctgtaatctccctgcagcagagtcaactgcataagaaaccaaaagacacacctgctccatgccagcctaagccaccacataaaaagtcagaccatctgctggaagaaccacatggagaggccctgagtcaacatggagaggaagaaggacttgactgaatccagccttccagctgtccctaccaaggtgccaggcatgagaatgaagctgtcttgaactctgaagaccagcttagccaccaggtaaatgccactaagtgacctcactcaatgtcatgtgggacggaagaatcaccccgccaaacccttcctgggtccctgacccagaaatttgtcagatgtaatggttgtgaaaagccattcaatttgggggcagttttgtatgcagcatagctagctggtatgatacaacagcctgcaattcaggcagcagcagcactaacaacgagtgaaatcctgcaggagcgaactcctttggggtgcctgcctaattgttttcttttctgagagtctcctccccagtatcccctaaaccaccatcctgcatctttctcccccactagcctccgtgggagacatatgacccacattgggccaggtggattctctccctcccaactcccttcctcccttccacagttgatgggagtagacatttgactagagctgggccaggcagatcctctctcccagatatgtgggaccaggaatcagaggtggctgatcattctg

SEQ ID NO: 280362 - DNA, 834 bp, Homo sapiens
cctccgccggggctctgcccgctcgcctgctcgcctggtgggggagaggggagcggggccgacacaggactgcagttgacagcagataactgaaagctcggaaagcgaaaccgtggataagcaggggaactgtggcatcccatttaaaattgcttctgaagagaagcatgaggttacatctgtaatctccctgcagcagagtcaactgcataagaaaccaaaagacacacctgctccatgccagcttcgataatttctttgtaccttcggcgaaagaagcccatctgaaaggcagaaagaaagagaagctgagttagaagtgctgaagaatcagccattgtgaccccaaggcagtctgtccctgggtaggtgtgacctgcactcacagggctggggaggcttggaggacccctcggattagagaaaacactggcaagaaaaacatcctgtggagacatttttcaaaatgcatggacttcctgcgggtgatattacgtaagctgtttgttccttctaaaatgcatctggtgtagtgttttccagactgtgtgctggggaataccagttactgagagctgttcaaaggtgtttgggagtaaaaaaaggtttcatggctgggcgcagtggctcacgcctgtaatcccagcactttgggaggctgagacaggcagaccacttgaggtcaggagtttgagagcagcctggccaacatggtgaaaccctgtctctactaaaaatacaaaaattagctgggcatggtggtgtgtgcctgtaatcccagctacttgggaggctggggcacgagaatcgcttgaacctgggaggcggaggttg

SEQ ID NO: 280363 - DNA, 709 bp, Homo sapiens
cctccgccggggctctgcccgctcgcctgctcgcctggtgggggagaggggagcggggccgacacaggactgcagttgacagcagataactgaaagctcggaaagcgaaaccgtggataagcaggggaactgtggcatcccatttaaaattgcttctgaagagaagcatgaggttacatctgtaatctccctgcagcagagtcaactgcataagaaaccaaaagacacacctgctccatgccagcctaagccaccacataaaaagtcagaccatctgctggaagaaccacatggagaggccctgagtcaacatggagaggaagaaggacttgactgaatccagccttccagctgtccctaccaaggtgccaggcatgagaatgaagctgtcttgaactctgaagaccagcttagccaccagatgccaaacactgagcaggctttgttctccacccacaaaccagaggctgtctcagcaggaaggagttggagttggagaaaaaggagaattaagaatctatctggcgatgtggattaaataaacaacaaattggcagattgtttttaaaaggccagctttccagggcatgattaactacgtttctcctgttcttcatctttatagtttctgtgggcctcaagcaacactttctgcattttcccctctcgccccctactcatcactccctgaaaggtaagtagagttggg

SEQ ID NO: 280364 - DNA, 903 bp, Homo sapiens
cctccgccggggctctgcccgctcgcctgctcgcctggtgggggagaggggagcggggccgacacagggttcctgaccaagctggtgcttctgcgtgtgttcctgcatgacttggtgtgtccccttctcttggatctactgcagttgacagcagataactgaaagctcggaaagcgaaaccgtggataagcaggggaactgtggcatcccatttaaaattgcttctgaagagaagcatgaggttacatctgtaatctccctgcagcagagtcaactgcataagaaaccaaaagacacacctgctccatgccagcttcgataatttctttgtaccttcggcgaaagaagcccatctgaaaggcagaaagaaagagaagctgagttagaagtgctgaagaatcagccattgtgaccccaaggcagtctgtccctgggtaggtgtgacctgcactcacagggctggggaggcttggaggacccctcggattagagaaaacactggcaagaaaaacatcctgtggagacatttttcaaaatgcatggacttcctgcgggtgatattacgtaagctgtttgttccttctaaaatgcatctggtgtagtgttttccagactgtgtgctggggaataccagttactgagagctgttcaaaggtgtttgggagtaaaaaaaggtttcatggctgggcgcagtggctcacgcctgtaatcccagcactttgggaggctgagacaggcagaccacttgaggtcaggagtttgagagcagcctggccaacatggtgaaaccctgtctctactaaaaatacaaaaattagctgggcatggtggtgtgtgcctgtaatcccagctacttgggaggctggggcacgagaatcgcttgaacctgggaggcggaggttg

SEQ ID NO: 280365 - DNA, 3243 bp, Homo sapiens
  misc_feature (2245)..(2245): n is a, c, g, or t
ttttttttgtttgcagccattttttattccaaacatgtatgtttttgtaaacctgacatttcccaaacagtgcaagtgaatcagaagtgactgcttagactttaatacacgtgacattgtgaggcagcacaacctccccccacccaccaaaattcctcagtggaaatgtacatggatgcatcagtaaagttctggaaatgcagatagcgtgggtgcctgccaagcaattaatcactcgtaaagcttttaaactcactctgccagtcacaccgtgcacattagaattaaaacaacaacatcaacaaagaaaaaaccttaacacagtctgaaatctagatcattgtgctataaagcattgcacgatgttgggaaatttgttcacttattccccccatgtgctgaaaattcagaagacatcctagaagtttcattttggccctactggctctgtattctcccttcagccactctttgaatattctccactgtgtatattattattctatatatcaaaatatcagctaaaagtgtgcatactaaagcatttctgaaatgatgctcactttctgccttttgtctactaaaggctccaagtgacaatcctttccagcacctctaaattttgagaagtttgagccaagtatacagttcaccagatgtacgtttcacacgtaacccagacataactgcatgcacctggccataatgccttacccaaaaataaaagtcataaataaccttttaaaaagccaccatgctagggttcaacaggtagcatacagcacacggatcgtctggggatctgctatgcttccgcatggaaaacaggatgttcccaggagtgctgttgggtttttgttttaaacctcattgcctttggctcaagggcagtagctacatgatttggtgaaggaggacttcctagtggatcttctacaaggtctaccatacctctgagtacccatgatgctgacagttttcctaaagaactgcctgaggaaacctcagtgctgagttattcggaatggatgcctgtcagttgccactaagccagtggaccctgcccctcctgctagtgtccccttgtttctaaacatcatggcctcttctttgtgacagctctatggcccacttggaggatgttccaaactctcctgagtcctatgtaaattaagcataagcaaaactttttttaaaaaaggggcactgttttactccatttttacaaaggtcctttttcatatttaaaaaccatttcagttctctgaacagttggttaaaaccacattgaagattcaactaaaagctgaaggaaactgaaataatactgctcaggagaatatcttataggattccacagtgaaaccatggaagcaggaaggggagaaagtagaacatactgtagaattttcaaataatattctggaagggtaacacagatgtactgatccaccccatctgcttcccctgagagcatagagagggcttctgagctgggaaggagcttgtgaactgcccaagttgagagagcgctaacgatatgcttgacttctctatcactgcacaaaatgcttaactccccagtccccgtagcccacctgctactcagcacgatcagaccagcagaggcatcatccttccccagacaggttcctggggaggctttcagtatctgctggtggtgatgccaaggctggttttcttaaaacctgcctttataaagtcttagtgacctcctgggtatacagctgctcatgtgggtccacccacgcagaatcaagcagaagcaaataggtcccagctctgagactgcccacaggagtctacccttctccagtggggctttgctggtgggcagaacatgggcctgcgaatcacccttctacactgtcaccaacgcacctacaccccggcaggaggcaagttagttgctctaagtgcatgtggccaaagctgttgatggtgctgttccagaaatatcacctaagaatcctaaatgattcattaaagaaaacatggcattatgaacaagagtccatcaaaggaaagctgcaaatggcatcccattcaaaaagtccacatgccactgcattttgccaccctgaggcaaaatgtccctgaagtgttctctggggaacctccagcaccttgcacagtgcctgacacacagcaggggcctcataaatggctgttaataagtgataaaacccacccaagactgcttttcttgctgcttttgataaanctcataagcgaactctgagtgacagctgctttctttgcctcgtcctgctccctgtagctacctctgtgcctccatcccacagttagatgcaacatccctgatttccaggatcagcttagttcatgccattgacccttgatttttttggtctattcccatgttcaccaggaagagaagcatgaggttacatctgtaatctccctgcagcagagtcaactgcataagaaaccaaaagacacacctgctccatgccaggttagtacccacccatcaccctcataattttgccaaaactttagatatgtttgtgagtattagccaagtatgtgtattaaaaatctgtcttcccagaagttgagtttgatgtctttttgacaatgttcacggactcccaacgtgttagcttccagtaaaaaaggtgctataagaaagacccttggttttatagattgtttcatccgcactggatgccatgtgtatgtagctggcactttggcaggctgtaataagccattaagactccgttagaccctgctcttagccccatgttttctgtcttattagatggttatccatcagtaggaatagcagccatagctgttaacagttattgagtgatcactatgggccaggtcagcgctgagcatgctacatccatcatctcattgccctttcagaaaatcacactgcactcaaaactaagcagcacagtgcatctgacaatatatctactgtcaaacagagagcttggatactgaaggccgtaactcagcactcacacattcagggggtggggaggggcagtgttctgctcagatcctttgcatcatttcttttgcatcatttccctgtgtctcccctggctgaggatgcatctgtggttgtcctttagaggactgtcctgagctactggagccattacgccagcaggaattgagaataaaacgtttacatctcctctgggtgcagccagccccttgattcaggttgggacacct

SEQ ID NO: 280366 - DNA, 3152 bp, Homo sapiens
  misc_feature (2245)..(2245): n is a, c, g, or t
ttttttttgtttgcagccattttttattccaaacatgtatgtttttgtaaacctgacatttcccaaacagtgcaagtgaatcagaagtgactgcttagactttaatacacgtgacattgtgaggcagcacaacctccccccacccaccaaaattcctcagtggaaatgtacatggatgcatcagtaaagttctggaaatgcagatagcgtgggtgcctgccaagcaattaatcactcgtaaagcttttaaactcactctgccagtcacaccgtgcacattagaattaaaacaacaacatcaacaaagaaaaaaccttaacacagtctgaaatctagatcattgtgctataaagcattgcacgatgttgggaaatttgttcacttattccccccatgtgctgaaaattcagaagacatcctagaagtttcattttggccctactggctctgtattctcccttcagccactctttgaatattctccactgtgtatattattattctatatatcaaaatatcagctaaaagtgtgcatactaaagcatttctgaaatgatgctcactttctgccttttgtctactaaaggctccaagtgacaatcctttccagcacctctaaattttgagaagtttgagccaagtatacagttcaccagatgtacgtttcacacgtaacccagacataactgcatgcacctggccataatgccttacccaaaaataaaagtcataaataaccttttaaaaagccaccatgctagggttcaacaggtagcatacagcacacggatcgtctggggatctgctatgcttccgcatggaaaacaggatgttcccaggagtgctgttgggtttttgttttaaacctcattgcctttggctcaagggcagtagctacatgatttggtgaaggaggacttcctagtggatcttctacaaggtctaccatacctctgagtacccatgatgctgacagttttcctaaagaactgcctgaggaaacctcagtgctgagttattcggaatggatgcctgtcagttgccactaagccagtggaccctgcccctcctgctagtgtccccttgtttctaaacatcatggcctcttctttgtgacagctctatggcccacttggaggatgttccaaactctcctgagtcctatgtaaattaagcataagcaaaactttttttaaaaaaggggcactgttttactccatttttacaaaggtcctttttcatatttaaaaaccatttcagttctctgaacagttggttaaaaccacattgaagattcaactaaaagctgaaggaaactgaaataatactgctcaggagaatatcttataggattccacagtgaaaccatggaagcaggaaggggagaaagtagaacatactgtagaattttcaaataatattctggaagggtaacacagatgtactgatccaccccatctgcttcccctgagagcatagagagggcttctgagctgggaaggagcttgtgaactgcccaagttgagagagcgctaacgatatgcttgacttctctatcactgcacaaaatgcttaactccccagtccccgtagcccacctgctactcagcacgatcagaccagcagaggcatcatccttccccagacaggttcctggggaggctttcagtatctgctggtggtgatgccaaggctggttttcttaaaacctgcctttataaagtcttagtgacctcctgggtatacagctgctcatgtgggtccacccacgcagaatcaagcagaagcaaataggtcccagctctgagactgcccacaggagtctacccttctccagtggggctttgctggtgggcagaacatgggcctgcgaatcacccttctacactgtcaccaacgcacctacaccccggcaggaggcaagttagttgctctaagtgcatgtggccaaagctgttgatggtgctgttccagaaatatcacctaagaatcctaaatgattcattaaagaaaacatggcattatgaacaagagtccatcaaaggaaagctgcaaatggcatcccattcaaaaagtccacatgccactgcattttgccaccctgaggcaaaatgtccctgaagtgttctctggggaacctccagcaccttgcacagtgcctgacacacagcaggggcctcataaatggctgttaataagtgataaaacccacccaagactgcttttcttgctgcttttgataaanctcataagcgaactctgagtgacagctgctttctttgcctcgtcctgctccctgtagctacctctgtgcctccatcccacagttagatgcaacatccctgatttccaggatcagcttagttcatgccattgacccttgatttttttggtctattcccatgttcaccaggaagagaagcatgaggttacatctgtaatctccctgcagcagagtcaactgcataagaaaccaaaagacacacctgctccatgccagcttcgataatttctttgtaccttcggcgaaagaagcccatctgaaaggcagaaagaaagagaagctgagttagaagtgctgaagaatcagccattgtgaccccaaggcagtctgtccctggcctaagccaccacataaaaagtcagaccatctgctggaagaaccacatggagaggccctgagtcaacatggagaggaagaaggacttgactgaatccagccttccagctgtccctaccaaggtgccaggcatgagaatgaagctgtcttgaactctgaagaccagcttagccaccagatgccaaacactgagcaggctttgttctccacccacaaaccagaggctgtctcagcaggaaggagttggagttggagaaaaaggagaattaagaatctatctggcgatgtggattaaataaacaacaaattggcagattgtttttaaaagagaagtatggactttggtgtcaggaagttgcagttatggtccctggtgctgttttggagctggggacacagtggaaacaaggaagagacagaccttcatcagctaaagcctccaataccattactgatgaatagagaggctctgaaggaaaaggactccgggtctctgaaaggagagtgtgaggcaaacaaatcatcctagaca

SEQ ID NO: 280367 - DNA, 3188 bp, Homo sapiens
  misc_feature (2190)..(2190): n is a, c, g, or t
ttttttttgtttgcagccattttttattccaaacatgtatgtttttgtaaacctgacatttcccaaacagtgcaagtgaatcagaagtgactgcttagactttaatacacgtgacattgtgaggcagcacaacctccccccacccaccaaaattcctcagtggaaatgtacatggatgcatcagtaaagttctggaaatgcagatagcgtgggtgcctgccaagcaattaatcactcgtaaagcttttaaactcactctgccagtcacaccgtgcacattagaattaaaacaacaacatcaacaaagaaaaaaccttaacacagtctgaaatctagatcattgtgctataaagcattgcacgatgttgggaaattttttggccctactggctctgtattctcccttcagccactctttgaatattctccactgtgtatattattattctatatatcaaaatatcagctaaaagtgtgcatactaaagcatttctgaaatgatgctcactttctgccttttgtctactaaaggctccaagtgacaatcctttccagcacctctaaattttgagaagtttgagccaagtatacagttcaccagatgtacgtttcacacgtaacccagacataactgcatgcacctggccataatgccttacccaaaaataaaagtcataaataaccttttaaaaagccaccatgctagggttcaacaggtagcatacagcacacggatcgtctggggatctgctatgcttccgcatggaaaacaggatgttcccaggagtgctgttgggtttttgttttaaacctcattgcctttggctcaagggcagtagctacatgatttggtgaaggaggacttcctagtggatcttctacaaggtctaccatacctctgagtacccatgatgctgacagttttcctaaagaactgcctgaggaaacctcagtgctgagttattcggaatggatgcctgtcagttgccactaagccagtggaccctgcccctcctgctagtgtccccttgtttctaaacatcatggcctcttctttgtgacagctctatggcccacttggaggatgttccaaactctcctgagtcctatgtaaattaagcataagcaaaactttttttaaaaaaggggcactgttttactccatttttacaaaggtcctttttcatatttaaaaaccatttcagttctctgaacagttggttaaaaccacattgaagattcaactaaaagctgaaggaaactgaaataatactgctcaggagaatatcttataggattccacagtgaaaccatggaagcaggaaggggagaaagtagaacatactgtagaattttcaaataatattctggaagggtaacacagatgtactgatccaccccatctgcttcccctgagagcatagagagggcttctgagctgggaaggagcttgtgaactgcccaagttgagagagcgctaacgatatgcttgacttctctatcactgcacaaaatgcttaactccccagtccccgtagcccacctgctactcagcacgatcagaccagcagaggcatcatccttccccagacaggttcctggggaggctttcagtatctgctggtggtgatgccaaggctggttttcttaaaacctgcctttataaagtcttagtgacctcctgggtatacagctgctcatgtgggtccacccacgcagaatcaagcagaagcaaataggtcccagctctgagactgcccacaggagtctacccttctccagtggggctttgctggtgggcagaacatgggcctgcgaatcacccttctacactgtcaccaacgcacctacaccccggcaggaggcaagttagttgctctaagtgcatgtggccaaagctgttgatggtgctgttccagaaatatcacctaagaatcctaaatgattcattaaagaaaacatggcattatgaacaagagtccatcaaaggaaagctgcaaatggcatcccattcaaaaagtccacatgccactgcattttgccaccctgaggcaaaatgtccctgaagtgttctctggggaacctccagcaccttgcacagtgcctgacacacagcaggggcctcataaatggctgttaataagtgataaaacccacccaagactgcttttcttgctgcttttgataaanctcataagcgaactctgagtgacagctgctttctttgcctcgtcctgctccctgtagctacctctgtgcctccatcccacagttagatgcaacatccctgatttccaggatcagcttagttcatgccattgacccttgatttttttggtctattcccatgttcaccaggaagagaagcatgaggttacatctgtaatctccctgcagcagagtcaactgcataagaaaccaaaagacacacctgctccatgccaggttagtacccacccatcaccctcataattttgccaaaactttagatatgtttgtgagtattagccaagtatgtgtattaaaaatctgtcttcccagaagttgagtttgatgtctttttgacaatgttcacggactcccaacgtgttagcttccagtaaaaaaggtgctataagaaagacccttggttttatagattgtttcatccgcactggatgccatgtgtatgtagctggcactttggcaggctgtaataagccattaagactccgttagaccctgctcttagccccatgttttctgtcttattagatggttatccatcagtaggaatagcagccatagctgttaacagttattgagtgatcactatgggccaggtcagcgctgagcatgctacatccatcatctcattgccctttcagaaaatcacactgcactcaaaactaagcagcacagtgcatctgacaatatatctactgtcaaacagagagcttggatactgaaggccgtaactcagcactcacacattcagggggtggggaggggcagtgttctgctcagatcctttgcatcatttcttttgcatcatttccctgtgtctcccctggctgaggatgcatctgtggttgtcctttagaggactgtcctgagctactggagccattacgccagcaggaattgagaataaaacgtttacatctcctctgggtgcagccagccccttgattcaggttgggacacct

SEQ ID NO: 280368 - DNA, 1151 bp, Homo sapiens
ctttggggccactattcattcaagtaagggtgacttgaacccaagcaccataataccactgcagtcgagctgttaaccaagacgaagtgactaacgggcaggcgcgtggctgattcacatcccaggtgggacggagcaggatgtgtaagatttcattacgctactcaaaacggcatgcaacttaacacttacaaaatatttatttctggaattttccatttaatattttcagactgcagttgacagcagataactgaaagctcggaaagcgaaaccgtggataagcaggggaactgtggcatcccatttaaaattgcttctgaagagaagcatgaggttacatctgtaatctccctgcagcagagtcaactgcataagaaaccaaaagacacacctgctccatgccaggttagtacccacccatcaccctcataattttgccaaaactttagatatgtttgtgagtattagccaagtatgtgtattaaaaatctgtcttcccagaagttgagtttgatgtctttttgacaatgttcacggactcccaacgtgttagcttccagtaaaaaaggtgctataagaaagacccttggttttatagattgtttcatccgcactggatgccatgtgtatgtagctggcactttggcaggctgtaataagccattaagactccgttagaccctgctcttagccccatgttttctgtcttattagatggttatccatcagtaggaatagcagccatagctgttaacagttattgagtgatcactatgggccaggtcagcgctgagcatgctacatccatcatctcattgccctttcagaaaatcacactgcactcaaaactaagcagcacagtgcatctgacaatatatctactgtcaaacagagagcttggatactgaaggccgtaactcagcactcacacattcagggggtggggaggggcagtgttctgctcagatcctttgcatcatttcttttgcatcatttccctgtgtctcccctggctgaggatgcatctgtggttgtcctttagaggactgtcctgagctactggagccattacgccagcaggaattgagaataaaacgtttacatctcctctgggtgcagccagccccttgattcaggttgggacacct

SEQ ID NO: 280369 - DNA, 1113 bp, Homo sapiens
cttgagtgaattatataactatttaatagaaataataaaacatcgatacaaatataaaagacataatcagtataaaaggcttatatttataaaaatactttaggtaacagttttcccctgagggttgaccatgcgtgttgcatccataaatattgctcggctctgtagctcactctccaaagttcagagttcatctttaaaggaagtggtgctggccccggtcgtgtgacctggccgaagtggctgcctcaggctggcacctgggcttgatagaatgaagaagagaacagcatcagtggggcctccgaaaaatctggagaagatttttttcttccaaatatggaagatacaaagaccaaggatgacaggctagtgatcaggtcatgtgactggtgtggcagctcactggtttttctggacccagtcccaactgtcttcattctctttccggttcttctcagcttcgataatttctttgtaccttcggcgaaagaagcccatctgaaaggcagaaagaaagagaagctgagttagaagtgctgaagaatcagccattgtgaccccaaggcagtctgtccctggcctaagccaccacataaaaagtcagaccatctgctggaagaaccacatggagaggccctgagtcaacatggagaggaagaaggacttgactgaatccagccttccagctgtccctaccaaggtgccaggcatgagaatgaagctgtcttgaactctgaagaccagcttagccaccagatgccaaacactgagcaggctttgttctccacccacaaaccagaggctgtctcagcaggaaggagttggagttggagaaaaaggagaattaagaatctatctggcgatgtggattaaataaacaacaaattggcagattgtttttaaaagagaagtatggactttggtgtcaggaagttgcagttatggtccctggtgctgttttggagctggggacacagtggaaacaaggaagagacagaccttcatcagctaaagcctccaataccattactgatgaatagagaggctctgaaggaaaaggactccgggtctctgaaaggagagtgtgaggcaaacaaatcatcctagaca

SEQ ID NO: 280370 - DNA, 448 bp, Homo sapiens
tattccatagcacggctcccacgcagctcactacagacatgaccagagcagcaggaaccaaagggagacccgcccattgtcactttcttaatctctgatctcttgagctgtttctggcaaagcctgccgtgtcttacatttgtctctctatccggattagatgttgctatatgaacacatcgggactgtgtctgcaggaaggagctccccattcgaggccttcacagtgtcacccacattcacctctttccacttaaacgtgtcccatgaatcttgtcataacagttttgtgttccttaactattttgtctgccatgtcatttatgatgtatataacctctttaatgcctgaaatcataagaataatcatcaaaggcaagagggttgtatattttcccgttggagacacatctggaatttgctgcaataaaataataataagaaagca

SEQ ID NO: 280371 - DNA, 1557 bp, Homo sapiens
tgtggtctatgaagaagtgatgaaaatagaaattagttttattttatgagccatgtgttataatacatagaaaaaaatgcaccaattacaaagcgggccacaaaaaggaataaacgtaaagccgacaacgcagtcactagggaaagggtgaagacacgggaaccacgcagcccgccgtccacgtgcaccgggtagccacggggccctagccgaacgacgcggacgcgaagtgggcgggcccggccaagccacgcctccgcgccagacgccgcagtagagcgggcagggcgctgcgcccaagagccacagacgcaagcccagtgccacaggccgcgggggcggggaggacggcgcccggggacagagaacatgggacgcagagcggtccaaggccccggcgccctggtgaggcccaaacctcccgccatgccccggccccaacgagacccaagccccctgtcccggcccagcgcccgcgggggacccaagccccagcctggtccacctcggaggcctctaggacccgggggcgcccggcggcccgcccggctcccacaaatagactcctgggcgggcgcctgagcccccaaaatagatcctcagggcccaaaagcagactcttcggcgggcgccatgggaccggcagaagctgggcgccgcggggccgcctcgcccgtacctccaccgttggtgcgcgtcgcgccctcactcttcctcgggagcgcgcgagccgcgggcgcggaggagcagctggcgcgcgcgggagtcacgctgtgcgtcaacgtctcccgccagcagcccggcccgcgcgcgcccggcgtggcagagctgcgcgtgcccgtgttcgacgacccggctgaggacctgctggcgcacctggagcccacgtgcgccgccatggaggccgcggtgcgcgccggcggcgcctgcctagtctactgcaagaacggccgcagccgctcggccgccgtctgcaccgcgtacctcatgcggcaccgcggcctcagcctggcgaaggccttccagatggtgaagagcgctcgcccggtagcagaaccgaacccgggcttctggtctcagctccagaagtatgaggaggccctccaggcccagtcctgcctgcagggagagcccccagccttagggttgggccctgaggcttgaagcttgaaggcctgctgcctggaggaaggatgtccctgcactgatacagaagctgtttctggcaaagcctgccgtgtcttacatttgtctctctatccggattagatgttgctatatgaacacatcgggactgtgtctgcaggaaggagctccccattcgaggccttcacagtgtcacccacattcacctctttccacttaaacgtgtcccatgaatcttgtcataacagttttgtgttccttaactattttgtctgccatgtcatttatgatgtatataacctctttaatgcctgaaatcataagaataatcatcaaaggcaagagggttgtatattttcccgttggagacacatctggaatttgctgcaataaaataataataagaaagca

SEQ ID NO: 280372 - DNA, 1809 bp, Homo sapiens
tgtggtctatgaagaagtgatgaaaatagaaattagttttattttatgagccatgtgttataatacatagaaaaaaatgcaccaattacaaagcgggccacaaaaaggaataaacgtaaagccgacaacgcagtcactagggaaagggtgaagacacgggaaccacgcagcccgccgtccacgtgcaccgggtagccacggggccctagccgaacgacgcggacgcgaagtgggcgggcccggccaagccacgcctccgcgccagacgccgcagtagagcgggcagggcgctgcgcccaagagccacagacgcaagcccagtgccacaggccgcgggggcggggaggacggcgcccggggacagagaacatgggacgcagagcggtccaaggccccggcgccctggtgaggcccaaacctcccgccatgccccggccccaacgagacccaagccccctgtcccggcccagcgcccgcgggggacccaagccccagcctggtccacctcggaggcctctaggacccgggggcgcccggcggcccgcccggctcccacaaatagactcctgggcgggcgcctgagcccccaaaatagatcctcagggcccaaaagcagactcttcggcgggcgccatgggaccggcagaagctgggcgccgcggggccgcctcgcccgtacctccaccgttggtgcgcgtcgcgccctcactcttcctcgggagcgcgcgagccgcgggcgcggaggagcagctggcgcgcgcgggagtcacgctgtgcgtcaacgtctcccgccagcagcccggcccgcgcgcgcccggcgtggcagagctgcgcgtgcccgtgttcgacgacccggctgaggacctgctggcgcacctggagcccacgtgcgccgccatggaggccgcggtgcgcgccggcggcgcctgcctagtctactgcaagaacggccgcagccgctcggccgccgtctgcaccgcgtacctcatgcggcaccgcggcctcagcctggcgaaggccttccaggtgggcgggcctttaggggggcggtgtttcgagaggggcgtgtcttccggggacgagttttccgggcggggccggcttcgggattgggacaggcacttccgggaggggcgggtctctctcgtgagggcgggcttagggaagcagagaggcacttccgggttgggcggggcccactcttacagctgggcccgccttggcccctgctggccattagcgcgacttggggttattcagtacacttcttgtttgcagatggtgaagagcgctcgcccggtagcagaaccgaacccgggcttctggtctcagctccagaagtatgaggaggccctccaggcccagtcctgcctgcagggagagcccccagccttagggttgggccctgaggcttgaagcttgaaggcctgctgcctggaggaaggatgtccctgcactgatacagaagctgtttctggcaaagcctgccgtgtcttacatttgtctctctatccggattagatgttgctatatgaacacatcgggactgtgtctgcaggaaggagctccccattcgaggccttcacagtgtcacccacattcacctctttccacttaaacgtgtcccatgaatcttgtcataacagttttgtgttccttaactattttgtctgccatgtcatttatgatgtatataacctctttaatgcctgaaatcataagaataatcatcaaaggcaagagggttgtatattttcccgttggagacacatctggaatttgctgcaataaaataataataagaaagca

SEQ ID NO: 280373 - DNA, 1323 bp, Homo sapiens
tgtggtctatgaagaagtgatgaaaatagaaattagttttattttatgagccatgtgttataatacatagaaaaaaatgcaccaattacaaagcgggccacaaaaaggaataaacgtaaagccgacaacgcagtcactagggaaagggtgaagacacgggaaccacgcagcccgccgtccacgtgcaccgggtagccacggggccctagccgaacgacgcggacgcgaagtgggcgggcccggccaagccacgcctccgcgccagacgccgcagtagagcgggcagggcgctgcgcccaagagccacagacgcaagcccagtgccacaggccgcgggggcggggaggacggcgcccggggacagagaacatgggacgcagagcggtccaaggccccggcgccctggtgaggcccaaacctcccgccatgccccggccccaacgagacccaagccccctgtcccggcccagcgcccgcgggggacccaagccccagcctggtccacctcggaggcctctaggacccgggggcgcccggcggcccgcccggctcccacaaatagactcctgggcgggcgcctgagcccccaaaatagatcctcagggcccaaaagcagactcttcggcgggcgccatgggaccggcagaagctgggcgccgcggggccgcctcgcccgtacctccaccgttggtgcgcgtcgcgccctcactcttcctcgggagcgcgcgagccgcgggcgcggaggagcagctggcgcgcgcgggagtcacgctgtgcgtcaacgtctcccgccagcagcccggcccgcgcgcgcccggcgtggcagagctgcgcgtgcccgtgttcgacgacccggctgaggacctgctggcgcacctggagcccacgtgcgccgccatggaggccgcggtgcgcgccggcggcgcctgcctagtctactgcaagaacggccgcagccgctcggccgccgtctgcaccgcgtacctcatgcggcaccgcggcctcagcctggcgaaggccttccagatggtgaagagcgctcgcccggtagcagaaccgaacccgggcttctggtctcagctccagaagtatgaggaggccctccaggcccagtcctgcctgcagggagagcccccagccttagggttgggccctgaggcttgaagcttgaaggcctgctgcctggaggaaggatgtccctgcactgatacagaaggctggtctttacccttcttcctcactgtcatatcgagttttcctttgtgtgtgtgtgtgtgaaacatagtgcttttaattttatatttccggctgaggtgatgcaca

SEQ ID NO: 280374 - DNA, 991 bp, Homo sapiens
tattccatagcacggctcccacgcagctcactacagacatgaccagagcagcaggaaccaaagggagacccgcccattgtcactttcttaatctctgatctcttgaggtgatttgacagaattctgcaggaatttggtttcaaagccagtgtaaacaactatgccagtgatccactgagcatttcttttttttttttcttgagacggagtctcactctggtgcccaggctggagtgggcgccatcttggctcactgcaagctccgcctcccggcttcatgccattctcgtccttcagcctcctgagtggctgggattacaggcgcccgccaccacgcctagctaatttctttgtatttttggtagagacggggtttcactgtgttagccaggatggtctcaatctcctgacctcatgatcctcccgcctcggcctcccaaagcgctgggattacaggcgtgagccacctcgcccggccaatccactgagcatttctaagctgtgtatctcttaacaagacccagtcaggccctattggaacagggcttttaccacctaggcggaagctcagccattgaaatgacgatcaggtgcttcacggtctatttttccagataggcctaacagctggttttctgtttgcatttcagctgtttctggcaaagcctgccgtgtcttacatttgtctctctatccggattagatgttgctatatgaacacatcgggactgtgtctgcaggaaggagctccccattcgaggccttcacagtgtcacccacattcacctctttccacttaaacgtgtcccatgaatcttgtcataacagttttgtgttccttaactattttgtctgccatgtcatttatgatgtatataacctctttaatgcctgaaatcataagaataatcatcaaaggcaagagggttgtatattttcccgttggagacacatctggaatttgctgcaataaaataataataagaaagca

SEQ ID NO: 280375 - DNA, 1658 bp, Homo sapiens
tgtggtctatgaagaagtgatgaaaatagaaattagttttattttatgagccatgtgttataatacatagaaaaaaatgcaccaattacaaagcgggccacaaaaaggaataaacgtaaagccgacaacgcagtcactagggaaagggtgaagacacgggaaccacgcagcccgccgtccacgtgcaccgggtagccacggggccctagccgaacgacgcggacgcgaagtgggcgggcccggccaagccacgcctccgcgccagacgccgcagtagagcgggcagggcgctgcgcccaagagccacagacgcaagcccagtgccacaggccgcgggggcggggaggacggcgcccggggacagagaacatgggacgcagagcggtccaaggccccggcgccctggtgaggcccaaacctcccgccatgccccggccccaacgagacccaagccccctgtcccggcccagcgcccgcgggggacccaagccccagcctggtccacctcggaggcctctaggacccgggggcgcccggcggcccgcccggctcccacaaatagactcctgggcgggcgcctgagcccccaaaatagatcctcagggcccaaaagcagactcttcggcgggcgccatgggaccggcagaagctgggcgccgcggggccgcctcgcccgtacctccaccgttggtgcgcgtcgcgccctcactcttcctcgggagcgcgcgagccgcgggcgcggaggagcagctggcgcgcgcgggagtcacgctgtgcgtcaacgtctcccgccagcagcccggcccgcgcgcgcccggcgtggcagagctgcgcgtgcccgtgttcgacgacccggctgaggacctgctggcgcacctggagcccacgtgcgccgccatggaggccgcggtgcgcgccggcggcgcctgcctagtctactgcaagaacggccgcagccgctcggccgccgtctgcaccgtgatacccgtcaatgtcggacaaccggcgggtgctcagtccctggacgatgggtcattccagactggttgaagagagcgtctctgtccgcgggtatgcatgagactctgataccgcggcgtcttcgtggtctcagctccataagtatgcggagtccctcctgtctccgctccgtgcctgcatgggaggagtcgccccagtccttcgggtttggtgcgcccttggaagtggccgttgcacaggcgtttgcatatggccatgacctgcactttgtgatggacagggaagttggtcccctttgtcgatctcgtaataccatgataggactagtatattcgttggtcaagaagactctgactcgtgtcttacatttgtctctctatccggattagatgttgctatatgaacacatcgggactgtgtctgcaggaaggagctccccattcgaggccttcacagtgtcacccacattcacctctttccacttaaacgtgtcccatgaatcttgtcataacagttttgtgttccttaactattttgtctgccatgtcatttatgatgtatataacctctttaatgcctgaaatcataagaataatcatcaaaggcaagagggttgtatattttcccgttggagacacatctggaatttgctgcaataaaataataataagaaagca

SEQ ID NO: 280376 - DNA, 1785 bp, Homo sapiens
tgtggtctatgaagaagtgatgaaaatagaaattagttttattttatgagccatgtgttataatacatagaaaaaaatgcaccaattacaaagcgggccacaaaaaggaataaacgtaaagccgacaacgcagtcactagggaaagggtgaagacacgggaaccacgcagcccgccgtccacgtgcaccgggtagccacggggccctagccgaacgacgcggacgcgaagtgggcgggcccggccaagccacgcctccgcgccagacgccgcagtagagcgggcagggcgctgcgcccaagagccacagacgcaagcccagtgccacaggccgcgggggcggggaggacggcgcccggggacagagaacatgggacgcagagcggtccaaggccccggcgccctggtgaggcccaaacctcccgccatgccccggccccaacgagacccaagccccctgtcccggcccagcgcccgcgggggacccaagccccagcctggtccacctcggaggcctctaggacccgggggcgcccggcggcccgcccggctcccacaaatagactcctgggcgggcgcctgagcccccaaaatagatcctcagggcccaaaagcagactcttcggcgggcgccatgggaccggcagaagctgggcgccgcggggccgcctcgcccgtacctccaccgttggtgcgcgtcgcgccctcactcttcctcgggagcgcgcgagccgcgggcgcggaggagcagctggcgcgcgcgggagtcacgctgtgcgtcaacgtctcccgccagcagcccggcccgcgcgtgcccgtgttcgacgacccggctgaggacctgctggcgcacctggagcccacgtgcgccgccatggaggccgcggtgcgcgccggcggcgcctgcctagtctactgcaagaacggccgcagccgctcggccgccgtctgcaccgcgtacctcatgcggcaccgcggcctcagcctggcgaaggccttccaggtgggcgggcctttaggggggcggtgtttcgagaggggcgtgtcttccggggacgagttttccgggcggggccggcttcgggattgggacaggcacttccgggaggggcgggtctctctcgtgagggcgggcttagggaagcagagaggcacttccgggttgggcggggcccactcttacagctgggcccgccttggcccctgctggccattagcgcgacttggggttattcagtacacttcttgtttgcagatggtgaagagcgctcgcccggtagcagaaccgaacccgggcttctggtctcagctccagaagtatgaggaggccctccaggcccagtcctgcctgcagggagagcccccagccttagggttgggccctgaggcttgaagcttgaaggcctgctgcctggaggaaggatgtccctgcactgatacagaagctgtttctggcaaagcctgccgtgtcttacatttgtctctctatccggattagatgttgctatatgaacacatcgggactgtgtctgcaggaaggagctccccattcgaggccttcacagtgtcacccacattcacctctttccacttaaacgtgtcccatgaatcttgtcataacagttttgtgttccttaactattttgtctgccatgtcatttatgatgtatataacctctttaatgcctgaaatcataagaataatcatcaaaggcaagagggttgtatattttcccgttggagacacatctggaatttgctgcaataaaataataataagaaagca

SEQ ID NO: 280377 - DNA, 1756 bp, Homo sapiens
tgtggtctatgaagaagtgatgaaaatagaaattagttttattttatgagccatgtgttataatacatagaaaaaaatgcaccaattacaaagcgggccacaaaaaggaataaacgtaaagccgacaacgcagtcactagggaaagggtgaagacacgggaaccacgcagcccgccgtccacgtgcaccgggtagccacggggccctagccgaacgacgcggacgcgaagtgggcgggcccggccaagccacgcctccgcgccagacgccgcagtagagcgggcagggcgctgcgcccaagagccacagacgcaagcccagtgccacaggccgcgggggcggggaggacggcgcccggggacagagaacatgggacgcagagcggtccaaggccccggcgccctggtgaggcccaaacctcccgccatgccccggccccaacgagacccaagccccctgtcccggcccagcgcccgcgggggacccaagccccagcctggtccacctcggaggcctctaggacccgggggcgcccggcggcccgcccggctcccacaaatagactcctgggcgggcgcctgagcccccaaaatagatcctcagggcccaaaagcagactcttcggcgggcgccatgggaccggcagaagctgggcgccgcggggccgcctcgcccgtacctccaccgttggtgcgcgtcgcgccctcactcttcctcgggagcgcgcgagccgcgggcgcggaggagcagctggcgcgcgcgggagtcacgctgtgcgtcaacgtctcccgccagcagcccggcccgcgcgcgcccggcgtggcagagctgcgcgtgcccgtgttcgacgacccggctgaggacctgctggcgcacctggagcccacgtgcgccgccatggaggccgcggtgcgcgccggcggcgcctgcctagtctactgcaagaacggccgcagccgctcggccgccgtctgcaccgcgtacctcatgcggcaccgcggcctcagcctggcgaaggccttccaggtgggcgggcctttaggggggcggtgtttcgagaggggcgtgtcttccggggacgagttttccgggcggggccggcttcgggattgggacaggcacttccgggaggggcgggtctctctcgtgagggcgggcttagggaagcagagaggcacttccgggttgggcggggcccactcttacagctgggcccgccttggcccctgctggccattagcgcgacttggggttattcagtacacttcttgtttgcagatggtgaagagcgctcgcccggtagcagaaccgaacccgggcttctggtctcagctccagaagtatgaggaggccctccaggcccagtcctgcctgcagggagagcccccagccttagggttgggccctgaggcttgaagcttgaaggcctgctgcctggaggaaggatgtccctgcactgatacagaagatgttgctatatgaacacatcgggactgtgtctgcaggaaggagctccccattcgaggccttcacagtgtcacccacattcacctctttccacttaaacgtgtcccatgaatcttgtcataacagttttgtgttccttaactattttgtctgccatgtcatttatgatgtatataacctctttaatgcctgaaatcataagaataatcatcaaaggcaagagggttgtatattttcccgttggagacacatctggaatttgctgcaataaaataataataagaaagca

SEQ ID NO: 280378 - DNA, 374 bp, Homo sapiens
gtgggttgaccgtggctgtgggttgaccgtggcttacgaataccatcgacacgctcaacatgcaggtggaccagtttgagagtgaagtggagtcactgtcagtgcagacacgcaagaagaagggcgacaaggataagcaggaccggattgagggcttgaagcggcacatcgagaagcaccgctaccacgtgcgcatgctagagaccatcctgcgcatgctggacaatgactccatcctcgttgacgccatccgcaagatcaaggacgacgttgagtactatgttgactcatcccaggaccccgacttcgaggagaacgagtttctctacgatgacctggacctcgaggacattcgtgaggccctggggctgatc

SEQ ID NO: 280379 - DNA, 4409 bp, Homo sapiens
  misc_feature (2360)..(2362): n is a, c, g, or t
  misc_feature (2868)..(2868): n is a, c, g, or t
  misc_feature (3348)..(3348): n is a, c, g, or t
  misc_feature (3369)..(3369): n is a, c, g, or t
agacgagaagagaggaggggaggcctcctccgccgccgccatcttggaccgggcccggtcagcttccgcggagccatcggcagacgccgcggcctcccttgagccccgacccccgtcgtcagaacaaccccgggcccactcccccaaccccacttccgcttcgcgccgctatcgcgatagcgcccgggcccggggcgcgagacaaaggcggcgggcgctcgcctcccccgcctgtcgcgatacgctcctcagcggcggcgccagctcctgtgcgtccgtctccaagagagtatgaagagagtgcgtctgtagggcagggaagatggcggacaagcgcaaactccaaggtgagattgatcgctgcctcaagaaggtgtccgagggcgtggagcagtttgaagatatttggcagaagctccacaatgcagccaacgcgaaccagaaagaaaagtatgaggctgacctaaagaaggagattaagaagctacaacggctgagggaccaaatcaagacatgggtagcgtccaacgagatcaaggacaagaggcagcttatagacaaccgcaagctcattgagacgcaaatggaacggttcaaagttgtggaacgagagaccaaaaccaaagcttacagcaaagagggcctgggcctggcccagaaggtagatcctgcccagaaggagaaggaagaggttggccagtggctcacgaataccatcgacacgctcaacatgcaggtggaccagtttgagagtgaagtggagtcactgtcagtgcagacacgcaagaagaagggcgacaaggataagcaggaccggattgagggcttgaagcggcacatcgagaagcaccgctaccacgtgcgcatgctagagaccatcctgcgcatgctggacaatgactccatcctcgttgacgccatccgcaagatcaaggacgacgttgagtactatgttgactcatcccaggaccccgacttcgaggagaacgagtttctctacgatgacctggacctcgaggacattccacaggcgctggtcgccacctccccccccagccacagccacatggaggatgagatcttcaaccagtccagcagcacgcccacctcaaccacctccagctctcccatcccgcccagcccagccaactgtaccacggaaaactctgaagatgataagaagaggggacgttccacagacagtgaagtcagccagtctccagccaaaaacggctccaagcctgtccacagcaaccagcaccctcagtccccagctgtgccgcccacctacccctccggccccccgcctgctgcctctgccttgagcaccactcctggcaacaatggggtccccgcccccgcagcacccccaagtgccctgggccccaaggccagtccagctcccagccacaactcgggcacccctgctccctatgcccaggctgtggccccaccagctcccagtgggcccagcacgacccagccccggccccccagcgtccagcctagcggaggcggaggcggcggcagcggaggcggagggagcagcagcagtagtaacagcagtgccggtggaggggctggcaagcagaatggcgccaccagttacagctcagttgtggcagacagcccggcagaggtggctttgagcagcagtgggggcaacaatgccagcagccaggccttgggccccccttccggcccccacaacccacctcccagcacctcgaaggaacccagtgcggcagccccaacgggggctgggggcgtggccccaggctcagggaacaactcagggggacccagcctcctggtgccactgcctgtgaatcctcccagctccccaacgcccagcttcagtgatgccaaggcagccggtgccctgctcaatgggcctccacagttcagcaccgccccagaaatcaaggcccctgagcctctgagctccttgaagtccatggcggaacgggcagccatcagctctggcattgaggaccctgtgccaacgctgcacctgaccgagcgagacatcatcctgagcagtacatcagcacctccggcctcagcccagccgcccctgcagctgtcagaggtgaacataccgctgtcgctgggtgtctgtccactgggccctgtgcccctcaccaaggagcagctctatcagcaggccatggaagaggccgcctggcaccacatgcctcacccctctgactctgagcgtattcggcagtacctcccccggaacccctgtccgacgcccccctaccaccaccagatgccacccccacactcggacactgtggaattctaccagcgcctgtcgaccgagacactcttcttcatcttctactatctggagnnncagcagggcccccggggcagcctcgggccccccggcttcgccgccaccgccgccgtcccccctcgggctggaggggtgagggcactaaggcacagtatctggcagccaaggccctaaagaagcagtcatggcgattccacaccaagtacatgatgtggttccagaggcacgaggagcccaagaccatcactgacgagtttgagcaggtgagggccccgccccctctcttcccgctgctagggttggggtagagtccccaggctccaggcagcccctgctggcctctgctcccttgcctccacctttcagctggcgcagtccctcagcctgaccaagtactcctccctctggctgtctgctcagcctggaacaccgccctctcatcctccacttggccagctcctaggcctcctgtaggtctcagcccaaatgtcccttcctcaaagaaaccttcctggagccacccagcccagtgcctcccctttgcagtgctgggcacactcgcntggggtgtgggattttcccagtatgtgtccctgcaccaggctgtgggctctgctgccgagggaccttgatggcccccacttcacctccaggtcccagcactcagcagggcaggggctcagtgccgaaactattttttttgaatgggcttctcaagttctaatactgggaaattcctgctgcttgcaaacactctggaaccaacctacctgggtttcagcccagtccagctgggcgactctaggcaagtcactcgaacctctgtgtctcaattaacttatctgtaaaatggggggagacacctacctaatgcagttgttatgaagattaaatgagttaataacatgtaagtacttaatggtgactgctacatagtcagtgtcatggattttttttttcaaattactttcagttggtgtgttctacagtgatgtttttttccaccaaatacttccctgatgccgagccccttcatggggatnaagtagtacaaggtccttgtnctcagagaactcagtcccctctcctggttctcccaggttgccatctttgaagcacttaagacattcatttagaacctaggtcctctcccattgtgtcctcagatgttaaccacagacttcctgtcctttcctggtttggcccaaaaccatcctccaagttagtacatttcagggcatccagtcattcagaaattcccacaccacttccgtcaccaataaaatgtccctgcagagtgcttggatttagactctgagactgttccattctctagaacaagggtgacagtacccactgcctcgaggtctttgtgaagattaaatgctaggctgtgcatcctgtactcacgtgagaggtgctcaaaagccacagccctcgaggaaacgaaggctgtgcactcacacctggggctggggccccgtctctggcagctggcttcggtggaacctctgcggccccctccgtttcctcctcgctgaagtggcatgataacatttcctacccaagaagaaccttgtgaggatggatgagagtgtgtgcgtgcagggcagctggcccggttgcctgacacatccacagccctaagaattgtcccctttgtctgttggtccggcccagatcccagaccacctcctcgtccactcactgaccgccttctcccccggccagggcacctacatctactttgactacgagaagtggggccagcggaagaaggaaggcttcacctttgagtaccgctacctggaggaccgggacctccagtgacaccggcccctccctctacccacccccttcccccgcatgctgatccccctgcccaggtgagggccctgccctggaagactggagggaggccccaagccacggggcatccccctctcccaggaagcagggagggggccgggaggttttcctctcagccccaccctgggggcccgggggcgagggctgccccctcctcccctccccagtgagggacattttttggtaaacctattttcattttggaaaatatttatgaataaatagttttatatga

SEQ ID NO: 280380 - DNA, 4105 bp, Homo sapiens
  misc_feature (2056)..(2058): n is a, c, g, or t
  misc_feature (2564)..(2564): n is a, c, g, or t
  misc_feature (3044)..(3044): n is a, c, g, or t
  misc_feature (3065)..(3065): n is a, c, g, or t
cccacgcgtccggggaagatggcggacaagcgcaaactccaaggtgagattgatcgctgcctcaagaaggtgtccgagggcgtggagcagtttgaagatatttggcagaagctccacaatgcagccaacgcgaaccagaaagaaaagtatgaggctgacctaaagaaggagattaagaagctacaacggctgagggaccaaatcaagacatgggtagcgtccaacgagatcaaggacaagaggcagcttatagacaaccgcaagctcattgagacgcaaatggaacggttcaaagttgtggaacgagagaccaaaaccaaagcttacagcaaagagggcctgggcctggcccagaaggtagatcctgcccagaaggagaaggaagaggttggccagtggctcacgaataccatcgacacgctcaacatgcaggtggaccagtttgagagtgaagtggagtcactgtcagtgcagacacgcaagaagaagggcgacaaggataagcaggaccggattgagggcttgaagcggcacatcgagaagcaccgctaccacgtgcgcatgctagagaccatcctgcgcatgctggacaatgactccatcctcgttgacgccatccgcaagatcaaggacgacgttgagtactatgttgactcatcccaggaccccgacttcgaggagaacgagtttctctacgatgacctggacctcgaggacattccacaggcgctggtcgccacctccccccccagccacagccacatggaggatgagatcttcaaccagtccagcagcacgcccacctcaaccacctccagctctcccatcccgcccagcccagccaactgtaccacggaaaactctgaagatgataagaagaggggacgttccacagacagtgaagtcagccagtctccagccaaaaacggctccaagcctgtccacagcaaccagcaccctcagtccccagctgtgccgcccacctacccctccggccccccgcctgctgcctctgccttgagcaccactcctggcaacaatggggtccccgcccccgcagcacccccaagtgccctgggccccaaggccagtccagctcccagccacaactcgggcacccctgctccctatgcccaggctgtggccccaccagctcccagtgggcccagcacgacccagccccggccccccagcgtccagcctagcggaggcggaggcggcggcagcggaggcggagggagcagcagcagtagtaacagcagtgccggtggaggggctggcaagcagaatggcgccaccagttacagctcagttgtggcagacagcccggcagaggtggctttgagcagcagtgggggcaacaatgccagcagccaggccttgggccccccttccggcccccacaacccacctcccagcacctcgaaggaacccagtgcggcagccccaacgggggctgggggcgtggccccaggctcagggaacaactcagggggacccagcctcctggtgccactgcctgtgaatcctcccagctccccaacgcccagcttcagtgatgccaaggcagccggtgccctgctcaatgggcctccacagttcagcaccgccccagaaatcaaggcccctgagcctctgagctccttgaagtccatggcggaacgggcagccatcagctctggcattgaggaccctgtgccaacgctgcacctgaccgagcgagacatcatcctgagcagtacatcagcacctccggcctcagcccagccgcccctgcagctgtcagaggtgaacataccgctgtcgctgggtgtctgtccactgggccctgtgcccctcaccaaggagcagctctatcagcaggccatggaagaggccgcctggcaccacatgcctcacccctctgactctgagcgtattcggcagtacctcccccggaacccctgtccgacgcccccctaccaccaccagatgccacccccacactcggacactgtggaattctaccagcgcctgtcgaccgagacactcttcttcatcttctactatctggagnnncagcagggcccccggggcagcctcgggccccccggcttcgccgccaccgccgccgtcccccctcgggctggaggggtgagggcactaaggcacagtatctggcagccaaggccctaaagaagcagtcatggcgattccacaccaagtacatgatgtggttccagaggcacgaggagcccaagaccatcactgacgagtttgagcaggtgagggccccgccccctctcttcccgctgctagggttggggtagagtccccaggctccaggcagcccctgctggcctctgctcccttgcctccacctttcagctggcgcagtccctcagcctgaccaagtactcctccctctggctgtctgctcagcctggaacaccgccctctcatcctccacttggccagctcctaggcctcctgtaggtctcagcccaaatgtcccttcctcaaagaaaccttcctggagccacccagcccagtgcctcccctttgcagtgctgggcacactcgcntggggtgtgggattttcccagtatgtgtccctgcaccaggctgtgggctctgctgccgagggaccttgatggcccccacttcacctccaggtcccagcactcagcagggcaggggctcagtgccgaaactattttttttgaatgggcttctcaagttctaatactgggaaattcctgctgcttgcaaacactctggaaccaacctacctgggtttcagcccagtccagctgggcgactctaggcaagtcactcgaacctctgtgtctcaattaacttatctgtaaaatggggggagacacctacctaatgcagttgttatgaagattaaatgagttaataacatgtaagtacttaatggtgactgctacatagtcagtgtcatggattttttttttcaaattactttcagttggtgtgttctacagtgatgtttttttccaccaaatacttccctgatgccgagccccttcatggggatnaagtagtacaaggtccttgtnctcagagaactcagtcccctctcctggttctcccaggttgccatctttgaagcacttaagacattcatttagaacctaggtcctctcccattgtgtcctcagatgttaaccacagacttcctgtcctttcctggtttggcccaaaaccatcctccaagttagtacatttcagggcatccagtcattcagaaattcccacaccacttccgtcaccaataaaatgtccctgcagagtgcttggatttagactctgagactgttccattctctagaacaagggtgacagtacccactgcctcgaggtctttgtgaagattaaatgctaggctgtgcatcctgtactcacgtgagaggtgctcaaaagccacagccctcgaggaaacgaaggctgtgcactcacacctggggctggggccccgtctctggcagctggcttcggtggaacctctgcggccccctccgtttcctcctcgctgaagtggcatgataacatttcctacccaagaagaaccttgtgaggatggatgagagtgtgtgcgtgcagggcagctggcccggttgcctgacacatccacagccctaagaattgtcccctttgtctgttggtccggcccagatcccagaccacctcctcgtccactcactgaccgccttctcccccggccagggcacctacatctactttgactacgagaagtggggccagcggaagaaggaaggcttcacctttgagtaccgctacctggaggaccgggacctccagtgacaccggcccctccctctacccacccccttcccccgcatgctgatccccctgcccaggtgagggccctgccctggaagactggagggaggccccaagccacggggcatccccctctcccaggaagcagggagggggccgggaggttttcctctcagccccaccctgggggcccgggggcgagggctgccccctcctcccctccccagtgagggacattttttggtaaacctattttcattttggaaaatatttatgaataaatagttttatatga

SEQ ID NO: 280381 - DNA, 3675 bp, Homo sapiens
aaattctccctgggggtaaggtaccagccctgtcctttatgggcttcttgttctaaagcatatccgtcccatatggttgctgctagtcacatgtggtgattagtaactagttaaaaatgaaaaattcagttcctccattacacttgccacatttcagatgttcagtggccaacagatatgcgcaaatagagtgtttccagcattgcaaagttctgttggatagcactgtttgccagatgttcccttctttgtgggtgaggactcttttggtgtgacttccctctgtattgaggctcttgttcctcagtatggggctgtttctgtctttacagtaagtgactactccagggttccctgccctgcacacgtagagtgggagcggcccgtggatcccagggaactgtgcttttcattgtaggccccctccctggaggggaagagggcaatctccgctggtatctcagaagtcttcttctgaggcataagcctctcttcccagggctcccctggtctcgctgtcaggccctaaggtatgtcttcccttggactaaagctccttggaactcccttttgacctcagtcttctctgggttccaggtaacttcctttaaaataaagacgctcctctcttgaagttttgggttcctgccctgatggtctatgtctccctgactctaaattaccaatccacttgctatgggattcctccatgagtgcagattggctccctcacagctgcggtacctttgcaccctcttatcttagtaagatttctgtcttctcccaggtctctcttgggtactgccttctgcccccaaatctctaagccttcttggtattagcttctttgggttaggagtgttatttccttttggtttaaggatcctgctctggaataaatgtcttggtggtttgagtcccttctacttggcattcagccctgtctgcatgagcgggttcagctcttcacagctttcggcatctctgctcgccgtcgttttcccccacccccaatctttcttctcctacctacagcttccacacacacacacacacacacacacacacacacacgcccttctctgtgagctgccagtttcatttgtctcctgacttgtctgagggatgacctctcctagccacctctgcccagcccctctgagtaggaagtgtgatttccagggctaatgcctccatcccagtcatcagctgtgtgcagcatgactgtcctgctctgaaaaacctttttgagtgtattctgggggaaggtactccatgctctaggaattttccacttcctgagtcagaggcacacaaaaaagtatgtaacttttcttgtttcaacaaacttatggggtcccctgttggccagacactatgctgggcagtcaagcgagcatcaggagaactggggctggtctcttgtcagatagcaaatgcttcttctctttaccagtcccacctacctcactatgctgactaggtccatgtctctgggtttttaccagccagggaatacgtgttaattcctctccaatctctcctagcagcgtccgtctccaagagagtatgaagagagtgcgtctgtagggcagggaagatggcggacaagcgcaaactccaaggtgagattgatcgctgcctcaagaaggtgtccgagggcgtggagcagtttgaagatatttggcagaagctccacaatgcagccaacgcgaaccagaaagaaaagtatgaggctgacctaaagaaggagattaagaagctacaacggctgagggaccaaatcaagacatgggtagcgtccaacgagatcaaggacaagaggcagcttatagacaaccgcaagctcattgagacgcaaatggaacggttcaaagttgtggaacgagagaccaaaaccaaagcttacagcaaagagggcctgggcctggcccagaaggtagatcctgcccagaaggagaaggaagaggttggccagtggctcacgaataccatcgacacgctcaacatgcaggtggaccagtttgagagtgaagtggagtcactgtcagtgcagacacgcaagaagaagggcgacaaggataagcaggaccggattgagggcttgaagcggcacatcgagaagcaccgctaccacgtgcgcatgctagagaccatcctgcgcatgctggacaatgactccatcctcgttgacgccatccgcaagatcaaggacgacgttgagtactatgttgactcatcccaggaccccgacttcgaggagaacgagtttctctacgatgacctggacctcgaggacattccacaggcgctggtcgccacctccccccccagccacagccacatggaggatgagatcttcaaccagtccagcagcacgcccacctcaaccacctccagctctcccatcccgcccagcccagccaactgtaccacggaaaactctgaagatgataagaagaggggacgttccacagacagtgaagtcagccagtctccagccaaaaacggctccaagcctgtccacagcaaccagcaccctcagtccccagctgtgccgcccacctacccctccggccccccgcctgctgcctctgccttgagcaccactcctggcaacaatggggtccccgcccccgcagcacccccaagtgccctgggccccaaggccagtccagctcccagccacaactcgggcacccctgctccctatgcccaggctgtggccccaccagctcccagtgggcccagcacgacccagccccggccccccagcgtccagcctagcggaggcggaggcggcggcagcggaggcggagggagcagcagcagtagtaacagcagtgccggtggaggggctggcaagcagaatggcgccaccagttacagctcagttgtggcagacagcccggcagaggtggctttgagcagcagtgggggcaacaatgccagcagccaggccttgggccccccttccggcccccacaacccacctcccagcacctcgaaggaacccagtgcggcagccccaacgggggctgggggcgtggccccaggctcagggaacaactcagggggacccagcctcctggtgccactgcctgtgaatcctcccagctccccaacgcccagcttcagtgatgccaaggcagccggtgccctgctcaatgggcctccacagttcagcaccgccccagaaatcaaggcccctgagcctctgagctccttgaagtccatggcggaacgggcagccatcagctctggcattgaggaccctgtgccaacgctgcacctgaccgagcgagacatcatcctgagcagtacatcagcacctccggcctcagcccagccgcccctgcagctgtcagaggtgaacataccgctgtcgctgggtgtctgtccactgggccctgtgcccctgcccaggtgagggccctgccctggaagactggagggaggccccaagccacggggcatccccctctcccaggaagcagggagggggccgggaggttttcctctcagccccaccctgggggcccgggggcgagggctgccccctcctcccctccccagtgagggacattttttggtaaacctattttcattttggaaaatatttatgaataaatagttttatatgacggctggcagcagcggcctctcctgtacccc

SEQ ID NO: 280382 - DNA, 2361 bp, Homo sapiens
  misc_feature (2326)..(2326): n is a, c, g, or t
  misc_feature (2329)..(2329): n is a, c, g, or t
aaattctccctgggggtaaggtaccagccctgtcctttatgggcttcttgttctaaagcatatccgtcccatatggttgctgctagtcacatgtggtgattagtaactagttaaaaatgaaaaattcagttcctccattacacttgccacatttcagatgttcagtggccaacagatatgcgcaaatagagtgtttccagcattgcaaagttctgttggatagcactgtttgccagatgttcccttctttgtgggtgaggactcttttggtgtgacttccctctgtattgaggctcttgttcctcagtatggggctgtttctgtctttacagtaagtgactactccagggttccctgccctgcacacgtagagtgggagcggcccgtggatcccagggaactgtgcttttcattgtaggccccctccctggaggggaagagggcaatctccgctggtatctcagaagtcttcttctgaggcataagcctctcttcccagggctcccctggtctcgctgtcaggccctaaggtatgtcttcccttggactaaagctccttggaactcccttttgacctcagtcttctctgggttccaggtaacttcctttaaaataaagacgctcctctcttgaagttttgggttcctgccctgatggtctatgtctccctgactctaaattaccaatccacttgctatgggattcctccatgagtgcagattggctccctcacagctgcggtacctttgcaccctcttatcttagtaagatttctgtcttctcccaggtctctcttgggtactgccttctgcccccaaatctctaagccttcttggtattagcttctttgggttaggagtgttatttccttttggtttaaggatcctgctctggaataaatgtcttggtggtttgagtcccttctacttggcattcagccctgtctgcatgagcgggttcagctcttcacagctttcggcatctctgctcgccgtcgttttcccccacccccaatctttcttctcctacctacagcttccacacacacacacacacacacacacacacacacacgcccttctctgtgagctgccagtttcatttgtctcctgacttgtctgagggatgacctctcctagccacctctgcccagcccctctgagtaggaagtgtgatttccagggctaatgcctccatcccagtcatcagctgtgtgcagcatgactgtcctgctctgaaaaacctttttgagtgtattctgggggaaggtactccatgctctaggaattttccacttcctgagtcagaggcacacaaaaaagtatgtaacttttcttgtttcaacaaacttatggggtcccctgttggccagacactatgctgggcagtcaagcgagcatcaggagaactggggctggtctcttgtcagatagcaaatgcttcttctctttaccagtcccacctacctcactatgctgactaggtccatgtctctgggtttttaccagccagggaatacgtgttaattcctctccaatctctcctagcagcgtccgtctccaagagagtatgaagagagtgcgtctgtagggcagggaagatggcggacaagcgcaaactccaaggtgagattgatcgctgcctcaagaaggtgtccgagggcgtggagcagtttgaagatatttggcagaagctccacaatgcagccaacgcgaaccagaaagaaaagtatgaggctgacctaaagaaggagattaagaagctacaacggctgagggaccaaatcaagacatgggtagcgtccaacgagatcaaggacaagaggcagcttatagacaaccgcaagctcattgagacgcaaatggaacggttcaaagttgtggaacgagagaccaaaaccaaagcttacagcaaagagggcctgggcctggcccagaaggtagatcctgcccagaaggagaaggaagaggttggccagtggctcacgaataccatcgacacgctcaacatgcaggtggaccagtttgagagtgaagtggagtcactgtcagtgcagacacgcaagaagaagggcgacaaggataagcaggaccggattgagggcttgaagcggcacatcgagaagcaccgctaccacgtgcgcatgctagagaccatcctgcgcatgctggacaatgactccatcctcgttgacgccatccgcaagatcaaggacgacgttgagtactatgttgactcatcccaggaccccgacttcgaggagaacgagtttctctacgatgacctggacctcgaggacattccacaggcgctggtcgccacctcnccncccagccgtcagtgaagccgtcgtagcagtga

SEQ ID NO: 280383 - DNA, 908 bp, Homo sapiens
tgctgttcagtgtatacgacggcattgcatcgctgatcagtggtcttagcgtttccagatgtcccacgacagtcccggcatcaataaaatgtccctgcagagtgcttggatttagactctgagactgttccattctctagaacaagggtgacagtacccactgcctcgaggtctttgtgaagattaaatgctaggctgtgcatcctgtactcacgtgagaggtgctcaaaagccacagccctcgaggaaacgaaggctgtgcactcacacctggggctggggccccgtctctggcagctggcttcggtggaacctctgcggccccctccgtttcctcctcgctgaagtggcatgataacatttcctacccaagaagaaccttgtgaggatggatgagagtgtgtgcgtgcagggcagctggcccggttgcctgacacatccacagccctaagaattgtcccctttgtctgttggtccggcccagatcccagaccacctcctcgtccactcactgaccgccttctcccccggccagggcacctacatctactttgactacgagaagtggggccagcggaagaaggaaggcttcacctttgagtaccgctacctggaggaccgggacctccagtgacaccggcccctccctctacccacccccttcccccgcatgctgatccccctgcccaggtgagggccctgccctggaagactggagggaggccccaagccacggggcatccccctctcccaggaagcagggagggggccgggaggttttcctctcagccccaccctgggggcccgggggcgagggctgccccctcctcccctccccagtgagggacattttttggtaaacctattttcattttggaaaatatttatgaataaatagttttatatga

SEQ ID NO: 280384 - DNA, 2004 bp, Homo sapiens
aaattctccctgggggtaaggtaccagccctgtcctttatgggcttcttgttctaaagcatatccgtcccatatggttgctgctagtcacatgtggtgattagtaactagttaaaaatgaaaaattcagttcctccattacacttgccacatttcagatgttcagtggccaacagatatgcgcaaatagagtgtttccagcattgcaaagttctgttggatagcactgtttgccagatgttcccttctttgtgggtgaggactcttttggtgtgacttccctctgtattgaggctcttgttcctcagtatggggctgtttctgtctttacagtaagtgactactccagggttccctgccctgcacacgtagagtgggagcggcccgtggatcccagggaactgtgcttttcattgtaggccccctccctggaggggaagagggcaatctccgctggtatctcagaagtcttcttctgaggcataagcctctcttcccagggctcccctggtctcgctgtcaggccctaaggtatgtcttcccttggactaaagctccttggaactcccttttgacctcagtcttctctgggttccaggtaacttcctttaaaataaagacgctcctctcttgaagttttgggttcctgccctgatggtctatgtctccctgactctaaattaccaatccacttgctatgggattcctccatgagtgcagattggctccctcacagctgcggtacctttgcaccctcttatcttagtaagatttctgtcttctcccaggtctctcttgggtactgccttctgcccccaaatctctaagccttcttggtattagcttctttgggttaggagtgttatttccttttggtttaaggatcctgctctggaataaatgtcttggtggtttgagtcccttctacttggcattcagccctgtctgcatgagcgggttcagctcttcacagctttcggcatctctgctcgccgtcgttttcccccacccccaatctttcttctcctacctacagcttccacacacacacacacacacacacacacacacacacgcccttctctgtgagctgccagtttcatttgtctcctgacttgtctgagggatgacctctcctagccacctctgcccagcccctctgagtaggaagtgtgatttccagggctaatgcctccatcccagtcatcagctgtgtgcagcatgactgtcctgctctgaaaaacctttttgagtgtattctgggggaaggtactccatgctctaggaattttccacttcctgagtcagaggcacacaaaaaagtatgtaacttttcttgtttcaacaaacttatggggtcccctgttggccagacactatgctgggcagtcaagcgagcatcaggagaactggggctggtctcttgtcagatagcaaatgcttcttctctttaccagtcccacctacctcactatgctgactaggtccatgtctctgggtttttaccagccagggaatacgtgttaattcctctccaatctctcctagcagcgtccgtctccaagagagtatgaagagagtgcgtctgtagggcagggaagatggcggacaagcgcaaactccaaggtgagattgatcgctgcctcaagaaggtgtccgagggcgtggagcagtttgaagatatttggcagaaggtacaggggctgagaccctaataatctgggtcttcagagaggagggcacaggaaggcggctcaggacctctgggtgttgaccagcgggaggggctacatatgcagatgctgaggacctaagagaatcagctctaagatggattgggggtaggggttggggggggtcctcgagtccctagcataaggaagaatcactggagtgggtactgggacatcccctcccacactgacttctcaattctctccatccctcagctccacaatgcagccaacaaccgacttaatcaccacccaacaatgacttattcaaa

SEQ ID NO: 280385 - DNA, 359 bp, Homo sapiens
gagagtatgaagagagtgcgtctgtagggcagggaagatggcggacaagcgcaaactccaaggtactagactgacttcctgctgcacctgtagccacatgctccctcttctgaggactgctctttagatacctgccacctgggcaggattctcacagccttgttcctccctggccaggtgagattgatcgctgcctcaagaaggtgtccgagggcgtggagcagtttgaagatatttggcagaaggtacaggggctgagaccctaataatctgggtcttcagagaggagggcacaggaaggcggctcaggacctctgggtgttgaccagcgggaggggctacatatgcagatgctgagg

SEQ ID NO: 280386 - DNA, 418 bp, Homo sapiens
cggctgagggaccaaatcaagacatgggtagcgtccaacgagatcaaggacaagaggcagcttatagacaaccgcaagctcattgagacggtaggagcccagagcctgagtcccagagaggtgggaaggtcaccagattcttgagatcccaaggggcggaggcagagcggccagaccccagaggtcctcaagagaagtaaggtttctgcacctaagggaagtgaagaggcagcggactcagagctcagaaagtagggtcacgaggctcaggtcggagtgtctgctggcccttagtcagctcctttcccacctttgagagcccccctgccaactgcactctctacagcaaatggaacggttcaaagttgtggaacgagagaccaaaaccaaagcttacagcaaagagggcctgggcctg

SEQ ID NO: 280387 - DNA, 383 bp, Homo sapiens
ccactgaggcacacctcagccccgcttccagttgcccactggctcacccgcggcccctccccagccctgctccagcagccccagtctaggccgaccccactctgctcatcggcacattctcaggcctccctggagaccactggggagctgtccagccccctcccaaccccagtgagtcatgagtgacctccaccctcatccccacttgggaaattttctaaattgcctcctctctcagctctcatcacacattagtttttcttccttctcaaagcttctctgaaagcaattttcacctcctgtctcattttccttctcctgatcagcattggtatgttctgtgcccccagccccatctccaagaggattgtccagcccaactg

SEQ ID NO: 280388 - DNA, 4136 bp, Homo sapiens
aaattctccctgggggtaaggtaccagccctgtcctttatgggcttcttgttctaaagcatatccgtcccatatggttgctgctagtcacatgtggtgattagtaactagttaaaaatgaaaaattcagttcctccattacacttgccacatttcagatgttcagtggccaacagatatgcgcaaatagagtgtttccagcattgcaaagttctgttggatagcactgtttgccagatgttcccttctttgtgggtgaggactcttttggtgtgacttccctctgtattgaggctcttgttcctcagtatggggctgtttctgtctttacagtaagtgactactccagggttccctgccctgcacacgtagagtgggagcggcccgtggatcccagggaactgtgcttttcattgtaggccccctccctggaggggaagagggcaatctccgctggtatctcagaagtcttcttctgaggcataagcctctcttcccagggctcccctggtctcgctgtcaggccctaaggtatgtcttcccttggactaaagctccttggaactcccttttgacctcagtcttctctgggttccaggtaacttcctttaaaataaagacgctcctctcttgaagttttgggttcctgccctgatggtctatgtctccctgactctaaattaccaatccacttgctatgggattcctccatgagtgcagattggctccctcacagctgcggtacctttgcaccctcttatcttagtaagatttctgtcttctcccaggtctctcttgggtactgccttctgcccccaaatctctaagccttcttggtattagcttctttgggttaggagtgttatttccttttggtttaaggatcctgctctggaataaatgtcttggtggtttgagtcccttctacttggcattcagccctgtctgcatgagcgggttcagctcttcacagctttcggcatctctgctcgccgtcgttttcccccacccccaatctttcttctcctacctacagcttccacacacacacacacacacacacacacacacacacgcccttctctgtgagctgccagtttcatttgtctcctgacttgtctgagggatgacctctcctagccacctctgcccagcccctctgagtaggaagtgtgatttccagggctaatgcctccatcccagtcatcagctgtgtgcagcatgactgtcctgctctgaaaaacctttttgagtgtattctgggggaaggtactccatgctctaggaattttccacttcctgagtcagaggcacacaaaaaagtatgtaacttttcttgtttcaacaaacttatggggtcccctgttggccagacactatgctgggcagtcaagcgagcatcaggagaactggggctggtctcttgtcagatagcaaatgcttcttctctttaccagtcccacctacctcactatgctgactaggtccatgtctctgggtttttaccagccagggaatacgtgttaattcctctccaatctctcctagcagcgtccgtctccaagagagtatgaagagagtgcgtctgtagggcagggaagatggcggacaagcgcaaactccaaggtgagattgatcgctgcctcaagaaggtgtccgagggcgtggagcagtttgaagatatttggcagaagctccacaatgcagccaacgcgaaccagaaagaaaagtatgaggctgacctaaagaaggagattaagaagctacaacggctgagggaccaaatcaagacatgggtagcgtccaacgagatcaaggacaagaggcagcttatagacaaccgcaagctcattgagacgcaaatggaacggttcaaagttgtggaacgagagaccaaaaccaaagcttacagcaaagagggcctgggcctggcccagaaggtagatcctgcccagaaggagaaggaagaggttggccagtggctcacgaataccatcgacacgctcaacatgcaggtggaccagtttgagagtgaagtggagtcactgtcagtgcagacacgcaagaagaagggcgacaaggataagcaggaccggattgagggcttgaagcggcacatcgagaagcaccgctaccacgtgcgcatgctagagaccatcctgcgcatgctggacaatgactccatcctcgttgacgccatccgcaagatcaaggacgacgttgagtactatgttgactcatcccaggaccccgacttcgaggagaacgagtttctctacgatgacctggacctcgaggacattccacaggcgctggtcgccacctccccccccagccacagccacatggaggatgagatcttcaaccagtccagcagcacgcccacctcaaccacctccagctctcccatcccgcccagcccagccaactgtaccacggaaaactctgaagatgataagaagaggggacgttccacagacagtgaagtcagccagtctccagccaaaaacggctccaagcctgtccacagcaaccagcaccctcagtccccagctgtgccgcccacctacccctccggccccccgcctgctgcctctgccttgagcaccactcctggcaacaatggggtccccgcccccgcagcacccccaagtgccctgggccccaaggccagtccagctcccagccacaactcgggcacccctgctccctatgcccaggctgtggccccaccagctcccagtgggcccagcacgacccagccccggccccccagcgtccagcctagcggaggcggaggcggcggcagcggaggcggagggagcagcagcagtagtaacagcagtgccggtggaggggctggcaagcagaatggcgccaccagttacagctcagttgtggcagacagcccggcagaggtggctttgagcagcagtgggggcaacaatgccagcagccaggccttgggccccccttccggcccccacaacccacctcccagcacctcgaaggaacccagtgcggcagccccaacgggggctgggggcgtggccccaggctcagggaacaactcagggggacccagcctcctggtgccactgcctgtgaatcctcccagctccccaacgcccagcttcagtgatgccaaggcagccggtgccctgctcaatgggcctccacagttcagcaccgccccagaaatcaaggcccctgagcctctgagctccttgaagtccatggcggaacgggcagccatcagctctggcattgaggaccctgtgccaacgctgcacctgaccgagcgagacatcatcctgagcagtacatcagcacctccggcctcagcccagccgcccctgcagctgtcagaggtgaacataccgctgtcgctgggtgtctgtccactgggccctgtgcccctcaccaaggagcagctctatcagcaggccatggaagaggccgcctggcaccacatgcctcacccctctgactctgagcgtattcggcagtacctcccccggaacccctgtccgacgcccccctaccaccaccagatgccacccccacactcggacactgtggaattctaccagcgcctgtcgaccgagacactcttcttcatcttctactatctggagggcactaaggcacagtatctggcagccaaggccctaaagaagcagtcatggcgattccacaccaagtacatgatgtggttccagaggcacgaggagcccaagaccatcactgacgagtttgagcagggcacctacatctactttgactacgagaagtggggccagcggaagaaggaaggcttcacctttgagtaccgctacctggaggaccgggacctccagtgacaccggcccctccctctacccacccccttcccccgcatgctgatccccctgcccaggtgagggccctgccctggaagactggagggaggccccaagccacggggcatccccctctcccaggaagcagggagggggccgggaggttttcctctcagccccaccctgggggcccgggggcgagggctgccccctcctcccctccccagtgagggacattttttggtaaacctattttcattttggaaaatatttatgaataaatagttttatatga

SEQ ID NO: 280389 - DNA, 5687 bp, Homo sapiens
  misc_feature (3638)..(3640): n is a, c, g, or t
  misc_feature (4146)..(4146): n is a, c, g, or t
  misc_feature (4626)..(4626): n is a, c, g, or t
  misc_feature (4647)..(4647): n is a, c, g, or t
aaattctccctgggggtaaggtaccagccctgtcctttatgggcttcttgttctaaagcatatccgtcccatatggttgctgctagtcacatgtggtgattagtaactagttaaaaatgaaaaattcagttcctccattacacttgccacatttcagatgttcagtggccaacagatatgcgcaaatagagtgtttccagcattgcaaagttctgttggatagcactgtttgccagatgttcccttctttgtgggtgaggactcttttggtgtgacttccctctgtattgaggctcttgttcctcagtatggggctgtttctgtctttacagtaagtgactactccagggttccctgccctgcacacgtagagtgggagcggcccgtggatcccagggaactgtgcttttcattgtaggccccctccctggaggggaagagggcaatctccgctggtatctcagaagtcttcttctgaggcataagcctctcttcccagggctcccctggtctcgctgtcaggccctaaggtatgtcttcccttggactaaagctccttggaactcccttttgacctcagtcttctctgggttccaggtaacttcctttaaaataaagacgctcctctcttgaagttttgggttcctgccctgatggtctatgtctccctgactctaaattaccaatccacttgctatgggattcctccatgagtgcagattggctccctcacagctgcggtacctttgcaccctcttatcttagtaagatttctgtcttctcccaggtctctcttgggtactgccttctgcccccaaatctctaagccttcttggtattagcttctttgggttaggagtgttatttccttttggtttaaggatcctgctctggaataaatgtcttggtggtttgagtcccttctacttggcattcagccctgtctgcatgagcgggttcagctcttcacagctttcggcatctctgctcgccgtcgttttcccccacccccaatctttcttctcctacctacagcttccacacacacacacacacacacacacacacacacacgcccttctctgtgagctgccagtttcatttgtctcctgacttgtctgagggatgacctctcctagccacctctgcccagcccctctgagtaggaagtgtgatttccagggctaatgcctccatcccagtcatcagctgtgtgcagcatgactgtcctgctctgaaaaacctttttgagtgtattctgggggaaggtactccatgctctaggaattttccacttcctgagtcagaggcacacaaaaaagtatgtaacttttcttgtttcaacaaacttatggggtcccctgttggccagacactatgctgggcagtcaagcgagcatcaggagaactggggctggtctcttgtcagatagcaaatgcttcttctctttaccagtcccacctacctcactatgctgactaggtccatgtctctgggtttttaccagccagggaatacgtgttaattcctctccaatctctcctagcagcgtccgtctccaagagagtatgaagagagtgcgtctgtagggcagggaagatggcggacaagcgcaaactccaaggtgagattgatcgctgcctcaagaaggtgtccgagggcgtggagcagtttgaagatatttggcagaagctccacaatgcagccaacgcgaaccagaaagaaaagtatgaggctgacctaaagaaggagattaagaagctacaacggctgagggaccaaatcaagacatgggtagcgtccaacgagatcaaggacaagaggcagcttatagacaaccgcaagctcattgagacgcaaatggaacggttcaaagttgtggaacgagagaccaaaaccaaagcttacagcaaagagggcctgggcctggcccagaaggtagatcctgcccagaaggagaaggaagaggttggccagtggctcacgaataccatcgacacgctcaacatgcaggtggaccagtttgagagtgaagtggagtcactgtcagtgcagacacgcaagaagaagggcgacaaggataagcaggaccggattgagggcttgaagcggcacatcgagaagcaccgctaccacgtgcgcatgctagagaccatcctgcgcatgctggacaatgactccatcctcgttgacgccatccgcaagatcaaggacgacgttgagtactatgttgactcatcccaggaccccgacttcgaggagaacgagtttctctacgatgacctggacctcgaggacattccacaggcgctggtcgccacctccccccccagccacagccacatggaggatgagatcttcaaccagtccagcagcacgcccacctcaaccacctccagctctcccatcccgcccagcccagccaactgtaccacggaaaactctgaagatgataagaagaggggacgttccacagacagtgaagtcagccagtctccagccaaaaacggctccaagcctgtccacagcaaccagcaccctcagtccccagctgtgccgcccacctacccctccggccccccgcctgctgcctctgccttgagcaccactcctggcaacaatggggtccccgcccccgcagcacccccaagtgccctgggccccaaggccagtccagctcccagccacaactcgggcacccctgctccctatgcccaggctgtggccccaccagctcccagtgggcccagcacgacccagccccggccccccagcgtccagcctagcggaggcggaggcggcggcagcggaggcggagggagcagcagcagtagtaacagcagtgccggtggaggggctggcaagcagaatggcgccaccagttacagctcagttgtggcagacagcccggcagaggtggctttgagcagcagtgggggcaacaatgccagcagccaggccttgggccccccttccggcccccacaacccacctcccagcacctcgaaggaacccagtgcggcagccccaacgggggctgggggcgtggccccaggctcagggaacaactcagggggacccagcctcctggtgccactgcctgtgaatcctcccagctccccaacgcccagcttcagtgatgccaaggcagccggtgccctgctcaatgggcctccacagttcagcaccgccccagaaatcaaggcccctgagcctctgagctccttgaagtccatggcggaacgggcagccatcagctctggcattgaggaccctgtgccaacgctgcacctgaccgagcgagacatcatcctgagcagtacatcagcacctccggcctcagcccagccgcccctgcagctgtcagaggtgaacataccgctgtcgctgggtgtctgtccactgggccctgtgcccctcaccaaggagcagctctatcagcaggccatggaagaggccgcctggcaccacatgcctcacccctctgactctgagcgtattcggcagtacctcccccggaacccctgtccgacgcccccctaccaccaccagatgccacccccacactcggacactgtggaattctaccagcgcctgtcgaccgagacactcttcttcatcttctactatctggagnnncagcagggcccccggggcagcctcgggccccccggcttcgccgccaccgccgccgtcccccctcgggctggaggggtgagggcactaaggcacagtatctggcagccaaggccctaaagaagcagtcatggcgattccacaccaagtacatgatgtggttccagaggcacgaggagcccaagaccatcactgacgagtttgagcaggtgagggccccgccccctctcttcccgctgctagggttggggtagagtccccaggctccaggcagcccctgctggcctctgctcccttgcctccacctttcagctggcgcagtccctcagcctgaccaagtactcctccctctggctgtctgctcagcctggaacaccgccctctcatcctccacttggccagctcctaggcctcctgtaggtctcagcccaaatgtcccttcctcaaagaaaccttcctggagccacccagcccagtgcctcccctttgcagtgctgggcacactcgcntggggtgtgggattttcccagtatgtgtccctgcaccaggctgtgggctctgctgccgagggaccttgatggcccccacttcacctccaggtcccagcactcagcagggcaggggctcagtgccgaaactattttttttgaatgggcttctcaagttctaatactgggaaattcctgctgcttgcaaacactctggaaccaacctacctgggtttcagcccagtccagctgggcgactctaggcaagtcactcgaacctctgtgtctcaattaacttatctgtaaaatggggggagacacctacctaatgcagttgttatgaagattaaatgagttaataacatgtaagtacttaatggtgactgctacatagtcagtgtcatggattttttttttcaaattactttcagttggtgtgttctacagtgatgtttttttccaccaaatacttccctgatgccgagccccttcatggggatnaagtagtacaaggtccttgtnctcagagaactcagtcccctctcctggttctcccaggttgccatctttgaagcacttaagacattcatttagaacctaggtcctctcccattgtgtcctcagatgttaaccacagacttcctgtcctttcctggtttggcccaaaaccatcctccaagttagtacatttcagggcatccagtcattcagaaattcccacaccacttccgtcaccaataaaatgtccctgcagagtgcttggatttagactctgagactgttccattctctagaacaagggtgacagtacccactgcctcgaggtctttgtgaagattaaatgctaggctgtgcatcctgtactcacgtgagaggtgctcaaaagccacagccctcgaggaaacgaaggctgtgcactcacacctggggctggggccccgtctctggcagctggcttcggtggaacctctgcggccccctccgtttcctcctcgctgaagtggcatgataacatttcctacccaagaagaaccttgtgaggatggatgagagtgtgtgcgtgcagggcagctggcccggttgcctgacacatccacagccctaagaattgtcccctttgtctgttggtccggcccagatcccagaccacctcctcgtccactcactgaccgccttctcccccggccagggcacctacatctactttgactacgagaagtggggccagcggaagaaggaaggcttcacctttgagtaccgctacctggaggaccgggacctccagtgacaccggcccctccctctacccacccccttcccccgcatgctgatccccctgcccaggtgagggccctgccctggaagactggagggaggccccaagccacggggcatccccctctcccaggaagcagggagggggccgggaggttttcctctcagccccaccctgggggcccgggggcgagggctgccccctcctcccctccccagtgagggacattttttggtaaacctattttcattttggaaaatatttatgaataaatagttttatatga

SEQ ID NO: 280390 - DNA, 4654 bp, Homo sapiens
aaattctccctgggggtaaggtaccagccctgtcctttatgggcttcttgttctaaagcatatccgtcccatatggttgctgctagtcacatgtggtgattagtaactagttaaaaatgaaaaattcagttcctccattacacttgccacatttcagatgttcagtggccaacagatatgcgcaaatagagtgtttccagcattgcaaagttctgttggatagcactgtttgccagatgttcccttctttgtgggtgaggactcttttggtgtgacttccctctgtattgaggctcttgttcctcagtatggggctgtttctgtctttacagtaagtgactactccagggttccctgccctgcacacgtagagtgggagcggcccgtggatcccagggaactgtgcttttcattgtaggccccctccctggaggggaagagggcaatctccgctggtatctcagaagtcttcttctgaggcataagcctctcttcccagggctcccctggtctcgctgtcaggccctaaggtatgtcttcccttggactaaagctccttggaactcccttttgacctcagtcttctctgggttccaggtaacttcctttaaaataaagacgctcctctcttgaagttttgggttcctgccctgatggtctatgtctccctgactctaaattaccaatccacttgctatgggattcctccatgagtgcagattggctccctcacagctgcggtacctttgcaccctcttatcttagtaagatttctgtcttctcccaggtctctcttgggtactgccttctgcccccaaatctctaagccttcttggtattagcttctttgggttaggagtgttatttccttttggtttaaggatcctgctctggaataaatgtcttggtggtttgagtcccttctacttggcattcagccctgtctgcatgagcgggttcagctcttcacagctttcggcatctctgctcgccgtcgttttcccccacccccaatctttcttctcctacctacagcttccacacacacacacacacacacacacacacacacacgcccttctctgtgagctgccagtttcatttgtctcctgacttgtctgagggatgacctctcctagccacctctgcccagcccctctgagtaggaagtgtgatttccagggctaatgcctccatcccagtcatcagctgtgtgcagcatgactgtcctgctctgaaaaacctttttgagtgtattctgggggaaggtactccatgctctaggaattttccacttcctgagtcagaggcacacaaaaaagtatgtaacttttcttgtttcaacaaacttatggggtcccctgttggccagacactatgctgggcagtcaagcgagcatcaggagaactggggctggtctcttgtcagatagcaaatgcttcttctctttaccagtcccacctacctcactatgctgactaggtccatgtctctgggtttttaccagccagggaatacgtgttaattcctctccaatctctcctagcagcgtccgtctccaagagagtatgaagagagtgcgtctgtagggcagggaagatggcggacaagcgcaaactccaaggtgagattgatcgctgcctcaagaaggtgtccgagggcgtggagcagtttgaagatatttggcagaagctccacaatgcagccaacgcgaaccagaaagaaaagtatgaggctgacctaaagaaggagattaagaagctacaacggctgagggaccaaatcaagacatgggtagcgtccaacgagatcaaggacaagaggcagcttatagacaaccgcaagctcattgagacgcaaatggaacggttcaaagttgtggaacgagagaccaaaaccaaagcttacagcaaagagggcctgggcctggcccagaaggtagatcctgcccagaaggagaaggaagaggttggccagtggctcacgaataccatcgacacgctcaacatgcaggtggaccagtttgagagtgaagtggagtcactgtcagtgcagacacgcaagaagaagggcgacaaggatgaggggccaagcaggtgctctgcagcccctgagcctggccctgggctcgccagcagaagcaggaccggattgagggcttgaagcggcacatcgagaagcaccgctaccacgtgcgcatgctagagaccatcctgcgcatgctggacaatgactccatcctcgttgacgccatccgcaagatcaaggacgacgttgagtactatgttgactcatcccaggaccccgacttcgaggagaacgagtttctctacgatgacctggacctcgaggacattccacaggcgctggtcgccacctccccccccagccacagccacatggaggatgagatcttcaaccagtccagcagcacgcccacctcaaccacctccagctctcccatcccgcccagcccagccaactgtaccacggaaaactctgaagatgataagaagaggggacgttccacagacagtgaagtcagccagtctccagccaaaaacggctccaagcctgtccacagcaaccagcaccctcagtccccagctgtgccgcccacctacccctccggccccccgcctgctgcctctgccttgagcaccactcctggcaacaatggggtccccgcccccgcagcacccccaagtgccctgggccccaaggccagtccagctcccagccacaactcgggcacccctgctccctatgcccaggctgtggccccaccagctcccagtgggcccagcacgacccagccccggccccccagcgtccagcctagcggaggcggaggcggcggcagcggaggcggagggagcagcagcagtagtaacagcagtgccggtggaggggctggcaagcagaatggcgccaccagttacagctcagttgtggcagacagcccggcagaggtggctttgagcagcagtgggggcaacaatgccagcagccaggccttgggccccccttccggcccccacaacccacctcccagcacctcgaaggaacccagtgcggcagccccaacgggggctgggggcgtggccccaggctcagggaacaactcagggggacccagcctcctggtgccactgcctgtgaatcctcccagctccccaacgcccagcttcagtgatgccaaggcagccggtgccctgctcaatgggcctccacagttcagcaccgccccagaaatcaaggcccctgagcctctgagctccttgaagtccatggcggaacgggcagccatcagctctggcattgaggaccctgtgccaacgctgcacctgaccgagcgagacatcatcctgagcagtacatcagcacctccggcctcagcccagccgcccctgcagctgtcagaggtgaacataccgctgtcgctgggtgtctgtccactgggccctgtgcccctcaccaaggagcagctctatcagcaggccatggaagaggccgcctggcaccacatgcctcacccctctgactctgagcgtattcggcagtacctcccccggaacccctgtccgacgcccccctaccaccaccagatgccacccccacactcggacactgtggaattctaccagcgcctgtcgaccgagacactcttcttcatcttctactatctggagcccagagatgttagaactgcttgggttgacagcgaggctggtccactgaggcacacctcagccccgcttccagttgcccactggctcacccgcggcccctccccagccctgctccagcagccccagtctaggccgaccccactctgctcatcggcacattctcaggcctccctggagaccactggggagctgtccagccccctcccaaccccacttctctgaaagcaattttcacctcctgtctcattttccttctcctgatcagcattggtatgttctgtgcccccagccccatctccaagaggattgtccagcccaactgtggtctgtggcgggggccggggttcagccctgatgtcctgccccattcccctggctccccacccagtttgggggccccctgatccccctctccactgttcctcccccagggcactaaggcacagtatctggcagccaaggccctaaagaagcagtcatggcgattccacaccaagtacatgatgtggttccagaggcacgaggagcccaagaccatcactgacgagtttgagcagggcacctacatctactttgactacgagaagtggggccagcggaagaaggaaggcttcacctttgagtaccgctacctggaggaccgggacctccagtgacaccggcccctccctctacccacccccttcccccgcatgctgatccccctgcccaggtgagggccctgccctggaagactggagggaggccccaagccacggggcatccccctctcccaggaagcagggagggggccgggaggttttcctctcagccccaccctgggggcccgggggcgagggctgccccctcctcccctccccagtgagggacattttttggtaaacctattttcattttggaaaatatttatgaataaatagttttatatgacggctggcagcagcggcctctcctgtacccc

SEQ ID NO: 280391 - DNA, 5403 bp, Homo sapiens
  misc_feature (3354)..(3356): n is a, c, g, or t
  misc_feature (3862)..(3862): n is a, c, g, or t
  misc_feature (4342)..(4342): n is a, c, g, or t
  misc_feature (4363)..(4363): n is a, c, g, or t
aaattctccctgggggtaaggtaccagccctgtcctttatgggcttcttgttctaaagcatatccgtcccatatggttgctgctagtcacatgtggtgattagtaactagttaaaaatgaaaaattcagttcctccattacacttgccacatttcagatgttcagtggccaacagatatgcgcaaatagagtgtttccagcattgcaaagttctgttggatagcactgtttgccagatgttcccttctttgtgggtgaggactcttttggtgtgacttccctctgtattgaggctcttgttcctcagtatggggctgtttctgtctttacagtaagtgactactccagggttccctgccctgcacacgtagagtgggagcggcccgtggatcccagggaactgtgcttttcattgtaggccccctccctggaggggaagagggcaatctccgctggtatctcagaagtcttcttctgaggcataagcctctcttcccagggctcccctggtctcgctgtcaggccctaaggtatgtcttcccttggactaaagctccttggaactcccttttgacctcagtcttctctgggttccaggtaacttcctttaaaataaagacgctcctctcttgaagttttgggttcctgccctgatggtctatgtctccctgactctaaattaccaatccacttgctatgggattcctccatgagtgcagattggctccctcacagctgcggtacctttgcaccctcttatcttagtaagatttctgtcttctcccaggtctctcttgggtactgccttctgcccccaaatctctaagccttcttggtattagcttctttgggttaggagtgttatttccttttggtttaaggatcctgctctggaataaatgtcttggtggtttgagtcccttctacttggcattcagccctgtctgcatgagcgggttcagctcttcacagctttcggcatctctgctcgccgtcgttttcccccacccccaatctttcttctcctacctacagcttccacacacacacacacacacacacacacacacacacgcccttctctgtgagctgccagtttcatttgtctcctgacttgtctgagggatgacctctcctagccacctctgcccagcccctctgagtaggaagtgtgatttccagggctaatgcctccatcccagtcatcagctgtgtgcagcatgactgtcctgctctgaaaaacctttttgagtgtattctgggggaaggtactccatgctctaggaattttccacttcctgagtcagaggcacacaaaaaagtatgtaacttttcttgtttcaacaaacttatggggtcccctgttggccagacactatgctgggcagtcaagcgagcatcaggagaactggggctggtctcttgtcagatagcaaatgcttcttctctttaccagtcccacctacctcactatgctgactaggtccatgtctctgggtttttaccagccagggaatacgtgttaattcctctccaatctctcctagcagcgtccgtctccaagagagtatgaagagagtgcgtctgtagggcagggaagatggcggacaagcgcaaactccaaggtgagattgatcgctgcctcaagaaggtgtccgagggcgtggagcagtttgaagatatttggcagaagctccacaatgcagccaacgcgaaccagaaagaaaagtatgaggctgacctaaagaaggagattaagaagctacaacggctgagggaccaaatcaagacatgggtagcgtccaacgagatcaaggacaagaggcagcttatagacaaccgcaagctcattgagacgcaaatggaacggttcaaagttgtggaacgagagaccaaaaccaaagcttacagcaaagagggcctgggcctggcccagaaggtagatcctgcccagaaggagaaggaagaggttggccagtggctcacgaataccatcgacacgctcaacatgcaggtggaccagtttgagagtgaagtggagtcactgtcagtgcagacacatggaggatgagatcttcaaccagtccagcagcacgcccacctcaaccacctccagctctcccatcccgcccagcccagccaactgtaccacggaaaactctgaagatgataagaagaggggacgttccacagacagtgaagtcagccagtctccagccaaaaacggctccaagcctgtccacagcaaccagcaccctcagtccccagctgtgccgcccacctacccctccggccccccgcctgctgcctctgccttgagcaccactcctggcaacaatggggtccccgcccccgcagcacccccaagtgccctgggccccaaggccagtccagctcccagccacaactcgggcacccctgctccctatgcccaggctgtggccccaccagctcccagtgggcccagcacgacccagccccggccccccagcgtccagcctagcggaggcggaggcggcggcagcggaggcggagggagcagcagcagtagtaacagcagtgccggtggaggggctggcaagcagaatggcgccaccagttacagctcagttgtggcagacagcccggcagaggtggctttgagcagcagtgggggcaacaatgccagcagccaggccttgggccccccttccggcccccacaacccacctcccagcacctcgaaggaacccagtgcggcagccccaacgggggctgggggcgtggccccaggctcagggaacaactcagggggacccagcctcctggtgccactgcctgtgaatcctcccagctccccaacgcccagcttcagtgatgccaaggcagccggtgccctgctcaatgggcctccacagttcagcaccgccccagaaatcaaggcccctgagcctctgagctccttgaagtccatggcggaacgggcagccatcagctctggcattgaggaccctgtgccaacgctgcacctgaccgagcgagacatcatcctgagcagtacatcagcacctccggcctcagcccagccgcccctgcagctgtcagaggtgaacataccgctgtcgctgggtgtctgtccactgggccctgtgcccctcaccaaggagcagctctatcagcaggccatggaagaggccgcctggcaccacatgcctcacccctctgactctgagcgtattcggcagtacctcccccggaacccctgtccgacgcccccctaccaccaccagatgccacccccacactcggacactgtggaattctaccagcgcctgtcgaccgagacactcttcttcatcttctactatctggagnnncagcagggcccccggggcagcctcgggccccccggcttcgccgccaccgccgccgtcccccctcgggctggaggggtgagggcactaaggcacagtatctggcagccaaggccctaaagaagcagtcatggcgattccacaccaagtacatgatgtggttccagaggcacgaggagcccaagaccatcactgacgagtttgagcaggtgagggccccgccccctctcttcccgctgctagggttggggtagagtccccaggctccaggcagcccctgctggcctctgctcccttgcctccacctttcagctggcgcagtccctcagcctgaccaagtactcctccctctggctgtctgctcagcctggaacaccgccctctcatcctccacttggccagctcctaggcctcctgtaggtctcagcccaaatgtcccttcctcaaagaaaccttcctggagccacccagcccagtgcctcccctttgcagtgctgggcacactcgcntggggtgtgggattttcccagtatgtgtccctgcaccaggctgtgggctctgctgccgagggaccttgatggcccccacttcacctccaggtcccagcactcagcagggcaggggctcagtgccgaaactattttttttgaatgggcttctcaagttctaatactgggaaattcctgctgcttgcaaacactctggaaccaacctacctgggtttcagcccagtccagctgggcgactctaggcaagtcactcgaacctctgtgtctcaattaacttatctgtaaaatggggggagacacctacctaatgcagttgttatgaagattaaatgagttaataacatgtaagtacttaatggtgactgctacatagtcagtgtcatggattttttttttcaaattactttcagttggtgtgttctacagtgatgtttttttccaccaaatacttccctgatgccgagccccttcatggggatnaagtagtacaaggtccttgtnctcagagaactcagtcccctctcctggttctcccaggttgccatctttgaagcacttaagacattcatttagaacctaggtcctctcccattgtgtcctcagatgttaaccacagacttcctgtcctttcctggtttggcccaaaaccatcctccaagttagtacatttcagggcatccagtcattcagaaattcccacaccacttccgtcaccaataaaatgtccctgcagagtgcttggatttagactctgagactgttccattctctagaacaagggtgacagtacccactgcctcgaggtctttgtgaagattaaatgctaggctgtgcatcctgtactcacgtgagaggtgctcaaaagccacagccctcgaggaaacgaaggctgtgcactcacacctggggctggggccccgtctctggcagctggcttcggtggaacctctgcggccccctccgtttcctcctcgctgaagtggcatgataacatttcctacccaagaagaaccttgtgaggatggatgagagtgtgtgcgtgcagggcagctggcccggttgcctgacacatccacagccctaagaattgtcccctttgtctgttggtccggcccagatcccagaccacctcctcgtccactcactgaccgccttctcccccggccagggcacctacatctactttgactacgagaagtggggccagcggaagaaggaaggcttcacctttgagtaccgctacctggaggaccgggacctccagtgacaccggcccctccctctacccacccccttcccccgcatgctgatccccctgcccaggtgagggccctgccctggaagactggagggaggccccaagccacggggcatccccctctcccaggaagcagggagggggccgggaggttttcctctcagccccaccctgggggcccgggggcgagggctgccccctcctcccctccccagtgagggacattttttggtaaacctattttcattttggaaaatatttatgaataaatagttttatatga

SEQ ID NO: 280392 - DNA, 2371 bp, Homo sapiens
aaattctccctgggggtaaggtaccagccctgtcctttatgggcttcttgttctaaagcatatccgtcccatatggttgctgctagtcacatgtggtgattagtaactagttaaaaatgaaaaattcagttcctccattacacttgccacatttcagatgttcagtggccaacagatatgcgcaaatagagtgtttccagcattgcaaagttctgttggatagcactgtttgccagatgttcccttctttgtgggtgaggactcttttggtgtgacttccctctgtattgaggctcttgttcctcagtatggggctgtttctgtctttacagtaagtgactactccagggttccctgccctgcacacgtagagtgggagcggcccgtggatcccagggaactgtgcttttcattgtaggccccctccctggaggggaagagggcaatctccgctggtatctcagaagtcttcttctgaggcataagcctctcttcccagggctcccctggtctcgctgtcaggccctaaggtatgtcttcccttggactaaagctccttggaactcccttttgacctcagtcttctctgggttccaggtaacttcctttaaaataaagacgctcctctcttgaagttttgggttcctgccctgatggtctatgtctccctgactctaaattaccaatccacttgctatgggattcctccatgagtgcagattggctccctcacagctgcggtacctttgcaccctcttatcttagtaagatttctgtcttctcccaggtctctcttgggtactgccttctgcccccaaatctctaagccttcttggtattagcttctttgggttaggagtgttatttccttttggtttaaggatcctgctctggaataaatgtcttggtggtttgagtcccttctacttggcattcagccctgtctgcatgagcgggttcagctcttcacagctttcggcatctctgctcgccgtcgttttcccccacccccaatctttcttctcctacctacagcttccacacacacacacacacacacacacacacacacacgcccttctctgtgagctgccagtttcatttgtctcctgacttgtctgagggatgacctctcctagccacctctgcccagcccctctgagtaggaagtgtgatttccagggctaatgcctccatcccagtcatcagctgtgtgcagcatgactgtcctgctctgaaaaacctttttgagtgtattctgggggaaggtactccatgctctaggaattttccacttcctgagtcagaggcacacaaaaaagtatgtaacttttcttgtttcaacaaacttatggggtcccctgttggccagacactatgctgggcagtcaagcgagcatcaggagaactggggctggtctcttgtcagatagcaaatgcttcttctctttaccagtcccacctacctcactatgctgactaggtccatgtctctgggtttttaccagccagggaatacgtgttaattcctctccaatctctcctagcagcgtccgtctccaagagagtatgaagagagtgcgtctgtagggcagggaagatggcggacaagcgcaaactccaaggtgagattgatcgctgcctcaagaaggtgtccgagggcgtggagcagtttgaagatatttggcagaagctccacaatgcagccaacgcgaaccagaaagaaaagtatgaggctgacctaaagaaggagattaagaagctacaacggctgagggaccaaatcaagacatgggtagcgtccaacgagatcaaggacaagaggcagcttatagacaaccgcaagctcattgagacgcaaatggaacggttcaaagttgtggaacgagagaccaaaaccaaagcttacagcaaagagggcctgggcctggcccagaaggtagatcctgcccagaaggagaaggaagaggttggccagtggctcacgaataccatcgacacgctcaacatgcaggtggaccagtttgagagtgaagtggagtcactgtcagtgcagacacatggaggatgagatcttcaaccagtccagcagcacgcccacctcaaccacctccagctctcccatcccgcccagcccagccaactgtaccacggaaaactctgaagatgataagaagaggggacgttccacagacagtgaagtcagccagtctccagccaaaaacggctccaagcctgtccacagcaaccagcaccctcagtccccagctgtgccgcccacctacccctcctcccctccccagtgagggacattttttggtaaacctattttcattttggaaaatatttatgaataaatagttttatatga

SEQ ID NO: 280393 - DNA, 492 bp, Homo sapiens
ctgtcccaaggaccttgaatttatttttcacataagacaacccagaacaagaattgctcaggtatcatatctggccaaagtacataacagatttaaagttttaaaaagaagcaaggtctgataagaattaagttttgaaaaatcttattaacaacaggctaaggtgcctttgagttgggtggttctaccagaccccagaatggtgctctgctatacaattgacctttcttagtttccagaatagggaagctagagctgagcaagacttaaccactaattactattatctgacccaggaaaactccgcctttccagttgtataatttataacaatagtgcctaaaagattaaatcaataggtacatacttcatcaaatttgttcaggttgttggaaaggagactaacaagttgtccaatacttattttatctagaacacggcttgacagctttaaagtctaaaagaaaaatggaaagttagataatttcaaca

SEQ ID NO: 280394 - DNA, 801 bp, Homo sapiens
ttttagtagagacagggtttcaccatcttggccaagctggtctcgaactgacctcgtgatccacccaaagtactgggcctcccaaagtactgggattacaggcgtgagacaccgcgcccggccgactcaattctatttttaaaaatattaggagattacatagctttgatcagtgtaaaacattcccagttctcaccatcaacaactctggccaggaggatttttctttctgacatatatctaagctctcaaatgttgcaactcgttagaattccatcaaatatcagatctgttgattaacaaattcctgcagttttctgcaaatgtccctcctacttgcaaagaagacgtccattttggccaagtagacagtaagaaataaggattaacaggtgaggtcaggatgtgtctcgtgttccagactttaggtgagctcagcctgagggcttattccctttccttggaggaacacaggatgttagttgaaaatccagtctatatgcaatagtcagtcccatccgaaacagactggacttggccttggacttcccagagccatgctctcttactgtcccttgtggcctctctcattctactcaggtaaggtcgggtttgaagctacgtttatggaaatgcaatgcgtgccactcaaaaaccctccagtccataagctgggacttctgccccgttccctttttccaggggcttcccttcaaacagcagtgagtctctatggggaatccctgcatctccctctctcttgtcttcccagggtcgacgcggccgcgaatttagtagtag

SEQ ID NO: 280395 - DNA, 5159 bp, Homo sapiens
  misc_feature (686)..(686): n is a, c, g, or t
  misc_feature (2672)..(2672): n is a, c, g, or t
ggcacgaggcgcaggatgagggcggccattgctggggctccgcttcggggaggaggacgctgaggaggcgccgagccgcgcagcgctgcgggggaggcgcccgcgccgacgcggggcccatggccaggaccaccagccagctgtatgacgccgtgcccatccagtccagcgtggtgttatgttcctgcccatccccatcaatggtgaggacccagactgagtccagcacgccccctggcattcctggtggcagcaggcagggccccgccatggacggcactgcagccgagcctcggcccggcgccggctccctgcagcatgcccagcctccgccgcagcctcggaagaagcggcctgaggacttcaagtttgggaaaatccttggggaaggctctttttccacggttgtcctggctcgagaactggcaacctccagagaatatgcgattaaaattctggagaagcgacatatcataaaagagaacaaggtcccctatgtaaccagagagcgggatgtcatgtcgcgcctggatcaccccttctttgttaagctttacttcacatttcaggacgacgagaagctgtatttcggccttagttatgccaaaaatggagaactacttaaatatattcgcaaaatcggttcattcgatgagacctgtacccgattttacacggctgagatngtgtctgctttagagtacttgcacggcaagggcatcattcacagggaccttaaaccggaaaacattttgttaaatgaagatatgcacatccagatcacagattttggaacagcaaaagtcttatccccagagagcaaacaagccagggccaactcattcgtgggaacagcgcagtacgtttctccagagctgctcacggagaagtccgcctgtaagagttcagacctttgggctcttggatgcataatataccagcttgtggcaggactcccaccattccgagctggaaacgagtatcttatatttcagaagatcattaagttggaatatgactttccagaaaaattcttccctaaggcaagagacctcgtggagaaacttttggttttagatgccacaaagcggttaggctgtgaggaaatggaaggatacggacctcttaaagcacacccgttcttcgagtccgtcacgtgggagaacctgcaccagcagacgcctccgaagctcaccgcttacctgccggctatgtcggaagacgacgaggactgctatggcaattatgacaatctcctgagccagtttggctgcatgcaggtgtcttcgtcctcctcctcacactccctgtcagcctccgacacgggcctgccccagaggtcaggcagcaacatagagcagtacattcacgatctggactcgaactcctttgaactggacttacagttttccgaagatgagaagaggttgttgttggagaagcaggctggcggaaacccttggcaccagtttgtagaaaataatttaatactaaagatgggcccagtggataagcggaagggtttatttgcaagacgacgacagctgttgctcacagaaggaccacatttatattatgtggatcctgtcaacaaagttctgaaaggtgaaattccttggtcacaagaacttcgaccagaggccaagaattttaaaactttctttgtccacacgcctaacaggacgtattatctgatggaccccagcgggaacgcacacaagtggtgcaggaagatccaggaggtttggaggcagcgataccagagccacccggacgccgctgtgcagtgacgtggcctgcggccgggctgcccttcgctgccaggacacctgccccagcgcggcttggccgccatccgggacgcttccagaccacctgccagccatcacaaggggaacgcagaggcggaaaccttgcagcatttttatttaaaagaaaagaagaaaaaaaacacccaaccacacaaagaacaaaaccagtaacaaacacaaaggaattcagggtcgctttgcttgctctctgtgctccgtggaggcctccgtgtgccctcgttgccgtggggacccagctccatgcacgtcaacccagtcccgcccagactagtggacagacctggtgtcaccagtttttcctagcatcagtccgaaccatgcgcccgccctgccccaactgtgtgctggtcctgctgtggccgaggggaccgggtgtgtttggctctttatgcccctcccgctgtggtcctggaactcttcaccagggagggagccctgcgggggccgcagctttgtggagggagccgccgtgcttctgtcacctgctccctttcttgcgtctccctgtgatgggcccttaggcctggctgggcccattacatatccctgtggtggctctggtggcagctttctgtggcccctgctgtgttggcaggcaggtttgcgtggtgaggagcgggaggggttggagtggtgcgggagcaggctgccgagtggagggtgccatcgagggctccggatcccttatcctacttagcagtgttggtctctggggctgaagccgagcgcatgctgggagcggtactgtcagaagtgagcccagttagtaccccgctggctcactgcacgagagagtcctgccccgagccctaggtggggccaggaggtgccttggagaanccagccagagcagagagggctgctgacttccgtgtggagcagagaggcctgagggcctcctaaaaggtttaaatgtccacgcctctccagttgctgaagtagggtctgagagaaccctggcatcagcagacccagggtgcttctgtctcctgcagaccacgccagggagtgcagacaccaccgtcacacacgccccttttgtgttttggttcaagtttctcagagcccctcagagcttctacatctgtgcatcagaaatctcacagccttctcatgctgccggctcatctgggcccatagagtgggctttgccagttgctgttgcacaggaggcgagaacagcacacttcaaccccagcttgctggtcggctttcctctagagagagccggttttggggccatttccctttgatgctttggtggccttgccccgctctgcagcacagacaggccagatgcatttgtcctttgcctagctactccccaggtagagagtgctcctggtggcctggcaggtctgggcccttctctccctgcccaggttgtccctggagggcagccctcactccctttgggggagaggcagacattgctgcccacagacctgcctctgactcaactgtgtccaccctccctggtccctacccccaagtcacaggtgactcagcagtgaccctgtgtgccaggccagatccaaactgagagggaaggtgtcgtttttacactgctaatgacgagagtggctctttttagctaggcgagtacagacggggcctgggagggggcagagatgttccccaggccctgcctgtggttcctgcctgggccttggctgctgctgtgtgagagctgcatgtgagcctgtgaccgtgagctggggtgagctgggccgcacctaccctggggccccagggagcaggacgctccggggcccagcacgttgccctgggcctgtggccggagtcggagtcctctctcctcctcctggcttttggaaaggcttggctgtgttggggagtctctcttagccctttcaggaatttctgttcaggcttcctcctcctcatcagctattttacccatctcagaacgtcctgtgtctccatgtaggagagtggctctctcagatctctcagggcgtctggttatagggaaacaagtggagcagggacgtggctttaattggagcactcggctgggctgcttggggagactcttccgtgcgttcttcctctggatagaaccaccacctcctgggcgtcactgacaagctccatcttaacctccaaagccacagaactaggggctcagagccagagctggcagccgccagccaaaatgatgccattgcctgagctgacagccaagcccttctgtgggtcacctttctcctcacccagccccttgctcttcccttttgaaaggcccgtgtgttttctttccttaccctgtgcttgctcatgtctactccggttttctctaccacatccttagagccatcacctggcacgcaggcgccttacattctacggtagaacgtggggtactgtgtgtgcacatagacacacttacgtggaattacagttgtgggtttatccaagatgaggaagatttcacctgctgtttaatagacttggggccatgtgcctccccacacatgggcaaggacaggtggaatgtcgggaccacactgtgcggcttctcggcacaaagcggagggaggctgtggtcgctgccggcctaggtgtcccaggtgccccgcctttctctgggacacagttgggggctggcttctgagggattcctttctcccctctttgtgtggccccagccagggcggtgggcagtcctggtgtcgtcgatataagtttatttaactgtagttcgtatcgtttccggcttctatgtggttttatttttgttgttggcttgttaacaattgttttgagagagatggctggtcatgccacagctgctggggactccgcctactccagccctcttgggacacactgtgggatttgtggcccttccccagaggaattgtggagactgtcccatggaacaaaccctcaggcaccagcacagggctctgggtgactcagtaaaactaacgtttgtctctgacaagatcagctgtaggctcaccggccagagaagaccactgtgagcattttgccgtatatcctgccctgccatttgttcactttttaaactaaaataggaacatccgacacacaccgtttgcatcgtcttctcccttgatattttaagcattttcccatgtcatgagtttctcagaaacatgtttttaacaattgtactatttagtcattgtccatttactataatttatctgaccatttccctactgtaaaatacttaagacggtttctgatttttccactatttaaataatgctgtgatgaatatctttaaaatcttctgatttcttacttttttcccccttagatgcctggaagtgg

SEQ ID NO: 280396 - DNA, 2206 bp, Homo sapiens
  misc_feature (686)..(686): n is a, c, g, or t
ggcacgaggcgcaggatgagggcggccattgctggggctccgcttcggggaggaggacgctgaggaggcgccgagccgcgcagcgctgcgggggaggcgcccgcgccgacgcggggcccatggccaggaccaccagccagctgtatgacgccgtgcccatccagtccagcgtggtgttatgttcctgcccatccccatcaatggtgaggacccagactgagtccagcacgccccctggcattcctggtggcagcaggcagggccccgccatggacggcactgcagccgagcctcggcccggcgccggctccctgcagcatgcccagcctccgccgcagcctcggaagaagcggcctgaggacttcaagtttgggaaaatccttggggaaggctctttttccacggttgtcctggctcgagaactggcaacctccagagaatatgcgattaaaattctggagaagcgacatatcataaaagagaacaaggtcccctatgtaaccagagagcgggatgtcatgtcgcgcctggatcaccccttctttgttaagctttacttcacatttcaggacgacgagaagctgtatttcggccttagttatgccaaaaatggagaactacttaaatatattcgcaaaatcggttcattcgatgagacctgtacccgattttacacggctgagatngtgtctgctttagagtacttgcacggcaagggcatcattcacagggaccttaaaccggaaaacattttgttaaatgaagatatgcacatccagatcacagattttggaacagcaaaagtcttatccccagagagcaaacaagccagggccaactcattcgtgggaacagcgcagtacgtttctccagagctgctcacggagaagtccgcctgtaagagttcagacctttgggctcttggatgcataatataccagcttgtggcaggactcccaccattccgagctggaaacgagtatcttatatttcagaagatcattaagttggaatatgactttccagaaaaattcttccctaaggcaagagacctcgtggagaaacttttggttttagatgccacaaagcggttaggctgtgaggaaatggaaggatacggacctcttaaagcacacccgttcttcgagtccgtcacgtgggagaacctgcaccagcagacgcctccgaagctcaccgcttacctgccggctatgtcggaagacgacgaggactgctatggcaattatgacaatctcctgagccagtttggctgcatgcaggtgtcttcgtcctcctcctcacactccctgtcagcctccgacacgggcctgccccagaggtcaggcagcaacatagagcagtacattcacgatctggactcgaactcctttgaactggacttacagttttccgaagatgagaagaggttgttgttggagaagcaggctggcggaaacccttggcaccagtttgtagaaaataatttaatactaaagatgggcccagtggataagcggaagggtttatttgcaagacgacgacagctgttgctcacagaaggaccacatttatattatgtggatcctgtcaacaaagttctgaaaggtgaaattccttggtcacaagaacttcgaccagaggccaagaattttaaaactttctttgtccacacgcctaacaggacgtattatctgatggaccccagcgggaacgcacacaagtggtgcaggaagatccaggaggtttggaggcagcgataccagagccacccggacgccgctgtgcagtgacgtggcctgcggccgggctgcccttcgctgccaggacacctgccccagcgcggcttggccgccatccgggacgcttccagaccacctgccagccatcacaaggggaacgcagaggcggaaaccttgcagcatttttatttaaaagaaaagaagaaaaaaaacacccaaccacacaaagaacaaaaccagtaacaaacacaaaggaattcagggtcgctttgcttgctctctgtgctccgtggaggcctccgtgtgccctcgttgccgtggggacccagctccatgcacgtcaacccagtcccgcccagactagtggacagacctggtgtcaccagtttttcctagcatcagtccgaaccatgcgcccgccctgcccttcagggaaatgggggtcattaaaggaaactgaaccttga

SEQ ID NO: 280397 - DNA, 5162 bp, Homo sapiens
  misc_feature (686)..(686): n is a, c, g, or t
  misc_feature (2672)..(2672): n is a, c, g, or t
ggcacgaggcgcaggatgagggcggccattgctggggctccgcttcggggaggaggacgctgaggaggcgccgagccgcgcagcgctgcgggggaggcgcccgcgccgacgcggggcccatggccaggaccaccagccagctgtatgacgccgtgcccatccagtccagcgtggtgttatgttcctgcccatccccatcaatggtgaggacccagactgagtccagcacgccccctggcattcctggtggcagcaggcagggccccgccatggacggcactgcagccgagcctcggcccggcgccggctccctgcagcatgcccagcctccgccgcagcctcggaagaagcggcctgaggacttcaagtttgggaaaatccttggggaaggctctttttccacggttgtcctggctcgagaactggcaacctccagagaatatgcgattaaaattctggagaagcgacatatcataaaagagaacaaggtcccctatgtaaccagagagcgggatgtcatgtcgcgcctggatcaccccttctttgttaagctttacttcacatttcaggacgacgagaagctgtatttcggccttagttatgccaaaaatggagaactacttaaatatattcgcaaaatcggttcattcgatgagacctgtacccgattttacacggctgagatngtgtctgctttagagtacttgcacggcaagggcatcattcacagggaccttaaaccggaaaacattttgttaaatgaagatatgcacatccagatcacagattttggaacagcaaaagtcttatccccagagagcaaacaagccagggccaactcattcgtgggaacagcgcagtacgtttctccagagctgctcacggagaagtccgcctgtaagagttcagacctttgggctcttggatgcataatataccagcttgtggcaggactcccaccattccgagctggaaacgagtatcttatatttcagaagatcattaagttggaatatgactttccagaaaaattcttccctaaggcaagagacctcgtggagaaacttttggttttagatgccacaaagcggttaggctgtgaggaaatggaaggatacggacctcttaaagcacacccgttcttcgagtccgtcacgtgggagaacctgcaccagcagacgcctccgaagctcaccgcttacctgccggctatgtcggaagacgacgaggactgctatggcaattatgacaatctcctgagccagtttggctgcatgcaggtgtcttcgtcctcctcctcacactccctgtcagcctccgacacgggcctgccccagaggtcaggcagcaacatagagcagtacattcacgatctggactcgaactcctttgaactggacttacagttttccgaagatgagaagaggttgttgttggagaagcaggctggcggaaacccttggcaccagtttgtagaaaataatttaatactaaagatgggcccagtggataagcggaagggtttatttgcaagacgacgacagctgttgctcacagaaggaccacatttatattatgtggatcctgtcaacaaagttctgaaaggtgaaattccttggtcacaagaacttcgaccagaggccaagaattttaaaactttctttgtccacacgcctaacaggacgtattatctgatggaccccagcgggaacgcacacaagtggtgcaggaagatccaggaggtttggaggcagcgataccagagccacccggacgccgctgtgcagtgacgtggcctgcggccgggctgcccttcgctgccaggacacctgccccagcgcggcttggccgccatccgggacgcttccagaccacctgccagccatcacaaggggaacgcagaggcggaaaccttgcagcatttttatttaaaagaaaagaagaaaaaaaacacccaaccacacaaagaacaaaaccagtaacaaacacaaaggaattcagggtcgctttgcttgctctctgtgctccgtggaggcctccgtgtgccctcgttgccgtggggacccagctccatgcacgtcaacccagtcccgcccagactagtggacagacctggtgtcaccagtttttcctagcatcagtccgaaccatgcgcccgccctgccccaactgtgtgctggtcctgctgtggccgaggggaccgggtgtgtttggctctttatgcccctcccgctgtggtcctggaactcttcaccagggagggagccctgcgggggccgcagctttgtggagggagccgccgtgcttctgtcacctgctccctttcttgcgtctccctgtgatgggcccttaggcctggctgggcccattacatatccctgtggtggctctggtggcagctttctgtggcccctgctgtgttggcaggcaggtttgcgtggtgaggagcgggaggggttggagtggtgcgggagcaggctgccgagtggagggtgccatcgagggctccggatcccttatcctacttagcagtgttggtctctggggctgaagccgagcgcatgctgggagcggtactgtcagaagtgagcccagttagtaccccgctggctcactgcacgagagagtcctgccccgagccctaggtggggccaggaggtgccttggagaanccagccagagcagagagggctgctgacttccgtgtggagcagagaggcctgagggcctcctaaaaggtttaaatgtccacgcctctccagttgctgaagtagggtctgagagaaccctggcatcagcagacccagggtgcttctgtctcctgcagaccacgccagggagtgcagacaccaccgtcacacacgccccttttgtgttttggttcaagtttctcagagcccctcagagcttctacatctgtgcatcagaaatctcacagccttctcatgctgccggctcatctgggcccatagagtgggctttgccagttgctgttgcacaggaggcgagaacagcacacttcaaccccagcttgctggtcggctttcctctagagagagccggttttggggccatttccctttgatgctttggtggccttgccccgctctgcagcacagacaggccagatgcatttgtcctttgcctagctactccccaggtagagagtgctcctggtggcctggcaggtctgggcccttctctccctgcccaggttgtccctggagggcagccctcactccctttgggggagaggcagacattgctgcccacagacctgcctctgactcaactgtgtccaccctccctggtccctacccccaagtcacaggtgactcagcagtgaccctgtgtgccaggccagatccaaactgagagggaaggtgtcgtttttacactgctaatgacgagagtggctctttttagctaggcgagtacagacggggcctgggagggggcagagatgttccccaggccctgcctgtggttcctgcctgggccttggctgctgctgtgtgagagctgcatgtgagcctgtgaccgtgagctggggtgagctgggccgcacctaccctggggccccagggagcaggacgctccggggcccagcacgttgccctgggcctgtggccggagtcggagtcctctctcctcctcctggcttttggaaaggcttggctgtgttggggagtctctcttagccctttcaggaatttctgttcaggcttcctcctcctcatcagctattttacccatctcagaacgtcctgtgtctccatgtaggagagtggctctctcagatctctcagggcgtctggttatagggaaacaagtggagcagggacgtggctttaattggagcactcggctgggctgcttggggagactcttccgtgcgttcttcctctggatagaaccaccacctcctgggcgtcactgacaagctccatcttaacctccaaagccacagaactaggggctcagagccagagctggcagccgccagccaaaatgatgccattgcctgagctgacagccaagcccttctgtgggtcacctttctcctcacccagccccttgctcttcccttttgaaaggcccgtgtgttttctttccttaccctgtgcttgctcatgtctactccggttttctctaccacatccttagagccatcacctggcacgcaggcgccttacattctacggtagaacgtggggtactgtgtgtgcacatagacacacttacgtggaattacagttgtgggtttatccaagatgaggaagatttcacctgctgtttaatagacttggggccatgtgcctccccacacatgggcaaggacaggtggaatgtcgggaccacactgtgcggcttctcggcacaaagcggagggaggctgtggtcgctgccggcctaggtgtcccaggtgccccgcctttctctgggacacagttgggggctggcttctgagggattcctttctcccctctttgtgtggccccagccagggcggtgggcagtcctggtgtagagcacaagcctctccaccctagagaaatgcctctgtaccacggctaccatgtggaaccttaacttgcagaaggcttgttaacaattgttttgagagagatggctggtcatgccacagctgctggggactccgcctactccagccctcttgggacacactgtgggatttgtggcccttccccagaggaattgtggagactgtcccatggaacaaaccctcaggcaccagcacagggctctgggtgactcagtaaaactaacgtttgtctctgacaagatcagctgtaggctcaccggccagagaagaccactgtgagcattttgccgtatatcctgccctgccatttgttcactttttaaactaaaataggaacatccgacacacaccgtttgcatcgtcttctcccttgatattttaagcattttcccatgtcatgagtttctcagaaacatgtttttaacaattgtactatttagtcattgtccatttactataatttatctgaccatttccctactgtaaaatacttaagacggtttctgatttttccactatttaaataatgctgtgatgaatatctttaaaatcttctgatttcttacttttttcccccttagatgcctggaagtgg

SEQ ID NO: 280398 - DNA, 4781 bp, Homo sapiens
  misc_feature (2291)..(2291): n is a, c, g, or t
ggcacgaggcgcaggatgagggcggccattgctggggctccgcttcggggaggaggacgctgaggaggcgccgagccgcgcagcgctgcgggggaggcgcccgcgccgacgcggggcccatggccaggaccaccagccagctgtatgacgccgtgcccatccagtccagcgtggtgttatgttcctgcccatccccatcaatggtgaggacccagactgagtccagcacgccccctggcattcctggtggcagcaggcagggccccgccatggacggcactgcagccgagcctcggcccggcgccggctccctgcagcatgcccagcctccgccgcagcctcggaagaagcggcctgaggacttcaagtttgggaaaatccttggggaaggctctttttccacggttgtcctggctcgagaactggcaacctccagagaatatgcgaccagggccaactcattcgtgggaacagcgcagtacgtttctccagagctgctcacggagaagtccgcctgtaagagttcagacctttgggctcttggatgcataatataccagcttgtggcaggactcccaccattccgagctggaaacgagtatcttatatttcagaagatcattaagttggaatatgactttccagaaaaattcttccctaaggcaagagacctcgtggagaaacttttggttttagatgccacaaagcggttaggctgtgaggaaatggaaggatacggacctcttaaagcacacccgttcttcgagtccgtcacgtgggagaacctgcaccagcagacgcctccgaagctcaccgcttacctgccggctatgtcggaagacgacgaggactgctatggcaattatgacaatctcctgagccagtttggctgcatgcaggtgtcttcgtcctcctcctcacactccctgtcagcctccgacacgggcctgccccagaggtcaggcagcaacatagagcagtacattcacgatctggactcgaactcctttgaactggacttacagttttccgaagatgagaagaggttgttgttggagaagcaggctggcggaaacccttggcaccagtttgtagaaaataatttaatactaaagatgggcccagtggataagcggaagggtttatttgcaagacgacgacagctgttgctcacagaaggaccacatttatattatgtggatcctgtcaacaaagttctgaaaggtgaaattccttggtcacaagaacttcgaccagaggccaagaattttaaaactttctttgtccacacgcctaacaggacgtattatctgatggaccccagcgggaacgcacacaagtggtgcaggaagatccaggaggtttggaggcagcgataccagagccacccggacgccgctgtgcagtgacgtggcctgcggccgggctgcccttcgctgccaggacacctgccccagcgcggcttggccgccatccgggacgcttccagaccacctgccagccatcacaaggggaacgcagaggcggaaaccttgcagcatttttatttaaaagaaaagaagaaaaaaaacacccaaccacacaaagaacaaaaccagtaacaaacacaaaggaattcagggtcgctttgcttgctctctgtgctccgtggaggcctccgtgtgccctcgttgccgtggggacccagctccatgcacgtcaacccagtcccgcccagactagtggacagacctggtgtcaccagtttttcctagcatcagtccgaaccatgcgcccgccctgccccaactgtgtgctggtcctgctgtggccgaggggaccgggtgtgtttggctctttatgcccctcccgctgtggtcctggaactcttcaccagggagggagccctgcgggggccgcagctttgtggagggagccgccgtgcttctgtcacctgctccctttcttgcgtctccctgtgatgggcccttaggcctggctgggcccattacatatccctgtggtggctctggtggcagctttctgtggcccctgctgtgttggcaggcaggtttgcgtggtgaggagcgggaggggttggagtggtgcgggagcaggctgccgagtggagggtgccatcgagggctccggatcccttatcctacttagcagtgttggtctctggggctgaagccgagcgcatgctgggagcggtactgtcagaagtgagcccagttagtaccccgctggctcactgcacgagagagtcctgccccgagccctaggtggggccaggaggtgccttggagaanccagccagagcagagagggctgctgacttccgtgtggagcagagaggcctgagggcctcctaaaaggtttaaatgtccacgcctctccagttgctgaagtagggtctgagagaaccctggcatcagcagacccagggtgcttctgtctcctgcagaccacgccagggagtgcagacaccaccgtcacacacgccccttttgtgttttggttcaagtttctcagagcccctcagagcttctacatctgtgcatcagaaatctcacagccttctcatgctgccggctcatctgggcccatagagtgggctttgccagttgctgttgcacaggaggcgagaacagcacacttcaaccccagcttgctggtcggctttcctctagagagagccggttttggggccatttccctttgatgctttggtggccttgccccgctctgcagcacagacaggccagatgcatttgtcctttgcctagctactccccaggtagagagtgctcctggtggcctggcaggtctgggcccttctctccctgcccaggttgtccctggagggcagccctcactccctttgggggagaggcagacattgctgcccacagacctgcctctgactcaactgtgtccaccctccctggtccctacccccaagtcacaggtgactcagcagtgaccctgtgtgccaggccagatccaaactgagagggaaggtgtcgtttttacactgctaatgacgagagtggctctttttagctaggcgagtacagacggggcctgggagggggcagagatgttccccaggccctgcctgtggttcctgcctgggccttggctgctgctgtgtgagagctgcatgtgagcctgtgaccgtgagctggggtgagctgggccgcacctaccctggggccccagggagcaggacgctccggggcccagcacgttgccctgggcctgtggccggagtcggagtcctctctcctcctcctggcttttggaaaggcttggctgtgttggggagtctctcttagccctttcaggaatttctgttcaggcttcctcctcctcatcagctattttacccatctcagaacgtcctgtgtctccatgtaggagagtggctctctcagatctctcagggcgtctggttatagggaaacaagtggagcagggacgtggctttaattggagcactcggctgggctgcttggggagactcttccgtgcgttcttcctctggatagaaccaccacctcctgggcgtcactgacaagctccatcttaacctccaaagccacagaactaggggctcagagccagagctggcagccgccagccaaaatgatgccattgcctgagctgacagccaagcccttctgtgggtcacctttctcctcacccagccccttgctcttcccttttgaaaggcccgtgtgttttctttccttaccctgtgcttgctcatgtctactccggttttctctaccacatccttagagccatcacctggcacgcaggcgccttacattctacggtagaacgtggggtactgtgtgtgcacatagacacacttacgtggaattacagttgtgggtttatccaagatgaggaagatttcacctgctgtttaatagacttggggccatgtgcctccccacacatgggcaaggacaggtggaatgtcgggaccacactgtgcggcttctcggcacaaagcggagggaggctgtggtcgctgccggcctaggtgtcccaggtgccccgcctttctctgggacacagttgggggctggcttctgagggattcctttctcccctctttgtgtggccccagccagggcggtgggcagtcctggtgtagagcacaagcctctccaccctagagaaatgcctctgtaccacggctaccatgtggaaccttaacttgcagaaggcttgttaacaattgttttgagagagatggctggtcatgccacagctgctggggactccgcctactccagccctcttgggacacactgtgggatttgtggcccttccccagaggaattgtggagactgtcccatggaacaaaccctcaggcaccagcacagggctctgggtgactcagtaaaactaacgtttgtctctgacaagatcagctgtaggctcaccggccagagaagaccactgtgagcattttgccgtatatcctgccctgccatttgttcactttttaaactaaaataggaacatccgacacacaccgtttgcatcgtcttctcccttgatattttaagcattttcccatgtcatgagtttctcagaaacatgtttttaacaattgtactatttagtcattgtccatttactataatttatctgaccatttccctactgtaaaatacttaagacggtttctgatttttccactatttaaataatgctgtgatgaatatctttaaaatcttctgatttcttacttttttcccccttagatgcctggaagtgg

SEQ ID NO: 280399 - DNA, 1785 bp, Homo sapiens
ctgggctcgggtgatcctcctgtcttagccttccaaggtgctgggattacaggtgtgggccaccatgcccagccaccatcttggtttaatttctttccttggaaatggagcaaagggctttcactcttctttttcatggctgcatagtattccataattgtttaaacaattgataatagacactgtatcggggtgactggtatacccccaaaatcacatctgcccagagcctcaggacatggccttgtttggaaatggttttagcagatgcagctaagatgaggtcaccccgtgttaggatggccccgaatccagtgcctggcacccttataaggagagggaaacttggacgcagacaggaaggccgggtgaagacagaagcagagaccgggggccaaggagtgcctggggttgcccagagccaccacgggctgcaagaggtgtgggacagactctctcagccacagaagggcccagccccgcacaggcctggatttcagagggcgaacatttctgtggccgaagctcccagtgcgtttgcagtccttggagacggccgcagacacatttgttcttggcctgtctccaggtctgtagcccccacagtgagcggccactggccggaggggaacaggaagagctggaggggacgtcacacacatgagccttttaggaataacgagtgacacgtgcaagaccccaaaccaaacaccatgtaacctgacacccagggagggagggagggaggggctgggaggggctcacctgtagggaggggctcacctgtacagcggtgctgggaagctggcctcgagggtccccgaggggatacagggccgtgcagcctcttgcctgagggtttgcatgtctgcctggatcccccgggctcctgccagaaggcctctgaggccaccgttgacagcataaaggccacccagtgtctcggcaaccacgctgaccactccctcctcccagctgcggggtgaggtggcctcgagggaagggctggagagtcgttctgagtatttaacaactgggggtgacacagtgtgggtgggcaaggccagggccactgccaggtggggtccgtggccctgagcccccagctctatgcaccccccacctggggtctggcttctccatctccacacccccttgaggggcttctgtctccccctgccccttcgatcgcaggaggcagtgcctggccggggtcgcaggcacctgtcaccccagctcctcactcctcacccactcacatccagtccgtttgtaaaatacacccaggatgagacctgcacgcagtggctcacagcagcacgatttgtgacagcccgaggcggagaacaccgaacacccagtgaaggtgaggggatcagcacggcgcggccacccacgcacccacgcgctggaacgagactcagccacaaggaggtgcgaagctctgacccaggccacagtgcggatgcaccttgaggatgtcacgctcagtgagagacaccagacacagaagggtacgctgtgatcccacttctatgaaatgtccaggacagaccaatccacagaatcagggagaggattcgtgggtgccgggactggggagggggacctgggggtgactaggtgacataatggggacagggctgccttctgggtgatgagaatgttctggaatcagatgggatggctgcacggcgtggtgaaggtactgaacgccacctcactgtaagacggtagattttgtattttaccacaataaacaaaacaaaacaaaaccaaaccaaa

SEQ ID NO: 280400 - DNA, 331 bp, Homo sapiens
gcggccccctactactactaaattcgcggccgcgtcgacctctaatccatcccagccctctggaggatttggggtgcccctctcggcagggaacaggaagtaggaatcccagaagggtctgggggaaccctaaccctgagctcagtccagttcacccctcacctccagcctgggggtctccagacactgccagggccccctcaggacggctggagcctggaggagacagccacggggtggtgggctgggcctggaccccaccgtggtgggcagcagggctgcccggcaggcttggtggactctgctggcagcaaataaagagatgacggca

SEQ ID NO: 280401 - DNA, 837 bp, Homo sapiens
gaccacctcgcctgtgtctccacagaacagcggagcgttcgtgtacggctccatgagcttcttggataaggtggccaatgggctggcagtcatggccatccagagcctgcacccttgcccctcagagctctgctgcagggcctgcgtgagcttttaccactgggcgatggtggctgtgacgggcggcgtgggcgtggccgctgccctgtgtctctgtagcctcctgctgtggccgacccgcctgcgacgctgatgagacctgcacgcagtggctcacagcagcacgatttgtgacagcccgaggcggagaacaccgaacacccagtgaaggtgaggggatcagcacggcgcggccacccacgcacccacgcgctggaacgagactcagccacaaggaggtgcgaagctctgacccaggccacagtgcggatgcaccttgaggatgtcacgctcagtgagagacaccagacacagaagggtacgctgtgatcccacttctgtcttctgggtcaaagggaccatgtctgcagagggatcctgtggctggaagcgaggaggctccatcacgggcgtcggcagctacccgaaggcagggatctgggcaatccaggcacggccatgacccctccgaggctcttcttgggttgtggactgctgcttgcaggaacccaaggcgtgaacgatggtgaccatgcggttggccgaatgggggccgcccactatccagtgaccgcgttgcagaatcttctacagcaggccagtgtggcactgtggtgtgacagcctgtggaacctactgatgcccacgttgtctgcggggcctgggtcggaacgcaac

SEQ ID NO: 280402 - DNA, 349 bp, Homo sapiens
ttacacactcacaagcttaaaacacaaattttacttgtttttatttaaaaagtccggatccagcagtgagaaggaagccagtgtagcgcgtggctgtcctccgaggaggggcaccctcggctgtgaggttcttctgggtgtatcgcgcagcgagtgctttttccgggttcagggggctggggagattgaaagctaaagggatgctgcagaaatttaattttaggggggctggagcccccaaggtgcaggatgggaccaggccccaaagggtggacccccagcctctcgtccacggggtggggtgtggcagggccgcgcccacagcttctcctctgcatcgtgggcccgc

SEQ ID NO: 280403 - DNA, 2175 bp, Homo sapiens
ccaccgatcgccccccccccccccccccttctgctagtcgaggcctggtttaatcggccgagggcggacgtgggtgagggcgcggccgtaagagagcgggacgcggggtgcccggcgcgtggtgggggtccccggcgcctgcccccacggcacccaagaaggcctggccagggtaccctccgcggagcccgggggtggggggcgcggggcccggcgccgcgatgggcccgggacccccagcggccggagcggcgccgtccccgcggccgctgtccctggtggcgcggctgagctacgccgtgggccacttcctcaacgacctgtgcgcgtccatgtggttcacctacctgctgctctacctgcactcggtgcgcgcctacagctcccgcggcgcggggctgctgctgctgctgggccaggtggccgacgggctgtgcacaccgctcgtgggctacgaggccgaccgcgccgccagctgctgcgcccgctacggcccgcgcaaggcctggcacctggtcggcaccgtctgcgtcctgctgtccttccccttcatcttcagcccctgcctgggctgtggggcggccacgcccgagtgggctgccctcctctactacggcccgttcatcgtgatcttccagtttggctgggcctccacacagatctcccacctcagcctcatcccggagctcgtcaccaacgaccatgagaaggtggagctcacggcactcaggtatgcgttcaccgtggtggccaacatcaccgtctacggcgccgcctggctcctgctgcacctgcagggctcgtcgcgggtggagcccacccaagacatcagcatcagcgaccagctggggggccaggacgtgcccgtgttccggaacctgtccctgctggtggtgggtgtcggcgccgtgttctcactgctattccacctgggcacccgggagaggcgccggccgcatgcggaggagccaggcgagcacacccccctgttggcccctgccacggcccagcccctgctgctctggaagcactggctccgggagccggctttctaccaggtgggcatactgtacatgaccaccaggctcatcgtgaacctgtcccagacctacatggccatgtacctcacctactcgctccacctgcccaagaagttcatcgcgaccattcccctggtgatgtacctcagcggcttcttgtcctccttcctcatgaagcccatcaacaagtgcattgggaggaacatgacctacttctcaggcctcctggtgatcctggcctttgccgcctgggtggcgctggcggagggactgggtgtggccgtgtacgcagcggctgtgctgctgggtgctggctgtgccaccatcctcgtcacctcgctggccatgacggccgacctcatcggtccccacacgaacagcggagcgttcgtgtacggctccatgagcttcttggataaggtggccaatgggctggcagtcatggccatccagagcctgcacccttgcccctcagagctctgctgcagggcctgcgtgagcttttaccactgggcgatggtggctgtgacgggcggcgtgggcgtggccgctgccctgtgtctctgtagcctcctgctgtggccgacccgcctgcgacgctgggaccgtgatgcccggccctgactcctgacagcctcctgcacctgtgcaagggaactgtggggacgcacgaggatgccccccagggccttggggaaaagcccccactgcccctcactcttctctggacccccaccctccatcctcacccagctcccgggggtggggtcgggtgagggcagcagggatgcccgccagggacttgcaaggaccccctgggttttgagggtgtcccattctcaactctaatccatcccagccctctggaggatttggggtgcccctctcggcagggaacaggaagtaggaatcccagaagggtctgggggaaccctaaccctgagctcagtccagttcacccctcacctccagcctgggggtctccagacactgccagggccccctcaggacggctggagcctggaggagacagccacggggtggtgggctgggcctggaccccaccgtggtgggcagcagggctgcccggcaggcttggtggactctgctggcagcaaataaagagatgacggca

SEQ ID NO: 280404 - DNA, 3275 bp, Homo sapiens
ggctgcagagtcgagcgtggggcggacgcggcggacgtgggtgagggcgcggccgtaagagagcgggacgcggggtgcccggcgcgtggtgggggtccccggcgcctgcccccacggcacccaagaaggcctggccagggtaccctccgcggagcccgggggtggggggcgcggggcccggcgccgcgatgggcccgggacccccagcggccggagcggcgccgtccccgcggccgctgtccctggtggcgcggctgagctacgccgtgggccacttcctcaacgacctgtgcgcgtccatgtggttcacctacctgctgctctacctgcactcggtgcgcgcctacagctcccgcggcgcggggctgctgctgctgctgggccaggtggccgacgggctgtgcacaccgctcgtgggctacgaggccgaccgcgccgccagctgctgcgcccgctacggcccgcgcaaggcctggcacctggtcggcaccgtctgcgtcctgctgtccttccccttcatcttcagcccctgcctgggctgtggggcggccacgcccgagtgggctgccctcctctactacggcccgttcatcgtgatcttccagtttggctgggcctccacacagatctcccacctcagcctcatcccggagctcgtcaccaacgaccatgagaaggtggagctcacggcactcaggtatgcgttcaccgtggtggccaacatcaccgtctacggcgccgcctggctcctgctgcacctgcagggctcgtcgcgggtggagcccacccaagacatcagcatcagcgaccagctggggggccaggacgtgcccgtgttccggaacctgtccctgctggtggtgggtgtcggcgccgtgttctcactgctattccacctgggcacccgggagaggcgccggccgcatgcggaggagccaggcgagcacacccccctgttggcccctgccacggcccagcccctgctgctctggaagcactggctccgggagccggctttctaccaggtgggcatactgtacatgaccaccaggctcatcgtgaacctgtcccagacctacatggccatgtacctcacctactcgctccacctgcccaagaagttcatcgcgaccattcccctggtgatgtacctcagcggcttcttgtcctccttcctcatgaagcccatcaacaagtgcattgggaggaacatgacctacttctcaggcctcctggtgatcctggcctttgccgcctgggtggcgctggcggagggactgggtgtggccgtgtacgcagcggctgtgctgctgggtgctggctgtgccaccatcctcgtcacctcgctggccatgacggccgacctcatcggtccccacacgaacagcggagcgttcgtgtacggctccatgagcttcttggataaggtggccaatgggctggcagtcatggccatccagagcctgcacccttgcccctcagagctctgctgcagggcctgcgtgagcttttaccactgggcgatggtggctgtgacgggcggcgtgggcgtggccgctgccctgtgtctctgtagcctcctgctgtggccgacccgcctgcgacgctgggaccgtgatgcccggccctgactcctgacagcctcctgcacctgtgcaagggaactgtggggacgcacgaggatgccccccagggccttggggaaaagcccccactgcccctcactcttctctggacccccaccctccatcctcacccagctcccgggggtggggtcgggtgagggcagcagggatgcccgccagggacttgcaaggaccccctgggttttgagggtgtcccattctcaactctaatccatcccagccctctggaggatttggggtgcccctctcggcagggaacaggaagtaggaatcccagaagggtctgggggaaccctaaccctgagctcagtccagttcacccctcacctccagcctgggggtctccagacactgccagggccccctcaggacggctggagcctggaggagacagccacggggtggtgggctgggcctggaccccaccgtggtgggcagcagggctgcccggcaggcttggtggactctgctggcagcaaataaagagatgacggcagcctggctcctgtctgcctgcgggggggctctgggcaggggtagcctgggcatctcagccctgccctggttgtgggcggccagcgagcccagtgtctgcctctgtcccgagcctctggtcccctgggactaggttagtgccccctcatctgggtgcagagacagtgggtgcatcctggtagcatgcctttatcggggagtgggtgtgagggaaggcggggaccgctggcaggtggaggggcagtatggttccaggacccactcccggtagttctgggtggtgccgggcgggcgctggggtgccgacagggagggcacgtagtctgatgccctccacagtggctccaccccgtaccggttcctgttgagcactgtaggtgggactcgggtcaccatgtgcccccacctcctcgccgttggccagcaaggggctcctggatcgccccgggcagtttcaccctggcctaggtggccttgtccccctggcctcccaaggacccaccctgcacctagcctcaccgtattccttgccccggattggcctgtctttccacagcgcgctcccccaccgggtgctgggggcctggtactgggcagggacgatggggtcatgccaggcggtctcccgcaggtgctgggtgtaggctgcggtggggcgggggctggcggtcattcctgtccccctctggcaggcccgctgcccagggcgggggggggggcactcacccgatggcatgctgcactcacggtgttggtagcagctgtgccagcggttgtaggcctcgcggaaggggctggccggggcccgtggcaggttgtaccaggcttcccaggcgtccgagttggtcaggcctgtgtaccacagctgggccggctgcgtcccgtcccatgggcgtgtacttccagcgtgtggcctgcctgatggctggtggccagcgggaaccctccagggacaggtagtcatcgctgagggtgggcagggggcagagactgagcccatgtctacagcgagtgctttgacccctttgcgatgtctgccagggtggatgatgtagaggcctggcccacggcgtggggtctccctccctcgccacttggagtctgtccttcagccctgtacccctcaccccagag

SEQ ID NO: 280405 - DNA, 2106 bp, Homo sapiens
ggctgcagagtcgagcgtggggcggacgcggcggacgtgggtgagggcgcggccgtaagagagcgggacgcggggtgcccggcgcgtggtgggggtccccggcgcctgcccccacggcacccaagaaggcctggccagggtaccctccgcggagcccgggggtggggggcgcggggcccggcgccgcgatgggcccgggacccccagcggccggagcggcgccgtccccgcggccgctgtccctggtggcgcggctgagctacgccgtgggccacttcctcaacgacctgtgcgcgtccatgtggttcacctacctgctgctctacctgcactcggtgcgcgcctacagctcccgcggcgcggggctgctgctgctgctgggccaggtggccgacgggctgtgcacaccgctcgtgggctacgaggccgaccgcgccgccagctgctgcgcccgctacggcccgcgcaaggcctggcacctggtcggcaccgtctgcgtcctgctgtccttccccttcatcttcagcccctgcctgggctgtggggcggccacgcccgagtgggctgccctcctctactacggcccgttcatcgtgatcttccagtttggctgggcctccacacagatctcccacctcagcctcatcccggagctcgtcaccaacgaccatgagaaggtggagctcacggcactcaggtatgcgttcaccgtggtggccaacatcaccgtctacggcgccgcctggctcctgctgcacctgcagggctcgtcgcgggtggagcccacccaagacatcagcatcagcgaccagctggggggccaggacgtgcccgtgttccggaacctgtccctgctggtggtgggtgtcggcgccgtgttctcactgctattccacctgggcacccgggagaggcgccggccgcatgcggaggagccaggcgagcacacccccctgttggcccctgccacggcccagcccctgctgctctggaagcactggctccgggagccggctttctaccaggtgggcatactgtacatgaccaccaggctcatcgtgaacctgtcccagacctacatggccatgtacctcacctactcgctccacctgcccaagaagttcatcgcgaccattcccctggtgatgtacctcagcggcttcttgtcctccttcctcatgaagcccatcaacaagtgcattgggaggaacatgacctacttctcaggcctcctggtgatcctggcctttgccgcctgggtggcgctggcggagggactgggtgtggccgtgtacgcagcggctgtgctgctgggtgctggctgtgccaccatcctcgtcacctcgctggccatgacggccgacctcatcggtccccacacgaacagcggagcgttcgtgtacggctccatgagcttcttggataaggtggccaatgggctggcagtcatggccatccagagcctgcacccttgcccctcagagctctgctgcagggcctgcgtgagcttttaccactgggcgatggtggctgtgacgggcggcgtgggcgtggccgctgccctgtgtctctgtagcctcctgctgtggccgacccgcctgcgacgctgatgagacctgcacgcagtggctcacagcagcacgatttgtgacagcccgaggcggagaacaccgaacacccagtgaaggtgaggggatcagcacggcgcggccacccacgcacccacgcgctggaacgagactcagccacaaggaggtgcgaagctctgacccaggccacagtgcggatgcaccttgaggatgtcacgctcagtgagagacaccagacacagaagggtacgctgtgatcccacttctatgaaatgtccaggacagaccaatccacagaatcagggagaggattcgtgggtgccgggactggggagggggacctgggggtgactaggtgacataatggggacagggctgccttctgggtgatgagaatgttctggaatcagatgggatggctgcacggcgtggtgaaggtactgaacgccacctcactgtaagacggtagattttgtattttaccacaataaacaaaacaaaacaaaaccaaaccaaa

SEQ ID NO: 280406 - DNA, 2271 bp, Homo sapiens
ggctgcagagtcgagcgtggggcggacgcggcggacgtgggtgagggcgcggccgtaagagagcgggacgcggggtgcccggcgcgtggtgggggtccccggcgcctgcccccacggcacccaagaaggcctggccagggtaccctccgcggagcccgggggtggggggcgcggggcccggcgccgcgatgggcccgggacccccagcggccggagcggcgccgtccccgcggccgctgtccctggtggcgcggctgagctacgccgtgggccacttcctcaacgacctgtgcgcgtccatgtggttcacctacctgctgctctacctgcactcggtgcgcgcctacagctcccgcggcgcggggctgctgctgctgctgggccaggtggccgacgggctgtgcacaccgctcgtgggctacgaggccgaccgcgccgccagctgctgcgcccgctacggcccgcgcaaggcctggcacctggtcggcaccgtctgcgtcctgctgtccttccccttcatcttcagcccctgcctgggctgtggggcggccacgcccgagtgggctgccctcctctactacggcccgttcatcgtgatcttccagtttggctgggcctccacacagatctcccacctcagcctcatcccggagctcgtcaccaacgaccatgagaaggtggagctcacggcactcaggtatgcgttcaccgtggtggccaacatcaccgtctacggcgccgcctggctcctgctgcacctgcagggctcgtcgcgggtggagcccacccaagacatcagcatcagcgaccagctggggggccaggacgtgcccgtgttccggaacctgtccctgctggtggtgggtgtcggcgccgtgttctcactgctattccacctgggcacccgggagaggcgccggccgcatgcggaggagccaggcgagcacacccccctgttggcccctgccacggcccagcccctgctgctctggaagcactggctccgggagccggctttctaccaggtgggcatactgtacatgaccaccaggctcatcgtgaacctgtcccagacctacatggccatgtacctcacctactcgctccacctgcccaagaagttcatcgcgaccattcccctggtgatgtacctcagcggcttcttgtcctccttcctcatgaagcccatcaacaagtgcattgggaggaacatgacctacttctcaggcctcctggtgatcctggcctttgccgcctgggtggcgctggcggagggactgggtgtggccgtgtacgcagcggctgtgctgctgggtgctggctgtgccaccatcctcgtcacctcgctggccatgacggccgacctcatcggtccccacacgaacagcggagcgttcgtgtacggctccatgagcttcttggataaggtggccaatgggctggcagtcatggccatccagagcctgcacccttgcccctcagagctctgctgcagggcctgcgtgagcttttaccactgggcgatggtggctgtgacgggcggcgtgggcgtggccgctgccctgtgtctctgtagcctcctgctgtggccgacccgcctgcgacgctgggaccgtgatgcccggccctgactcctgacagcctcctgcacctgtgcaagggaactgtggggacgcacgaggatgccccccagggccttggggaaaagcccccactgcccctcactcttctctggacccccaccctccatcctcacccagctcccgggggtggggtcgggtgagggcagcagggatgcccgccagggacttgcaaggaccccctgggttttgagggtgtcccattctcaactctaatccatcccagccctctggaggatttggggtgcccctctcggcagggaacaggaagtaggaatcccagaagggtctgggggaaccctaaccctgagctcagtccagttcacccctcacctccagcctgggggtctccagacactgccagggccccctcaggacggctggagcctggaggagacagccacggggtggtgggctgggcctggaccccaccgtggtgggcagcagggctgcccggcaggcttggtggactctgctggcagcaaataaagagatgacggcaaaaaaacatagacaaaacagggcgcggaaaaaatatccagaggccagatatcgaatacacgttttgaaagggcctaagggccaaataacaaccgccggtaacctcgaggacaacaacggtctgaagctt

SEQ ID NO: 280407 - DNA, 2308 bp, Homo sapiens
ggctgcagagtcgagcgtggggcggacgcggcggacgtgggtgagggcgcggccgtaagagagcgggacgcggggtgcccggcgcgtggtgggggtccccggcgcctgcccccacggcacccaagaaggcctggccagggtaccctccgcggagcccgggggtggggggcgcggggcccggcgccgcgatgggcccgggacccccagcggccggagcggcgccgtccccgcggccgctgtccctggtggcgcggctgagctacgccgtgggccacttcctcaacgacctgtgcgcgtccatgtggttcacctacctgctgctctacctgcactcggtgcgcgcctacagctcccgcggcgcggggctgctgctgctgctgggccaggtggccgacgggctgtgcacaccgctcgtgggctacgaggccgaccgcgccgccagctgctgcgcccgctacggcccgcgcaaggcctggcacctggtcggcaccgtctgcgtcctgctgtccttccccttcatcttcagcccctgcctgggctgtggggcggccacgcccgagtgggctgccctcctctactacggcccgttcatcgtgatcttccagtttggctgggcctccacacagatctcccacctcagcctcatcccggagctcgtcaccaacgaccatgagaaggtggagctcacggcactcaggtatgcgttcaccgtggtggccaacatcaccgtctacggcgccgcctggctcctgctgcacctgcagggctcgtcgcgggtggagcccacccaagacatcagcatcagcgaccagctggggggccaggacgtgcccgtgttccggaacctgtccctgctggtggtgggtgtcggcgccgtgttctcactgctattccacctgggcacccgggagaggcgccggccgcatgcggaggagccaggcgagcacacccccctgttggcccctgccacggcccagcccctgctgctctggaagcactggctccgggagccggctttctaccaggtgggcatactgtacatgaccaccaggctcatcgtgaacctgtcccagacctacatggccatgtacctcacctactcgctccacctgcccaagaagttcatcgcgaccattcccctggtgatgtacctcagcggcttcttgtcctccttcctcatgaagcccatcaacaagtgcattgggaggaacatgacctacttctcaggcctcctggtgatcctggcctttgccgcctgggtggcgctggcggagggactgggtgtggccgtgtacgcagcggctgtgctgctgggtgctggctgtgccaccatcctcgtcacctcgctggccatgacggccgacctcatcggtccccacacgaacagcggagcgttcgtgtacggctccatgagcttcttggataaggtggccaatgggctggcagtcatggccatccagagcctgcacccttgcccctcagagctctgctgcagggcctgcgtgagcttttaccactgggcgatggtggctgtgacgggcggcgtgggcgtggccgctgccctgtgtctctgtagcctcctgctgtggccgacccgcctgcgacgctcttttcttgcctggagaagagggaggggagaggacaagggccctggctactcctggattcctacagtccttgtccagcctccaagacccacaagtcccttcctctgggaagcccccctggcctggaggtgcaccaggaagaagtggtctggggctggcactaagccatggcccagggaagactgggggacccactaggccaggatgagacctgcacgcagtggctcacagcagcacgatttgtgacagcccgaggcggagaacaccgaacacccagtgaaggtgaggggatcagcacggcgcggccacccacgcacccacgcgctggaacgagactcagccacaaggaggtgcgaagctctgacccaggccacagtgcggatgcaccttgaggatgtcacgctcagtgagagacaccagacacagaagggtacgctgtgatcccacttctatgaaatgtccaggacagaccaatccacagaatcagggagaggattcgtgggtgccgggactggggagggggacctgggggtgactaggtgacataatggggacagggctgccttctgggtgatgagaatgttctggaatcagatgggatggctgcacggcgtggtgaaggtactgaacgccacctcactgtaagacggtagattttgtattttaccacaataaacaaaacaaaacaaaaccaaaccaaa

SEQ ID NO: 280408 - DNA, 2095 bp, Homo sapiens
ccaccgatcgccccccccccccccccccttctgctagtcgaggcctggtttaatcggccgagggcggacgtgggtgagggcgcggccgtaagagagcgggacgcggggtgcccggcgcgtggtgggggtccccggcgcctgcccccacggcacccaagaaggcctggccagggtaccctccgcggagcccgggggtggggggcgcggctgagctacgccgtgggccacttcctcaacgacctgtgcgcgtccatgtggttcacctacctgctgctctacctgcactcggtgcgcgcctacagctcccgcggcgcggggctgctgctgctgctgggccaggtggccgacgggctgtgcacaccgctcgtgggctacgaggccgaccgcgccgccagctgctgcgcccgctacggcccgcgcaaggcctggcacctggtcggcaccgtctgcgtcctgctgtccttccccttcatcttcagcccctgcctgggctgtggggcggccacgcccgagtgggctgccctcctctactacggcccgttcatcgtgatcttccagtttggctgggcctccacacagatctcccacctcagcctcatcccggagctcgtcaccaacgaccatgagaaggtggagctcacggcactcaggtatgcgttcaccgtggtggccaacatcaccgtctacggcgccgcctggctcctgctgcacctgcagggctcgtcgcgggtggagcccacccaagacatcagcatcagcgaccagctggggggccaggacgtgcccgtgttccggaacctgtccctgctggtggtgggtgtcggcgccgtgttctcactgctattccacctgggcacccgggagaggcgccggccgcatgcggaggagccaggcgagcacacccccctgttggcccctgccacggcccagcccctgctgctctggaagcactggctccgggagccggctttctaccaggtgggcatactgtacatgaccaccaggctcatcgtgaacctgtcccagacctacatggccatgtacctcacctactcgctccacctgcccaagaagttcatcgcgaccattcccctggtgatgtacctcagcggcttcttgtcctccttcctcatgaagcccatcaacaagtgcattgggaggaacatgacctacttctcaggcctcctggtgatcctggcctttgccgcctgggtggcgctggcggagggactgggtgtggccgtgtacgcagcggctgtgctgctgggtgctggctgtgccaccatcctcgtcacctcgctggccatgacggccgacctcatcggtccccacacgaacagcggagcgttcgtgtacggctccatgagcttcttggataaggtggccaatgggctggcagtcatggccatccagagcctgcacccttgcccctcagagctctgctgcagggcctgcgtgagcttttaccactgggcgatggtggctgtgacgggcggcgtgggcgtggccgctgccctgtgtctctgtagcctcctgctgtggccgacccgcctgcgacgctgggaccgtgatgcccggccctgactcctgacagcctcctgcacctgtgcaagggaactgtggggacgcacgaggatgccccccagggccttggggaaaagcccccactgcccctcactcttctctggacccccaccctccatcctcacccagctcccgggggtggggtcgggtgagggcagcagggatgcccgccagggacttgcaaggaccccctgggttttgagggtgtcccattctcaactctaatccatcccagccctctggaggatttggggtgcccctctcggcagggaacaggaagtaggaatcccagaagggtctgggggaaccctaaccctgagctcagtccagttcacccctcacctccagcctgggggtctccagacactgccagggccccctcaggacggctggagcctggaggagacagccacggggtggtgggctgggcctggaccccaccgtggtgggcagcagggctgcccggcaggcttggtggactctgctggcagcaaataaagagatgacggca

SEQ ID NO: 280409 - DNA, 2116 bp, Homo sapiens
ggctgcagagtcgagcgtggggcggacgcggcggacgtgggtgagggcgcggccgtaagagagcgggacgcggggtgcccggcgcgtggtgggggtccccggcgcctgcccccacggcacccaagaaggcctggccagggtaccctccgcggagcccgggggtggggggcgcggggcccggcgccgcgatgggcccgggacccccagcggccggagcggcgccgtccccgcggccgctgtccctggtggcgcggctgagctacgccgtgggccacttcctcaacgacctgtgcgcgtccatgtggttcacctacctgctgctctacctgcactcggtgcgcgcctacagctcccgcggcgcggggctgctgctgctgctgggccaggtggccgacgggctgtgcacaccgctcgtgggctacgaggccgaccgcgccgccagctgctgcgcccgctacgggcaccgtctgcgtcctgctgtccttccccttcatcttcagcccctgcctgggctgtggggcggccacgcccgagtgggctgccctcctctactacggcccgttcatcgtgatcttccagtttggctgggcctccacacagatctcccacctcagcctcatcccggagctcgtcaccaacgaccatgagaaggtggagctcacggcactcaggtatgcgttcaccgtggtggccaacatcaccgtctacggcgccgcctggctcctgctgcacctgcagggctcgtcgcgggtggagcccacccaagacatcagcatcagcgaccagctggggggccaggacgtgcccgtgttccggaacctgtccctgctggtggtgggtgtcggcgccgtgttctcactgctattccacctgggcacccgggagaggcgccggccgcatgcggaggagccaggcgagcacacccccctgttggcccctgccacggcccagcccctgctgctctggaagcactggctccgggagccggctttctaccaggtgggcatactgtacatgaccaccaggctcatcgtgaacctgtcccagacctacatggccatgtacctcacctactcgctccacctgcccaagaagttcatcgcgaccattcccctggtgatgtacctcagcggcttcttgtcctccttcctcatgaagcccatcaacaagtgcattgggaggaacatgacctacttctcaggcctcctggtgatcctggcctttgccgcctgggtggcgctggcggagggactgggtgtggccgtgtacgcagcggctgtgctgctgggtgctggctgtgccaccatcctcgtcacctcgctggccatgacggccgacctcatcggtccccacacgaacagcggagcgttcgtgtacggctccatgagcttcttggataaggtggccaatgggctggcagtcatggccatccagagcctgcacccttgcccctcagagctctgctgcagggcctgcgtgagcttttaccactgggcgatggtggctgtgacgggcggcgtgggcgtggccgctgccctgtgtctctgtagcctcctgctgtggccgacccgcctgcgacgctgggaccgtgatgcccggccctgactcctgacagcctcctgcacctgtgcaagggaactgtggggacgcacgaggatgccccccagggccttggggaaaagcccccactgcccctcactcttctctggacccccaccctccatcctcacccagctcccgggggtggggtcgggtgagggcagcagggatgcccgccagggacttgcaaggaccccctgggttttgagggtgtcccattctcaactctaatccatcccagccctctggaggatttggggtgcccctctcggcagggaacaggaagtaggaatcccagaagggtctgggggaaccctaaccctgagctcagtccagttcacccctcacctccagcctgggggtctccagacactgccagggccccctcaggacggctggagcctggaggagacagccacggggtggtgggctgggcctggaccccaccgtggtgggcagcagggctgcccggcaggcttggtggactctgctggcagcaaataaagagatgacggca

SEQ ID NO: 280410 - DNA, 2257 bp, Homo sapiens
tttgagtacagggttggcgttgacttcggttgtgggcgtggcctctgcttggtgggcgtggttttctgctggagaacgggcccacaggaccaaggggagggtgccgcccccaaggagtggaagtgggcgggaccttagagtgggcagagctggcattgtgcggtgggcggggcctggacttagagtggcagaggacctgtcaggggcgtggcagctggcacggggcggggtctcagcttccagaggaaaatgggctgtgggcggagccacaagcaattcaaatccagcctggggcggggcttcgaggctggggcgggagcccggggcctcccccagctcagcgcagggactctcacctcctcctcgtgggaccccttctcgcccgcgcgtggaccctcgccgcgctcttgcttgacagtcaccacgaagcccccatgctggcccggagccttgccgcccgccggcctggagccaaggataccgcggtcagccccgtcccaagaatctcccctcccccaaaagcccaccccagggcgttttgacccccgacggcggggctgcagcgagagtgcatgagcccgaggaggcagggtctgatggggcaccgtctgcgtcctgctgtccttccccttcatcttcagcccctgcctgggctgtggggcggccacgcccgagtgggctgccctcctctactacggcccgttcatcgtgatcttccagtttggctgggcctccacacagatctcccacctcagcctcatcccggagctcgtcaccaacgaccatgagaaggtggagctcacggcactcaggtatgcgttcaccgtggtggccaacatcaccgtctacggcgccgcctggctcctgctgcacctgcagggctcgtcgcgggtggagcccacccaagacatcagcatcagcgaccagctggggggccaggacgtgcccgtgttccggaacctgtccctgctggtggtgggtgtcggcgccgtgttctcactgctattccacctgggcacccgggagaggcgccggccgcatgcggaggagccaggcgagcacacccccctgttggcccctgccacggcccagcccctgctgctctggaagcactggctccgggagccggctttctaccaggtgggcatactgtacatgaccaccaggctcatcgtgaacctgtcccagacctacatggccatgtacctcacctactcgctccacctgcccaagaagttcatcgcgaccattcccctggtgatgtacctcagcggcttcttgtcctccttcctcatgaagcccatcaacaagtgcattgggaggaacatgacctacttctcaggcctcctggtgatcctggcctttgccgcctgggtggcgctggcggagggactgggtgtggccgtgtacgcagcggctgtgctgctgggtgctggctgtgccaccatcctcgtcacctcgctggccatgacggccgacctcatcggtccccacacgaacagcggagcgttcgtgtacggctccatgagcttcttggataaggtggccaatgggctggcagtcatggccatccagagcctgcacccttgcccctcagagctctgctgcagggcctgcgtgagcttttaccactgggcgatggtggctgtgacgggcggcgtgggcgtggccgctgccctgtgtctctgtagcctcctgctgtggccgacccgcctgcgacgctgggaccgtgatgcccggccctgactcctgacagcctcctgcacctgtgcaagggaactgtggggacgcacgaggatgccccccagggccttggggaaaagcccccactgcccctcactcttctctggacccccaccctccatcctcacccagctcccgggggtggggtcgggtgagggcagcagggatgcccgccagggacttgcaaggaccccctgggttttgagggtgtcccattctcaactctaatccatcccagccctctggaggatttggggtgcccctctcggcagggaacaggaagtaggaatcccagaagggtctgggggaaccctaaccctgagctcagtccagttcacccctcacctccagcctgggggtctccagacactgccagggccccctcaggacggctggagcctggaggagacagccacggggtggtgggctgggcctggaccccaccgtggtgggcagcagggctgcccggcaggcttggtggactctgctggcagcaaataaagagatgacggca

SEQ ID NO: 280411 - DNA, 2216 bp, Homo sapiens
cttcttctcctggatcttctccgtgcacatcttataggcttcagactgctggtacgcccgcagctccttcatgtactgctgcttctctctctcggcctcatccaggtaccgctgcttttccgttggctgcagcttgctccactcggcgcccagcatcttggtgatctcgggaaagggcagatccgggtggcgcgtgcggatctgctcgcgccgctcgttcaggaagcgcacgtagcccgtgaccggtgccttgggcccattcggcagaatcttcttccgcttcttgcccttgggccagccgcgtttcttcaccggctcctcctcgtgggaccccttctcgcccgcgcgtggaccctcgccgcgctcttgcttgacagtcaccacgaagcccccatgctggcccggagccttgccgcccgccggcctggagccaaggataccgcggtcagccccgtcccaagaatctcccctcccccaaaagcccaccccagggcgttttgacccccgacggcggggctgcagcgagagtgcatgagcccgaggaggcagggtctgatggggcaccgtctgcgtcctgctgtccttccccttcatcttcagcccctgcctgggctgtggggcggccacgcccgagtgggctgccctcctctactacggcccgttcatcgtgatcttccagtttggctgggcctccacacagatctcccacctcagcctcatcccggagctcgtcaccaacgaccatgagaaggtggagctcacggcactcaggtatgcgttcaccgtggtggccaacatcaccgtctacggcgccgcctggctcctgctgcacctgcagggctcgtcgcgggtggagcccacccaagacatcagcatcagcgaccagctggggggccaggacgtgcccgtgttccggaacctgtccctgctggtggtgggtgtcggcgccgtgttctcactgctattccacctgggcacccgggagaggcgccggccgcatgcggaggagccaggcgagcacacccccctgttggcccctgccacggcccagcccctgctgctctggaagcactggctccgggagccggctttctaccaggtgggcatactgtacatgaccaccaggctcatcgtgaacctgtcccagacctacatggccatgtacctcacctactcgctccacctgcccaagaagttcatcgcgaccattcccctggtgatgtacctcagcggcttcttgtcctccttcctcatgaagcccatcaacaagtgcattgggaggaacatgacctacttctcaggcctcctggtgatcctggcctttgccgcctgggtggcgctggcggagggactgggtgtggccgtgtacgcagcggctgtgctgctgggtgctggctgtgccaccatcctcgtcacctcgctggccatgacggccgacctcatcggtccccacacgaacagcggagcgttcgtgtacggctccatgagcttcttggataaggtggccaatgggctggcagtcatggccatccagagcctgcacccttgcccctcagagctctgctgcagggcctgcgtgagcttttaccactgggcgatggtggctgtgacgggcggcgtgggcgtggccgctgccctgtgtctctgtagcctcctgctgtggccgacccgcctgcgacgctgggaccgtgatgcccggccctgactcctgacagcctcctgcacctgtgcaagggaactgtggggacgcacgaggatgccccccagggccttggggaaaagcccccactgcccctcactcttctctggacccccaccctccatcctcacccagctcccgggggtggggtcgggtgagggcagcagggatgcccgccagggacttgcaaggaccccctgggttttgagggtgtcccattctcaactctaatccatcccagccctctggaggatttggggtgcccctctcggcagggaacaggaagtaggaatcccagaagggtctgggggaaccctaaccctgagctcagtccagttcacccctcacctccagcctgggggtctccagacactgccagggccccctcaggacggctggagcctggaggagacagccacggggtggtgggctgggcctggaccccaccgtggtgggcagcagggctgcccggcaggcttggtggactctgctggcagcaaataaagagatgacggca

SEQ ID NO: 280412 - DNA, 3139 bp, Homo sapiens
ggctgcagagtcgagcgtggggcggacgcggcggacgtgggtgagggcgcggccgtaagagagcgggacgcggggtgcccggcgcgtggtgggggtccccggcgcctgcccccacggcacccaagaaggcctggccagggtaccctccgcggagcccgggggtggggggcgcggggcccggcgccgcgatgggcccgggacccccagcggccggagcggcgccgtccccgcggccgctgtccctggtggcgcggctgagctacgccgtgggccacttcctcaacgacctgtgcgcgtccatgtggttcacctacctgctgctctacctgcactcggtgcgcgcctacagctcccgcggcgcggggctgctgctgctgctgggccaggtggccgacgggctgtgcacaccgctcgtgggctacgaggccgaccgcgccgccagctgctgcgcccgctacggcccgcgcaaggcctggcacctggtcggcaccgtctgcgtcctgctgtccttccccttcatcttcagcccctgcctgggctgtggggcggccacgcccgagtgggctgccctcctctactacggcccgttcatcgtgatcttccagtttggctgggcctccacacagatctcccacctcagcctcatcccggagctcgtcaccaacgaccatgagaaggtggagctcacggcactcaggtatgcgttcaccgtggtggccaacatcaccgtctacggcgccgcctggctcctgctgcacctgcagggctcgtcgcgggtggagcccacccaagacatcagcatcagcgaccagctggggggccaggacgtgcccgtgttccggaacctgtccctgctggtggtgggtgtcggcgccgtgttctcactgctattccacctgggcacccgggagaggcgccggccgcatgcggaggagccaggcgagcacacccccctgttggcccctgccacggcccagcccctgctgctctggaagcactggctccgggagccggctttctaccaggtgggcatactgtacatgaccaccaggctcatcgtgaacctgtcccagacctacatggccatgtacctcacctactcgctccacctgcccaagaagttcatcgcgaccattcccctggtgatgtacctcagcggcttcttgtcctccttcctcatgaagcccatcaacaagtgcattgggaggaacatgacctacttctcaggcctcctggtgatcctggcctttgccgcctgggtggcgctggcggagggactgggtgtggccgtgtacgcagcggctgtgctgctgggtgctggctgtgccaccatcctcgtcacctcgctggccatgacggccgacctcatcggtccccacacgaacagcggagcgttcgtgtacggctccatgagcttcttggataaggtggccaatgggctggcagtcatggccatccagagcctgcacccttgcccctcagagctctgctgcagggcctgcgtgagcttttaccactgggcgatggtggctgtgacgggcggcgtgggcgtggccgctgccctgtgtctctgtagcctcctgctgtggccgacccgcctgcgacgctcttttcttgcctggagaagagggaggggagaggacaagggccctggctactcctggattcctacagtccttgtccagcctccaagacccacaagtcccttcctctgggaagcccccctggcctggaggtgcaccaggaagaagtggtctggggctggcactaagccatggcccagggaagactgggggacccactaggccaggtgtgtggctcacgcttgtaaacccagcactttgggaggctgaggcaggtggatcacttgaggtcaggagttcgagaccagcctggccagcatggtaaaaccccatctctactaaaaatacgaaaattaagccaggcatggtgtgggggcggggggcacctgtaatcccagctactcaggaggctgaggcaggagaatcgcttgaacccaggaagtggagtttgcagtaagctgagatcgtgcccttgcactccagcctgggcaacagagtgagactctgtctcaaaaacaaaaagacaagagactcaaagatgttttatgctttgaccttgctcttgggaatatgtcccaaggaagtcatcccagaaaacaaggttgctggcccaagacagtctagcagggttcaaaacaatctcatctgccctgcacggaaagcccggttccagctctcatggcaggaactctgcttaaatcctgactagactcccaggtgcccacagaacatgggagtagcctggtcagttacagagcctgtttgagggaccccacatagactcggcttttccactagaaaggcaatttcaagatcaggagaacctcacccttttgaaatgaattgcaagacacatgtagcttttaaaacacaattaaaacagcacaaaattgtctgggcgcagtggctcatgcctgtaatcccagcactttgggaggccaaggtgggtagatcacctgaggtcgggagttcgagaccagcctgaccaacatggtgaggccccgtctctactaaaaatacaaaaattagtcaggtgtggtgatggacacctgtggtcccagctactcgggaagctgaggcaggagaattagcttgaacccgggaggcggaggttgcagtgagccgagattgcgtcactgcactccagcctgggtgagagagcgagactctgtctcaacacaaacaaaacagcacagaataatattcaatgagaaatgagcccctcacccctgctgtcggccccgtacccacctgccactcactactttctggtgtttcctcccaggagcaggtggtacatgcactcacccccgttattacacagttgcagtgagccaagattgcaccattgcgttccagtcttgcgacaagagtgagactccgtccaaaaaaaaaaacaaaaattagctgggcatgtggcacaaacctgtagtcctagctactcagaaggcttgagatggaagaatcctagaacctgggaggcagaagttgcagtgagccaagattgcgccactgcaccctagcctgggcaacagtatgagactgtctcaaaaaaa

SEQ ID NO: 280413 - DNA, 833 bp, Homo sapiens
ggttcagaacccacacgcgtacatcctcgtcacctcgctggccatgacggccgacctcatcggtccccacacgaacagcggagcgttcgtgtacggctccatgagcttcttggataaggtggccaatgggctggcagtcatggccatccagagcctgcacccttgcccctcagagctctgctgcagggcctgcgtgagcttttaccactgggcgatggtggctgtgacgggcggcgtgggcgtggccgctgccctgtgtctctgtagcctcctgctgtggccgacccgcctgcgacgctgggaccgtgatgcccggccctgactcctgacagcctcctgcacctgtgcaagggaactgtggggacgcacgaggatgccccccagggccttggggaaaagcccccactgcccctcactcttctctggacccccaccctccatcctcacccagctcccgggggtggggtcgggtgagggcagcagggatgcccgccagggacttgcaaggaccccctgggttttgagggtgtcccattctcaactctaatccatcccagccctctggaggatttggggtgcccctctcggcagggaacaggaagtaggaatcccagaagggtctgggggaaccctaaccctgagctcagtccagttcacccctcacctccagcctgggggtctccagacactgccagggccccctcaggacggctggagcctggaggagacagccacggggtggtgggctgggcctggaccccaccgtggtgggcagcagggctgcccggcaggcttggtggactctgctggcagcaaataaagagatgacggca

SEQ ID NO: 280414 - DNA, 1508 bp, Homo sapiens
tggctaggagcaggccgggtgtgtaggatgcccgccagggacttgcaaggaccccctgggttttgagggtgtcccattctcaactctaatccatcccagccctctggaggatttggggtgcccctctcggcagggaacaggaagtaggaatcccagaagggtctgggggaaccctaaccctgagctcagtccagttcacccctcacctccagcctgggggtctccagacactgccagggccccctcaggacggctggagcctggaggagacagccacggggtggtgggctgggcctggaccccaccgtggtgggcagcagggctgcccggcaggcttggtggactctgctggcagcaaataaagagatgacggcagcctggctcctgtctgcctgcgggggggctctgggcaggggtagcctgggcatctcagccctgccctggttgtgggcggccagcgagcccagtgtctgcctctgtcccgagcctctggtcccctgggactaggttagtgccccctcatctgggtgcagagacagtgggtgcatcctggtagcatgcctttatcggggagtgggtgtgagggaaggcggggaccgctggcaggtggaggggcagtatggttccaggacccactcccggtagttctgggtggtgccgggcgggcgctggggtgccgacagggagggcacgtagtctgatgccctccacagtggctccaccccgtaccggttcctgttgagcactgtaggtgggactcgggtcaccatgtgcccccacctcctcgccgttggccagcaaggggctcctggatcgccccgggcagtttcaccctggcctaggtggccttgtccccctggcctcccaaggacccaccctgcacctagcctcaccgtattccttgccccggattggcctgtctttccacagcgcgctcccccaccgggtgctgggggcctggtactgggcagggacgatggggtcatgccaggcggtctcccgcaggtgctgggtgtaggctgcggtggggcgggggctggcggtcattcctgtccccctctggcaggcccgctgcccagggcgggggggggggcactcacccgatggcatgctgcactcacggtgttggtagcagctgtgccagcggttgtaggcctcgcggaaggggctggccggggcccgtggcaggttgtaccaggcttcccaggcgtccgagttggtcaggcctgtgtaccacagctgggccggctgcgtcccgtcccatgggcgtgtacttccagcgtgtggcctgcctgatggctggtggccagcgggaaccctccagggacaggtagtcatcgctgagggtgggcagggggcagagactgagcccatgtctacagcgagtgctttgacccctttgcgatgtctgccagggtggatgatgtagaggcctggcccacggcgtggggtctccctccctcgccacttggagtctgtccttcagccctgtacccctcaccccagag

SEQ ID NO: 280415 - DNA, 1619 bp, Homo sapiens
gggtgcttgaggagagaggctgactccccctctccccacacatcgcaccccaagcacccaagtcagcactaaacctttctgttctcagcttttcttgcctggagaagagggaggggagaggacaagggccctggctactcctggattcctacagtccttgtccagcctccaagacccacaagtcccttcctctgggaagcccccctggcctggaggtgcaccaggaagaagtggtctggggctggcactaagccatggcccagggaagactgggggacccactaggccaggtgtgtggctcacgcttgtaaacccagcactttgggaggctgaggcaggtggatcacttgaggtcaggagttcgagaccagcctggccagcatggtaaaaccccatctctactaaaaatacgaaaattaagccaggcatggtgtgggggcggggggcacctgtaatcccagctactcaggaggctgaggcaggagaatcgcttgaacccaggaagtggagtttgcagtaagctgagatcgtgcccttgcactccagcctgggcaacagagtgagactctgtctcaaaaacaaaaagacaagagactcaaagatgttttatgctttgaccttgctcttgggaatatgtcccaaggaagtcatcccagaaaacaaggttgctggcccaagacagtctagcagggttcaaaacaatctcatctgccctgcacggaaagcccggttccagctctcatggcaggaactctgcttaaatcctgactagactcccaggtgcccacagaacatgggagtagcctggtcagttacagagcctgtttgagggaccccacatagactcggcttttccactagaaaggcaatttcaagatcaggagaacctcacccttttgaaatgaattgcaagacacatgtagcttttaaaacacaattaaaacagcacaaaattgtctgggcgcagtggctcatgcctgtaatcccagcactttgggaggccaaggtgggtagatcacctgaggtcgggagttcgagaccagcctgaccaacatggtgaggccccgtctctactaaaaatacaaaaattagtcaggtgtggtgatggacacctgtggtcccagctactcgggaagctgaggcaggagaattagcttgaacccgggaggcggaggttgcagtgagccgagattgcgtcactgcactccagcctgggtgagagagcgagactctgtctcaacacaaacaaaacagcacagaataatattcaatgagaaatgagcccctcacccctgctgtcggccccgtacccacctgccactcactactttctggtgtttcctcccaggagcaggtggtacatgcactcacccccgttattacacagttgcagtgagccaagattgcaccattgcgttccagtcttgcgacaagagtgagactccgtccaaaaaaaaaaacaaaaattagctgggcatgtggcacaaacctgtagtcctagctactcagaaggcttgagatggaagaatcctagaacctgggaggcagaagttgcagtgagccaagattgcgccactgcaccctagcctgggcaacagtatgagactgtctcaaaaaaa

SEQ ID NO: 280416 - DNA, 1542 bp, Homo sapiens
tgttctggtttttgagacggatcttcgctctgtcgcccaggctggagtgcagtggtgcgattcctggattcctacagtccttgtccagcctccaagacccacaagtcccttcctctgggaagcccccctggcctggaggtgcaccaggaagaagtggtctggggctggcactaagccatggcccagggaagactgggggacccactaggccaggtgtgtggctcacgcttgtaaacccagcactttgggaggctgaggcaggtggatcacttgaggtcaggagttcgagaccagcctggccagcatggtaaaaccccatctctactaaaaatacgaaaattaagccaggcatggtgtgggggcggggggcacctgtaatcccagctactcaggaggctgaggcaggagaatcgcttgaacccaggaagtggagtttgcagtaagctgagatcgtgcccttgcactccagcctgggcaacagagtgagactctgtctcaaaaacaaaaagacaagagactcaaagatgttttatgctttgaccttgctcttgggaatatgtcccaaggaagtcatcccagaaaacaaggttgctggcccaagacagtctagcagggttcaaaacaatctcatctgccctgcacggaaagcccggttccagctctcatggcaggaactctgcttaaatcctgactagactcccaggtgcccacagaacatgggagtagcctggtcagttacagagcctgtttgagggaccccacatagactcggcttttccactagaaaggcaatttcaagatcaggagaacctcacccttttgaaatgaattgcaagacacatgtagcttttaaaacacaattaaaacagcacaaaattgtctgggcgcagtggctcatgcctgtaatcccagcactttgggaggccaaggtgggtagatcacctgaggtcgggagttcgagaccagcctgaccaacatggtgaggccccgtctctactaaaaatacaaaaattagtcaggtgtggtgatggacacctgtggtcccagctactcgggaagctgaggcaggagaattagcttgaacccgggaggcggaggttgcagtgagccgagattgcgtcactgcactccagcctgggtgagagagcgagactctgtctcaacacaaacaaaacagcacagaataatattcaatgagaaatgagcccctcacccctgctgtcggccccgtacccacctgccactcactactttctggtgtttcctcccaggagcaggtggtacatgcactcacccccgttattacacagttgcagtgagccaagattgcaccattgcgttccagtcttgcgacaagagtgagactccgtccaaaaaaaaaaacaaaaattagctgggcatgtggcacaaacctgtagtcctagctactcagaaggcttgagatggaagaatcctagaacctgggaggcagaagttgcagtgagccaagattgcgccactgcaccctagcctgggcaacagtatgagactgtctcaaaaaaa

SEQ ID NO: 280417 - DNA, 300 bp, Homo sapiens
ttttgtcaccaggggccataagcctgggggaccccgactgcagaccctcgctcctgcgtgactgtgtgcatgcggggggcgtctccatctgtgcctcagtttccctctctcctccctccatgtcctcaccctgggagccctggctggtgcgggacagccccgcgactgaccactctgccttccacaggcaccgtctgcgtcctgctgtccttccccttcatcttcagcccctgcctgggctgtggggcggccacgcccgagtgggctgccctcctctactacggcccgttcatcgtgatc

SEQ ID NO: 280418 - DNA, 668 bp, Homo sapiens
gggagtagcctggtcagttacagagcctgtttgagggaccccacatagactcggcttttccactagaaaggcaatttcaagatcaggagaacctcacccttttgaaatgaattgcaagacacatgtagcttttaaaacacaattaaaacagcacaaaattgtctgggcgcagtggctcatgcctgtaatcccagcactttgggaggccaaggtgggtagatcacctgaggtcgggagttcgagaccagcctgaccaacatggtgaggccccgtctctactaaaaatacaaaaattagtcaggtgtggtgatggacacctgtggtcccagctactcgggaagctgaggcaggagaattagcttgaacccgggaggcggaggttgcagtgagccgagattgcgtcactgcactccagcctgggtgagagagcgagactctgtctcaacacaaacaaaacagcacagaataatattcaatgagaaatgagcccctcacccctgctgtcggccccgtacccacctgccactcactactttctggtgtttcctcccaggagcaggtggtacatgcactcacccccgttattacacacttgcgggagcccattcactgcatctccatttttttaaaaaatagaaatagggtcttgcactgggtgcggtggctca

SEQ ID NO: 280419 - DNA, 1641 bp, Homo sapiens
ctgggctcgggtgatcctcctgtcttagccttccaaggtgctgggattacaggtgtgggccaccatgcccagccaccatcttggtttaatttctttccttggaaatggagcaaagggctttcactcttctttttcatggctgcatagtattccataattgtttaaacaattgataatagacactgtatcggggtgactggtatacccccaaaatcacatctgcccagagcctcaggacatggccttgtttggaaatggttttagcagatgcagctaagatgaggtcaccccgtgttaggatggccccgaatccagtgcctggcacccttataaggagagggaaacttggacgcagacaggaaggccgggtgaagacagaagcagagaccgggggccaaggagtgcctggggttgcccagagccaccacgggctgcaagaggtgtgggacagactctctcagccacagaagggcccagccccgcacaggcctggatttcagagggcgaacatttctgtggccgaagctcccagtgcgtttgcagtccttggagacggccgcagacacatttgttcttggcctgtctccaggtctgtagcccccacagtgagcggccactggccggaggggaacaggaagagctggaggggacgtcacacacatgagccttttaggaataacgagtgacacgtgcaagaccccaaaccaaacaccatgtaacctgacacccagggagggagggagggaggggctgggaggggctcacctgtagggaggggctcacctgtacagcggtgctgggaagctggcctcgagggtccccgaggggatacagggccgtgcagcctcttgcctgagggtttgcatgtctgcctggatcccccgggctcctgccagaaggcctctgaggccaccgttgacagcataaaggccacccagtgtctcggcaaccacgctgaccactccctcctcccagctgcggggtgaggtggcctcgagggaagggctggagagtcgttctgagtatttaacaactgggggtgacacagtgtgggtgggcaaggccagggccactgccaggtggggtccgtggccctgagcccccagctctatgcaccccccacctggggtctggcttctccatctccacacccccttgaggggcttctgtctccccctgccccttcgatcgcaggaggcagtgcctggccggggtcgcaggcacctgtcaccccagctcctcactcctcacccactcacatccagtccgtttgtaaaatacacccaggatgagacctgcacgcagtggctcacagcagcacgatttgtgacagcccgaggcggagaacaccgaacaccagacacagaagggtacgctgtgatcccacttctatgaaatgtccaggacagaccaatccacagaatcagggagaggattcgtgggtgccgggactggggagggggacctgggggtgactaggtgacataatggggacagggctgccttctgggtgatgagaatgttctggaatcagatgggatggctgcacggcgtggtgaaggtactgaacgccacctcactgtaagacggtagattttgtattttaccacaataaacaaaacaaaacaaaaccaaaccaaa

SEQ ID NO: 280420 - DNA, 2142 bp, Homo sapiens
ggctgcagagtcgagcgtggggcggacgcggcggacgtgggtgagggcgcggccgtaagagagcgggacgcggggtgcccggcgcgtggtgggggtccccggcgcctgcccccacggcacccaagaaggcctggccagggtaccctccgcggagcccgggggtggggggcgcggggcccggcgccgcgatgggcccgggacccccagcggccggagcggcgccgtccccgcggccgctgtccctggtggcgcggctgagctacgccgtgggccacttcctcaacgacctgtgcgcgtccatgtggttcacctacctgctgctctacctgcactcggtgcgcgcctacagctcccgcggcgcggggctgctgctgctgctgggccaggtggccgacgggctgtgcacaccgctcgtgggctacgaggccgaccgcgccgccagctgctgcgcccgctacggcccgcgcaaggcctggcacctggtcggcaccgtctgcgtcctgctgtccttccccttcatcttcagcccctgcctgggctgtggggcggccacgcccgagtgggctgccctcctctactacggcccgttcatcgtgatcttccagtttggctgggcctccacacagatctcccacctcagcctcatcccggagctcgtcaccaacgaccatgagaaggtggagctcacggcactcaggtatgcgttcaccgtggtggccaacatcaccgtctacggcgccgcctggctcctgctgcacctgcagggctcgtcgcgggtggagcccacccaagacatcagcatcagcgaccagctggggggccaggacgtgcccgtgttccggaacctgtccctgctggtggtgggtgtcggcgccgtgttctcactgctattccacctgggcacccgggagaggcgccggccgcatgcggaggagccaggcgagcacacccccctgttggcccctgccacggcccagcccctgctgctctggaagcactggctccgggagccggctttctaccaggtgggcatactgtacatgaccaccaggctcatcgtgaacctgtcccagacctacatggccatgtacctcacctactcgctccacctgcccaagaagttcatcgcgaccattcccctggtgatgtacctcagcggcttcttgtcctccttcctcatgaagcccatcaacaagtgcattgggaggaacatgacctacttctcaggcctcctggtgatcctggcctttgccgcctgggtggcgctggcggagggactgggtgtggccgtgtacgcagcggctgtgctgctgggtgctggctgtgccaccatcctcgtcacctcgctggccatgacggccgacctcatcggtccccacacgaacagcggagcgttcgtgtacggctccatgagcttcttggataaggtggccaatgggctggcagtcatggccatccagagcctgcacccttgcccctcagagctctgctgcagggcctgcgtgagcttttaccactgggcgatggtggctgtgacgggcggcgtgggcgtggccgctgccctgtgtctctgtagcctcctgctgtggccgacccgcctgcgacgctgggaccgtgatgcccggccctgactcctgacagcctcctgcacctgtgcaagggaactgtggggacgcacgaggatgccccccagggccttggggaaaagcccccactgcccctcactcttctctggacccccaccctccatcctcacccagctcccgggggtggggtcgggtgagggcagcagggatgcccgccagggacttgcaaggaccccctgggttttgagggtgtcccattctcaactctaatccatcccagccctctggaggatttggggtgcccctctcggcagggaacaggaagtaggaatcccagaagggtctgggggaaccctaaccctgagctcagtccagttcacccctcacctccagcctgggggtctccagacactgccagggccccctcaggacggctggagcctggaggagacagccacggggtggtgggctgggcctggaccccaccgtggtgggcagcagggctgcccggcaggcttggtggactctgctggcagcaaataaagagatgacggca

SEQ ID NO: 280421 - DNA, 3046 bp, Homo sapiens
ggctgcagagtcgagcgtggggcggacgcggcggacgtgggtgagggcgcggccgtaagagagcgggacgcggggtgcccggcgcgtggtgggggtccccggcgcctgcccccacggcacccaagaaggcctggccagggtaccctccgcggagcccgggggtggggggcgcggggcccggcgccgcgatgggcccgggacccccagcggccggagcggcgccgtccccgcggccgctgtccctggtggcgcggctgagctacgccgtgggccacttcctcaacgacctgtgcgcgtccatgtggttcacctacctgctgctctacctgcactcggtgcgcgcctacagctcccgcggcgcggggctgctgctgctgctgggccaggtggccgacgggctgtgcacaccgctcgtgggctacgaggccgaccgcgccgccagctgctgcgcccgctacggcccgcgcaaggcctggcacctggtcggcaccgtctgcgtcctgctgtccttccccttcatcttcagcccctgcctgggctgtggggcggccacgcccgagtgggctgccctcctctactacggcccgttcatcgtgatcttccagtttggctgggcctccacacagatctcccacctcagcctcatcccggagctcgtcaccaacgaccatgagaaggtggagctcacggcactcaggtatgcgttcaccgtggtggccaacatcaccgtctacggcgccgcctggctcctgctgcacctgcagggctcgtcgcgggtggagcccacccaagacatcagcatcagcgaccagctggggggccaggacgtgcccgtgttccggaacctgtccctgctggtggtgggtgtcggcgccgtgttctcactgctattccacctgggcacccgggagaggcgccggccgcatgcggaggagccaggcgagcacacccccctgttggcccctgccacggcccagcccctgctgctctggaagcactggctccgggagccggctttctaccaggtgggcatactgtacatgaccaccaggctcatcgtgaacctgtcccagacctacatggccatgtacctcacctactcgctccacctgcccaagaagttcatcgcgaccattcccctggtgatgtacctcagcggcttcttgtcctccttcctcatgaagcccatcaacaagtgcattgggaggaacatgacctacttctcaggcctcctggtgatcctggcctttgccgcctgggtggcgctggcggagggactgggtgtggccgtgtacgcagcggctgtgctgctgggtgctggctgtgccaccatcctcgtcacctcgctggccatgacggccgacctcatcggtccccacacgaacagcggagcgttcgtgtacggctccatgagcttcttggataaggtggccaatgggctggcagtcatggccatccagagcctgcacccttgcccctcagagctctgctgcagggcctgcgtgagcttttaccactgggcgatggtggctgtgacgggcggcgtgggcgtggccgctgccctgtgtctctgtagcctcctgctgtggccgacccgcctgcgacgctgggaccgtgatgcccggccctgactcctgacagcctcctgcacctgtgcaagggaactgtggggacgcacgaggatgccccccagggccttggggaaaagcccccactgcccctcactcttctctggacccccaccctccatcctcacccagctcccgggggtggggtcgggtgagggcagcagggatgcccgccagggacttgcaaggaccccctgggttttgagggtgtcccattctcaactctaatccatcccagccctctggaggatttggggtgcccctctcggcagggaacaggaagtaggaatcccagaagggtctgggggaaccctaaccctgagctcagtccagttcacccctcacctccagcctgggggtctccagacactgccagggccccctcaggacggctggagcctggaggagacagccacggggtggtgggctgggcctggaccccaccgtggtgggcagcagggctgcccggcaggcttggtggactctgctggcagcaaataaagagatgacggcagcctggctcctgtctgcctgcgggggggctctgggcaggggtagcctgggcatctcagccctgccctggttgtgggcggccagcgagcccagtgtctgcctctgtcccgagcctctggtcccctgggactaggttagtgccccctcatctgggtgcagagacagtgggtgcatcctggtagcatgcctttatcggggagtgggtgtgagggaaggcggggaccgctggcaggtggaggggcagtatggttccaggacccactcccggtagttctgggtggtgccgggcgggcgctggggtgccgacagggagggcacgtagtctgatgccctccacagtggctccaccccgtaccggttcctgttgagcacgtattccttgccccggattggcctgtctttccacagcgcgctcccccaccgggtgctgggggcctggtactgggcagggacgatggggtcatgccaggcggtctcccgcaggtgctgggtgtaggccgatggcatgctgcactcacggtgttggtagcagctgtgccagcggttgtaggcctcgcggaaggggctggccggggcccgtggcaggttgtaccaggcttcccaggcgtccgagttggtcaggcctgtgtaccacagctgggccggctgcgtcccgtcccatgggcgtgtacttccagcgtgtggcctgcctgatggctggtggccagcgggaaccctccagggacaggtagtcatcgctgagggtgggcagggggcagagactgagcccatgtctacagcgagtgctttgacccctttgcgatgtctgccagggtggatgatgtagaggcctggcccacggcgtggggtctccctccctcgccacttggagtctgtccttcagccctgtacccctcaccccagag

SEQ ID NO: 280422 - DNA, 2354 bp, Homo sapiens
ggctgcagagtcgagcgtggggcggacgcggcggacgtgggtgagggcgcggccgtaagagagcgggacgcggggtgcccggcgcgtggtgggggtccccggcgcctgcccccacggcacccaagaaggcctggccagggtaccctccgcggagcccgggggtggggggcgcggggcccggcgccgcgatgggcccgggacccccagcggccggagcggcgccgtccccgcggccgctgtccctggtggcgcggctgagctacgccgtgggccacttcctcaacgacctgtgcgcgtccatgtggttcacctacctgctgctctacctgcactcggtgcgcgcctacagctcccgcggcgcggggctgctgctgctgctgggccaggtggccgacgggctgtgcacaccgctcgtgggctacgaggccgaccgcgccgccagctgctgcgcccgctacggcccgcgcaaggcctggcacctggtcggcaccgtctgcgtcctgctgtccttccccttcatcttcagcccctgcctgggctgtggggcggccacgcccgagtgggctgccctcctctactacggcccgttcatcgtgatcttccagtttggctgggcctccacacagatctcccacctcagcctcatcccggagctcgtcaccaacgaccatgagaaggtggagctcacggcactcaggtatgcgttcaccgtggtggccaacatcaccgtctacggcgccgcctggctcctgctgcacctgcagggctcgtcgcgggtggagcccacccaagacatcagcatcagcgaccagctggggggccaggacgtgcccgtgttccggaacctgtccctgctggtggtgggtgtcggcgccgtgttctcactgctattccacctgggcacccgggagaggcgccggccgcatgcggaggagccaggcgagcacacccccctgttggcccctgccacggcccagcccctgctgctctggaagcactggctccgggagccggctttctaccaggtgggcatactgtacatgaccaccaggctcatcgtgaacctgtcccagacctacatggccatgtacctcacctactcgctccacctgcccaagaagttcatcgcgaccattcccctggtgatgtacctcagcggcttcttgtcctccttcctcatgaagcccatcaacaagtgcattgggaggaacatgacctacttctcaggcctcctggtgatcctggcctttgccgcctgggtggcgctggcggagggactgggtgtggccgtgtacgcagcggctgtgctgctgggtgctggctgtgccaccatcctcgtcacctcgctggccatgacggccgacctcatcggtccccacacgaacagcggagcgttcgtgtacggctccatgagcttcttggataaggtggccaatgggctggcagtcatggccatccagagcctgcacccttgcccctcagagctctgctgcagggcctgcgtgagcttttaccactgggcgatggtggctgtgacgggcggcgtgggcgtggccgctgccctgtgtctctgtagcctcctgctgtggccgacccgcctgcgacgctgggaccgtgatgcccggccctgactcctgacagcctcctgcacctgtgcaagggaactgtggggacgcacgaggatgccccccagggccttggggaaaagcccccactgcccctcactcttctctggacccccaccctccatcctcacccagctcccgggggtggggtcgggtgagggcagcagggatgcccgccagggacttgcaaggaccccctgggttttgagggtgtcccattctcaactctaatccatcccagccctctggaggatttggggtgcccctctcggcagggaacaggaagtaggaatcccagaagggtctgggggaaccctaaccctgagctcagtccagttcacccctcacctccagcctgggggtctccagacactgccagggccccctcaggacggctggagcctggaggagacagccacggggtggtgggctgggcctggaccccaccgtggtgggcagcagggctgcccggcaggcttggtggactctgctggcagcaaataaagagatgacggcaaaacaaacacgacaacgcacaacagacaccgaaacgaacccgcccgaaacacagagagaacaacacacaaaagaaacgccaagaacacaccactcacgaagacacgaaccaaaagagggagggggcccccacaaaaaaacccacgcccaggggagagcgcaccaaagacgccacccccacgtccccgaggaaggcggggcccaccacaagag

SEQ ID NO: 280423 - DNA, 2218 bp, Homo sapiens
ggctgcagagtcgagcgtggggcggacgcggcggacgtgggtgagggcgcggccgtaagagagcgggacgcggggtgcccggcgcgtggtgggggtccccggcgcctgcccccacggcacccaagaaggcctggccagggtaccctccgcggagcccgggggtggggggcgcggggcccggcgccgcgatgggcccgggacccccagcggccggagcggcgccgtccccgcggccgctgtccctggtggcgcggctgagctacgccgtgggccacttcctcaacgacctgtgcgcgtccatgtggttcacctacctgctgctctacctgcactcggtgcgcgcctacagctcccgcggcgcggggctgctgctgctgctgggccaggtggccgacgggctgtgcacaccgctcgtgggctacgaggccgaccgcgccgccagctgctgcgcccgctacggcccgcgcaaggcctggcacctggtcggcaccgtctgcgtcctgctgtccttccccttcatcttcagcccctgcctgggctgtggggcggccacgcccgagtgggctgccctcctctactacggcccgttcatcgtgatcttccagtttggctgggcctccacacagatctcccacctcagcctcatcccggagctcgtcaccaacgaccatgagaaggtggagctcacggcactcaggtatgcgttcaccgtggtggccaacatcaccgtctacggcgccgcctggctcctgctgcacctgcagggctcgtcgcgggtggagcccacccaagacatcagcatcagcgaccagctggggggccaggacgtgcccgtgttccggaacctgtccctgctggtggtgggtgtcggcgccgtgttctcactgctattccacctgggcacccgggagaggcgccggccgcatgcggaggagccaggcgagcacacccccctgttggcccctgccacggcccagcccctgctgctctggaagcactggctccgggagccggctttctaccaggtgggcatactgtacatgaccaccaggctcatcgtgaacctgtcccagacctacatggccatgtacctcacctactcgctccacctgcccaagaagttcatcgcgaccattcccctggtgatgtacctcagcggcttcttgtcctccttcctcatgaagcccatcaacaagtgcattgggaggaacatgacctacttctcaggcctcctggtgatcctggcctttgccgcctgggtggcgctggcggagggactgggtgtggccgtgtacgcagcggctgtgctgctgggtgctggctgtgccaccatcctcgtcacctcgctggccatgacggccgacctcatcggtccccacacgaacagcggagcgttcgtgtacggctccatgagcttcttggataaggtggccaatgggctggcagtcatggccatccagagcctgcacccttgcccctcagagctctgctgcagggcctgcgtgagcttttaccactgggcgatggtggctgtgacgggcggcgtgggcgtggccgctgccctgtgtctctgtagcctcctgctgtggccgacccgcctgcgacgctgtgagtcctggcccacccctccctccccagacactgacccacactctctaatgccatttccacccctcccttgcaggggaccgtgatgcccggccctgactcctgacagcctcctgcacctgtgcaagggaactgtggggacgcacgaggatgccccccagggccttggggaaaagcccccactgcccctcactcttctctggacccccaccctccatcctcacccagctcccgggggtggggtcgggtgagggcagcagggatgcccgccagggacttgcaaggaccccctgggttttgagggtgtcccattctcaactctaatccatcccagccctctggaggatttggggtgcccctctcggcagggaacaggaagtaggaatcccagaagggtctgggggaaccctaaccctgagctcagtccagttcacccctcacctccagcctgggggtctccagacactgccagggccccctcaggacggctggagcctggaggagacagccacggggtggtgggctgggcctggaccccaccgtggtgggcagcagggctgcccggcaggcttggtggactctgctggcagcaaataaagagatgacggca

SEQ ID NO: 280424 - DNA, 2294 bp, Homo sapiens
ggctgcagagtcgagcgtggggcggacgcggcggacgtgggtgagggcgcggccgtaagagagcgggacgcggggtgcccggcgcgtggtgggggtccccggcgcctgcccccacggcacccaagaaggcctggccagggtaccctccgcggagcccgggggtggggggcgcggggcccggcgccgcgatgggcccgggacccccagcggccggagcggcgccgtccccgcggccgctgtccctggtggcgcggctgagctacgccgtgggccacttcctcaacgacctgtgcgcgtccatgtggttcacctacctgctgctctacctgcactcggtgcgcgcctacagctcccgcggcgcggggctgctgctgctgctgggccaggtggccgacgggctgtgcacaccgctcgtgggctacgaggccgaccgcgccgccagctgctgcgcccgctacggcccgcgcaaggcctggcacctggtcggcaccgtctgcgtcctgctgtccttccccttcatcttcagcccctgcctgggctgtggggcggccacgcccgagtgggctgccctcctctactacggcccgttcatcgtgatcttccagtttggctgggcctccacacagatctcccacctcagcctcatcccggagctcgtcaccaacgaccatgagaaggtggagctcacggcactcaggtatgcgttcaccgtggtggccaacatcaccgtctacggcgccgcctggctcctgctgcacctgcagggctcgtcgcgggtggagcccacccaagacatcagcatcagcgaccagctggggggccaggacgtgcccgtgttccggaacctgtccctgctggtggtgggtgtcggcgccgtgttctcactgctattccacctgggcacccgggagaggcgccggccgcatgcggaggagccaggcgagcacacccccctgttggcccctgccacggcccagcccctgctgctctggaagcactggctccgggagccggctttctaccaggtgggcatactgtacatgaccaccaggctcatcgtgaacctgtcccagacctacatggccatgtacctcacctactcgctccacctgcccaagaagttcatcgcgaccattcccctggtgatgtacctcagcggcttcttgtcctccttcctcatgaagcccatcaacaagtgcattgggaggaacatgacctacttctcaggcctcctggtgatcctggcctttgccgcctgggtggcgctggcggagggactgggtgtggccgtgtacgcagcggctgtgctgctgggtgctggctgtgccaccatcctcgtcacctcgctggccatgacggccgacctcatcggtccccacacgaacagcggagcgttcgtgtacggctccatgagcttcttggataaggtggccaatgggctggcagtcatggccatccagagcctgcacccttgcccctcagagctctgctgcagggcctgcgtgagcttttaccactgggcgatggtggctgtgacgggcggcgtgggcgtggccgctgccctgtgtctctgtagcctcctgctgtggccgacccgcctgcgacgctgatgagacctgcacgcagtggctcacagcagcacgatttgtgacagcccgaggcggagaacaccgaacacccagtgaaggtgaggggatcagcacggcgcggccacccacgcacccacgcgctggaacgagactcagccacaaggaggtgcgaagctctgacccaggccacagtgcggatgcaccttgaggatgtcacgctcagtgagagacaccagacacagaagggtacgctgtgatcccacttctatgaaatgtccaggacagaccaatccacagaatcagggagaggattcgtgggtgccgggactggggagggggacctgggggtgactaggtgacataatggggacagggctgccttctgggtgatgagaatgttctggaatcagatgggatggctgcacggcgtggtgaaggtactgaacgccacctcactgtaagacggtagattttgtattttaccacaataaacaaaacaaaacaaaaccaaaccaaaaaaaacaacaagcaagatctcggagcggtctatttccgggttgcgacaacacgcggttctcggcacggcccgtcggtcataggcggctcccggccccacgccttttcgttacagcggggacgactccgccggccccctaatctgactcgcattatttacaacaggccggttacctgctatgacctcgc

SEQ ID NO: 280425 - DNA, 2545 bp, Homo sapiens
ttacacactcacaagcttaaaacacaaattttacttgtttttatttaaaaagtccggatccagcagtgagaaggagccacccccaccagggtccctcggctggaggagagcaggatgggcaaagccggcccccacccatctggggtacaggcatgcgggggacaccccaggtaagtccccacaaggcagcttcctgtgtggcctatggcacagccccccgtagtgagtaatttggggggtcctgccgtgtgctgggggtgggtttcgtctgccctgtgtcctgggggtggcccggagagccagtgtagcgcgtggctgtcctccgaggaggggcaccctcggctgtgaggttcttctgggtgtatcgcgcagcgagtgctttttccgggttcagggggctggggagattgaaagctaaagggatgctgcagaaatttaattttaggggggctggagcccccaaggtgcaggatgggaccaggccccaaagggtggacccccagcctctcgtccacggggtggggtgtggcagggccgcgccgctcgttcaggaagcgcacgtagcccgtgaccggtgccttgggcccattcggcagaatcttcttccgcttcttgcccttgggccagccgcgtttcttcaccggctcctcctcgtgggaccccttctcgcccgcgcgtggaccctcgccgcgctcttgcttgacagtcaccacgaagcccccatgctggcccggagccttgccgcccgccggcctggagccaaggataccgcggtcagccccgtcccaagaatctcccctcccccaaaagcccaccccagggcgttttgacccccgacggcggggctgcagcgagagtgcatgagcccgaggaggcagggtctgatggggcaccgtctgcgtcctgctgtccttccccttcatcttcagcccctgcctgggctgtggggcggccacgcccgagtgggctgccctcctctactacggcccgttcatcgtgatcttccagtttggctgggcctccacacagatctcccacctcagcctcatcccggagctcgtcaccaacgaccatgagaaggtggagctcacggcactcaggtatgcgttcaccgtggtggccaacatcaccgtctacggcgccgcctggctcctgctgcacctgcagggctcgtcgcgggtggagcccacccaagacatcagcatcagcgaccagctggggggccaggacgtgcccgtgttccggaacctgtccctgctggtggtgggtgtcggcgccgtgttctcactgctattccacctgggcacccgggagaggcgccggccgcatgcggaggagccaggcgagcacacccccctgttggcccctgccacggcccagcccctgctgctctggaagcactggctccgggagccggctttctaccaggtgggcatactgtacatgaccaccaggctcatcgtgaacctgtcccagacctacatggccatgtacctcacctactcgctccacctgcccaagaagttcatcgcgaccattcccctggtgatgtacctcagcggcttcttgtcctccttcctcatgaagcccatcaacaagtgcattgggaggaacatgacctacttctcaggcctcctggtgatcctggcctttgccgcctgggtggcgctggcggagggactgggtgtggccgtgtacgcagcggctgtgctgctgggtgctggctgtgccaccatcctcgtcacctcgctggccatgacggccgacctcatcggtccccacacgaacagcggagcgttcgtgtacggctccatgagcttcttggataaggtggccaatgggctggcagtcatggccatccagagcctgcacccttgcccctcagagctctgctgcagggcctgcgtgagcttttaccactgggcgatggtggctgtgacgggcggcgtgggcgtggccgctgccctgtgtctctgtagcctcctgctgtggccgacccgcctgcgacgctgggaccgtgatgcccggccctgactcctgacagcctcctgcacctgtgcaagggaactgtggggacgcacgaggatgccccccagggccttggggaaaagcccccactgcccctcactcttctctggacccccaccctccatcctcacccagctcccgggggtggggtcgggtgagggcagcagggatgcccgccagggacttgcaaggaccccctgggttttgagggtgtcccattctcaactctaatccatcccagccctctggaggatttggggtgcccctctcggcagggaacaggaagtaggaatcccagaagggtctgggggaaccctaaccctgagctcagtccagttcacccctcacctccagcctgggggtctccagacactgccagggccccctcaggacggctggagcctggaggagacagccacggggtggtgggctgggcctggaccccaccgtggtgggcagcagggctgcccggcaggcttggtggactctgctggcagcaaataaagagatgacggca

SEQ ID NO: 280426 - DNA, 1971 bp, Homo sapiens
ggctgcagagtcgagcgtggggcggacgcggcggacgtgggtgagggcgcggccgtaagagagcgggacgcggggtgcccggcgcgtggtgggggtccccggcgcctgcccccacggcacccaagaaggcctggccagggtaccctccgcggagcccgggggtggggggcgcggggcccggcgccgcgatgggcccgggacccccagcggccggagcggcgccgtccccgcggccgctgtccctggtggcgcggctgagctacgccgtgggccacttcctcaacgacctgtgcgcgtccatgtggttcacctacctgctgctctacctgcactcggtgcgcgcctacagctcccgcggcgcggggctgctgctgctgctgggccaggtggccgacgggctgtgcacaccgctcgtgggctacgaggccgaccgcgccgccagctgctgcgcccgctacggcccgcgcaaggcctggcacctggtcggcaccgtctgcgtcctgctgtccttccccttcatcttcagcccctgcctgggctgtggggcggccacgcccgagtgggctgccctcctctactacggcccgttcatcgtgatcttccagtttggctgggcctccacacagatctcccacctcagcctcatcccggagctcgtcaccaacgaccatgagaaggtggagctcacggcactcaggtatgcgttcaccgtggtggccaacatcaccgtctacggcgccgcctggctcctgctgcacctgcagggctcgtcgcgggtggagcccacccaagacatcagcatcagcgaccagctggggggccaggacgtgcccgtgttccggaacctgtccctgctggtggtgggtgtcggcgccgtgttctcactgctattccacctgggcacccgggagaggcgccggccgcatgcggaggagccaggcgagcacacccccctgttggcccctgccacggcccagcccctgctgctctggaagcactggctccgggagccggctttctaccaggtgggcatactgtacatgaccaccaggctcatcgtgaacctgtcccagacctacatggccatgtacctcacctactcgctccacctgcccaagaagttcatcgcgaccattcccctggtgatgtacctcagcggcttcttgtcctccttcctcatgaagcccatcaacaagtgcattgggaggaacaacagcggagcgttcgtgtacggctccatgagcttcttggataaggtggccaatgggctggcagtcatggccatccagagcctgcacccttgcccctcagagctctgctgcagggcctgcgtgagcttttaccactgggcgatggtggctgtgacgggcggcgtgggcgtggccgctgccctgtgtctctgtagcctcctgctgtggccgacccgcctgcgacgctgggaccgtgatgcccggccctgactcctgacagcctcctgcacctgtgcaagggaactgtggggacgcacgaggatgccccccagggccttggggaaaagcccccactgcccctcactcttctctggacccccaccctccatcctcacccagctcccgggggtggggtcgggtgagggcagcagggatgcccgccagggacttgcaaggaccccctgggttttgagggtgtcccattctcaactctaatccatcccagccctctggaggatttggggtgcccctctcggcagggaacaggaagtaggaatcccagaagggtctgggggaaccctaaccctgagctcagtccagttcacccctcacctccagcctgggggtctccagacactgccagggccccctcaggacggctggagcctggaggagacagccacggggtggtgggctgggcctggaccccaccgtggtgggcagcagggctgcccggcaggcttggtggactctgctggcagcaaataaagagatgacggca

SEQ ID NO: 280427 - DNA, 2400 bp, Homo sapiens
ttacacactcacaagcttaaaacacaaattttacttgtttttatttaaaaagtccggatccagcagtgagaaggagccacccccaccagggtccctcggctggaggagagcaggatgggcaaagccggcccccacccatctggggtacaggcatgcgggggacaccccaggtaagtccccacaaggcagcttcctgtgtggcctatggcacagccccccgtagtgagtaatttggggggtcctgccgtgtgctgggggtgggtttcgtctgccctgtgtcctgggggtggcccggagagccagtgtagcgcgtggctgtcctccgaggaggggcaccctcggctgtgaggttcttctgggtgtatcgcgcagcgagtgctttttccgggttcagggggctggggagattgaaagctaaagggatgctgcagaaatttaattttaggggggctggagcccccaaggtgcaggatgggaccaggccccaaagggtggacccccagcctctcgtccacggggtggggtgtggcagggccgcgccgctcgttcaggaagcgcacgtagcccgtgaccggtgccttgggcccattcggcagaatcttcttccgcttcttgcccttgggccagccgcgtttcttcaccggctcctcctcgtgggaccccttctcgcccgcgcgtggaccctcgccgcgctcttgcttgacagtcaccacgaagcccccatgctggcccggagccttgccgcccgccggcctggagccaaggataccgcggtcagccccgtcccaagaatctcccctcccccaaaagcccaccccagggcgttttgacccccgacggcggggctgcagcgagagtgcatgagcccgaggaggcagggtctgatggggcaccgtctgcgtcctgctgtccttccccttcatcttcagcccctgcctgggctgtggggcggccacgcccgagtgggctgccctcctctactacggcccgttcatcgtgatcttccagtttggctgggcctccacacagatctcccacctcagcctcatcccggagctcgtcaccaacgaccatgagaaggtggagctcacggcactcagaacctgtccctgctggtggtgggtgtcggcgccgtgttctcactgctattccacctgggcacccgggagaggcgccggccgcatgcggaggagccaggcgagcacacccccctgttggcccctgccacggcccagcccctgctgctctggaagcactggctccgggagccggctttctaccaggtgggcatactgtacatgaccaccaggctcatcgtgaacctgtcccagacctacatggccatgtacctcacctactcgctccacctgcccaagaagttcatcgcgaccattcccctggtgatgtacctcagcggcttcttgtcctccttcctcatgaagcccatcaacaagtgcattgggaggaacatgacctacttctcaggcctcctggtgatcctggcctttgccgcctgggtggcgctggcggagggactgggtgtggccgtgtacgcagcggctgtgctgctgggtgctggctgtgccaccatcctcgtcacctcgctggccatgacggccgacctcatcggtccccacacgaacagcggagcgttcgtgtacggctccatgagcttcttggataaggtggccaatgggctggcagtcatggccatccagagcctgcacccttgcccctcagagctctgctgcagggcctgcgtgagcttttaccactgggcgatggtggctgtgacgggcggcgtgggcgtggccgctgccctgtgtctctgtagcctcctgctgtggccgacccgcctgcgacgctgggaccgtgatgcccggccctgactcctgacagcctcctgcacctgtgcaagggaactgtggggacgcacgaggatgccccccagggccttggggaaaagcccccactgcccctcactcttctctggacccccaccctccatcctcacccagctcccgggggtggggtcgggtgagggcagcagggatgcccgccagggacttgcaaggaccccctgggttttgagggtgtcccattctcaactctaatccatcccagccctctggaggatttggggtgcccctctcggcagggaacaggaagtaggaatcccagaagggtctgggggaaccctaaccctgagctcagtccagttcacccctcacctccagcctgggggtctccagacactgccagggccccctcaggacggctggagcctggaggagacagccacggggtggtgggctgggcctggaccccaccgtggtgggcagcagggctgcccggcaggcttggtggactctgctggcagcaaataaagagatgacggca

SEQ ID NO: 280428 - DNA, 2116 bp, Homo sapiens
ttacacactcacaagcttaaaacacaaattttacttgtttttatttaaaaagtccggatccagcagtgagaaggagccacccccaccagggtccctcggctggaggagagcaggatgggcaaagccggcccccacccatctggggtacaggcatgcgggggacaccccaggtaagtccccacaaggcagcttcctgtgtggcctatggcacagccccccgtagtgagtaatttggggggtcctgccgtgtgctgggggtgggtttcgtctgccctgtgtcctgggggtggcccggagagccagtgtagcgcgtggctgtcctccgaggaggggcaccctcggctgtgaggttcttctgggtgtatcgcgcagcgagtgctttttccgggttcagggggctggggagattgaaagctaaagggatgctgcagaaatttaattttaggggggctggagcccccaaggtgcaggatgggaccaggccccaaagggtggacccccagcctctcgtccacggggtggggtgtggcagggccgcgccgctcgttcaggaagcgcacgtagcccgtgaccggtgccttgggcccattcggcagaatcttcttccgcttcttgcccttgggccagccgcgtttcttcaccggctcctcctcgtgggaccccttctcgcccgcgcgtggaccctcgccgcgctcttgcttgacagtcaccacgaagcccccatgctggcccggagccttgccgcccgccggcctggagccaaggataccgcggtcagccccgtcccaagaatctcccctcccccaaaagcccaccccagggcgttttgacccccgacggcggggctgcagcgagagtgcatgagcccgaggaggcagggtctgatggggctggagtgtagtcatcggatctcagctcactgcaacctcgaactcctgggctcaagtgattctcctgcttcagcctctcgagcagttgggaccacagaacctgtccctgctggtggtgggtgtcggcgccgtgttctcactgctattccacctgggcacccgggagaggcgccggccgcatgcggaggagccaggcgagcacacccccctgttggcccctgccacggcccagcccctgctgctctggaagcactggctccgggagccggctttctaccaggtgggcatactgtacatgaccaccaggctcatcgtgaacctgtcccagacctacatggccatgtacctcacctactcgctccacctgcccaagaagttcatcgcgaccattcccctggtgatgtacctcagcggcttcttgtcctccttcctcatgaagcccatcaacaagtgcattgggaggaacaacagcggagcgttcgtgtacggctccatgagcttcttggataaggtggccaatgggctggcagtcatggccatccagagcctgcacccttgcccctcagagctctgctgcagggcctgcgtgagcttttaccactgggcgatggtggctgtgacgggcggcgtgggcgtggccgctgccctgtgtctctgtagcctcctgctgtggccgacccgcctgcgacgctgggaccgtgatgcccggccctgactcctgacagcctcctgcacctgtgcaagggaactgtggggacgcacgaggatgccccccagggccttggggaaaagcccccactgcccctcactcttctctggacccccaccctccatcctcacccagctcccgggggtggggtcgggtgagggcagcagggatgcccgccagggacttgcaaggaccccctgggttttgagggtgtcccattctcaactctaatccatcccagccctctggaggatttggggtgcccctctcggcagggaacaggaagtaggaatcccagaagggtctgggggaaccctaaccctgagctcagtccagttcacccctcacctccagcctgggggtctccagacactgccagggccccctcaggacggctggagcctggaggagacagccacggggtggtgggctgggcctggaccccaccgtggtgggcagcagggctgcccggcaggcttggtggactctgctggcagcaaataaagagatgacggca

SEQ ID NO: 280429 - DNA, 1464 bp, Homo sapiens
gcggccccctactactactaaattcgcggccgcgtcgacctctaatccatcccagccctctggaggatttggggtgcccctctcggcagggaacaggaagtaggaatcccagaagggtctgggggaaccctaaccctgagctcagtccagttcacccctcacctccagcctgggggtctccagacactgccagggccccctcaggacggctggagcctggaggagacagccacggggtggtgggctgggcctggaccccaccgtggtgggcagcagggctgcccggcaggcttggtggactctgctggcagcaaataaagagatgacggcagcctggctcctgtctgcctgcgggggggctctgggcaggggtagcctgggcatctcagccctgccctggttgtgggcggccagcgagcccagtgtctgcctctgtcccgagcctctggtcccctgggactaggttagtgccccctcatctgggtgcagagacagtgggtgcatcctggtagcatgcctttatcggggagtgggtgtgagggaaggcggggaccgctggcaggtggaggggcagtatggttccaggacccactcccggtagttctgggtggtgccgggcgggcgctggggtgccgacagggagggcacgtagtctgatgccctccacagtggctccaccccgtaccggttcctgttgagcactgtaggtgggactcgggtcaccatgtgcccccacctcctcgccgttggccagcaaggggctcctggatcgccccgggcagtttcaccctggcctaggtggccttgtccccctggcctcccaaggacccaccctgcacctagcctcaccgtattccttgccccggattggcctgtctttccacagcgcgctcccccaccgggtgctgggggcctggtactgggcagggacgatggggtcatgccaggcggtctcccgcaggtgctgggtgtaggctgcggtggggcgggggctggcggtcattcctgtccccctctggcaggcccgctgcccagggcgggggggggggcactcacccgatggcatgctgcactcacggtgttggtagcagctgtgccagcggttgtaggcctcgcggaaggggctggccggggcccgtggcaggttgtaccaggcttcccaggcgtccgagttggtcaggcctgtgtaccacagctgggccggctgcgtcccgtcccatgggcgtgtacttccagcgtgtggcctgcctgatggctggtggccagcgggaaccctccagggacaggtagtcatcgctgagggtgggcagggggcagagactgagcccatgtctacagcgagtgctttgacccctttgcgatgtctgccagggtggatgatgtagaggcctggcccacggcgtggggtctccctccctcgccacttggagtctgtccttcagccctgtacccctcaccccagag

SEQ ID NO: 280430 - DNA, 454 bp, Homo sapiens
tgggttgtagcctggactccgcttggccgagtcactgtaccctggtcctgggcacgaagggtggagctgcaggtcacagctttcccgcgttaggtaatgtgcgggctggggaaactgaggccagcacgggcttcctggaggccacccagtgtggcagtggttggaatcacctgtcagtcaggggttccccaggcctctctgacggcgtagccacgtggggaggaagtgacccaggttcctggcgtcttgttgagtccctgcccgcctgcccgccaggtatgcgttcaccgtggtggccaacatcaccgtctacggcgccgcctggctcctgctgcacctgcagggctcgtcgcgggtggagcccacccaagacatcagcatcagcgaccagctggggggccaggacgtgcccgtgttccgggtgagctggagtccgggtgggtcgcctgaagtc

SEQ ID NO: 280431 - DNA, 960 bp, Homo sapiens
tgactctagagagatcccgatccacgtgcattgtgatggtggatggggtgttccagggtgttgtggagcgaaatatgagagacaaactatttttgacggggaaactggggtccaaactggatatcttggtggagaacatggggaggctcagctttgggtctaacagcagtgacttcaagggcctgttgaagccaccaattctggggcaaacaatccttacccagtggatgatgttccctctgaaaattgataaccttgtgaagtggtggtttcccctccagttgccaaaatggccatatcctcaagctccttctggccccacattctactccaaaacatttccaattttaggctcagttggggacacatttctatatctacctggatggaccaagggccaagtctggatcaatgggtttaacttgggccggtactggacaaagcaggggccacaacagaccctctacgtgccaagattcctgctgtttcctaggggagccctcaacaaaattacattgctggaactagaagatgtacctctccagccccaagtccaatttttggataagcctatcctcaatagcactagtactttgcacaggacacatatcaattccctttcagctgatacactgagtgcctctgaaccaatggagttaagtgggcactgaaaggtaggccgggcatggtggctcatgcctgtaatcccagcactttgggaggctgagacgggtggattacctgaggtcaggacttcaagaccagcctggccaacatggtgaaaccccgtctccactaaaaatacaaaaattagccgggcgtgatggtgggcacctctaatcccagctacttgggaggctgagggcaggagaattgcttgaatccaggaggcagaggttgcagtgagtggaggttgtaccactgcactccagcctggctgacagtgagacactccatctc

SEQ ID NO: 280432 - DNA, 2407 bp, Homo sapiens
agtgctgacatcatcagtccgcgccggcgtaacggcccgcggtatctcagcaaccgctgggcatccggaggatgtggggacgcggagctgagaggctccgggctagctaggtgtaggggtggacgggtcccaggaccctggtgagggttctctacttggccttcggtgggggtcaagacgcaggcacctacgccaaaggggagcaaagccgggctcggcccgaggcccccaggacctccatctcccaatgttggaggttccctcccaggaatccgacacgtgacggtctgtccgccgtctcagactagaggagcgctgtaaacgccatggctcccaagaagctgtcctgccttcgttccctgctgctgccgctcagcctgacgctactgctgccccaggcagacactcggtcgttcgtagtggataggggtcatgaccggtttctcctagacggggccccgttccgctatgtgtctggcagcctgcactactttcgggtaccgcgggtgctttgggccgaccggcttttgaagatgcgatggagcggcctcaacgccatacagttttatgtgccctggaactaccacgagccacagcctggggtctataactttaatggcagccgggacctcattgcctttctgaatgaggcagctctagcgaacctgttggtcatactgagaccaggaccttacatctgtgcagagtgggagatgggggggtctcccatcctggttgcttcgaaaacctgaaattcatctaaagaacctcagatccagacttccttgccgcagtggactcctggttcaaggtcttgctgcccaagatatatccatggctttatcacaatgggggcaacatcattagcattcagctgacaacatgaccaaaatctttaccctgcttcggaagtatgaaccccatgggccattggtaaactctgagtactacacaggctggctggattactggggccagaatcactccacacggtctgtgtcagctgtaaccaaaggactagagaacatgctcaagttgggagccagtgtgaacatgtacatgttccatggaggtaccaactttggatattggaatggtgccgataagaagggacgcttccttccgattactaccagctatgactatgatgcacctatatctgaagcaggggaccccacacctaagctttttgctcttcgagatgtcatcagcaagttccaggaagttcctttgggacctttacctcccccgagccccaagatgatgcttggacctgtgactctgcacctggttgggcatttactggctttcctagacttgctttgcccccgtgggcccattcattcaatcttgccaatgacctttgaggctgtcaagcaggaccatggcttcatgttgtaccgaacctatatgacccataccatttttgagccaacaccattctgggtgccaaataatggagtccatgaccgtgcctatgtgatggtggatggggtgttccagggtgttgtggagcgaaatatgagagacaaactatttttgacggggaaactggggtccaaactggatatcttggtggagaacatggggaggctcagctttgggtctaacagcagtgacttcaagggcctgttgaagccaccaattctggggcaaacaatccttacccagtggatgatgttccctctgaaaattgataaccttgtgaagtggtggtttcccctccagttgccaaaatggccatatcctcaagctccttctggccccacattctactccaaaacatttccaattttaggctcagttggggacacatttctatatctacctggatggaccaagggccaagtctggatcaatgggtttaacttgggccggtactggacaaagcaggggccacaacagaccctctacgtgccaagattcctgctgtttcctaggggagccctcaacaaaattacattgctggaactagaagatgtacctctccagccccaagtccaatttttggataagcctatcctcaatagcactagtactttgcacaggacacatatcaattccctttcagctgatacactgagtgcctctgaaccaatggagttaagtgggcactgaaaggtaggccgggcatggtggctcatgcctgtaatcccagcactttgggaggctgagacgggtggattacctgaggtcaggacttcaagaccagcctggccaacatggtgaaaccccgtctccactaaaaatacaaaaattagccgggcgtgatggtgggcacctctaatcccagctacttgggaggctgagggcaggagaattgcttgaatccaggaggcagaggttgcagtgagtggaggttgtaccactgcactccagcctggctgacagtgagacactccatctc

SEQ ID NO: 280433 - DNA, 1636 bp, Homo sapiens
ccacaagattgtgtatgaggtgcggcctcgggttgtcaattcgatgcgaggggatccgggtctttatctacaatgtgggcaactagtcactacgacattcagactgacaacatgaccaaaatctttaccctgcttcggaagtatgaaccccatgggccattggtaaactctgagtactacacaggctggctggattactggggccagaatcactccacacggtctgtgtcagctgtaaccaaaggactagagaacatgctcaagttgggagccagtgtgaacatgtacatgttccatggaggtaccaactttggatattggaatggtgccgataagaagggacgcttccttccgattactaccagctatgactatgatgcacctatatctgaagcaggggaccccacacctaagctttttgctcttcgagatgtcatcagcaagttccaggaagttcctttgggacctttacctcccccgagccccaagatgatgcttggacctgtgactctgcacctggttgggcatttactggctttcctagacttgctttgcccccgtgggcccattcattcaatcttgccaatgacctttgaggctgtcaagcaggaccatggcttcatgttgtaccgaacctatatgacccataccatttttgagccaacaccattctgggtgccaaataatggagtccatgaccgtgcctatgtgatggtggatggggtgttccagggtgttgtggagcgaaatatgagagacaaactatttttgacggggaaactggggtccaaactggatatcttggtggagaacatggggaggctcagctttgggtctaacagcagtgacttcaagggcctgttgaagccaccaattctggggcaaacaatccttacccagtggatgatgttccctctgaaaattgataaccttgtgaagtggtggtttcccctccagttgccaaaatggccatatcctcaagctccttctggccccacattctactccaaaacatttccaattttaggctcagttggggacacatttctatatctacctggatggaccaagggccaagtctggatcaatgggtttaacttgggccggtactggacaaagcaggggccacaacagaccctctacgtgccaagattcctgctgtttcctaggggagccctcaacaaaattacattgctggaactagaagatgtacctctccagccccaagtccaatttttggataagcctatcctcaatagcactagtactttgcacaggacacatatcaattccctttcagctgatacactgagtgcctctgaaccaatggagttaagtgggcactgaaaggtaggccgggcatggtggctcatgcctgtaatcccagcactttgggaggctgagacgggtggattacctgaggtcaggacttcaagaccagcctggccaacatggtgaaaccccgtctccactaaaaatacaaaaattagccgggcgtgatggtgggcacctctaatcccagctacttgggaggctgagggcaggagaattgcttgaatccaggaggcagaggttgcagtgagtggaggttgtaccactgcactccagcctggctgacagtgagacactccatctc

SEQ ID NO: 280434 - DNA, 265 bp, Homo sapiens
tttcctatgttcaaatttcattggcgtgcaaatatacaaggtgcttagggttgggaatttcttgacaagagtcattgcttcccatatttagtggtgagcaagtgtgatggtagcacctaacacagaagctctgctccttcctttagacttccttgccgcagtggactcctggttcaaggtcttgctgcccaagatatatccatggctttatcacaatgggggcaacatcattagcattcagtacaagggggaagtgactggagca

SEQ ID NO: 280435 - DNA, 1955 bp, Homo sapiens
gtgatataggcgagtcctagaagcgaagttcgagtagtcacacagttagcggtcgcccgtgccgtgcagaccggctttgaagatgcgatggagcgagctcaacgccataaagtttatgtgccctggaactaccacgagccacagcctggggtctataactttaatggcagccgggacctcattgcctttctgaatgaggcagctctagcgaacctgttggtcatactgagaccaggaccttacatctgtgcagagtgggagatgggggggtctcccatcctggttgcttcgaaaacctgaaattcatctaaagaacctcagatccagacttccttgccgcagtggactcctggttcaaggtcttgctgcccaagatatatccatggctttatcacaatgggggcaacatcattagcattcagctgacaacatgaccaaaatctttaccctgcttcggaagtatgaaccccatgggccattggtaaactctgagtactacacaggctggctggattactggggccagaatcactccacacggtctgtgtcagctgtaaccaaaggactagagaacatgctcaagttgggagccagtgtgaacatgtacatgttccatggaggtaccaactttggatattggaatggtgccgataagaagggacgcttccttccgattactaccagctatgactatgatgcacctatatctgaagcaggggaccccacacctaagctttttgctcttcgagatgtcatcagcaagttccaggaagttcctttgggacctttacctcccccgagccccaagatgatgcttggacctgtgactctgcacctggttgggcatttactggctttcctagacttgctttgcccccgtgggcccattcattcaatcttgccaatgacctttgaggctgtcaagcaggaccatggcttcatgttgtaccgaacctatatgacccataccatttttgagccaacaccattctgggtgccaaataatggagtccatgaccgtgcctatgtgatggtggatggggtgttccagggtgttgtggagcgaaatatgagagacaaactatttttgacggggaaactggggtccaaactggatatcttggtggagaacatggggaggctcagctttgggtctaacagcagtgacttcaagggcctgttgaagccaccaattctggggcaaacaatccttacccagtggatgatgttccctctgaaaattgataaccttgtgaagtggtggtttcccctccagttgccaaaatggccatatcctcaagctccttctggccccacattctactccaaaacatttccaattttaggctcagttggggacacatttctatatctacctggatggaccaagggccaagtctggatcaatgggtttaacttgggccggtactggacaaagcaggggccacaacagaccctctacgtgccaagattcctgctgtttcctaggggagccctcaacaaaattacattgctggaactagaagatgtacctctccagccccaagtccaatttttggataagcctatcctcaatagcactagtactttgcacaggacacatatcaattccctttcagctgatacactgagtgcctctgaaccaatggagttaagtgggcactgaaaggtaggccgggcatggtggctcatgcctgtaatcccagcactttgggaggctgagacgggtggattacctgaggtcaggacttcaagaccagcctggccaacatggtgaaaccccgtctccactaaaaatacaaaaattagccgggcgtgatggtgggcacctctaatcccagctacttgggaggctgagggcaggagaattgcttgaatccaggaggcagaggttgcagtgagtggaggttgtaccactgcactccagcctggctgacagtgagacactccatctc

SEQ ID NO: 280436 - DNA, 1704 bp, Homo sapiens
agaatgaatatggtagctacagagcctgtgacttcagctacatgaggcacttggctgggctcttccgtgcactgctaggagaaaagatcttgctcttcaccacagatgggcctgaaggactcaagtgtggctccctccggggactctataccactgtagattttggcccagctgacaacatgaccaaaatctttaccctgcttcggaagtatgaaccccatgggccattggtaaactctgagtactacacaggctggctggattactggggccagaatcactccacacggtctgtgtcagctgtaaccaaaggactagagaacatgctcaagttgggagccagtgtgaacatgtacatgttccatggaggtaccaactttggatattggaatggtgccgataagaagggacgcttccttccgattactaccagctatgactatgatgcacctatatctgaagcaggggaccccacacctaagctttttgctcttcgagatgtcatcagcaagttccaggaagttcctttgggacctttacctcccccgagccccaagatgatgcttggacctgtgactctgcacctggttgggcatttactggctttcctagacttgctttgcccccgtgggcccattcattcaatcttgccaatgacctttgaggctgtcaagcaggaccatggcttcatgttgtaccgaacctatatgacccataccatttttgagccaacaccattctgggtgccaaataatggagtccatgaccgtgcctatgtgatggtggatggggtgttccagggtgttgtggagcgaaatatgagagacaaactatttttgacggggaaactggggtccaaactggatatcttggtggagaacatggggaggctcagctttgggtctaacagcagtgacttcaagggcctgttgaagccaccaattctggggcaaacaatccttacccagtggatgatgttccctctgaaaattgataaccttgtgaagtggtggtttcccctccagttgccaaaatggccatatcctcaagctccttctggccccacattctactccaaaacatttccaattttaggctcagttggggacacatttctatatctacctggatggaccaagggccaagtctggatcaatgggtttaacttgggccggtactggacaaagcaggggccacaacagaccctctacgtgccaagattcctgctgtttcctaggggagccctcaacaaaattacattgctggaactagaagatgtacctctccagccccaagtccaatttttggataagcctatcctcaatagcactagtactttgcacaggacacatatcaattccctttcagctgatacactgagtgcctctgaaccaatggagttaagtgggcactgaaaggtaggccgggcatggtggctcatgcctgtaatcccagcactttgggaggctgagacgggtggattacctgaggtcaggacttcaagaccagcctggccaacatggtgaaaccccgtctccactaaaaatacaaaaattagccgggcgtgatggtgggcacctctaatcccagctacttgggaggctgagggcaggagaattgcttgaatccaggaggcagaggttgcagtgagtggaggttgtaccactgcactccagcctggctgacagtgagacactccatctc

SEQ ID NO: 280437 - DNA, 420 bp, Homo sapiens
caggacaaaatagattcatcttcaacattccctgcatattatcagagctgatataaacgggaagagggaagtactggtttggtgatacattgctgccatatcccaggagaagaccttcaagctttacatttggacttggacgcaagaacttcaagaggatggagtcacttgtggtattgatgtggactttgaggtttggccttttacctaacaatgggaatgaaaacatcgatggctgttacttcccctttttagcatcctacccaacttcccagcaagtgttggtggctagaggcattgttcttgaaaaacatgttgtctactttgctactcagtattacagcacacacccaaacgcccaaaatgaagctaaataacatagagcagcctagaataaaaagtatatcttactgttcaata

SEQ ID NO: 280438 - DNA, 483 bp, Homo sapiens
gtgcctcagcctcgcgaatagctgggattacagtgcaaaggggaagagtcagaaggtgaataaatactcacagccgaagctcttcaaaagacttcaccgagtacagaggggagtttggatcccgctgcaggacttccacttggtttgtgttatcaacaaggttgcttctgatcagcttgttgagtaaggactgggcagctctgtcctctgtcaggaaaaagaaagcaaagaattttaaaaagtccttgaaacctaccaggcgtttactctaattcaactgccatttgtattttaaataataatgtactgaacattcaaattcaaggtacgtcatagttttgacttataaattaaaatagttttattaaagaaaaaagttatgatacatcacccatttaggcctcatattcttttccagactctattctaacagccctcttttcctgcagttatctattcctcctatccagacccacatattta

SEQ ID NO: 280439 - DNA, 3275 bp, Homo sapiens
tgcggttcggcgctcccaggttcctttcctcactgcacgctcttgcccctcctcttttctctcctgcccgtgttgcttcccgccgcctgacctggcccgcccgcctttccagtctggccgggcgggggcctgaagcacggcggctcgggccgtgggaccgtgttcacaccctttccagaaattcttggctggtaaccgcgaaaccgactggagcaggagctgggagaactggagaaaactgctctaatctcacttgactccagctaggagctgatgctgcatcgtaataacatttgcagagcgctttcacaggcgctggagtgacttgtctgagattcctccagaactgagccctttgttggaaccataccccagcccatggtcccatgactaggtggatagtactccttgtacctcctgcaacccagaaccctggctgaccactttgaaggaggatgctccagcaggtcaatggccacaatccggggtctgatggccaagccagggagtacctcagagaagacctgcaggagttcctgggtggggaggtcctgctgtacaaactggatgacctcaccagggtgaatcctgtgacactagagacagtcctgaggtgcctgcaggcccggtacatggcagacacattctacaccaatgctggctgcaccctggtagccttgaaccccttcaagcctgttcctcagctctactcgcccgagctaatgagagagtaccatgctgcgcctcagccccagaaactgaagccccatgtgttcactgtgggtgaacagacctacaggaatgtcaagagcctgattgaaccagtcaaccagtctattgttgtcagtggagagagtggtgctggaaagacatggacgtctcgctgcctaatgaagttctatgctgtggtggccacctcacctgcatcttgggagagccacaagattgcagagaggatagaacagaggatcctgaactccaaccctgtcatggaagcttttgggaatgcgtgtacactgaggaataacaacagcagtcgctttgggaagttcatccagctccagctgaacagggctcagcaaatgactggagccgcagtccagacctacctcctagagaaaactcgagtggcctgccaggcttccagtgagaggaacttccacatcttctatcagatttgcaaaggagccagtgaggacgagaggctccagtggcaccttcctgagggagctgccttctcctggctgcccaacccagagaggagcttagaagaggattgttttgaggtgaccagagaggccatgctccatttgggcattgacacccctacccagaacaacatctttaaggtcctagctggactgctgcaccttggcaatatccagtttgctgcctccgaggatgaagcccagccctgccagccgatggatgatgccaagtactctgtcaggacggcagcctcgctgctggggctcccagaggacgtgctgctggagatggtgcagattagaaccatcagggcaggcagacagcagcaggtgttccggaagccctgcgcccgagccgagtgtgacacccgtagagactgcctggccaaactgatctatgcgcggttgtttgactggctggtatcagtgatcaacagcagcatctgtgcagacaccgactcgtggaccactttcataggcctgctggatgtgtatggatttgaatcatttcctgacaacagtctggaacagttgtgcatcaactacgccaatgagaagctgcaggtcctgagccagctggaggcctgtggcctcgtggagaccatccatatcagtgctgctggcttccccatccgggtctctcaccgaaactttgtagaacgatacaagttactaagaaggcttcatccttgcacatcctctggccccgacagcccatatcctgccaaagggctccctgaatggtgtccacacagcgaggaagccacgcttgaacctctcatccaggacattctccacactctgccggtcctaactcaggcagcagccataactggtgactcggctgaggccatgccagcccccatgcactgtggcaggaccaaggtgttcatgactgactctatgctggagcttctggaatgtgggcgtgcccgggtgctggagcagtgtgcccgctgcatccagggtggctggaggcgacaccggcaccgagagcaggagcggcagtggcgggccgtcatgctcatccaggcagccattcgttcctggttaactcggaaacacatccagaggctgcatgcagctgccacagtcatcaagcgtgcatggcagaagtggagaatcagaatggcctgccttgctgctaaagagctggatggtgtggaagaaaaacacttctctcaagctccctgttccctgagcacctcgccgctgcagaccaggctcctggaggcaataatccgcctctggcccctgggactggtcctggccaatacggctatgggtgtaggcagctttcagaggaaattagtggtctgggcttgcctccagctccccaggggcagccccagtagctacactgtccagacagcacaagaccaggctggtgtcacgtccatccgagcgctgcctcagggatcgataaagtttcactgcagaaagtctccactgcggtatgctgacatctgccctgaaccttcaccctacagcattacaggctttaatcagattctgctggaaagacacaggctgatccacgtgacctcttctgccttcactgggctggggtgatccttggtgcctttgtttccacaaggccttttcctgccccctgccttgccaaagacatttaatcagcacacagctgccagactattcccacagtgctccaaatgcacatgaacaacagtgacggctccagccttcgacccagagccccgtgcccagtgcgtcagtgggcctggggttccaggctacatcaagcactgatggtgtcagggctggtagttaccaaatcagggttaagaaacatcagggccacatttcactaccttcacagatcaaactcagcagcagtcatgactgtctgtcactacactggggatcccaattccacataagcacttttggaagaaaacagccaaagttggcctaaaattggcgctggaatttgggctgggaaaaatcttgtggttatttcctttaaaaaggaacaaaactttagtatttaattagttgatttatttaatgtaatttcaaacaattaaattatgaataatgcaatgt

SEQ ID NO: 280440 - DNA, 1704 bp, Homo sapiens
tgcggttcggcgctcccaggttcctttcctcactgcacgctcttgcccctcctcttttctctcctgcccgtgttgcttcccgccgcctgacctggcccgcccgcctttccagtctggccgggcgggggcctgaagcacggcggctcgggccgtgggaccgtgttcacaccctttccagaaattcttggctggtaaccgcgaaaccgactggagcaggagctgggagaactggagaaaactgctctaatctcacttgactccagctaggagctgatgctgcatcgtaataacatttgcagagcgctttcacaggcgctggagtgacttgtctgagattcctccagaactgagccctttgttggaaccataccccagcccatggtcccatgactaggtggatagtactccttgtacctcctgcaacccagaaccctggctgaccactttgaaggaggatgctccagcaggtcaatggccacaatccggggtctgatggccaagccagggagtacctcagagaagacctgcaggagttcctgggtggggaggtcctgctgtacaaactggatgacctcaccagggtgaatcctgtgacactagagacagtcctgaggtgcctgcaggcccggtacatggcagacacattctacaccaatgctggctgcaccctggtagccttgaaccccttcaagcctgttcctcagctctactcgcccgagctaatgagagagtaccatgctgcgcctcagccccagaaactgaagccccatgtgttcactgtgggtgaacagacctacaggaatgtcaagagcctgattgaaccagtcaaccagtctattgttgtcagtggagagagtggtgctggaaagacatggacgtctcgctgcctaatgaagttctatgctgtggtggccacctcacctgcatcttgggagagccacaagattgcagagaggatagaacagaggatcctgaactccaaccctgtcatggaagcttttgggaatgcgtgtacactgaggaataacaacagcagtcgctttgggaagttcatccagctccagctgaacagggctcagcaaatgactggagccgcagtccagacctacctcctagagaaaactcgagtggcctgccaggcttccagtgagaggaacttccacatcttctatcagatttgcaaaggagccagtgaggacgagaggctccagtggcaccttcctgagggagctgccttctcctggctgcccaacccagagaggagcttagaagaggattgttttgaggtgaccagagaggccatgctccatttgggcattgacacccctacccagaacaacatctttaaggtcagaagaaaagccacgccacttaagtttggcagagatgacgggcagccctttgcatagagcttttccctggacttggagttggtctttccctgaggatctaggactttgggcccttctgtgctacctccaaggaatcagtcacctctgttctgctgagtctggagaccaggtggtggggtggacggggcataaggaagagtgatgcatacacagtgctagagtacagaatgcagtaagtgatccatgggggcagagagcaaggtaccgcatgatcagaagagagaactagtgctaccgccttgcttgtctagtacattaaaacttacaagtcatgttcacacttctctgctca

SEQ ID NO: 280441 - DNA, 864 bp, Homo sapiens
ctcaagaaagtctccaccagggttaatccattgcaggcacgcttcaccctcagcctcatctctccttgctaggggtggtgccaaggcctagaaaattccaagtctgagggtcacttaaccattcttcaaagattggcttaggcccagcctcacaacaccccacctcccagatggattcatctccctgaaatcctcaccttcttgaagttgacactggaccgttcacctgattagcgctcccaaatggatcatcaacccttagtcgtagtgctaacagtgtttatcctctgagtgaatactcagattcgtactttgtgtggtgctgtcaaaccatgacctcattgaccttcacaaccactccttatgaggcagatttaactgtccccattttcaaggtaagaaattgaggtaggtgatgtgcctgacccaggatcacacacccagtgagtgattgaactgtgatataaactaccacaccacacctttcctggagcagcgagagatgactccagcctctcctcctcaccaacgactgaaataggatatttctgtctaatgtagaggatagggcacaaggcttctctgtctccccagtgtcttactcctcctccatggcacactgacccagagggtttgcagccccaccccaacccaaaccctaaccctgtaataaaactggcccagggagcctctgaggctctcataaaagtttccctgtctcctaattggcaagggaaaggacaggcccactctccgcccaggcctgccttgcatctcattttggttgcttctgctaggtgggaaggagtgagtgagtcactccagaaaagccctcacctgtgtatgtccttgtcttctctctca

SEQ ID NO: 280442 - DNA, 544 bp, Homo sapiens
tcatagctgtcagagttaccgaaatctcgaagttgtgcatcaactacgccaatgagaagctgcagcagcattttgtggctcactacctaagggcccagcaggtgagggatggggtgagcaggaggcaggtccttcttttggatcctcaatcccttcctgaccttccagccccagtccaggttctgattagaagcctttggttccttcttattttatttttaattgacaaataataattgcacaacttgtcgagattcgaatctcgacaagttgtgcagccgagcgtggcccaactgagatcaacaatggtagacccagcgatcaactggtttttcctaaaaatgaacggtgaactggaacagactaaagacaaacgggaacaagcccaaaatgaactgagtgcctggaagtttacgcctgatagccaaacagggaaaaagttaatggcgaagtgtcgaatgcttatccaggagaatcaagagcttggaaggcagctgtcccaggaacgtatggcacaactggtcgagattcgggtaccgagctc

SEQ ID NO: 280443 - DNA, 516 bp, Homo sapiens
cgtggtggctcacacctgtaatcctagcacttcgggaggccgaggtgggaggatcacctgaggtcaggagttcgagaccagcctggtcaacatggtgaaagcccgtctctactaaaaatacaaaaattagccaggctggtggcacatgcctgtagtcccagttactccagaggctgaggcaagaggattgcttgagcctgggagattgaagctacagccttacggaggctacaataagctgttcgtgccacttgccaactccaagccttggggggccaaaggaacgccccgttgattccattcccaagtatgaactaagaagcagcagtaagagacaaacacaaaaacagaacaaaaagagagaaaacacacaaaaaaaaaaataaaaaaggggggcggcgccgctcatcaaggattatcctcccagaggggggcccaagatttgtgcggatgagcgccagtttctgtggtgcgacagagggtgcccccatataggggagccgtgttatttaaaca

SEQ ID NO: 280444 - DNA, 4672 bp, Homo sapiens
tgcggttcggcgctcccaggttcctttcctcactgcacgctcttgcccctcctcttttctctcctgcccgtgttgcttcccgccgcctgacctggcccgcccgcctttccagtctggccgggcgggggcctgaagcacggcggctcgggccgtgggaccgtgttcacaccctttccagaaattcttggctggtaaccgcgaaaccgactggagcaggagctgggagaactggagaaaactgctctaatctcacttgactccagctaggagctgatgctgcatcgtaataacatttgcagagcgctttcacaggcgctggagtgacttgtctgagattcctccagaactgagccctttgttggaaccataccccagcccatggtcccatgactaggtggatagtactccttgtacctcctgcaacccagaaccctggctgaccactttgaaggaggatgctccagcagagatggagtctcactctgtagacaaggctggtctcaaactcctgacctcaagtgatccgtctgcctcagcctcccaaggtgcttttacaggggtcaatggccacaatccggggtctgatggccaagccagggagtacctcagagaagacctgcaggagttcctgggtggggaggtcctgctgtacaaactggatgacctcaccagggtgaatcctgtgacactagagacagtcctgaggtgcctgcaggcccggtacatggcagacacattctacaccaatgctggctgcaccctggtagccttgaaccccttcaagcctgttcctcagctctactcgcccgagctaatgagagagtaccatgctgcgcctcagccccagaaactgaagccccatgtgttcactgtgggtgaacagacctacaggaatgtcaagagcctgattgaaccagtcaaccagtctattgttgtcagtggagagagtggtgctggaaagacatggacgtctcgctgcctaatgaagttctatgctgtggtggccacctcacctgcatcttgggagagccacaagattgcagagaggatagaacagaggatcctgaactccaaccctgtcatggaagcttttgggaatgcgtgtacactgaggaataacaacagcagtcgctttgggaagttcatccagctccagctgaacagggctcagcaaatgactggagccgcagtccagacctacctcctagagaaaactcgagtggcctgccaggcttccagtgagaggaacttccacatcttctatcagatttgcaaaggagccagtgaggacgagaggctccagtggcaccttcctgagggagctgccttctcctggctgcccaacccagagaggagcttagaagaggattgttttgaggtgaccagagaggccatgctccatttgggcattgacacccctacccagaacaacatctttaaggtcctagctggactgctgcaccttggcaatatccagtttgctgcctccgaggatgaagcccagccctgccagccgatggatgatgccaagtactctgtcaggacggcagcctcgctgctggggctcccagaggacgtgctgctggagatggtgcagattagaaccatcagggcaggcagacagcagcaggtgttccggaagccctgcgcccgagccgagtgtgacacccgtagagactgcctggccaaactgatctatgcgcggttgtttgactggctggtatcagtgatcaacagcagcatctgtgcagacaccgactcgtggaccactttcataggcctgctggatgtgtatggatttgaatcatttcctgacaacagtctggaacagttgtgcatcaactacgccaatgagaagctgcagcagcattttgtggctcactacctaagggcccagcaggaggaatacgcagttgagggcctggagtggtcattcatcaactaccaggacaaccagccctgtttggatctcattgagggaagccccatcagcatctgctccctcataaatgaggaatgccgcctcaatcgacccagcagcgcagcccagctccagacacgcattgagactgccctggcaggcagcccctgcctgggccacaataagctcagccgggagcccagcttcattgtggtgcattatgcggggcctgtgcggtaccacacagcaggcctggtggagaagaacaaggaccctatcccacctgagctgaccaggctcctgcagcaatcccaggaccccctgctcatggggctgtttcctactaaccccaaagagaagacccaggaggaaccccctggccagagcagggcccctgtgttgaccgtggtgtccaagttcaaggcctcactggagcagcttctgcaggtcctacacagcaccacgccccactacattcgctgcatcaagcccaacagccagggccaggcgcagacctttctccaagaggaggtcctgagccagctggaggcctgtggcctcgtggagaccatccatatcagtgctgctggcttccccatccgggtctctcaccgaaactttgtagaacgatacaagttactaagaaggcttcatccttgcacatcctctggccccgacagcccatatcctgccaaagggctccctgaatggtgtccacacagcgaggaagccacgcttgaacctctcatccaggacattctccacactctgccggtcctaactcaggcagcagccataactggtgactcggctgaggccatgccagcccccatgcactgtggcaggaccaaggtgttcatgactgactctatgctggagcttctggaatgtgggcgtgcccgggtgctggagcagtgtgcccgctgcatccagggtggctggaggcgacaccggcaccgagagcaggagcggcagtggcgggccgtcatgctcatccaggcagccattcgttcctggttaactcggaaacacatccagaggctgcatgcagctgccacagtcatcaagcgtgcatggcagaagtggagaatcagaatggcctgccttgctgctaaagagctggatggtgtggaagaaaaacacttctctcaagctccctgttccctgagcacctcgccgctgcagaccaggctcctggaggcaataatccgcctctggcccctgggactggtcctggccaatacggctatgggtgtaggcagctttcagaggaaattagtggtctgggcttgcctccagctccccaggggcagccccagtagctacactgtccagacagcacaagaccaggctggtgtcacgtccatccgagcgctgcctcagggatcgataaagtttcactgcagaaagtctccactgcggtatgctgacatctgccctgaaccttcaccctacagcattacaggctttaatcagattctgctggaaagacacaggctgatccacgtgacctcttctgccttcactgggctggggtgatccttggtgcctttgtttccacaaggccttttcctgccccctgccttgccaaagacatttaatcagcacacagctgccagactattcccacagtgctccaaatgcacatgaacaacagtgacggctccagccttcgacccagagccccgtgcccagtgcgtcagtgggcctggggttccaggctacatcaagcactgatggtgtcagggctggtagttaccaaatcagggttaagaaacatcagggccacatttcactaccttcacagatcaaactcagcagcagtcatgactgtctgtcactacactggggatcccaattccacataagcacttttggaagaaaacagccaaagttggcctaaaattggcgctggaatttgggctgggaaaaatcttgtggttatttcctttaaaaaggaacaaaactttagtatttaattagttgatttatttaatgtaatttcaaacaattaaattatgaataatgcaatgtacagtagaatcacgttttgattttattaacactgaccaagtttaactccatatgaagtgtaagcttgatatcgtttatgatgtctatcaactgtaccaaaagtaaaacatttaaaaacaatcatctgaatgtcaagttttctctccataaaggacttgccaccttaaggaccccaagtctgcctgaaacatgagccacatcaatgccggtaaaggcctgcatgacctaatctgcatcctggaaacctcttttgcctgagctccccagccccaaactagctggtctgggagagggagcaggcaggttccaggagtcaagcacacgcttgagcaagcagcacaataatccatcttaagactcctcattctgggatggctccacaattcctaaacagcagtctgcaaactccacaaacaaaggctcttgcatgtaagctctcatgagctttgctttgtcttctccctgatcgaggttgaccatcaactgcctgaggtgtggattgagcaataagcttcttaatgttgcagattccccttaattctttaaattctgcaaagaaactctgtcttcttcctcatcactattgagaaaatcagctatagagtcatcatcatctttgttttccacaggctttacggttttggtaggaagagctgatcttatttttttctcaacaggacgagtttcagggttgcactgttctgaaaaagacacaaa

SEQ ID NO: 280445 - DNA, 6164 bp, Homo sapiens
tgcggttcggcgctcccaggttcctttcctcactgcacgctcttgcccctcctcttttctctcctgcccgtgttgcttcccgccgcctgacctggcccgcccgcctttccagtctggccgggcgggggcctgaagcacggcggctcgggccgtgggaccgtgttcacaccctttccagaaattcttggctggtaaccgcgaaaccgactggagcaggagctgggagaactggagaaaactgctctaatctcacttgactccagctaggagctgatgctgcatcgtaataacatttgcagagcgctttcacaggcgctggagtgacttgtctgagattcctccagaactgagccctttgttggaaccataccccagcccatggtcccatgactaggtggatagtactccttgtacctcctgcaacccagaaccctggctgaccactttgaaggaggatgctccagcaggtcaatggccacaatccggggtctgatggccaagccagggagtacctcagagaagacctgcaggagttcctgggtggggaggtcctgctgtacaaactggatgacctcaccagggtgaatcctgtgacactagagacagtcctgaggtgcctgcaggcccggtacatggcagacacattctacaccaatgctggctgcaccctggtagccttgaaccccttcaagcctgttcctcagctctactcgcccgagctaatgagagagtaccatgctgcgcctcagccccagaaactgaagccccatgtgttcactgtgggtgaacagacctacaggaatgtcaagagcctgattgaaccagtcaaccagtctattgttgtcagtggagagagtggtgctggaaagacatggacgtctcgctgcctaatgaagttctatgctgtggtggccacctcacctgcatcttgggagagccacaagattgcagagaggatagaacagaggatcctgaactccaaccctgtcatggaagcttttgggaatgcgtgtacactgaggaataacaacagcagtcgctttgggaagttcatccagctccagctgaacagggctcagcaaatgactggagccgcagtccagacctacctcctagagaaaactcgagtggcctgccaggcttccagtgagaggaacttccacatcttctatcagatttgcaaaggagccagtgaggacgagaggctccagtggcaccttcctgagggagctgccttctcctggctgcccaacccagagaggagcttagaagaggattgttttgaggtgaccagagaggccatgctccatttgggcattgacacccctacccagaacaacatctttaaggtcctagctggactgctgcaccttggcaatatccagtttgctgcctccgaggatgaagcccagccctgccagccgatggatgatgccaagtgtgagggtcagggtgtaggatggggcaggccctgtcaggaaggtagccagcattgctggggttgggtggaaggctggatggtgaaaattggaatctgatgcccttgcttatgccacccaccatagggcctggccctggatcatttactcctcaccctgtctggtgaggcagacagtatcgtccccatcttaaagatgagaaaatgagtcagaggtttgtaaagtgatttgtcccatacatggcagcatggactggtacatgaaagtgctgggtttgagttctgactgctgtttatggagtcctttgggtgagtcacttcactgatcagaacttaggtttcttctgtccagttgggcaagtcatggtcccgctgtgatgacttcacagtgcctcgtgaagaggactggatggagagtgatttgcctaaagaggatttgcccctcccagactctgtcaggacggcagcctcgctgctggggctcccagaggacgtgctgctggagatggtgcagattagaaccatcagggcaggcagacagcagcaggtgttccggaagccctgcgcccgagccgagtgtgacacccgtagagactgcctggccaaactgatctatgcgcggttgtttgactggctggtatcagtgatcaacagcagcatctgtgcagacaccgactcgtggaccactttcataggtagcaaggcctcactgtgctgggagcactccagaaaaagagcaataaagccctggatggagaggcaggagccctgggtccactgtgtgactctgggcagttcctttcccttttttgtctcctcttgcatctgcctgccagcatagagcgagatctctgcatagggtgagatctctgctctcctgcacccacatctgagcagtccataactctccagacaggctcaacagtgccttgtctgaaagagccctttacctccccagagacccagctctaattgtgggagagtagtgggggttggggaaaatagctgtattagaagggactttggaggctggcaccgtggctcacacctgtaatcccaacattttgggaggccaaagtgggaggatcactggaggccaggagttggagaccagcctgggcaatatagcaagaccccatttcaaagaaattagccaggcatggtgctacatgcctgtagtcccagctactcaggagaccgaggtgggaggatcactttagcccaagagtttgaagcttctgtgagctgtgatcacaccactgcactccagcctggtcaacagagcaagaccctatctcaggggggagaacaaaaaaagacttgggggacatgactgagggaggtcaacacggttgtaactaggtgggacagtcagttataggaggaaataaagcttaaaggtacaagtgcagtttgctcatggaatggtggaattctaggcaccaaattggctagtgagactaatgccctccgaactagatttaacacagaaaatgttccctgggacctggtttcctcataggaggtgcctatcagaaccagagaattcagactcaaaaatgggcctgatgctctgggctgtcttcacacttcatttgggtttcctgcttgctctgagctctacaggggaatggggtagagatgggagccaccttgggtggagggtggggaaggtatgttctgcccaccacaggtgtcatgctcactcagcctgatgcccaggctgccaagtataaggcattggcaggggcccagccaccctgggttccttggtcccctattccccatctgctccctgcagtggccccatgggttctctgccatcttcccaggcctgctggatgtgtatggatttgaatcatttcctgacaacagtctggaacagttgtgcatcaactacgccaatgagaagctgcagcagcattttgtggctcactacctaagggcccagcaggaggaatacgcagttgagggcctggagtggtcattcatcaactaccaggacaaccagccctgtttggatctcattgagggaagccccatcagcatctgctccctcataaatgaggaatgccgcctcaatcgacccagcagcgcagcccagctccagacacgcattgagactgccctggcaggcagcccctgcctgggccacaataagctcagccgggagcccagcttcattgtggtgcattatgcggggcctgtgcggtaccacacagcaggcctggtggagaagaacaaggaccctatcccacctgagctgaccaggctcctgcagcaatcccaggaccccctgctcatggggctgtttcctactaaccccaaagagaagacccaggaggaaccccctggccagagcagggcccctgtgttgaccgtggtgtccaagttcaaggcctcactggagcagcttctgcaggtcctacacagcaccacgccccactacattcgctgcatcaagcccaacagccagggccaggcgcagacctttctccaagaggaggtcctgagccagctggaggcctgtggcctcgtggagaccatccatatcagtgctgctggcttccccatccgggtctctcaccgaaactttgtagaacgatacaagttactaagaaggcttcatccttgcacatcctctggccccgacagcccatatcctgccaaagggctccctgaatggtgtccacacagcgaggaagccacgcttgaacctctcatccaggacattctccacactctgccggtcctaactcaggcagcagccataactggtgactcggctgaggccatgccagcccccatgcactgtggcaggaccaaggtgttcatgactgactctatgctggagcttctggaatgtgggcgtgcccgggtgctggagcagtgtgcccgctgcatccagggtggctggaggcgacaccggcaccgagagcaggagcggcagtggcgggccgtcatgctcatccaggcagccattcgttcctggttaactcggaaacacatccagaggctgcatgcagctgccacagtcatcaagcgtgcatggcagaagtggagaatcagaatggcctgccttgctgctaaagagctggatggtgtggaagaaaaacacttctctcaagctccctgttccctgagcacctcgccgctgcagaccaggctcctggaggcaataatccgcctctggcccctgggactggtcctggccaatacggctatgggtgtaggcagctttcagaggaaattagtggtctgggcttgcctccagctccccaggggcagccccagtagctacactgtccagacagcacaagaccaggctggtgtcacgtccatccgagcgctgcctcagggatcgataaagtttcactgcagaaagtctccactgcggtatgctgacatctgccctgaaccttcaccctacagcattacaggctttaatcagattctgctggaaagacacaggctgatccacgtgacctcttctgccttcactgggctggggtgatccttggtgcctttgtttccacaaggccttttcctgccccctgccttgccaaagacatttaatcagcacacagctgccagactattcccacagtgctccaaatgcacatgaacaacagtgacggctccagccttcgacccagagccccgtgcccagtgcgtcagtgggcctggggttccaggctacatcaagcactgatggtgtcagggctggtagttaccaaatcagggttaagaaacatcagggccacatttcactaccttcacagatcaaactcagcagcagtcatgactgtctgtcactacactggggatcccaattccacataagcacttttggaagaaaacagccaaagttggcctaaaattggcgctggaatttgggctgggaaaaatcttgtggttatttcctttaaaaaggaacaaaactttagtatttaattagttgatttatttaatgtaatttcaaacaattaaattatgaataatgcaatgtacagtagaatcacgttttgattttattaacactgaccaagtttaactccatatgaagtgtaagcttgatatcgtttatgatgtctatcaactgtaccaaaagtaaaacatttaaaaacaatcatctgaatgtcaagttttctctccataaaggacttgccaccttaaggaccccaagtctgcctgaaacatgagccacatcaatgccggtaaaggcctgcatgacctaatctgcatcctggaaacctcttttgcctgagctccccagccccaaactagctggtctgggagagggagcaggcaggttccaggagtcaagcacacgcttgagcaagcagcacaataatccatcttaagactcctcattctgggatggctccacaattcctaaacagcagtctgcaaactccacaaacaaaggctcttgcatgtaagctctcatgagctttgctttgtcttctccctgatcgaggttgaccatcaactgcctgaggtgtggattgagcaataagcttcttaatgttgcagattccccttaattctttaaattctgcaaagaaactctgtcttcttcctcatcactattgagaaaatcagctatagagtcatcatcatctttgttttccacaggctttacggttttggtaggaagagctgatcttatttttttctcaacaggacgagtttcagggttgcactgttctgaaaaagacacaaa

SEQ ID NO: 280446 - DNA, 4663 bp, Homo sapiens
ctcaagaaagtctccaccagggttaatccattgcaggcacgcttcaccctcagcctcatctctccttgctaggggtggtgccaaggcctagaaaattccaagtctgagggtcacttaaccattcttcaaagattggcttaggcccagcctcacaacaccccacctcccagatggattcatctccctgaaatcctcaccttcttgaagttgacactggaccgttcacctgattagcgctcccaaatggatcatcaacccttagtcgtagtgctaacagtgtttatcctctgagtgaatactcagattcgtactttgtgtggtgctgtcaaaccatgacctcattgaccttcacaaccactccttatgaggcagatttaactgtccccattttcaaggcgctggagtgacttgtctgagattcctccagaactgagccctttgttggaaccataccccagcccatggtcccatgactaggtggatagtactccttgtacctcctgcaacccagaaccctggctgaccactttgaaggaggatgctccagcaggtcaatggccacaatccggggtctgatggccaagccagggagtacctcagagaagacctgcaggagttcctgggtggggaggtcctgctgtacaaactggatgacctcaccagggtgaatcctgtgacactagagacagtcctgaggtgcctgcaggcccggtacatggcagacacattctacaccaatgctggctgcaccctggtagccttgaaccccttcaagcctgttcctcagctctactcgcccgagctaatgagagagtaccatgctgcgcctcagccccagaaactgaagccccatgtgttcactgtgggtgaacagacctacaggaatgtcaagagcctgattgaaccagtcaaccagtctattgttgtcagtggagagagtggtgctggaaagacatggacgtctcgctgcctaatgaagttctatgctgtggtggccacctcacctgcatcttgggagagccacaagattgcagagaggatagaacagaggatcctgaactccaaccctgtcatggaagcttttgggaatgcgtgtacactgaggaataacaacagcagtcgctttgggaagttcatccagctccagctgaacagggctcagcaaatgactggagccgcagtccagacctacctcctagagaaaactcgagtggcctgccaggcttccagtgagaggaacttccacatcttctatcagatttgcaaaggagccagtgaggacgagaggctccagtggcaccttcctgagggagctgccttctcctggctgcccaacccagagaggagcttagaagaggattgttttgaggtgaccagagaggccatgctccatttgggcattgacacccctacccagaacaacatctttaaggtcctagctggactgctgcaccttggcaatatccagtttgctgcctccgaggatgaagcccagccctgccagccgatggatgatgccaagtactctgtcaggacggcagcctcgctgctggggctcccagaggacgtgctgctggagatggtgcagattagaaccatcagggcaggcagacagcagcaggtgttccggaagccctgcgcccgagccgagtgtgacacccgtagagactgcctggccaaactgatctatgcgcggttgtttgactggctggtatcagtgatcaacagcagcatctgtgcagacaccgactcgtggaccactttcataggcctgctggatgtgtatggatttgaatcatttcctgacaacagtctggaacagttgtgcatcaactacgccaatgagaagctgcagcagcattttgtggctcactacctaagggcccagcaggaggaatacgcagttgagggcctggagtggtcattcatcaactaccaggacaaccagccctgtttggatctcattgagggaagccccatcagcatctgctccctcataaatgaggaatgccgcctcaatcgacccagcagcgcagcccagctccagacacgcattgagactgccctggcaggcagcccctgcctgggccacaataagctcagccgggagcccagcttcattgtggtgcattatgcggggcctgtgcggtaccacacagcaggcctggtggagaagaacaaggaccctatcccacctgagctgaccaggctcctgcagcaatcccaggaccccctgctcatggggctgtttcctactaaccccaaagagaagacccaggaggaaccccctggccagagcagggcccctgtgttgaccgtggtgtccaagttcaaggcctcactggagcagcttctgcaggtcctacacagcaccacgccccactacattcgctgcatcaagcccaacagccagggccaggcgcagacctttctccaagaggaggtcctgagccagctggaggcctgtggcctcgtggagaccatccatatcagtgctgctggcttccccatccgggtctctcaccgaaactttgtagaacgatacaagttactaagaaggcttcatccttgcacatcctctggccccgacagcccatatcctgccaaagggctccctgaatggtgtccacacagcgaggaagccacgcttgaacctctcatccaggacattctccacactctgccggtcctaactcaggcagcagccataactggtgactcggctgaggccatgccagcccccatgcactgtggcaggaccaaggtgttcatgactgactctatgctggagcttctggaatgtgggcgtgcccgggtgctggagcagtgtgcccgctgcatccagggtggctggaggcgacaccggcaccgagagcaggagcggcagtggcgggccgtcatgctcatccaggcagccattcgttcctggttaactcggaaacacatccagaggctgcatgcagctgccacagtcatcaagcgtgcatggcagaagtggagaatcagaatggcctgccttgctgctaaagagctggatggtgtggaagaaaaacacttctctcaagctccctgttccctgagcacctcgccgctgcagaccaggctcctggaggcaataatccgcctctggcccctgggactggtcctggccaatacggctatgggtgtaggcagctttcagaggaaattagtggtctgggcttgcctccagctccccaggggcagccccagtagctacactgtccagacagcacaagaccaggctggtgtcacgtccatccgagcgctgcctcagggatcgataaagtttcactgcagaaagtctccactgcggtatgctgacatctgccctgaaccttcaccctacagcattacaggctttaatcagattctgctggaaagacacaggctgatccacgtgacctcttctgccttcactgggctggggtgatccttggtgcctttgtttccacaaggccttttcctgccccctgccttgccaaagacatttaatcagcacacagctgccagactattcccacagtgctccaaatgcacatgaacaacagtgacggctccagccttcgacccagagccccgtgcccagtgcgtcagtgggcctggggttccaggctacatcaagcactgatggtgtcagggctggtagttaccaaatcagggttaagaaacatcagggccacatttcactaccttcacagatcaaactcagcagcagtcatgactgtctgtcactacactggggatcccaattccacataagcacttttggaagaaaacagccaaagttggcctaaaattggcgctggaatttgggctgggaaaaatcttgtggttatttcctttaaaaaggaacaaaactttagtatttaattagttgatttatttaatgtaatttcaaacaattaaattatgaataatgcaatgtacagtagaatcacgttttgattttattaacactgaccaagtttaactccatatgaagtgtaagcttgatatcgtttatgatgtctatcaactgtaccaaaagtaaaacatttaaaaacaatcatctgaatgtcaagttttctctccataaaggacttgccaccttaaggaccccaagtctgcctgaaacatgagccacatcaatgccggtaaaggcctgcatgacctaatctgcatcctggaaacctcttttgcctgagctccccagccccaaactagctggtctgggagagggagcaggcaggttccaggagtcaagcacacgcttgagcaagcagcacaataatccatcttaagactcctcattctgggatggctccacaattcctaaacagcagtctgcaaactccacaaacaaaggctcttgcatgtaagctctcatgagctttgctttgtcttctccctgatcgaggttgaccatcaactgcctgaggtgtggattgagcaataagcttcttaatgttgcagattccccttaattctttaaattctgcaaagaaactctgtcttcttcctcatcactattgagaaaatcagctatagagtcatcatcatctttgttttccacaggctttacggttttggtaggaagagctgatcttatttttttctcaacaggacgagtttcagggttgcactgttctgaaaaagacacaaa

SEQ ID NO: 280447 - DNA, 4844 bp, Homo sapiens
tgcggttcggcgctcccaggttcctttcctcactgcacgctcttgcccctcctcttttctctcctgcccgtgttgcttcccgccgcctgacctggcccgcccgcctttccagtctggccgggcgggggcctgaagcacggcggctcgggccgtgggaccgtgttcacaccctttccagaaattcttggctggtaaccgcgaaaccgactggagcaggagctgggagaactggagaaaactgctctaatctcacttgactccagctaggagctgatgctgcatcgtaataacatttgcagagcgctttcacagattggcttaggcccagcctcacaacaccccacctcccagatggattcatctccctgaaatcctcaccttcttgaagttgacactggaccgttcacctgattagcgctcccaaatggatcatcaacccttagtcgtagtgctaacagtgtttatcctctgagtgaatactcagattcgtactttgtgtggtgctgtcaaaccatgacctcattgaccttcacaaccactccttatgaggcagatttaactgtccccattttcaaggcgctggagtgacttgtctgagattcctccagaactgagccctttgttggaaccataccccagcccatggtcccatgactaggtggatagtactccttgtacctcctgcaacccagaaccctggctgaccactttgaaggaggatgctccagcaggtcaatggccacaatccggggtctgatggccaagccagggagtacctcagagaagacctgcaggagttcctgggtggggaggtcctgctgtacaaactggatgacctcaccagggtgaatcctgtgacactagagacagtcctgaggtgcctgcaggcccggtacatggcagacacattctacaccaatgctggctgcaccctggtagccttgaaccccttcaagcctgttcctcagctctactcgcccgagctaatgagagagtaccatgctgcgcctcagccccagaaactgaagccccatgtgttcactgtgggtgaacagacctacaggaatgtcaagagcctgattgaaccagtcaaccagtctattgttgtcagtggagagagtggtgctggaaagacatggacgtctcgctgcctaatgaagttctatgctgtggtggccacctcacctgcatcttgggagagccacaagattgcagagaggatagaacagaggatcctgaactccaaccctgtcatggaagcttttgggaatgcgtgtacactgaggaataacaacagcagtcgctttgggaagttcatccagctccagctgaacagggctcagcaaatgactggagccgcagtccagacctacctcctagagaaaactcgagtggcctgccaggcttccagtgagaggaacttccacatcttctatcagatttgcaaaggagccagtgaggacgagaggctccagtggcaccttcctgagggagctgccttctcctggctgcccaacccagagaggagcttagaagaggattgttttgaggtgaccagagaggccatgctccatttgggcattgacacccctacccagaacaacatctttaaggtcctagctggactgctgcaccttggcaatatccagtttgctgcctccgaggatgaagcccagccctgccagccgatggatgatgccaagtactctgtcaggacggcagcctcgctgctggggctcccagaggacgtgctgctggagatggtgcagattagaaccatcagggcaggcagacagcagcaggtgttccggaagccctgcgcccgagccgagtgtgacacccgtagagactgcctggccaaactgatctatgcgcggttgtttgactggctggtatcagtgatcaacagcagcatctgtgcagacaccgactcgtggaccactttcataggcctgctggatgtgtatggatttgaatcatttcctgacaacagtctggaacagttgtgcatcaactacgccaatgagaagctgcagcagcattttgtggctcactacctaagggcccagcaggaggaatacgcagttgagggcctggagtggtcattcatcaactaccaggacaaccagccctgtttggatctcattgagggaagccccatcagcatctgctccctcataaatgaggaatgccgcctcaatcgacccagcagcgcagcccagctccagacacgcattgagactgccctggcaggcagcccctgcctgggccacaataagctcagccgggagcccagcttcattgtggtgcattatgcggggcctgtgcggtaccacacagcaggcctggtggagaagaacaaggaccctatcccacctgagctgaccaggctcctgcagcaatcccaggaccccctgctcatggggctgtttcctactaaccccaaagagaagacccaggaggaaccccctggccagagcagggcccctgtgttgaccgtggtgtccaagttcaaggcctcactggagcagcttctgcaggtcctacacagcaccacgccccactacattcgctgcatcaagcccaacagccagggccaggcgcagacctttctccaagaggaggtcctgagccagctggaggcctgtggcctcgtggagaccatccatatcagtgctgctggcttccccatccgggtctctcaccgaaactttgtagaacgatacaagttactaagaaggcttcatccttgcacatcctctggccccgacagcccatatcctgccaaagggctccctgaatggtgtccacacagcgaggaagccacgcttgaacctctcatccaggacattctccacactctgccggtcctaactcaggcagcagccataactggtgactcggctgaggccatgccagcccccatgcactgtggcaggaccaaggtgttcatgactgactctatgctggagcttctggaatgtgggcgtgcccgggtgctggagcagtgtgcccgctgcatccagggtggctggaggcgacaccggcaccgagagcaggagcggcagtggcgggccgtcatgctcatccaggcagccattcgttcctggttaactcggaaacacatccagaggctgcatgcagctgccacagtcatcaagcgtgcatggcagaagtggagaatcagaatggcctgccttgctgctaaagagctggatggtgtggaagaaaaacacttctctcaagctccctgttccctgagcacctcgccgctgcagaccaggctcctggaggcaataatccgcctctggcccctgggactggtcctggccaatacggctatgggtgtaggcagctttcagaggaaattagtggtctgggcttgcctccagctccccaggggcagccccagtagctacactgtccagacagcacaagaccaggctggtgtcacgtccatccgagcgctgcctcagggatcgataaagtttcactgcagaaagtctccactgcggtatgctgacatctgccctgaaccttcaccctacagcattacaggctttaatcagattctgctggaaagacacaggctgatccacgtgacctcttctgccttcactgggctggggtgatccttggtgcctttgtttccacaaggccttttcctgccccctgccttgccaaagacatttaatcagcacacagctgccagactattcccacagtgctccaaatgcacatgaacaacagtgacggctccagccttcgacccagagccccgtgcccagtgcgtcagtgggcctggggttccaggctacatcaagcactgatggtgtcagggctggtagttaccaaatcagggttaagaaacatcagggccacatttcactaccttcacagatcaaactcagcagcagtcatgactgtctgtcactacactggggatcccaattccacataagcacttttggaagaaaacagccaaagttggcctaaaattggcgctggaatttgggctgggaaaaatcttgtggttatttcctttaaaaaggaacaaaactttagtatttaattagttgatttatttaatgtaatttcaaacaattaaattatgaataatgcaatgtacagtagaatcacgttttgattttattaacactgaccaagtttaactccatatgaagtgtaagcttgatatcgtttatgatgtctatcaactgtaccaaaagtaaaacatttaaaaacaatcatctgaatgtcaagttttctctccataaaggacttgccaccttaaggaccccaagtctgcctgaaacatgagccacatcaatgccggtaaaggcctgcatgacctaatctgcatcctggaaacctcttttgcctgagctccccagccccaaactagctggtctgggagagggagcaggcaggttccaggagtcaagcacacgcttgagcaagcagcacaataatccatcttaagactcctcattctgggatggctccacaattcctaaacagcagtctgcaaactccacaaacaaaggctcttgcatgtaagctctcatgagctttgctttgtcttctccctgatcgaggttgaccatcaactgcctgaggtgtggattgagcaataagcttcttaatgttgcagattccccttaattctttaaattctgcaaagaaactctgtcttcttcctcatcactattgagaaaatcagctatagagtcatcatcatctttgttttccacaggctttacggttttggtaggaagagctgatcttatttttttctcaacaggacgagtttcagggttgcactgttctgaaaaagacacaaa

SEQ ID NO: 280448 - DNA, 3992 bp, Homo sapiens
tgcggttcggcgctcccaggttcctttcctcactgcacgctcttgcccctcctcttttctctcctgcccgtgttgcttcccgccgcctgacctggcccgcccgcctttccagtctggccgggcgggggcctgaagcacggcggctcgggccgtgggaccgtgttcacaccctttccagaaattcttggctggtaaccgcgaaaccgactggagcaggagctgggagaactggagaaaactgctctaatctcacttgactccagctaggagctgatgctgcatcgtaataacatttgcagagcgctttcacaggcgctggagtgacttgtctgagattcctccagaactgagccctttgttggaaccataccccagcccatggtcccatgactaggtggatagtactccttgtacctcctgcaacccagaaccctggctgaccactttgaaggaggatgctccagcaggtcaatggccacaatccggggtctgatggccaagccagggagtacctcagagaagacctgcaggagttcctgggtggggaggtcctgctgtacaaactggatgacctcaccagggtgaatcctgtgacactagagacagtcctgaggtgcctgcaggcccggtacatggcagacacattctacaccaatgctggctgcaccctggtagccttgaaccccttcaagcctgttcctcagctctactcgcccgagctaatgagagagtaccatgctgcgcctcagccccagaaactgaagccccatgtgttcactgtgggtgaacagacctacaggaatgtcaagagcctgattgaaccagtcaaccagtctattgttgtcagtggagagagtggtgctggaaagacatggacgtctcgctgcctaatgaagttctatgctgtggtggccacctcacctgcatcttgggagagccacaagattgcagagaggatagaacagaggatcctgaactccaaccctgtcatggaagcttttgggaatgcgtgtacactgaggaataacaacagcagtcgctttgggaagttcatccagctccagctgaacagggctcagcaaatgactggagccgcagtccagacctacctcctagagaaaactcgagtggcctgccaggcttccagtgagaggaacttccacatcttctatcagatttgcaaaggagccagtgaggacgagaggctccagtggcaccttcctgagggagctgccttctcctggctgcccaacccagagaggagcttagaagaggattgttttgaggtgaccagagaggccatgctccatttgggcattgacacccctacccagaacaacatctttaaggtcctagctggactgctgcaccttggcaatatccagtttgctgcctccgaggatgaagcccagccctgccagccgatggatgatgccaagtactctgtcaggacggcagcctcgctgctggggctcccagaggacgtgctgctggagatggtgcagattagaaccatcagggcaggcagacagcagcaggtgttccggaagccctgcgcccgagccgagtgtgacacccgtagagactgcctggccaaactgatctatgcgcggttgtttgactggctggtatcagtgatcaacagcagcatctgtgcagacaccgactcgtggaccactttcataggcctgctggatgtgtatggatttgaatcatttcctgacaacagtctggaacagttgtgcatcaactacgccaatgagaagctgcaggtcctgagccagctggaggcctgtggcctcgtggagaccatccatatcagtgctgctggcttccccatccgggtctctcaccgaaactttgtagaacgatacaagttactaagaaggcttcatccttgcacatcctctggccccgacagcccatatcctgccaaagggctccctgaatggtgtccacacagcgaggaagccacgcttgaacctctcatccaggacattctccacactctgccggtcctaactcaggcagcagccataactggtgactcggctgaggccatgccagcccccatgcactgtggcaggaccaaggtgttcatgactgactctatgctggagcttctggaatgtgggcgtgcccgggtgctggagcagtgtgcccgctgcatccagggtggctggaggcgacaccggcaccgagagcaggagcggcagtggcgggccgtcatgctcatccaggcagccattcgttcctggttaactcggaaacacatccagaggctgcatgcagctgccacagtcatcaagcgtgcatggcagaagtggagaatcagaatggcctgccttgctgctaaagagctggatggtgtggaagaaaaacacttctctcaagctccctgttccctgagcacctcgccgctgcagaccaggctcctggaggcaataatccgcctctggcccctgggactggtcctggccaatacggctatgggtgtaggcagctttcagaggaaattagtggtctgggcttgcctccagctccccaggggcagccccagtagctacactgtccagacagcacaagaccaggctggtgtcacgtccatccgagcgctgcctcagggatcgataaagtttcactgcagaaagtctccactgcggtatgctgacatctgccctgaaccttcaccctacagcattacaggctttaatcagattctgctggaaagacacaggctgatccacgtgacctcttctgccttcactgggctggggtgatccttggtgcctttgtttccacaaggccttttcctgccccctgccttgccaaagacatttaatcagcacacagctgccagactattcccacagtgctccaaatgcacatgaacaacagtgacggctccagccttcgacccagagccccgtgcccagtgcgtcagtgggcctggggttccaggctacatcaagcactgatggtgtcagggctggtagttaccaaatcagggttaagaaacatcagggccacatttcactaccttcacagatcaaactcagcagcagtcatgactgtctgtcactacactggggatcccaattccacataagcacttttggaagaaaacagccaaagttggcctaaaattggcgctggaatttgggctgggaaaaatcttgtggttatttcctttaaaaaggaacaaaactttagtatttaattagttgatttatttaatgtaatttcaaacaattaaattatgaataatgcaatgtacagtagaatcacgttttgattttattaacactgaccaagtttaactccatatgaagtgtaagcttgatatcgtttatgatgtctatcaactgtaccaaaagtaaaacatttaaaaacaatcatctgaatgtcaagttttctctccataaaggacttgccaccttaaggaccccaagtctgcctgaaacatgagccacatcaatgccggtaaaggcctgcatgacctaatctgcatcctggaaacctcttttgcctgagctccccagccccaaactagctggtctgggagagggagcaggcaggttccaggagtcaagcacacgcttgagcaagcagcacaataatccatcttaagactcctcattctgggatggctccacaattcctaaacagcagtctgcaaactccacaaacaaaggctcttgcatgtaagctctcatgagctttgctttgtcttctccctgatcgaggttgaccatcaactgcctgaggtgtggattgagcaataagcttcttaatgttgcagattccccttaattctttaaattctgcaaagaaactctgtcttcttcctcatcactattgagaaaatcagctatagagtcatcatcatctttgttttccacaggctttacggttttggtaggaagagctgatcttatttttttctcaacaggacgagtttcagggttgcactgttctgaaaaagacacaaa

SEQ ID NO: 280449 - DNA, 3769 bp, Homo sapiens
ctcataacgtctctccagttcaatggaaaccaagtcactccacaaacaaaggtgctctgtaagaagtggaggctaagcgttgtctaagcgttgtctttaattcctttctcagaccctgacagctgtttaggccaactttttttccctttatgacaactcaaaccattacctgctgggctctagggctggaatgaatttaaggagaaggtaaaaaccaaaaggagttcatcagatgaaaagatgtattaaccaacatgttcatagtggtcttattttgaaaaggaaaagtgttggaaagaacccaaatatctaacagtggtgacatcatggccaaatgatggactggaccatccctatgatgcagctaagtgtttttgaagaatattataaatttaatggagaaccacttccaaaatgatattcatacctagatgtcaaactacatattaagggcgatgccctccttttaaggtgtgtttgtgtgtgtgtaggcattaaaaaattgtataaggaagctgggcacagtagttcgctcctgtaatcccagcattttgggaggctgaggtgggaggatcacttgagcccaggaatttcataccagccgggcaacatggcaaaaccctttctctactaaaaatacaaaaattagccaagtgtggtagtatgcacctataatcctagctactcaggaggctgaggcaggagaatcacctcaacccaggaggcagaggttgcagtgagctgagattgcaccattacactccagcctgggtgacagagcaagactctgtctcaaaaaaaaaaaaaacaacaaaacataattaaccgtgcctggtggcacatgcctgtagtcccagttactccagaggctgaggcaagaggattgcttgagcctgggagattgaagctacagccttacggaggctacaataagctgttcgtgccactgcactccagcctgggcaagaccctgtctcaaaaaaaaaaaaaaaaaaaaaaaaaaaaacaaaaagaaaaagaatatgctgaaattgcagagaagggaataaaaattaccaccatctattaattgtatcagtgtttgggtatatggtgatgtgagatcagggatgcataaagcgaacaaattcaactgaggattaaaaacaaaacaaaaaaaaaagtttttaaaggcacagacaatccagacccctcccattccctgggtgctgacctggacccagcctgagacgggaagtgattgctgggccctcagccagtccttctccccagtgccccttcactgtgttgtgtaggtgtattcaagtgtgtgggcagtgtaaggaatgtttaaaagccaattttgccttatgtattgattttagaaccttatttgtagcaatttattgaaaaaaaaaaaacgtatttgaaactttgacagcaactgtggtgctgctgcagcgaggtcactgacagctctaatggcccctttattatctctttcctgtttctgggcaaacctcttagccattcgttcctggttaactcggaaacacatccagaggctgcatgcagctgccacagtcatcaagcgtgcatggcagaagtggagagtaagtaagacccaagaagtcggggtgggcagtggatcaattttggggaccagatggacccgagtgggaatgctggctctgccactgcaatgcaggtggccttgggcaggttgtttagcctctctgagcctcatattcctcatgtatgcagtgggcacagtaacacctaccctgcagggtggttatgtaggtgaagagtggtataagcaactctgggaatataccaaactctgggatgtacactttagaagactgggttttatggcatatcagttatatcttgatggactcttatcttgttttcaagtagcatatgtaaggcctaagcacagttgcctggggtgtatagacttgtggcatatggaaccagtttggttcagggcagccagctgtttgcaaccaggtgccttcagttcaccttgttaagatgatttgttaaagatagttttgatttccattttctgctaagagggctagataaatctaaagctataaagggatatttgctttttaagatcagaatggcctgccttgctgctaaagagctggatggtgtggaagaaaaacacttctctcaagctccctgttccctgagcacctcgccgctgcagaccaggctcctggaggcaataatccgcctctggcccctgggactggtcctggccaatacggctatgggtgtaggcagctttcagaggaaattagtggtctgggcttgcctccagctccccaggggcagccccagtagctacactgtccagacagcacaagaccaggctggtgtcacgtccatccgagcgctgcctcagggatcgataaagtttcactgcagaaagtctccactgcggtatgctgacatctgccctgaaccttcaccctacagcattacaggctttaatcagattctgctggaaagacacaggctgatccacgtgacctcttctgccttcactgggctggggtgatccttggtgcctttgtttccacaaggccttttcctgccccctgccttgccaaagacatttaatcagcacacagctgccagactattcccacagtgctccaaatgcacatgaacaacagtgacggctccagccttcgacccagagccccgtgcccagtgcgtcagtgggcctggggttccaggctacatcaagcactgatggtgtcagggctggtagttaccaaatcagggttaagaaacatcagggccacatttcactaccttcacagatcaaactcagcagcagtcatgactgtctgtcactacactggggatcccaattccacataagcacttttggaagaaaacagccaaagttggcctaaaattggcgctggaatttgggctgggaaaaatcttgtggttatttcctttaaaaaggaacaaaactttagtatttaattagttgatttatttaatgtaatttcaaacaattaaattatgaataatgcaatgtacagtagaatcacgttttgattttattaacactgaccaagtttaactccatatgaagtgtaagcttgatatcgtttatgatgtctatcaactgtaccaaaagtaaaacatttaaaaacaatcatctgaatgtcaagttttctctccataaaggacttgccaccttaaggaccccaagtctgcctgaaacatgagccacatcaatgccggtaaaggcctgcatgacctaatctgcatcctggaaacctcttttgcctgagctccccagccccaaactagctggtctgggagagggagcaggcaggttccaggagtcaagcacacgcttgagcaagcagcacaataatccatcttaagactcctcattctgggatggctccacaattcctaaacagcagtctgcaaactccacaaacaaaggctcttgcatgtaagctctcatgagctttgctttgtcttctccctgatcgaggttgaccatcaactgcctgaggtgtggattgagcaataagcttcttaatgttgcagattccccttaattctttaaattctgcaaagaaactctgtcttcttcctcatcactattgagaaaatcagctatagagtcatcatcatctttgttttccacaggctttacggttttggtaggaagagctgatcttatttttttctcaacaggacgagtttcagggttgcactgttctgaaaaagacacaaa

SEQ ID NO: 280450 - DNA, 4527 bp, Homo sapiens
tgcggttcggcgctcccaggttcctttcctcactgcacgctcttgcccctcctcttttctctcctgcccgtgttgcttcccgccgcctgacctggcccgcccgcctttccagtctggccgggcgggggcctgaagcacggcggctcgggccgtgggaccgtgttcacaccctttccagaaattcttggctggtaaccgcgaaaccgactggagcaggagctgggagaactggagaaaactgctctaatctcacttgactccagctaggagctgatgctgcatcgtaataacatttgcagagcgctttcacaggcgctggagtgacttgtctgagattcctccagaactgagccctttgttggaaccataccccagcccatggtcccatgactaggtggatagtactccttgtacctcctgcaacccagaaccctggctgaccactttgaaggaggatgctccagcaggtcaatggccacaatccggggtctgatggccaagccagggagtacctcagagaagacctgcaggagttcctgggtggggaggtcctgctgtacaaactggatgacctcaccagggtgaatcctgtgacactagagacagtcctgaggtgcctgcaggcccggtacatggcagacacattctacaccaatgctggctgcaccctggtagccttgaaccccttcaagcctgttcctcagctctactcgcccgagctaatgagagagtaccatgctgcgcctcagccccagaaactgaagccccatgtgttcactgtgggtgaacagacctacaggaatgtcaagagcctgattgaaccagtcaaccagtctattgttgtcagtggagagagtggtgctggaaagacatggacgtctcgctgcctaatgaagttctatgctgtggtggccacctcacctgcatcttgggagagccacaagattgcagagaggatagaacagaggatcctgaactccaaccctgtcatggaagcttttgggaatgcgtgtacactgaggaataacaacagcagtcgctttgggaagttcatccagctccagctgaacagggctcagcaaatgactggagccgcagtccagacctacctcctagagaaaactcgagtggcctgccaggcttccagtgagaggaacttccacatcttctatcagatttgcaaaggagccagtgaggacgagaggctccagtggcaccttcctgagggagctgccttctcctggctgcccaacccagagaggagcttagaagaggattgttttgaggtgaccagagaggccatgctccatttgggcattgacacccctacccagaacaacatctttaaggtcctagctggactgctgcaccttggcaatatccagtttgctgcctccgaggatgaagcccagccctgccagccgatggatgatgccaagtactctgtcaggacggcagcctcgctgctggggctcccagaggacgtgctgctggagatggtgcagattagaaccatcagggcaggcagacagcagcaggtgttccggaagccctgcgcccgagccgagtgtgacacccgtagagactgcctggccaaactgatctatgcgcggttgtttgactggctggtatcagtgatcaacagcagcatctgtgcagacaccgactcgtggaccactttcataggcctgctggatgtgtatggatttgaatcatttcctgacaacagtctggaacagttgtgcatcaactacgccaatgagaagctgcagcagcattttgtggctcactacctaagggcccagcaggaggaatacgcagttgagggcctggagtggtcattcatcaactaccaggacaaccagccctgtttggatctcattgagggaagccccatcagcatctgctccctcataaatgaggaatgccgcctcaatcgacccagcagcgcagcccagctccagacacgcattgagactgccctggcaggcagcccctgcctgggccacaataagctcagccgggagcccagcttcattgtggtgcattatgcggggcctgtgcggtaccacacagcaggcctggtggagaagaacaaggaccctatcccacctgagctgaccaggctcctgcagcaatcccaggaccccctgctcatggggctgtttcctactaaccccaaagagaagacccaggaggaaccccctggccagagcagggcccctgtgttgaccgtggtgtccaagttcaaggcctcactggagcagcttctgcaggtcctacacagcaccacgccccactacattcgctgcatcaagcccaacagccagggccaggcgcagacctttctccaagaggaggtcctgagccagctggaggcctgtggcctcgtggagaccatccatatcagtgctgctggcttccccatccgggtctctcaccgaaactttgtagaacgatacaagttactaagaaggcttcatccttgcacatcctctggccccgacagcccatatcctgccaaagggctccctgaatggtgtccacacagcgaggaagccacgcttgaacctctcatccaggacattctccacactctgccggtcctaactcaggcagcagccataactggtgactcggctgaggccatgccagcccccatgcactgtggcaggaccaaggtgttcatgactgactctatgctggagcttctggaatgtgggcgtgcccgggtgctggagcagtgtgcccgctgcatccagggtggctggaggcgacaccggcaccgagagcaggagcggcagtggcgggccgtcatgctcatccaggcagccattcgttcctggttaactcggaaacacatccagaggctgcatgcagctgccacagtcatcaagcgtgcatggcagaagtggagaatcagaatggcctgccttgctgctaaagagctggatggtgtggaagaaaaacacttctctcaagctccctgttccctgagcacctcgccgctgcagaccaggctcctggaggcaataatccgcctctggcccctgggactggtcctggccaatacggctatgggtgtaggcagctttcagaggaaattagtggtctgggcttgcctccagctccccaggggcagccccagtagctacactgtccagacagcacaagaccaggctggtgtcacgtccatccgagcgctgcctcagggatcgataaagtttcactgcagaaagtctccactgcggtatgctgacatctgccctgaaccttcaccctacagcattacaggctttaatcagattctgctggaaagacacaggctgatccacgtgacctcttctgccttcactgggctggggtgatccttggtgcctttgtttccacaaggccttttcctgccccctgccttgccaaagacatttaatcagcacacagctgccagactattcccacagtgctccaaatgcacatgaacaacagtgacggctccagccttcgacccagagccccgtgcccagtgcgtcagtgggcctggggttccaggctacatcaagcactgatggtgtcagggctggtagttaccaaatcagggttaagaaacatcagggccacatttcactaccttcacagatcaaactcagcagcaggaagaaaacagccaaagttggcctaaaattggcgctggaatttgggctgggaaaaatcttgtggttatttcctttaaaaaggaacaaaactttagtatttaattagttgatttatttaatgtaatttcaaacaattaaattatgaataatgcaatgtacagtagaatcacgttttgattttattaacactgaccaagtttaactccatatgaagtgtaagcttgatatcgtttatgatgtctatcaactgtaccaaaagtaaaacatttaaaaacaatcatctgaatgtcaagttttctctccataaaggacttgccaccttaaggaccccaagtctgcctgaaacatgagccacatcaatgccggtaaaggcctgcatgacctaatctgcatcctggaaacctcttttgcctgagctccccagccccaaactagctggtctgggagagggagcaggcaggttccaggagtcaagcacacgcttgagcaagcagcacaataatccatcttaagactcctcattctgggatggctccacaattcctaaacagcagtctgcaaactccacaaacaaaggctcttgcatgtaagctctcatgagctttgctttgtcttctccctgatcgaggttgaccatcaactgcctgaggtgtggattgagcaataagcttcttaatgttgcagattccccttaattctttaaattctgcaaagaaactctgtcttcttcctcatcactattgagaaaatcagctatagagtcatcatcatctttgttttccacaggctttacggttttggtaggaagagctgatcttatttttttctcaacaggacgagtttcagggttgcactgttctgaaaaagacacaaa

SEQ ID NO: 280451 - DNA, 3254 bp, Homo sapiens
ctcataacgtctctccagttcaatggaaaccaagtcactccacaaacaaaggtgctctgtaagaagtggaggctaagcgttgtctaagcgttgtctttaattcctttctcagaccctgacagctgtttaggccaactttttttccctttatgacaactcaaaccattacctgctgggctctagggctggaatgaatttaaggagaaggtaaaaaccaaaaggagttcatcagatgaaaagatgtattaaccaacatgttcatagtggtcttattttgaaaaggaaaagtgttggaaagaacccaaatatctaacagtggtgacatcatggccaaatgatggactggaccatccctatgatgcagctaagtgtttttgaagaatattataaatttaatggagaaccacttccaaaatgatattcatacctagatgtcaaactacatattaagggcgatgccctccttttaaggtgtgtttgtgtgtgtgtaggcattaaaaaattgtataaggaagctgggcacagtagttcgctcctgtaatcccagcattttgggaggctgaggtgggaggatcacttgagcccaggaatttcataccagccgggcaacatggcaaaaccctttctctactaaaaatacaaaaattagccaagtgtggtagtatgcacctataatcctagctactcaggaggctgaggcaggagaatcacctcaacccaggaggcagaggttgcagtgagctgagattgcaccattacactccagcctgggtgacagagcaagactctgtctcaaaaaaaaaaaaaacaacaaaacataattaaccgtgcctggtggcacatgcctgtagtcccagttactccagaggctgaggcaagaggattgcttgagcctgggagattgaagctacagccttacggaggctacaataagctgttcgtgccactgcactccagcctgggcaagaccctgtctcaaaaaaaaaaaaaaaaaaaaaaaaaaaaacaaaaagaaaaagaatatgctgaaattgcagagaagggaataaaaattaccaccatctattaattgtatcagtgtttgggtatatggtgatgtgagatcagggatgcataaagcgaacaaattcaactgaggattaaaaacaaaacaaaaaaaaaagtttttaaaggcacagacaatccagacccctcccattccctgggtgctgacctggacccagcctgagacgggaagtgattgctgggccctcagccagtccttctccccagtgccccttcactgtgttgtgtaggtgtattcaagtgtgtgggcagtgtaaggaatgtttaaaagccaattttgccttatgtattgattttagaaccttatttgtagcaatttattgaaaaaaaaaaaacgtatttgaaactttgacagcaactgtggtgctgctgcagcgaggtcactgacagctctaatggcccctttattatctctttcctgtttctgggcaaacctcttagccattcgttcctggttaactcggaaacacatccagaggctgcatgcagctgccacagtcatcaagcgtgcatggcagaagtggagaatcagaatggcctgccttgctgctaaagagctggatggtgtggaagaaaaacacttctctcaagctccctgttccctgagcacctcgccgctgcagaccaggctcctggaggcaataatccgcctctggcccctgggactggtcctggccaatacggctatgggtgtaggcagctttcagaggaaattagtggtctgggcttgcctccagctccccaggggcagccccagtagctacactgtccagacagcacaagaccaggctggtgtcacgtccatccgagcgctgcctcagggatcgataaagtttcactgcagaaagtctccactgcggtatgctgacatctgccctgaaccttcaccctacagcattacaggctttaatcagattctgctggaaagacacaggctgatccacgtgacctcttctgccttcactgggctggggtgatccttggtgcctttgtttccacaaggccttttcctgccccctgccttgccaaagacatttaatcagcacacagctgccagactattcccacagtgctccaaatgcacatgaacaacagtgacggctccagccttcgacccagagccccgtgcccagtgcgtcagtgggcctggggttccaggctacatcaagcactgatggtgtcagggctggtagttaccaaatcagggttaagaaacatcagggccacatttcactaccttcacagatcaaactcagcagcagtcatgactgtctgtcactacactggggatcccaattccacataagcacttttggaagaaaacagccaaagttggcctaaaattggcgctggaatttgggctgggaaaaatcttgtggttatttcctttaaaaaggaacaaaactttagtatttaattagttgatttatttaatgtaatttcaaacaattaaattatgaataatgcaatgtacagtagaatcacgttttgattttattaacactgaccaagtttaactccatatgaagtgtaagcttgatatcgtttatgatgtctatcaactgtaccaaaagtaaaacatttaaaaacaatcatctgaatgtcaagttttctctccataaaggacttgccaccttaaggaccccaagtctgcctgaaacatgagccacatcaatgccggtaaaggcctgcatgacctaatctgcatcctggaaacctcttttgcctgagctccccagccccaaactagctggtctgggagagggagcaggcaggttccaggagtcaagcacacgcttgagcaagcagcacaataatccatcttaagactcctcattctgggatggctccacaattcctaaacagcagtctgcaaactccacaaacaaaggctcttgcatgtaagctctcatgagctttgctttgtcttctccctgatcgaggttgaccatcaactgcctgaggtgtggattgagcaataagcttcttaatgttgcagattccccttaattctttaaattctgcaaagaaactctgtcttcttcctcatcactattgagaaaatcagctatagagtcatcatcatctttgttttccacaggctttacggttttggtaggaagagctgatcttatttttttctcaacaggacgagtttcagggttgcactgttctgaaaaagacacaaa

SEQ ID NO: 280452 - DNA, 2581 bp, Homo sapiens
gattttttaaatttattttttaatttattctttttatttgcagtagaagattcccaaactaagggctgggattggatctcccttttcccatacatggtggggagttgaggggtcggggctgagggagtggcctatagctgccctatttggccctcaggatgtgtgtttgggccttggaaacaaatgctggctgagcagcctgggattccaagcttggaaggagtcacccttccaggtgtcaagcaccctctgccagcctgcccaaagggactcatggcagtagaggctgtgggacaccccaggacacacaggcgcaagtgggtattccaaggctccacggaacagctagcaccctgagggacaacagagaggctgtttgtggcttcctccaaaagaagaacaaggagaaaatggctagagccaagaacagcaggaaagagacctgtagagtgctagggaggccaaagccagtttcttcaggccacagaggcatgtagagatgaccatgcactgatggggccatctccctcccccagaatggtgtccacacagcgaggaagccacgcttgaacctctcatccaggacattctccacactctgccggtcctaactcaggcagcagccataactggtgactcggctgaggccatgccagcccccatgcactgtggcaggaccaaggtgttcatgactgactctatgctggagcttctggaatgtgggcgtgcccgggtgctggagcagtgtgcccgctgcatccagggtggctggaggcgacaccggcaccgagagcaggagcggcagtggcgggccgtcatgctcatccaggcagccattcgttcctggttaactcggaaacacatccagaggctgcatgcagctgccacagtcatcaagcgtgcatggcagaagtggagaatcagaatggcctgccttgctgctaaagagctggatggtgtggaagaaaaacacttctctcaagctccctgttccctgagcacctcgccgctgcagaccaggctcctggaggcaataatccgcctctggcccctgggactggtcctggccaatacggctatgggtgtaggcagctttcagaggaaattagtggtctgggcttgcctccagctccccaggggcagccccagtagctacactgtccagacagcacaagaccaggctggtgtcacgtccatccgagcgctgcctcagggatcgataaagtttcactgcagaaagtctccactgcggtatgctgacatctgccctgaaccttcaccctacagcattacaggctttaatcagattctgctggaaagacacaggctgatccacgtgacctcttctgccttcactgggctggggtgatccttggtgcctttgtttccacaaggccttttcctgccccctgccttgccaaagacatttaatcagcacacagctgccagactattcccacagtgctccaaatgcacatgaacaacagtgacggctccagccttcgacccagagccccgtgcccagtgcgtcagtgggcctggggttccaggctacatcaagcactgatggtgtcagggctggtagttaccaaatcagggttaagaaacatcagggccacatttcactaccttcacagatcaaactcagcagcagtcatgactgtctgtcactacactggggatcccaattccacataagcacttttggaagaaaacagccaaagttggcctaaaattggcgctggaatttgggctgggaaaaatcttgtggttatttcctttaaaaaggaacaaaactttagtatttaattagttgatttatttaatgtaatttcaaacaattaaattatgaataatgcaatgtacagtagaatcacgttttgattttattaacactgaccaagtttaactccatatgaagtgtaagcttgatatcgtttatgatgtctatcaactgtaccaaaagtaaaacatttaaaaacaatcatctgaatgtcaagttttctctccataaaggacttgccaccttaaggaccccaagtctgcctgaaacatgagccacatcaatgccggtaaaggcctgcatgacctaatctgcatcctggaaacctcttttgcctgagctccccagccccaaactagctggtctgggagagggagcaggcaggttccaggagtcaagcacacgcttgagcaagcagcacaataatccatcttaagactcctcattctgggatggctccacaattcctaaacagcagtctgcaaactccacaaacaaaggctcttgcatgtaagctctcatgagctttgctttgtcttctccctgatcgaggttgaccatcaactgcctgaggtgtggattgagcaataagcttcttaatgttgcagattccccttaattctttaaattctgcaaagaaactctgtcttcttcctcatcactattgagaaaatcagctatagagtcatcatcatctttgttttccacaggctttacggttttggtaggaagagctgatcttatttttttctcaacaggacgagtttcagggttgcactgttctgaaaaagacacaaa

SEQ ID NO: 280453 - DNA, 3810 bp, Homo sapiens
tgcggttcggcgctcccaggttcctttcctcactgcacgctcttgcccctcctcttttctctcctgcccgtgttgcttcccgccgcctgacctggcccgcccgcctttccagtctggccgggcgggggcctgaagcacggcggctcgggccgtgggaccgtgttcacaccctttccagaaattcttggctggtaaccgcgaaaccgactggagcaggagctgggagaactggagaaaactgctctaatctcacttgactccagctaggagctgatgctgcatcgtaataacatttgcagagcgctttcacaggcgctggagtgacttgtctgagattcctccagaactgagccctttgttggaaccataccccagcccatggtcccatgactaggtggatagtactccttgtacctcctgcaacccagaaccctggctgaccactttgaaggaggatgctccagcaggtcaatggccacaatccggggtctgatggccaagccagggagtacctcagagaagacctgcaggagttcctgggtggggaggtcctgctgtacaaactggatgacctcaccagggtgaatcctgtgacactagagacagtcctgaggtgcctgcaggcccggtacatggcagacacattctacaccaatgctggctgcaccctggtagccttgaaccccttcaagcctgttcctcagctctactcgcccgagctaatgagagagtaccatgctgcgcctcagccccagaaactgaagccccatgtgttcactgtgggtgaacagacctacaggaatgtcaagagcctgattgaaccagtcaaccagtctattgttgtcagtggagagagtggtgctggaaagacatggacgtctcgctgcctaatgaagttctatgctgtggtggccacctcacctgcatcttgggagagccacaagattgcagagaggatagaacagaggatcctgaactccaaccctgtcatggaagcttttgggaatgcgtgtacactgaggaataacaacagcagtcgctttgggaagttcatccagctccagctgaacagggctcagcaaatgactggagccgcagtccagacctacctcctagagaaaactcgagtggcctgccaggcttccagtgagaggaacttccacatcttctatcagatttgcaaaggagccagtgaggacgagaggctccagtggcaccttcctgagggagctgccttctcctggctgcccaacccagagaggagcttagaagaggattgttttgaggtgaccagagaggccatgctccatttgggcattgacacccctacccagaacaacatctttaaggtcctagctggactgctgcaccttggcaatatccagtttgctgcctccgaggatgaagcccagccctgccagccgatggatgatgccaagtactctgtcaggacggcagcctcgctgctggggctcccagaggacgtgctgctggagatggtgcagattagaaccatcagggcaggcagacagcagcaggtgttccggaagccctgcgcccgagccgagtgtgacacccgtagagactgcctggccaaactgatctatgcgcggttgtttgactggctggtatcagtgatcaacagcagcatctgtgcagacaccgactcgtggaccactttcataggcctgctggatgtgtatggatttgaatcatttcctgacaacagtctggaacagttgtgcatcaactacgccaatgagaagctgcagcagcattttgtggctcactacctaagggcccagcaggaggaatacgcagttgagggcctggagtggtcattcatcaactaccaggacaaccagccctgtttggatctcattgagggaagccccatcagcatctgctccctcataaatgaggaatgccgcctcaatcgacccagcagcgcagcccagctccagacacgcattgagactgccctggcaggcagcccctgcctgggccacaataagctcagccgggagcccagcttcattgtggtgcattatgcggggcctgtgcggtaccacacagcaggcctggtggagaagaacaaggaccctatcccacctgagctgaccaggctcctgcagcaatcccaggaccccctgctcatggggctgtttcctactaaccccaaagagaagacccaggaggaaccccctggccagagcagggcccctgtgttgaccgtggtgtccaagttcaaggcctcactggagcagcttctgcaggtcctacacagcaccacgccccactacattcgctgcatcaagcccaacagccagggccaggcgcagacctttctccaagaggaggtcctgagccagctggaggcctgtggcctcgtggagaccatccatatcagtgctgctggcttccccatccgggtctctcaccgaaactttgtagaacgatacaagttactaagaaggcttcatccttgcacatcctctggccccgacagcccatatcctgccaaagggctccctgaatggtgtccacacagcgaggaagccacgcttgaacctctcatccaggacattctccacactctgccggtcctaactcaggcagcagccataactggtgactcggctgaggccatgccagcccccatgcactgtggcaggaccaaggtgttcatgactgactctatgctggagcttctggaatgtgggcgtgcccgggtgctggagcagtgtgcccgctgcatccagggtggctggaggcgacaccggcaccgagagcaggagcggcagtggcgggccgtcatgctcatccaggcagccattcgttcctggttaactcggaaacacatccagaggctgcatgcagctgccacagtcatcaagcgtgcatggcagaagtggagaatcagaatggcctgccttgctgctaaagagctggatggtgtggaagaaaaacacttctctcaagctccctgttccctgagcacctcgccgctgcagaccaggctcctggaggcaataatccgcctctggcccctgggactggtcctggccaatacggctatgggtgtaggcagctttcagaggaaattagtggtctgggcttgcctccagctccccaggggcagccccagtagctacactgtccagacagcacaagaccaggctggtgtcacgtccatccgagcgctgcctcagggatcgataaagtttcactgcagaaagtctccactgcggtatgctgacatctgccctgaaccttcaccctacagcattacaggctttaatcagattctgctggaaagacacaggctgatccacgtgacctcttctgccttcactgggctggggtgatccttggtgcctttgtttccacaaggccttttcctgccccctgccttgccaaagacatttaatcagcacacagctgccagactattcccacagtgctccaaatgcacatgaacaacagtgacggctccagccttcgacccagagccccgtgcccagtgcgtcagtgggcctggggttccaggctacatcaagcactgatggtgtcagggctggtagttaccaaatcagggttaagaaacatcagggccacatttcactaccttcacagatcaaactcagcagcaggaagaaaacagccaaagttggcctaaaattggcgctggaatttgggctgggaaaaatcttgtggttatttcctttaaaaaggaacaaaactttagtatttaattagttgatttatttaatgtaatttcaaacaattaaattatgaataatgcaatgt

SEQ ID NO: 280454 - DNA, 3955 bp, Homo sapiens
tgcggttcggcgctcccaggttcctttcctcactgcacgctcttgcccctcctcttttctctcctgcccgtgttgcttcccgccgcctgacctggcccgcccgcctttccagtctggccgggcgggggcctgaagcacggcggctcgggccgtgggaccgtgttcacaccctttccagaaattcttggctggtaaccgcgaaaccgactggagcaggagctgggagaactggagaaaactgctctaatctcacttgactccagctaggagctgatgctgcatcgtaataacatttgcagagcgctttcacaggcgctggagtgacttgtctgagattcctccagaactgagccctttgttggaaccataccccagcccatggtcccatgactaggtggatagtactccttgtacctcctgcaacccagaaccctggctgaccactttgaaggaggatgctccagcaggtcaatggccacaatccggggtctgatggccaagccagggagtacctcagagaagacctgcaggagttcctgggtggggaggtcctgctgtacaaactggatgacctcaccagggtgaatcctgtgacactagagacagtcctgaggtgcctgcaggcccggtacatggcagacacattctacaccaatgctggctgcaccctggtagccttgaaccccttcaagcctgttcctcagctctactcgcccgagctaatgagagagtaccatgctgcgcctcagccccagaaactgaagccccatgtgttcactgtgggtgaacagacctacaggaatgtcaagagcctgattgaaccagtcaaccagtctattgttgtcagtggagagagtggtgctggaaagacatggacgtctcgctgcctaatgaagttctatgctgtggtggccacctcacctgcatcttgggagagccacaagattgcagagaggatagaacagaggatcctgaactccaaccctgtcatggaagcttttgggaatgcgtgtacactgaggaataacaacagcagtcgctttgggaagttcatccagctccagctgaacagggctcagcaaatgactggagccgcagtccagacctacctcctagagaaaactcgagtggcctgccaggcttccagtgagaggaacttccacatcttctatcagatttgcaaaggagccagtgaggacgagaggctccagtggcaccttcctgagggagctgccttctcctggctgcccaacccagagaggagcttagaagaggattgttttgaggtgaccagagaggccatgctccatttgggcattgacacccctacccagaacaacatctttaaggtcctagctggactgctgcaccttggcaatatccagtttgctgcctccgaggatgaagcccagccctgccagccgatggatgatgccaagtactctgtcaggacggcagcctcgctgctggggctcccagaggacgtgctgctggagatggtgcagattagaaccatcagggcaggcagacagcagcaggtgttccggaagccctgcgcccgagccgagtgtgacacccgtagagactgcctggccaaactgatctatgcgcggttgtttgactggctggtatcagtgatcaacagcagcatctgtgcagacaccgactcgtggaccactttcataggcctgctggatgtgtatggatttgaatcatttcctgacaacagtctggaacagttgtgcatcaactacgccaatgagaagctgcagcagcattttgtggctcactacctaagggcccagcaggaggaatacgcagttgagggcctggagtggtcattcatcaactaccaggacaaccagccctgtttggatctcattgagggaagccccatcagcatctgctccctcataaatgaggaatgccgcctcaatcgacccagcagcgcagcccagctccagacacgcattgagactgccctggcaggcagcccctgcctgggccacaataagctcagccgggagcccagcttcattgtggtgcattatgcggggcctgtgcggtaccacacagcaggcctggtggagaagaacaaggaccctatcccacctgagctgaccaggctcctgcagcaatcccaggaccccctgctcatggggctgtttcctactaaccccaaagagaagacccaggaggaaccccctggccagagcagggcccctgtgttgaccgtggtgtccaagttcaaggcctcactggagcagcttctgcaggtcctacacagcaccacgccccactacattcgctgcatcaagcccaacagccagggccaggcgcagacctttctccaagaggaggtcctgagccagctggaggcctgtggcctcgtggagaccatccatatcagtgctgctggcttccccatccgggtctctcaccgaaactttgtagaacgatacaagttactaagaaggcttcatccttgcacatcctctggccccgacagcccatatcctgccaaagggctccctgaatggtgtccacacagcgaggaagccacgcttgaacctctcatccaggacattctccacactctgccggtcctaactcaggcagcagccataactggtgactcggctgaggccatgccagcccccatgcactgtggcaggaccaaggtgttcatgactgactctatgctggagcttctggaatgtgggcgtgcccgggtgctggagcagtgtgcccgctgcatccagggtggctggaggcgacaccggcaccgagagcaggagcggcagtggcgggccgtcatgctcatccaggcagccattcgttcctggttaactcggaaacacatccagaggctgcatgcagctgccacagtcatcaagcgtgcatggcagaagtggagaatcagaatggcctgccttgctgctaaagagctggatggtgtggaagaaaaacacttctctcaagctccctgttccctgagcacctcgccgctgcagaccaggctcctggaggcaataatccgcctctggcccctgggactggtcctggccaatacggctatgggtgtaggcagctttcagaggaaattagtggtctgggcttgcctccagctccccaggggcagccccagtagctacactgtccagacagcacaagaccaggctggtgtcacgtccatccgagcgctgcctcaggtacgttgtgtgtgatggccatgacagctttgttcctgagaacagcaggagcaaagcctacaagttcacagcgggaatgagactgaggctgggacaagatccatccctaaccctactgggtaaaccagagggctgcatgtccccatcaggctgcaggtttggattatttattttgttataactgggaatcttccagagccctttatctttttaaaaactgcttctaattatttcagcatctctaaatcttctagtcccatttccaaatgcaatgctgcgtttctagcaagctcccagctgattctgatgctccatgaaccacactgtgagaaccaaggctttagatgagtcaggagcaggaggtgatgaaagtttagcttagggcctggagcggtggctcacgcctataatcccagtactttgggaagtcgaggcgggtgtatcacctgaggtcaggagttcaagaccagcctggccaacatggcgaaaccccatctctactaaaaatacaaaaattggttgggcgtagtggcaggcgcctgtagtcccagctgctcgggaggctgaggcatgagaattgcttgaatctgggagggagaggttgcagtgagccgagattgcgccgctgcactccagcctgggtgacaggacgagagtccattagggcacgcggcaggctggacagcggtatttgggcttctccaagcagatcacgcagacgacggtgctacatttgagcgacg

SEQ ID NO: 280455 - DNA, 3364 bp, Homo sapiens
tgcggttcggcgctcccaggttcctttcctcactgcacgctcttgcccctcctcttttctctcctgcccgtgttgcttcccgccgcctgacctggcccgcccgcctttccagtctggccgggcgggggcctgaagcacggcggctcgggccgtgggaccgtgttcacaccctttccagaaattcttggctggtaaccgcgaaaccgactggagcaggagctgggagaactggagaaaactgctctaatctcacttgactccagctaggagctgatgctgcatcgtaataacatttgcagagcgctttcacaggcgctggagtgacttgtctgagattcctccagaactgagccctttgttggaaccataccccagcccatggtcccatgactaggtggatagtactccttgtacctcctgcaacccagaaccctggctgaccactttgaaggaggatgctccagcaggtcaatggccacaatccggggtctgatggccaagccagggagtacctcagagaagacctgcaggagttcctgggtggggaggtcctgctgtacaaactggatgacctcaccagggtgaatcctgtgacactagagacagtcctgaggtgcctgcaggcccggtacatggcagacacattctacaccaatgctggctgcaccctggtagccttgaaccccttcaagcctgttcctcagctctactcgcccgagctaatgagagagtaccatgctgcgcctcagccccagaaactgaagccccatgtgttcactgtgggtgaacagacctacaggaatgtcaagagcctgattgaaccagtcaaccagtctattgttgtcagtggagagagtggtgctggaaagacatggacgtctcgctgcctaatgaagttctatgctgtggtggccacctcacctgcatcttgggagagccacaagattgcagagaggatagaacagaggatcctgaactccaaccctgtcatggaagcttttgggaatgcgtgtacactgaggaataacaacagcagtcgctttgggaagttcatccagctccagctgaacagggctcagcaaatgactggagccgcagtccagacctacctcctagagaaaactcgagtggcctgccaggcttccagtgagaggaacttccacatcttctatcagatttgcaaaggagccagtgaggacgagaggctccagtggcaccttcctgagggagctgccttctcctggctgcccaacccagagaggagcttagaagaggattgttttgaggtgaccagagaggccatgctccatttgggcattgacacccctacccagaacaacatctttaaggtcctagctggactgctgcaccttggcaatatccagtttgctgcctccgaggatgaagcccagccctgccagccgatggatgatgccaagtactctgtcaggacggcagcctcgctgctggggctcccagaggacgtgctgctggagatggtgcagattagaaccatcagggcaggcagacagcagcaggtgttccggaagccctgcgcccgagccgagtgtgacacccgtagagactgcctggccaaactgatctatgcgcggttgtttgactggctggtatcagtgatcaacagcagcatctgtgcagacaccgactcgtggaccactttcataggcctgctggatgtgtatggatttgaatcatttcctgacaacagtctggaacagttgtgcatcaactacgccaatgagaagctgcagcagcattttgtggctcactacctaagggcccagcaggaggaatacgcagttgagggcctggagtggtcattcatcaactaccaggacaaccagccctgtttggatctcattgagggaagccccatcagcatctgctccctcataaatgaggaatgccgcctcaatcgacccagcagcgcagcccagctccagacacgcattgagactgccctggcaggcagcccctgcctgggccacaataagctcagccgggagcccagcttcattgtggtgcattatgcggggcctgtgcggtaccacacagcaggcctggtggagaagaacaaggaccctatcccacctgagctgaccaggctcctgcagcaatcccaggaccccctgctcatggggctgtttcctactaaccccaaagagaagacccaggaggaaccccctggccagagcagggcccctgtgttgaccgtggtgtccaagttcaaggcctcactggagcagcttctgcaggtcctacacagcaccacgccccactacattcgctgcatcaagcccaacagccagggccaggcgcagacctttctccaagaggaggtcctgagccagctggaggcctgtggcctcgtggagaccatccatatcagtgctgctggcttccccatccgggtctctcaccgaaactttgtagaacgatacaagttactaagaaggcttcatccttgcacatcctctggccccgacagcccatatcctgccaaagggctccctgaatggtgtccacacagcgaggaagccacgcttgaacctctcatccaggacattctccacactctgccggtcctaactcaggcagcagccataactggtgactcggctgaggccatgccagcccccatgcactgtggcaggaccaaggtgttcatgactgactctatgctggagcttctggaatgtgggcgtgcccgggtgctggagcagtgtgcccgctgcatccagggtggctggaggcgacaccggcaccgagagcaggagcggcagtggcgggccgtcatgctcatccaggcagccattcgttcctggttaactcggaaacacatccagaggctgcatgcagctgccacagtcatcaagcgtgcatggcagaagtggagaatcagaatggcctgccttgctgctaaagagctggatggtgtggaagaaaaacacttctctcaagctccctgttccctgagcacctcgccgctgcagaccaggctcctggaggcaataatccgcctctggcccctgggactggtcctggccaatacggctatgggtgtaggcagctttcagaggaaattagtggtctgggcttgcctccagctccccaggggcagccccagtagctacactgtccagacagcacaagaccaggctggtgtgggtggcgctgagaagagcacggtgatgaggctgggggaaggaggtccttcaaggacagggacgcgaggatacaccccaccgccgccctatgggaaagcagaccagatctggctcctctctcacaaggggagaggagaagatatggggatcgcccgaacaactcctagagaaaatgt

SEQ ID NO: 280456 - DNA, 1956 bp, Homo sapiens
tgcggttcggcgctcccaggttcctttcctcactgcacgctcttgcccctcctcttttctctcctgcccgtgttgcttcccgccgcctgacctggcccgcccgcctttccagtctggccgggcgggggcctgaagcacggcggctcgggccgtgggaccgtgttcacaccctttccagaaattcttggctggtaaccgcgaaaccgactggagcaggagctgggagaactggagaaaactgctctaatctcacttgactccagctaggagctgatgctgcatcgtaataacatttgcagagcgctttcacaggcgctggagtgacttgtctgagattcctccagaactgagccctttgttggaaccataccccagcccatggtcccatgactaggtggatagtactccttgtacctcctgcaacccagaaccctggctgaccactttgaaggaggatgctccagcaggtcaatggccacaatccggggtctgatggccaagccagggagtacctcagagaagacctgcaggagttcctgggtggggaggtcctgctgtacaaactggatgacctcaccagggtgaatcctgtgacactagagacagtcctgaggtgcctgcaggcccggtacatggcagacacattctacaccaatgctggctgcaccctggtagccttgaaccccttcaagcctgttcctcagctctactcgcccgagctaatgagagagtaccatgctgcgcctcagccccagaaactgaagccccatgtgttcactgtgggtgaacagacctacaggaatgtcaagagcctgattgaaccagtcaaccagtctattgttgtcagtggagagagtggtgctggaaagacatggacgtctcgctgcctaatgaagttctatgctgtggtggccacctcacctgcatcttgggagagccacaagattgcagagaggatagaacagaggatcctgaactccaaccctgtcatggaagcttttgggaatgcgtgtacactgaggaataacaacagcagtcgctttgggaagttcatccagctccagctgaacagggctcagcaaatgactggagccgcagtccagacctacctcctagagaaaactcgagtggcctgccaggcttccagtgagaggaacttccacatcttctatcagatttgcaaaggagccagtgaggacgagaggctccagtggcaccttcctgagggagctgccttctcctggctgcccaacccagagaggagcttagaagaggattgttttgaggtgaccagagaggccatgctccatttgggcattgacacccctacccagaacaacatctttaaggtcctagctggactgctgcaccttggcaatatccagtttgctgcctccgaggatgaagcccagccctgccagccgatggatgatgccaagtgtgagggtcagggtgtaggatggggcaggccctgtcaggaaggtagccagcattgctggggttgggtggaaggctggatggtgaaaattggaatctgatgcccttgcttatgccacccaccatagggcctggccctggatcatttactcctcaccctgtctggtgaggcagacagtatcgtccccatcttaaagatgagaaaatgagtcagaggtttgtaaagtgatttgtcccatacatggcagcatggactggtacatgaaagtgctgggtttgagttctgactgctgtttatggagtcctttgggtgagtcacttcactgatcagaacttaggtttcttctgtccagttgggcaagtcatggtcccgctgtgatgacttcacagtgcctcgtgaagaggactggatggagagtgatttgcctaaagaggatttgcccctcccagactctgtcaggacggcagcctcgctgtacggacacgcctcgtgcggggatcctctatcacgcgggacac

SEQ ID NO: 280457 - DNA, 1252 bp, Homo sapiens
  misc_feature (3)..(3): n is a, c, g, or t
  misc_feature (67)..(67): n is a, c, g, or t
  misc_feature (69)..(69): n is a, c, g, or t
  misc_feature (91)..(91): n is a, c, g, or t
  misc_feature (93)..(93): n is a, c, g, or t
  misc_feature (104)..(104): n is a, c, g, or t
  misc_feature (138)..(138): n is a, c, g, or t
ganctttcccctcaccaaacctgtacatttgagagatctcagagtaatgccacatctggtttatgcnanccagattcttagagagcccgcngnttctggtgggngcctgctgacaaactgatgcctcaccaggtaatnctttacacaaagacagtcctgaggtgcctgcaggcccggtacatggcagacacattctacaccaatgctggctgcaccctggtagccttgaaccccttcaagcctgttcctcagctctactcgcccgagctaatgagagagtaccatgctgcgcctcagccccagaaactgaagccccatgtgttcactgtgggtgaacagacctacaggaatgtcaagagcctgattgaaccagtcaaccagtctattgttgtcagtggagagagtggtgctggaaagacatggacgtctcgctgcctaatgaagttctatgctgtggtggccacctcacctgcatcttgggagagccacaagattgcagagaggatagaacagaggatcctgaactccaaccctgtcatggaagcttttgggaatgcgtgtacactgaggaataacaacagcagtcgctttgggaagttcatccagctccagctgaacagggctcagcaaatgactggagccgcagtccagacctacctcctagagaaaactcgagtggcctgccaggcttccagtgagaggaacttccacatcttctatcagatttgcaaaggagccagtgaggacgagaggctccagtggcaccttcctgagggagctgccttctcctggctgcccaacccagagaggagcttagaagaggattgttttgaggtgaccagagaggccatgctccatttgggcattgacacccctacccagaacaacatctttaaggtcagaagaaaagccacgccacttaagtttggcagagatgacgggcagccctttgcatagagcttttccctggacttggagttggtctttccctgaggatctaggactttgggcccttctgtgctacctccaaggaatcagtcacctctgttctgctgagtctggagaccaggtggtggggtggacggggcataaggaagagtgatgcatacacagtgctagagtacagaatgcagtaagtgatccatgggggcagagagcaaggtaccgcatgatcagaagagagaactagtgctaccgccttgcttgtctagtacattaaaacttacaagtcatgttcacacttctctgctca

SEQ ID NO: 280458 - DNA, 1359 bp, Homo sapiens
ctcataacgtctctccagttcaatggaaaccaagtcactccacaaacaaaggtgctctgtaagaagtggaggctaagcgttgtctaagcgttgtctttaattcctttctcagaccctgacagctgtttaggccaactttttttccctttatgacaactcaaaccattacctgctgggctctagggctggaatgaatttaaggagaaggtaaaaaccaaaaggagttcatcagatgaaaagatgtattaaccaacatgttcatagtggtcttattttgaaaaggaaaagtgttggaaagaacccaaatatctaacagtggtgacatcatggccaaatgatggactggaccatccctatgatgcagctaagtgtttttgaagaatattataaatttaatggagaaccacttccaaaatgatattcatacctagatgtcaaactacatattaagggcgatgccctccttttaaggtgtgtttgtgtgtgtgtaggcattaaaaaattgtataaggaagctgggcacagtagttcgctcctgtaatcccagcattttgggaggctgaggtgggaggatcacttgagcccaggaatttcataccagccgggcaacatggcaaaaccctttctctactaaaaatacaaaaattagccaagtgtggtagtatgcacctataatcctagctactcaggaggctgaggcaggagaatcacctcaacccaggaggcagaggttgcagtgagctgagattgcaccattacactccagcctgggtgacagagcaagactctgtctcaaaaaaaaaaaaaacaacaaaacataattaaccgtgcctggtggcacatgcctgtagtcccagttactccagaggctgaggcaagaggattgcttgagcctgggagattgaagctacagccttacggaggctacaataagctgttcgtgccactgcactccagcctgggcaagaccctgtctcaaaaaaaaaaaaaaaaaaaaaaaaaaaaacaaaaagaaaaagaatatgctgaaattgcagagaagggaataaaaattaccaccatctattaattgtatcagtgtttgggtatatggtgatgtgagatcagggatgcataaagcgaacaaattcaactgaggattaaaaacaaaacaaaaaaaaaagtttttaaaggcacagacaatccagacccctcccattccctgggtgctgacctggacccagcctgagacgggaagtgattgctgggccctcagccagtccttctccccagtgccccttcactgtgttgtgtagaacttgaacgttccatttctacaccaccagaaattaaattgatgggcttacaaaataaattgaa

SEQ ID NO: 280459 - DNA, 811 bp, Homo sapiens
ctcaagaaagtctccaccagggttaatccattgcaggcacgcttcaccctcagcctcatctctccttgctaggggtggtgccaaggcctagaaaattccaagtctgagggtcacttaaccattcttcaaagattggcttaggcccagcctcacaacaccccacctcccagatggattcatctccctgaaatcctcaccttcttgaagttgacactggaccgttcacctgattagcgctcccaaatggatcatcaacccttagtcgtagtgctaacagtgtttatcctctgagtgaatactcagattcgtactttgtgtggtgctgtcaaaccatgacctcattgaccttcacaaccactccttatgaggcagatttaactgtccccattttcaaggcgctggagtgacttgtctgagattcctccagaactgagccctttgttggaaccataccccagcccatggtcccatgactaggtggatagtactccttgtacctcctgcaacccagaaccctgcttttccctggacttggagttggtctttccctgaggatctaggactttgggcccttctgtgctacctccaaggaatcagtcacctctgttctgctgagtctggagaccaggtggtggggtggacggggcataaggaagagtgatgcatacacagtgctagagtacagaatgcagtaagtgatccatgggggcagagagcaaggtaccgcatgatcagaagagagaactagtgctaccgccttgcttgtctagtacattaaaacttacaagtcatgttcacacttctctgctca

SEQ ID NO: 280460 - DNA, 317 bp, Homo sapiens
gtgaacatgacttgtaagttttaatgtactagacaagcaaggcggtacactagttctctcttctgatcatgcggtaccttgctctctgcctccaaggaatcagtcacctctgttctgctgagtctggagaccaggtggtggggtggacggggcataaggaagagtgatgcatacacagtgctagagtacagaatgcagtaagtgatccatgggggcagagagcaaggtaccgcatgatcagaagagagaactagtgctaccgccttgcttgtctagtacattaaaacttacaagtcatgttcacacttctctgctca

SEQ ID NO: 280461 - DNA, 263 bp, Homo sapiens
cctccagatgggggctgctcagacactgccaggtaagaacttgacagaaggacagtacctggggacaagcccaggataagtggacaacactgggagtcggggcaggagtgctttgggggtgggcatgaccctctgccacagcccttctgcctggtgggcatggcagtcttctggagcaagttgtggccggaagaccagtagcacatggaggcaccctgcctgggaccatataggaatggtgggtggggtccctgtgtcaggtc

SEQ ID NO: 280462 - DNA, 219 bp, Homo sapiens
gtcttctctctcatgccacaggcgctggagtgacttgtctgagattcctccagaactgagccctttgttggaaccataccccagcccatggtcccatgactaggtggatagtactccttgtacctcctgcaacccagaaccctggctgaccactttgaaggaggatgctccagcaggtaaaacctcaaccttagataacccaggccctcaagcacctgc

SEQ ID NO: 280463 - DNA, 514 bp, Homo sapiens
actttgtagaacgatacaagttactaagaaggcttcatccttgcacatcctctggccccgacagcccatatcctgccaaagggctccctggtgagtgggacccatgagttagtcatttgtgcaaccacagtttactgagcatctaccctgtgccctgtcttagggctaggggctggggcttactggtgaataaaacacagccctggttttggttcagtgggggaaacagattcaaaaaagacaaatagcatggaaagtggaaaagcagagctatgagcaggatgctgtgggtggtgctagggaggtgtgaattggggaaggcttcctggaagaggtagtatctgagaataaattggattagccaggtgatgggtggtccacatgataaatgtaatctgaacaaaggcctagaggcttgaggcagcagtgtgggtatgaggaactccagccagttctgtgttgctggttcattgaggcagagaactggggcaggtgaggctggagtggcaggtag

SEQ ID NO: 280464 - DNA, 471 bp, Homo sapiens
tcaactgtaccaaaagtaaaacatttaaaaacaatcatctgaatgtcaagttttctctccataaaggacttgccaccttaaggaccccaagtctgcctgaaacatgagccacatcaatgccggtaaaggcctgcatgacctaatctgcatcctggaaacctcttttgcctgagctccccagccccaaactagctggtctgggagagggagcaggcaggttccaggagtcaagcacacgcttgagcaagcagcacaataatccatcttaagactcctcattctgggatggctccacaattcctaaacagcagtctgcaaactccacaaacaaaggctcttgcatgtaagctctcatgagctttgctttgtcttctccctgatcgaggttgaccatcaactgcctgaggtgtggattgagcaataagcttcttaatgttgcagattcccctaaaaattaacaagaaaaaaagc

SEQ ID NO: 280465 - DNA, 432 bp, Homo sapiens
agtacttgtccataccttcttgcatttttagcgtctgctctgtggggttgttaggccctggcactcccaggaactagtgctaaagctgcatctctctctcccctctagggatcgataaagtttcactgcagaaagtctccactgcggtatgctgacatctgccctgaaccttcaccctacagcattacaggctttaatcagattctgctggaaagacacaggctgatccacgtgacctcttctgccttcactgggctggggtgatccttggtgcctttgtttccacaaggccttttcctgccccctgccttgccaaagacatttaatcagcacacagctgccagactattcccacagtgctccaaatgcacatgaacaacagtgacggctccagccttcgacccagagccccgtgcccagtgcgtcagtggg

SEQ ID NO: 280466 - DNA, 4225 bp, Homo sapiens
cctcaagctaatttcaggtcacaatttgaggtcaaaggcttttaaagcctttgcctacaagtcactccaagatgagcagataaagtgtgatgaacacagatagagtgagcttctgaccacaggacatttgcacagcccctgttgcaaaaagagccagtttatttactgaagggaaaaaagttgcagagcaattactttaagaaaaaatgtgaggaagaaacccctgtatagtgctgtacgtgtcagcgtcttgtgtggtagtctcatcttctctgggctggggccggttctagagtggaggatgccattgttgacctcgggactgggggcccacttgtgcagaactacatcagggggtatggtggggccttgagctctgggctccaccggtagagttttgcaggggtgttcaatgaactcagttatttacaaaccacacccaggcccatctgccccttcccaagacactagctgggtctcgagccatgtgactgagctcgactgattccctccccagcctaggagctgagcttgtcctgtgctcagtcttcccataaggacatgccaggtttgtgtgtacctggcaacatgcatgcccatagcctgcatctgtagtaggtcaagacgtgataggccggaagcaagaggagaggatttggtctttgacctgtcaggctcagaatacaagggccccccagggtgtagcaccctgatggggggagcaattttaccacccctttgactcagccagaccctcttaccagagtccactctcttcccccaacaggttgtttgactggctggtatcagtgatcaacagcagcatctgtgcagacaccgactcgtggaccactttcataggtagcaaggcctcactgtgctgggagcactccagaaaaagagcaataaagccctggatggagaggcaggagccctgggtccactgtgtgactctgggcagttcctttcccttttttgtctcctcttgcatctgcctgccagcatagagcgagatctctgcatagggtgagatctctgctctcctgcacccacatctgagcagtccataactctccagacaggctcaacagtgccttgtctgaaagagccctttacctccccagagacccagctctaattgtgggagagtagtgggggttggggaaaatagctgtattagaagggactttggaggctggcaccgtggctcacacctgtaatcccaacattttgggaggccaaagtgggaggatcactggaggccaggagttggagaccagcctgggcaatatagcaagaccccatttcaaagaaattagccaggcatggtgctacatgcctgtagtcccagctactcaggagaccgaggtgggaggatcactttagcccaagagtttgaagcttctgtgagctgtgatcacaccactgcactccagcctggtcaacagagcaagaccctatctcaggggggagaacaaaaaaagacttgggggacatgactgagggaggtcaacacggttgtaactaggtgggacagtcagttataggaggaaataaagcttaaaggtacaagtgcagtttgctcatggaatggtggaattctaggcaccaaattggctagtgagactaatgccctccgaactagatttaacacagaaaatgttccctgggacctggtttcctcataggaggtgcctatcagaaccagagaattcagactcaaaaatgggcctgatgctctgggctgtcttcacacttcatttgggtttcctgcttgctctgagctctacaggggaatggggtagagatgggagccaccttgggtggagggtggggaaggtatgttctgcccaccacaggtgtcatgctcactcagcctgatgcccaggctgccaagtataaggcattggcaggggcccagccaccctgggttccttggtcccctattccccatctgctccctgcagtggccccatgggttctctgccatcttcccaggcctgctggatgtgtatggatttgaatcatttcctgacaacagtctggaacagttgtgcatcaactacgccaatgagaagctgcagcagcattttgtggctcactacctaagggcccagcaggaggaatacgcagttgagggcctggagtggtcattcatcaactaccaggacaaccagccctgtttggatctcattgagggaagccccatcagcatctgctccctcataaatgaggaatgccgcctcaatcgacccagcagcgcagcccagctccagacacgcattgagactgccctggcaggcagcccctgcctgggccacaataagctcagccgggagcccagcttcattgtggtgcattatgcggggcctgtgcggtaccacacagcaggcctggtggagaagaacaaggaccctatcccacctgagctgaccaggctcctgcagcaatcccaggaccccctgctcatggggctgtttcctactaaccccaaagagaagacccaggaggaaccccctggccagagcagggcccctgtgttgaccgtggtgtccaagttcaaggcctcactggagcagcttctgcaggtcctacacagcaccacgccccactacattcgctgcatcaagcccaacagccagggccaggcgcagacctttctccaagaggaggtcctgagccagctggaggcctgtggcctcgtggagaccatccatatcagtgctgctggcttccccatccgggtctctcaccgaaactttgtagaacgatacaagttactaagaaggcttcatccttgcacatcctctggccccgacagcccatatcctgccaaagggctccctgcctctgtcttcagagaggcactgggcatctaaggtggtcagagccctcagaatggtgtccacacagcgaggaagccacgcttgaacctctcatccaggacattctccacactctgccggtcctaactcaggcagcagccataactggtgactcggctgaggccatgccagcccccatgcactgtggcaggaccaaggtgttcatgactgactctatgctggagcttctggaatgtgggcgtgcccgggtgctggagcagtgtgcccgctgcatccagggtggctggaggcgacaccggcaccgagagcaggagcggcagtggcgggccgtcatgctcatccaggcagccattcgttcctggttaactcggaaacacatccagaggctgcatgcagctgccacagtcatcaagcgtgcatggcagaagtggagaatcagaatggcctgccttgctgctaaagagctggatggtgtggaagaaaaacacttctctcaagctccctgttccctgagcacctcgccgctgcagaccaggctcctggaggcaataatccgcctctggcccctgggactggtcctggccaatacggctatgggtgtaggcagctttcagaggaaattagtggtctgggcttgcctccagctccccaggggcagccccagtagctacactgtccagacagcacaagaccaggctggtgtcacgtccatccgagcgctgcctcagggatcgataaagtttcactgcagaaagtctccactgcggtatgctgacatctgccctgaaccttcaccctacagcattacaggctttaatcagattctgctggaaagacacaggctgatccacgtgacctcttctgccttcactgggctggggtgatccttggtgcctttgtttccacaaggccttttcctgccccctgccttgccaaagacatttaatcagcacacagctgccagactattcccacagtgctccaaatgcacatgaacaacagtgacggctccagccttcgacccagagccccgtgcccagtgcgtcagtgggcctggggttccaggctacatcaagcactgatggtgtcagggctggtagttaccaaatcagggttaagaaacatcagggccacatttcactaccttcacagatcaaactcagcagcagtcatgactgtctgtcactacactggggatcccaattccacataagcacttttggaagaaaacagccaaagttggcctaaaattggcgctggaatttgggctgggaaaaatcttgtggttatttcctttaaaaaggaacaaaactttagtatttaattagttgatttatttaatgtaatttcaaacaattaaattatgaataatgcaatgt

SEQ ID NO: 280467 - DNA, 4580 bp, Homo sapiens
tgcggttcggcgctcccaggttcctttcctcactgcacgctcttgcccctcctcttttctctcctgcccgtgttgcttcccgccgcctgacctggcccgcccgcctttccagtctggccgggcgggggcctgaagcacggcggctcgggccgtgggaccgtgttcacaccctttccagaaattcttggctggtaaccgcgaaaccgactggagcaggagctgggagaactggagaaaactgctctaatctcacttgactccagctaggagctgatgctgcatcgtaataacatttgcagagcgctttcacaggcgctggagtgacttgtctgagattcctccagaactgagccctttgttggaaccataccccagcccatggtcccatgactaggtggatagtactccttgtacctcctgcaacccagaaccctggctgaccactttgaaggaggatgctccagcaggtcaatggccacaatccggggtctgatggccaagccagggagtacctcagagaagacctgcaggagttcctgggtggggaggtcctgctgtacaaactggatgacctcaccagggtgaatcctgtgacactagagacagtcctgaggtgcctgcaggcccggtacatggcagacacattctacaccaatgctggctgcaccctggtagccttgaaccccttcaagcctgttcctcagctctactcgcccgagctaatgagagagtaccatgctgcgcctcagccccagaaactgaagccccatgtgttcactgtgggtgaacagacctacaggaatgtcaagagcctgattgaaccagtcaaccagtctattgttgtcagtggagagagtggtgctggaaagacatggacgtctcgctgcctaatgaagttctatgctgtggtggccacctcacctgcatcttgggagagccacaagattgcagagaggatagaacagaggatcctgaactccaaccctgtcatggaagcttttgggaatgcgtgtacactgaggaataacaacagcagtcgctttgggaagttcatccagctccagctgaacagggctcagcaaatgactggagccgcagtccagacctacctcctagagaaaactcgagtggcctgccaggcttccagtgagaggaacttccacatcttctatcagatttgcaaaggagccagtgaggacgagaggctccagtggcaccttcctgagggagctgccttctcctggctgcccaacccagagaggagcttagaagaggattgttttgaggtgaccagagaggccatgctccatttgggcattgacacccctacccagaacaacatctttaaggtcctagctggactgctgcaccttggcaatatccagtttgctgcctccgaggatgaagcccagccctgccagccgatggatgatgccaagtactctgtcaggacggcagcctcgctgctggggctcccagaggacgtgctgctggagatggtgcagattagaaccatcagggcaggcagacagcagcaggtgttccggaagccctgcgcccgagccgagtgtgacacccgtagagactgcctggccaaactgatctatgcgcggttgtttgactggctggtatcagtgatcaacagcagcatctgtgcagacaccgactcgtggaccactttcataggcctgctggatgtgtatggatttgaatcatttcctgacaacagtctggaacagttgtgcatcaactacgccaatgagaagctgcagcagcattttgtggctcactacctaagggcccagcaggaggaatacgcagttgagggcctggagtggtcattcatcaactaccaggacaaccagccctgtttggatctcattgagggaagccccatcagcatctgctccctcataaatgaggaatgccgcctcaatcgacccagcagcgcagcccagctccagacacgcattgagactgccctggcaggcagcccctgcctgggccacaataagctcagccgggagcccagcttcattgtggtgcattatgcggggcctgtgcggtaccacacagcaggcctggtggagaagaacaaggaccctatcccacctgagctgaccaggctcctgcagcaatcccaggaccccctgctcatggggctgtttcctactaaccccaaagagaagacccaggaggaaccccctggccagagcagggcccctgtgttgaccgtggtgtccaagttcaaggcctcactggagcagcttctgcaggtcctacacagcaccacgccccactacattcgctgcatcaagcccaacagccagggccaggcgcagacctttctccaagaggaggtcctgagccagctggaggcctgtggcctcgtggagaccatccatatcagtgctgctggcttccccatccgggtctctcaccgaaactttgtagaacgatacaagttactaagaaggcttcatccttgcacatcctctggccccgacagcccatatcctgccaaagggctccctgaatggtgtccacacagcgaggaagccacgcttgaacctctcatccaggacattctccacactctgccggtcctaactcaggcagcagccataactggtgactcggctgaggccatgccagcccccatgcactgtggcaggaccaaggtgttcatgactgactctatgctggagcttctggaatgtgggcgtgcccgggtgctggagcagtgtgcccgctgcatccagggtggctggaggcgacaccggcaccgagagcaggagcggcagtggcgggccgtcatgctcatccaggcagccattcgttcctggttaactcggaaacacatccagaggctgcatgcagctgccacagtcatcaagcgtgcatggcagaagtggagaatcagaatggcctgccttgctgctaaagagctggatggtgtggaagaaaaacacttctctcaagctccctgttccctgagcacctcgccgctgcagaccaggctcctggaggcaataatccgcctctggcccctgggactggtcctggccaatacggctatgggtgtaggcagctttcagaggaaattagtggtctgggcttgcctccagctccccaggggcagccccagtagctacactgtccagacagcacaagaccaggctggtgtcacgtccatccgagcgctgcctcagggatcgataaagtttcactgcagaaagtctccactgcggtatgctgacatctgccctgaaccttcaccctacagcattacaggctttaatcagattctgctggaaagacacaggctgatccacgtgacctcttctgccttcactgggctggggtgatccttggtgcctttgtttccacaaggccttttcctgccccctgccttgccaaagacatttaatcagcacacagctgccagactattcccacagtgctccaaatgcacatgaacaacagtgacggctccagccttcgacccagagccccgtgcccagtgcgtcagtgggcctggggttccaggctacatcaagcactgatggtgtcagggctggtagttaccaaatcagggttaagaaacatcagggccacatttcactaccttcacagatcaaactcagcagcagtcatgactgtctgtcactacactggggatcccaattccacataagcacttttggaagaaaacagccaaagttggcctaaaattggcgctggaatttgggctgggaaaaatcttgtggttatttcctttaaaaaggaacaaaactttagtatttaattagttgatttatttaatgtaatttcaaacaattaaattatgaataatgcaatgtacagtagaatcacgttttgattttattaacactgaccaagtttaactccatatgaagtgtaagcttgatatcgtttatgatgtctatcaactgtaccaaaagtaaaacatttaaaaacaatcatctgaatgtcaagttttctctccataaaggacttgccaccttaaggaccccaagtctgcctgaaacatgagccacatcaatgccggtaaaggcctgcatgacctaatctgcatcctggaaacctcttttgcctgagctccccagccccaaactagctggtctgggagagggagcaggcaggttccaggagtcaagcacacgcttgagcaagcagcacaataatccatcttaagactcctcattctgggatggctccacaattcctaaacagcagtctgcaaactccacaaacaaaggctcttgcatgtaagctctcatgagctttgctttgtcttctccctgatcgaggttgaccatcaactgcctgaggtgtggattgagcaataagcttcttaatgttgcagattccccttaattctttaaattctgcaaagaaactctgtcttcttcctcatcactattgagaaaatcagctatagagtcatcatcatctttgttttccacaggctttacggttttggtaggaagagctgatcttatttttttctcaacaggacgagtttcagggttgcactgttctgaaaaagacacaaa

SEQ ID NO: 280468 - DNA, 5027 bp, Homo sapiens
tgcggttcggcgctcccaggttcctttcctcactgcacgctcttgcccctcctcttttctctcctgcccgtgttgcttcccgccgcctgacctggcccgcccgcctttccagtctggccgggcgggggcctgaagcacggcggctcgggccgtgggaccgtgttcacaccctttccagaaattcttggctggtaaccgcgaaaccgactggagcaggagctgggagaactggagaaaactgctctaatctcacttgactccagctaggagctgatgctgcatcgtaataacatttgcagagcgctttcacaggcgctggagtgacttgtctgagattcctccagaactgagccctttgttggaaccataccccagcccatggtcccatgactaggtggatagtactccttgtacctcctgcaacccagaaccctggctgaccactttgaaggaggatgctccagcaggtcaatggccacaatccggggtctgatggccaagccagggagtacctcagagaagacctgcaggagttcctgggtggggaggtcctgctgtacaaactggatgacctcaccagggtgaatcctgtgacactagagacagtcctgaggtgcctgcaggcccggtacatggcagacacattctacaccaatgctggctgcaccctggtagccttgaaccccttcaagcctgttcctcagctctactcgcccgagctaatgagagagtaccatgctgcgcctcagccccagaaactgaagccccatgtgttcactgtgggtgaacagacctacaggaatgtcaagagcctgattgaaccagtcaaccagtctattgttgtcagtggagagagtggtgctggaaagacatggacgtctcgctgcctaatgaagttctatgctgtggtggccacctcacctgcatcttgggagagccacaagattgcagagaggatagaacagaggatcctgaactccaaccctgtcatggaagcttttgggaatgcgtgtacactgaggaataacaacagcagtcgctttgggaagttcatccagctccagctgaacagggctcagcaaatgactggagccgcagtccagacctacctcctagagaaaactcgagtggcctgccaggcttccagtgagaggaacttccacatcttctatcagatttgcaaaggagccagtgaggacgagaggctccagtggcaccttcctgagggagctgccttctcctggctgcccaacccagagaggagcttagaagaggattgttttgaggtgaccagagaggccatgctccatttgggcattgacacccctacccagaacaacatctttaaggtcctagctggactgctgcaccttggcaatatccagtttgctgcctccgaggatgaagcccagccctgccagccgatggatgatgccaagtgtgagggtcagggtgtaggatggggcaggccctgtcaggaaggtagccagcattgctggggttgggtggaaggctggatggtgaaaattggaatctgatgcccttgcttatgccacccaccatagggcctggccctggatcatttactcctcaccctgtctggtgaggcagacagtatcgtccccatcttaaagatgagaaaatgagtcagaggtttgtaaagtgatttgtcccatacatggcagcatggactggtacatgaaagtgctgggtttgagttctgactgctgtttatggagtcctttgggtgagtcacttcactgatcagaacttaggtttcttctgtccagttgggcaagtcatggtcccgctgtgatgacttcacagtgcctcgtgaagaggactggatggagagtgatttgcctaaagaggatttgcccctcccagactctgtcaggacggcagcctcgctgctggggctcccagaggacgtgctgctggagatggtgcagattagaaccatcagggcaggcagacagcagcaggtgttccggaagccctgcgcccgagccgagtgtgacacccgtagagactgcctggccaaactgatctatgcgcggttgtttgactggctggtatcagtgatcaacagcagcatctgtgcagacaccgactcgtggaccactttcataggcctgctggatgtgtatggatttgaatcatttcctgacaacagtctggaacagttgtgcatcaactacgccaatgagaagctgcagcagcattttgtggctcactacctaagggcccagcaggaggaatacgcagttgagggcctggagtggtcattcatcaactaccaggacaaccagccctgtttggatctcattgagggaagccccatcagcatctgctccctcataaatgaggaatgccgcctcaatcgacccagcagcgcagcccagctccagacacgcattgagactgccctggcaggcagcccctgcctgggccacaataagctcagccgggagcccagcttcattgtggtgcattatgcggggcctgtgcggtaccacacagcaggcctggtggagaagaacaaggaccctatcccacctgagctgaccaggctcctgcagcaatcccaggaccccctgctcatggggctgtttcctactaaccccaaagagaagacccaggaggaaccccctggccagagcagggcccctgtgttgaccgtggtgtccaagttcaaggcctcactggagcagcttctgcaggtcctacacagcaccacgccccactacattcgctgcatcaagcccaacagccagggccaggcgcagacctttctccaagaggaggtcctgagccagctggaggcctgtggcctcgtggagaccatccatatcagtgctgctggcttccccatccgggtctctcaccgaaactttgtagaacgatacaagttactaagaaggcttcatccttgcacatcctctggccccgacagcccatatcctgccaaagggctccctgaatggtgtccacacagcgaggaagccacgcttgaacctctcatccaggacattctccacactctgccggtcctaactcaggcagcagccataactggtgactcggctgaggccatgccagcccccatgcactgtggcaggaccaaggtgttcatgactgactctatgctggagcttctggaatgtgggcgtgcccgggtgctggagcagtgtgcccgctgcatccagggtggctggaggcgacaccggcaccgagagcaggagcggcagtggcgggccgtcatgctcatccaggcagccattcgttcctggttaactcggaaacacatccagaggctgcatgcagctgccacagtcatcaagcgtgcatggcagaagtggagaatcagaatggcctgccttgctgctaaagagctggatggtgtggaagaaaaacacttctctcaagctccctgttccctgagcacctcgccgctgcagaccaggctcctggaggcaataatccgcctctggcccctgggactggtcctggccaatacggctatgggtgtaggcagctttcagaggaaattagtggtctgggcttgcctccagctccccaggggcagccccagtagctacactgtccagacagcacaagaccaggctggtgtcacgtccatccgagcgctgcctcagggatcgataaagtttcactgcagaaagtctccactgcggtatgctgacatctgccctgaaccttcaccctacagcattacaggctttaatcagattctgctggaaagacacaggctgatccacgtgacctcttctgccttcactgggctggggtgatccttggtgcctttgtttccacaaggccttttcctgccccctgccttgccaaagacatttaatcagcacacagctgccagactattcccacagtgctccaaatgcacatgaacaacagtgacggctccagccttcgacccagagccccgtgcccagtgcgtcagtgggcctggggttccaggctacatcaagcactgatggtgtcagggctggtagttaccaaatcagggttaagaaacatcagggccacatttcactaccttcacagatcaaactcagcagcagtcatgactgtctgtcactacactggggatcccaattccacataagcacttttggaagaaaacagccaaagttggcctaaaattggcgctggaatttgggctgggaaaaatcttgtggttatttcctttaaaaaggaacaaaactttagtatttaattagttgatttatttaatgtaatttcaaacaattaaattatgaataatgcaatgtacagtagaatcacgttttgattttattaacactgaccaagtttaactccatatgaagtgtaagcttgatatcgtttatgatgtctatcaactgtaccaaaagtaaaacatttaaaaacaatcatctgaatgtcaagttttctctccataaaggacttgccaccttaaggaccccaagtctgcctgaaacatgagccacatcaatgccggtaaaggcctgcatgacctaatctgcatcctggaaacctcttttgcctgagctccccagccccaaactagctggtctgggagagggagcaggcaggttccaggagtcaagcacacgcttgagcaagcagcacaataatccatcttaagactcctcattctgggatggctccacaattcctaaacagcagtctgcaaactccacaaacaaaggctcttgcatgtaagctctcatgagctttgctttgtcttctccctgatcgaggttgaccatcaactgcctgaggtgtggattgagcaataagcttcttaatgttgcagattccccttaattctttaaattctgcaaagaaactctgtcttcttcctcatcactattgagaaaatcagctatagagtcatcatcatctttgttttccacaggctttacggttttggtaggaagagctgatcttatttttttctcaacaggacgagtttcagggttgcactgttctgaaaaagacacaaa

SEQ ID NO: 280469 - DNA, 5095 bp, Homo sapiens
tgcggttcggcgctcccaggttcctttcctcactgcacgctcttgcccctcctcttttctctcctgcccgtgttgcttcccgccgcctgacctggcccgcccgcctttccagtctggccgggcgggggcctgaagcacggcggctcgggccgtgggaccgtgttcacaccctttccagaaattcttggctggtaaccgcgaaaccgactggagcaggagctgggagaactggagaaaactgctctaatctcacttgactccagctaggagctgatgctgcatcgtaataacatttgcagagcgctttcacaggcgctggagtgacttgtctgagattcctccagaactgagccctttgttggaaccataccccagcccatggtcccatgactaggtggatagtactccttgtacctcctgcaacccagaaccctggctgaccactttgaaggaggatgctccagcaggtcaatggccacaatccggggtctgatggccaagccagggagtacctcagagaagacctgcaggagttcctgggtggggaggtcctgctgtacaaactggatgacctcaccagggtgaatcctgtgacactagagacagtcctgaggtgcctgcaggcccggtacatggcagacacattctacaccaatgctggctgcaccctggtagccttgaaccccttcaagcctgttcctcagctctactcgcccgagctaatgagagagtaccatgctgcgcctcagccccagaaactgaagccccatgtgttcactgtgggtgaacagacctacaggaatgtcaagagcctgattgaaccagtcaaccagtctattgttgtcagtggagagagtggtgctggaaagacatggacgtctcgctgcctaatgaagttctatgctgtggtggccacctcacctgcatcttgggagagccacaagattgcagagaggatagaacagaggatcctgaactccaaccctgtcatggaagcttttgggaatgcgtgtacactgaggaataacaacagcagtcgctttgggaagttcatccagctccagctgaacagggctcagcaaatgactggagccgcagtccagacctacctcctagagaaaactcgagtggcctgccaggcttccagtgagaggaacttccacatcttctatcagatttgcaaaggagccagtgaggacgagaggctccagtggcaccttcctgagggagctgccttctcctggctgcccaacccagagaggagcttagaagaggattgttttgaggtgaccagagaggccatgctccatttgggcattgacacccctacccagaacaacatctttaaggtcctagctggactgctgcaccttggcaatatccagtttgctgcctccgaggatgaagcccagccctgccagccgatggatgatgccaagtactctgtcaggacggcagcctcgctgctggggctcccagaggacgtgctgctggagatggtgcagattagaaccatcagggcaggcagacagcagcaggtgttccggaagccctgcgcccgagccgagtgtgacacccgtagagactgcctggccaaactgatctatgcgcggttgtttgactggctggtatcagtgatcaacagcagcatctgtgcagacaccgactcgtggaccactttcataggcctgctggatgtgtatggatttgaatcatttcctgacaacagtctggaacagttgtgcatcaactacgccaatgagaagctgcagcagcattttgtggctcactacctaagggcccagcaggaggaatacgcagttgagggcctggagtggtcattcatcaactaccaggacaaccagccctgtttggatctcattgagggaagccccatcagcatctgctccctcataaatgaggaatgccgcctcaatcgacccagcagcgcagcccagctccagacacgcattgagactgccctggcaggcagcccctgcctgggccacaataagctcagccgggagcccagcttcattgtggtgcattatgcggggcctgtgcggtaccacacagcaggcctggtggagaagaacaaggaccctatcccacctgagctgaccaggctcctgcagcaatcccaggaccccctgctcatggggctgtttcctactaaccccaaagagaagacccaggaggaaccccctggccagagcagggcccctgtgttgaccgtggtgtccaagttcaaggcctcactggagcagcttctgcaggtcctacacagcaccacgccccactacattcgctgcatcaagcccaacagccagggccaggcgcagacctttctccaagaggaggtcctgagccagctggaggcctgtggcctcgtggagaccatccatatcagtgctgctggcttccccatccgggtctctcaccgaaactttgtagaacgatacaagttactaagaaggcttcatccttgcacatcctctggccccgacagcccatatcctgccaaagggctccctgaatggtgtccacacagcgaggaagccacgcttgaacctctcatccaggacattctccacactctgccggtcctaactcaggcagcagccataactggtgactcggctgaggccatgccagcccccatgcactgtggcaggaccaaggtgttcatgactgactctatgctggagcttctggaatgtgggcgtgcccgggtgctggagcagtgtgcccgctgcatccagggtggctggaggcgacaccggcaccgagagcaggagcggcagtggcgggccgtcatgctcatccaggcagccattcgttcctggttaactcggaaacacatccagaggctgcatgcagctgccacagtcatcaagcgtgcatggcagaagtggagagtaagtaagacccaagaagtcggggtgggcagtggatcaattttggggaccagatggacccgagtgggaatgctggctctgccactgcaatgcaggtggccttgggcaggttgtttagcctctctgagcctcatattcctcatgtatgcagtgggcacagtaacacctaccctgcagggtggttatgtaggtgaagagtggtataagcaactctgggaatataccaaactctgggatgtacactttagaagactgggttttatggcatatcagttatatcttgatggactcttatcttgttttcaagtagcatatgtaaggcctaagcacagttgcctggggtgtatagacttgtggcatatggaaccagtttggttcagggcagccagctgtttgcaaccaggtgccttcagttcaccttgttaagatgatttgttaaagatagttttgatttccattttctgctaagagggctagataaatctaaagctataaagggatatttgctttttaagatcagaatggcctgccttgctgctaaagagctggatggtgtggaagaaaaacacttctctcaagctccctgttccctgagcacctcgccgctgcagaccaggctcctggaggcaataatccgcctctggcccctgggactggtcctggccaatacggctatgggtgtaggcagctttcagaggaaattagtggtctgggcttgcctccagctccccaggggcagccccagtagctacactgtccagacagcacaagaccaggctggtgtcacgtccatccgagcgctgcctcagggatcgataaagtttcactgcagaaagtctccactgcggtatgctgacatctgccctgaaccttcaccctacagcattacaggctttaatcagattctgctggaaagacacaggctgatccacgtgacctcttctgccttcactgggctggggtgatccttggtgcctttgtttccacaaggccttttcctgccccctgccttgccaaagacatttaatcagcacacagctgccagactattcccacagtgctccaaatgcacatgaacaacagtgacggctccagccttcgacccagagccccgtgcccagtgcgtcagtgggcctggggttccaggctacatcaagcactgatggtgtcagggctggtagttaccaaatcagggttaagaaacatcagggccacatttcactaccttcacagatcaaactcagcagcagtcatgactgtctgtcactacactggggatcccaattccacataagcacttttggaagaaaacagccaaagttggcctaaaattggcgctggaatttgggctgggaaaaatcttgtggttatttcctttaaaaaggaacaaaactttagtatttaattagttgatttatttaatgtaatttcaaacaattaaattatgaataatgcaatgtacagtagaatcacgttttgattttattaacactgaccaagtttaactccatatgaagtgtaagcttgatatcgtttatgatgtctatcaactgtaccaaaagtaaaacatttaaaaacaatcatctgaatgtcaagttttctctccataaaggacttgccaccttaaggaccccaagtctgcctgaaacatgagccacatcaatgccggtaaaggcctgcatgacctaatctgcatcctggaaacctcttttgcctgagctccccagccccaaactagctggtctgggagagggagcaggcaggttccaggagtcaagcacacgcttgagcaagcagcacaataatccatcttaagactcctcattctgggatggctccacaattcctaaacagcagtctgcaaactccacaaacaaaggctcttgcatgtaagctctcatgagctttgctttgtcttctccctgatcgaggttgaccatcaactgcctgaggtgtggattgagcaataagcttcttaatgttgcagattccccttaattctttaaattctgcaaagaaactctgtcttcttcctcatcactattgagaaaatcagctatagagtcatcatcatctttgttttccacaggctttacggttttggtaggaagagctgatcttatttttttctcaacaggacgagtttcagggttgcactgttctgaaaaagacacaaa

SEQ ID NO: 280470 - DNA, 4668 bp, Homo sapiens
tgcggttcggcgctcccaggttcctttcctcactgcacgctcttgcccctcctcttttctctcctgcccgtgttgcttcccgccgcctgacctggcccgcccgcctttccagtctggccgggcgggggcctgaagcacggcggctcgggccgtgggaccggtgagtgtcaacccgaacctatatctgaagcccttcagacgcggaaggggcttgggaggccagtttgccccgcagcggtgaggaagaatgttcacaccctttccagaaattcttggctggtaaccgcgaaaccgactggagcaggagctgggagaactggagaaaactgctctaatctcacttgactccagctaggagctgatgctgcatcgtaataacatttgcagagcgctttcacaggcgctggagtgacttgtctgagattcctccagaactgagccctttgttggaaccataccccagcccatggtcccatgactaggtggatagtactccttgtacctcctgcaacccagaaccctggctgaccactttgaaggaggatgctccagcaggtcaatggccacaatccggggtctgatggccaagccagggagtacctcagagaagacctgcaggagttcctgggtggggaggtcctgctgtacaaactggatgacctcaccagggtgaatcctgtgacactagagacagtcctgaggtgcctgcaggcccggtacatggcagacacattctacaccaatgctggctgcaccctggtagccttgaaccccttcaagcctgttcctcagctctactcgcccgagctaatgagagagtaccatgctgcgcctcagccccagaaactgaagccccatgtgttcactgtgggtgaacagacctacaggaatgtcaagagcctgattgaaccagtcaaccagtctattgttgtcagtggagagagtggtgctggaaagacatggacgtctcgctgcctaatgaagttctatgctgtggtggccacctcacctgcatcttgggagagccacaagattgcagagaggatagaacagaggatcctgaactccaaccctgtcatggaagcttttgggaatgcgtgtacactgaggaataacaacagcagtcgctttgggaagttcatccagctccagctgaacagggctcagcaaatgactggagccgcagtccagacctacctcctagagaaaactcgagtggcctgccaggcttccagtgagaggaacttccacatcttctatcagatttgcaaaggagccagtgaggacgagaggctccagtggcaccttcctgagggagctgccttctcctggctgcccaacccagagaggagcttagaagaggattgttttgaggtgaccagagaggccatgctccatttgggcattgacacccctacccagaacaacatctttaaggtcctagctggactgctgcaccttggcaatatccagtttgctgcctccgaggatgaagcccagccctgccagccgatggatgatgccaagtactctgtcaggacggcagcctcgctgctggggctcccagaggacgtgctgctggagatggtgcagattagaaccatcagggcaggcagacagcagcaggtgttccggaagccctgcgcccgagccgagtgtgacacccgtagagactgcctggccaaactgatctatgcgcggttgtttgactggctggtatcagtgatcaacagcagcatctgtgcagacaccgactcgtggaccactttcataggcctgctggatgtgtatggatttgaatcatttcctgacaacagtctggaacagttgtgcatcaactacgccaatgagaagctgcagcagcattttgtggctcactacctaagggcccagcaggaggaatacgcagttgagggcctggagtggtcattcatcaactaccaggacaaccagccctgtttggatctcattgagggaagccccatcagcatctgctccctcataaatgaggaatgccgcctcaatcgacccagcagcgcagcccagctccagacacgcattgagactgccctggcaggcagcccctgcctgggccacaataagctcagccgggagcccagcttcattgtggtgcattatgcggggcctgtgcggtaccacacagcaggcctggtggagaagaacaaggaccctatcccacctgagctgaccaggctcctgcagcaatcccaggaccccctgctcatggggctgtttcctactaaccccaaagagaagacccaggaggaaccccctggccagagcagggcccctgtgttgaccgtggtgtccaagttcaaggcctcactggagcagcttctgcaggtcctacacagcaccacgccccactacattcgctgcatcaagcccaacagccagggccaggcgcagacctttctccaagaggaggtcctgagccagctggaggcctgtggcctcgtggagaccatccatatcagtgctgctggcttccccatccgggtctctcaccgaaactttgtagaacgatacaagttactaagaaggcttcatccttgcacatcctctggccccgacagcccatatcctgccaaagggctccctgaatggtgtccacacagcgaggaagccacgcttgaacctctcatccaggacattctccacactctgccggtcctaactcaggcagcagccataactggtgactcggctgaggccatgccagcccccatgcactgtggcaggaccaaggtgttcatgactgactctatgctggagcttctggaatgtgggcgtgcccgggtgctggagcagtgtgcccgctgcatccagggtggctggaggcgacaccggcaccgagagcaggagcggcagtggcgggccgtcatgctcatccaggcagccattcgttcctggttaactcggaaacacatccagaggctgcatgcagctgccacagtcatcaagcgtgcatggcagaagtggagaatcagaatggcctgccttgctgctaaagagctggatggtgtggaagaaaaacacttctctcaagctccctgttccctgagcacctcgccgctgcagaccaggctcctggaggcaataatccgcctctggcccctgggactggtcctggccaatacggctatgggtgtaggcagctttcagaggaaattagtggtctgggcttgcctccagctccccaggggcagccccagtagctacactgtccagacagcacaagaccaggctggtgtcacgtccatccgagcgctgcctcagggatcgataaagtttcactgcagaaagtctccactgcggtatgctgacatctgccctgaaccttcaccctacagcattacaggctttaatcagattctgctggaaagacacaggctgatccacgtgacctcttctgccttcactgggctggggtgatccttggtgcctttgtttccacaaggccttttcctgccccctgccttgccaaagacatttaatcagcacacagctgccagactattcccacagtgctccaaatgcacatgaacaacagtgacggctccagccttcgacccagagccccgtgcccagtgcgtcagtgggcctggggttccaggctacatcaagcactgatggtgtcagggctggtagttaccaaatcagggttaagaaacatcagggccacatttcactaccttcacagatcaaactcagcagcagtcatgactgtctgtcactacactggggatcccaattccacataagcacttttggaagaaaacagccaaagttggcctaaaattggcgctggaatttgggctgggaaaaatcttgtggttatttcctttaaaaaggaacaaaactttagtatttaattagttgatttatttaatgtaatttcaaacaattaaattatgaataatgcaatgtacagtagaatcacgttttgattttattaacactgaccaagtttaactccatatgaagtgtaagcttgatatcgtttatgatgtctatcaactgtaccaaaagtaaaacatttaaaaacaatcatctgaatgtcaagttttctctccataaaggacttgccaccttaaggaccccaagtctgcctgaaacatgagccacatcaatgccggtaaaggcctgcatgacctaatctgcatcctggaaacctcttttgcctgagctccccagccccaaactagctggtctgggagagggagcaggcaggttccaggagtcaagcacacgcttgagcaagcagcacaataatccatcttaagactcctcattctgggatggctccacaattcctaaacagcagtctgcaaactccacaaacaaaggctcttgcatgtaagctctcatgagctttgctttgtcttctccctgatcgaggttgaccatcaactgcctgaggtgtggattgagcaataagcttcttaatgttgcagattccccttaattctttaaattctgcaaagaaactctgtcttcttcctcatcactattgagaaaatcagctatagagtcatcatcatctttgttttccacaggctttacggttttggtaggaagagctgatcttatttttttctcaacaggacgagtttcagggttgcactgttctgaaaaagacacaaa

SEQ ID NO: 280471 - DNA, 3391 bp, Homo sapiens
cgtgccccgtcgtcctctggaacatgagactgccccagagcagcaggaggggatagataggatggcctggcagtcgagaaagggaggccacttcagggaggtagcaatgcagtggaaagtgaccctcacctccagatgggggctgctcagacactgccaggtcctagctggactgctgcaccttggcaatatccagtttgctgcctccgaggatgaagcccagccctgccagccgatggatgatgccaagtactctgtcaggacggcagcctcgctgctggggctcccagaggacgtgctgctggagatggtgcagattagaaccatcagggcaggcagacagcagcaggtgttccggaagccctgcgcccgagccgagtgtgacacccgtagagactgcctggccaaactgatctatgcgcggttgtttgactggctggtatcagtgatcaacagcagcatctgtgcagacaccgactcgtggaccactttcataggcctgctggatgtgtatggatttgaatcatttcctgacaacagtctggaacagttgtgcatcaactacgccaatgagaagctgcagcagcattttgtggctcactacctaagggcccagcaggaggaatacgcagttgagggcctggagtggtcattcatcaactaccaggacaaccagccctgtttggatctcattgagggaagccccatcagcatctgctccctcataaatgaggaatgccgcctcaatcgacccagcagcgcagcccagctccagacacgcattgagactgccctggcaggcagcccctgcctgggccacaataagctcagccgggagcccagcttcattgtggtgcattatgcggggcctgtgcggtaccacacagcaggcctggtggagaagaacaaggaccctatcccacctgagctgaccaggctcctgcagcaatcccaggaccccctgctcatggggctgtttcctactaaccccaaagagaagacccaggaggaaccccctggccagagcagggcccctgtgttgaccgtggtgtccaagttcaaggcctcactggagcagcttctgcaggtcctacacagcaccacgccccactacattcgctgcatcaagcccaacagccagggccaggcgcagacctttctccaagaggaggtcctgagccagctggaggcctgtggcctcgtggagaccatccatatcagtgctgctggcttccccatccgggtctctcaccgaaactttgtagaacgatacaagttactaagaaggcttcatccttgcacatcctctggccccgacagcccatatcctgccaaagggctccctgaatggtgtccacacagcgaggaagccacgcttgaacctctcatccaggacattctccacactctgccggtcctaactcaggcagcagccataactggtgactcggctgaggccatgccagcccccatgcactgtggcaggaccaaggtgttcatgactgactctatgctggagcttctggaatgtgggcgtgcccgggtgctggagcagtgtgcccgctgcatccagggtggctggaggcgacaccggcaccgagagcaggagcggcagtggcgggccgtcatgctcatccaggcagccattcgttcctggttaactcggaaacacatccagaggctgcatgcagctgccacagtcatcaagcgtgcatggcagaagtggagaatcagaatggcctgccttgctgctaaagagctggatggtgtggaagaaaaacacttctctcaagctccctgttccctgagcacctcgccgctgcagaccaggctcctggaggcaataatccgcctctggcccctgggactggtcctggccaatacggctatgggtgtaggcagctttcagaggaaattagtggtctgggcttgcctccagctccccaggggcagccccagtagctacactgtccagacagcacaagaccaggctggtgtcacgtccatccgagcgctgcctcagggatcgataaagtttcactgcagaaagtctccactgcggtatgctgacatctgccctgaaccttcaccctacagcattacaggctttaatcagattctgctggaaagacacaggctgatccacgtgacctcttctgccttcactgggctggggtgatccttggtgcctttgtttccacaaggccttttcctgccccctgccttgccaaagacatttaatcagcacacagctgccagactattcccacagtgctccaaatgcacatgaacaacagtgacggctccagccttcgacccagagccccgtgcccagtgcgtcagtgggcctggggttccaggctacatcaagcactgatggtgtcagggctggtagttaccaaatcagggttaagaaacatcagggccacatttcactaccttcacagatcaaactcagcagcagtcatgactgtctgtcactacactggggatcccaattccacataagcacttttggaagaaaacagccaaagttggcctaaaattggcgctggaatttgggctgggaaaaatcttgtggttatttcctttaaaaaggaacaaaactttagtatttaattagttgatttatttaatgtaatttcaaacaattaaattatgaataatgcaatgtacagtagaatcacgttttgattttattaacactgaccaagtttaactccatatgaagtgtaagcttgatatcgtttatgatgtctatcaactgtaccaaaagtaaaacatttaaaaacaatcatctgaatgtcaagttttctctccataaaggacttgccaccttaaggaccccaagtctgcctgaaacatgagccacatcaatgccggtaaaggcctgcatgacctaatctgcatcctggaaacctcttttgcctgagctccccagccccaaactagctggtctgggagagggagcaggcaggttccaggagtcaagcacacgcttgagcaagcagcacaataatccatcttaagactcctcattctgggatggctccacaattcctaaacagcagtctgcaaactccacaaacaaaggctcttgcatgtaagctctcatgagctttgctttgtcttctccctgatcgaggttgaccatcaactgcctgaggtgtggattgagcaataagcttcttaatgttgcagattccccttaattctttaaattctgcaaagaaactctgtcttcttcctcatcactattgagaaaatcagctatagagtcatcatcatctttgttttccacaggctttacggttttggtaggaagagctgatcttatttttttctcaacaggacgagtttcagggttgcactgttctgaaaaagacacaaa

SEQ ID NO: 280472 - DNA, 2443 bp, Homo sapiens
agggggacttgggaccaccaggaccctttctagtgggagatttgttttcaaggtccctcgatttctcacagccccaaggagatacccccattagccaagccttgggagagcctgcagcttggcactggccagggtctaagaagaagggctgagagaatggcatttctggcctgctggccccatgctgcaggtgcctgccctgtctccccacccttgcaggtccgtcctgagccagctggaggcctgtggcctcgtggagaccatccatatcagtgctgctggcttccccatccgggtctctcaccgaaactttgtagaacgatacaagttactaagaaggcttcatccttgcacatcctctggccccgacagcccatatcctgccaaagggctccctgaatggtgtccacacagcgaggaagccacgcttgaacctctcatccaggacattctccacactctgccggtcctaactcaggcagcagccataactggtgactcggctgaggccatgccagcccccatgcactgtggcaggaccaaggtgttcatgactgactctatgctggagcttctggaatgtgggcgtgcccgggtgctggagcagtgtgcccgctgcatccagggtggctggaggcgacaccggcaccgagagcaggagcggcagtggcgggccgtcatgctcatccaggcagccattcgttcctggttaactcggaaacacatccagaggctgcatgcagctgccacagtcatcaagcgtgcatggcagaagtggagaatcagaatggcctgccttgctgctaaagagctggatggtgtggaagaaaaacacttctctcaagctccctgttccctgagcacctcgccgctgcagaccaggctcctggaggcaataatccgcctctggcccctgggactggtcctggccaatacggctatgggtgtaggcagctttcagaggaaattagtggtctgggcttgcctccagctccccaggggcagccccagtagctacactgtccagacagcacaagaccaggctggtgtcacgtccatccgagcgctgcctcagggatcgataaagtttcactgcagaaagtctccactgcggtatgctgacatctgccctgaaccttcaccctacagcattacaggctttaatcagattctgctggaaagacacaggctgatccacgtgacctcttctgccttcactgggctggggtgatccttggtgcctttgtttccacaaggccttttcctgccccctgccttgccaaagacatttaatcagcacacagctgccagactattcccacagtgctccaaatgcacatgaacaacagtgacggctccagccttcgacccagagccccgtgcccagtgcgtcagtgggcctggggttccaggctacatcaagcactgatggtgtcagggctggtagttaccaaatcagggttaagaaacatcagggccacatttcactaccttcacagatcaaactcagcagcagtcatgactgtctgtcactacactggggatcccaattccacataagcacttttggaagaaaacagccaaagttggcctaaaattggcgctggaatttgggctgggaaaaatcttgtggttatttcctttaaaaaggaacaaaactttagtatttaattagttgatttatttaatgtaatttcaaacaattaaattatgaataatgcaatgtacagtagaatcacgttttgattttattaacactgaccaagtttaactccatatgaagtgtaagcttgatatcgtttatgatgtctatcaactgtaccaaaagtaaaacatttaaaaacaatcatctgaatgtcaagttttctctccataaaggacttgccaccttaaggaccccaagtctgcctgaaacatgagccacatcaatgccggtaaaggcctgcatgacctaatctgcatcctggaaacctcttttgcctgagctccccagccccaaactagctggtctgggagagggagcaggcaggttccaggagtcaagcacacgcttgagcaagcagcacaataatccatcttaagactcctcattctgggatggctccacaattcctaaacagcagtctgcaaactccacaaacaaaggctcttgcatgtaagctctcatgagctttgctttgtcttctccctgatcgaggttgaccatcaactgcctgaggtgtggattgagcaataagcttcttaatgttgcagattccccttaattctttaaattctgcaaagaaactctgtcttcttcctcatcactattgagaaaatcagctatagagtcatcatcatctttgttttccacaggctttacggttttggtaggaagagctgatcttatttttttctcaacaggacgagtttcagggttgcactgttctgaaaaagacacaaa

SEQ ID NO: 280473 - DNA, 1136 bp, Homo sapiens
gcggccgctccaacatcagtgcttgatgtagcctggaaccccaggcccactgacgcactgggcacggggctctgggtcgaaggctggagccgtcactgttgttcatgtgcatttggagcactgtgggaataggctggtagttaccaaatcagggttaagaaacatcagggccacatttcactaccttcacagatcaaactcagcagcagtcatgactgtctgtcactacactggggatcccaattccacataagcacttttggaagaaaacagccaaagttggcctaaaattggcgctggaatttgggctgggaaaaatcttgtggttatttcctttaaaaaggaacaaaactttagtatttaattagttgatttatttaatgtaatttcaaacaattaaattatgaataatgcaatgtacagtagaatcacgttttgattttattaacactgaccaagtttaactccatatgaagtgtaagcttgatatcgtttatgatgtctatcaactgtaccaaaagtaaaacatttaaaaacaatcatctgaatgtcaagttttctctccataaaggacttgccaccttaaggaccccaagtctgcctgaaacatgagccacatcaatgccggtaaaggcctgcatgacctaatctgcatcctggaaacctcttttgcctgagctccccagccccaaactagctggtctgggagagggagcaggcaggttccaggagtcaagcacacgcttgagcaagcagcacaataatccatcttaagactcctcattctgggatggctccacaattcctaaacagcagtctgcaaactccacaaacaaaggctcttgcatgtaagctctcatgagctttgctttgtcttctccctgatcgaggttgaccatcaactgcctgaggtgtggattgagcaataagcttcttaatgttgcagattccccttaattctttaaattctgcaaagaaactctgtcttcttcctcatcactattgagaaaatcagctatagagtcatcatcatctttgttttccacaggctttacggttttggtaggaagagctgatcttatttttttctcaacaggacgagtttcagggttgcactgttctgaaaaagacacaaa

SEQ ID NO: 280474 - DNA, 4057 bp, Homo sapiens
tgcggttcggcgctcccaggttcctttcctcactgcacgctcttgcccctcctcttttctctcctgcccgtgttgcttcccgccgcctgacctggcccgcccgcctttccagtctggccgggcgggggcctgaagcacggcggctcgggccgtgggaccgtgttcacaccctttccagaaattcttggctggtaaccgcgaaaccgactggagcaggagctgggagaactggagaaaactgctctaatctcacttgactccagctaggagctgatgctgcatcgtaataacatttgcagagcgctttcacaggcgctggagtgacttgtctgagattcctccagaactgagccctttgttggaaccataccccagcccatggtcccatgactaggtggatagtactccttgtacctcctgcaacccagaaccctggctgaccactttgaaggaggatgctccagcaggtcaatggccacaatccggggtctgatggccaagccagggagtacctcagagaagacctgcaggagttcctgggtggggaggtcctgctgtacaaactggatgacctcaccagggtgaatcctgtgacactagagacagtcctgaggtgcctgcaggcccggtacatggcagacacattctacaccaatgctggctgcaccctggtagccttgaaccccttcaagcctgttcctcagctctactcgcccgagctaatgagagagtaccatgctgcgcctcagccccagaaactgaagccccatgtgttcactgtgggtgaacagacctacaggaatgtcaagagcctgattgaaccagtcaaccagtctattgttgtcagtggagagagtggtgctggaaagacatggacgtctcgctgcctaatgaagttctatgctgtggtggccacctcacctgcatcttgggagagccacaagattgcagagaggatagaacagaggatcctgaactccaaccctgtcatggaagcttttgggaatgcgtgtacactgaggaataacaacagcagtcgctttgggaagttcatccagctccagctgaacagggctcagcaaatgactggagccgcagtccagacctacctcctagagaaaactcgagtggcctgccaggcttccagtgagaggaacttccacatcttctatcagatttgcaaaggagccagtgaggacgagaggctccagtggcaccttcctgagggagctgccttctcctggctgcccaacccagagaggagcttagaagaggattgttttgaggtgaccagagaggccatgctccatttgggcattgacacccctacccagaacaacatctttaaggtcctagctggactgctgcaccttggcaatatccagtttgctgcctccgaggatgaagcccagccctgccagccgatggatgatgccaagtactctgtcaggacggcagcctcgctgctggggctcccagaggacgtgctgctggagatggtgcagattagaaccatcagggcaggcagacagcagcaggtgttccggaagccctgcgcccgagccgagtgtgacacccgtagagactgcctggccaaactgatctatgcgcggttgtttgactggctggtatcagtgatcaacagcagcatctgtgcagacaccgactcgtggaccactttcataggcctgctggatgtgtatggatttgaatcatttcctgacaacagtctggaacagttgtgcatcaactacgccaatgagaagctgcagcagcattttgtggctcactacctaagggcccagcaggaggaatacgcagttgagggcctggagtggtcattcatcaactaccaggacaaccagccctgtttggatctcattgagggaagccccatcagcatctgctccctcataaatgaggaatgccgcctcaatcgacccagcagcgcagcccagctccagacacgcattgagactgccctggcaggcagcccctgcctgggccacaataagctcagccgggagcccagcttcattgtggtgcattatgcggggcctgtgcggtaccacacagcaggcctggtggagaagaacaaggaccctatcccacctgagctgaccaggctcctgcagcaatcccaggaccccctgctcatggggctgtttcctactaaccccaaagagaagacccaggaggaaccccctggccagagcagggcccctgtgttgaccgtggtgtccaagttcaaggcctcactggagcagcttctgcaggtcctacacagcaccacgccccactacattcgctgcatcaagcccaacagccagggccaggcgcagacctttctccaagaggaggtcctgagccagctggaggcctgtggcctcgtggagaccatccatatcagtgctgctggcttccccatccgggtctctcaccgaaactttgtagaacgatacaagttactaagaaggcttcatccttgcacatcctctggccccgacagcccatatcctgccaaagggctccctgaatggtgtccacacagcgaggaagccacgcttgaacctctcatccaggacattctccacactctgccggtcctaactcaggcagcagccataactggtgactcggctgaggccatgccagcccccatgcactgtggcaggaccaaggtgttcatgactgactctatgctggagcttctggaatgtgggcgtgcccgggtgctggagcagtgtgcccgctgcatccagggtggctggaggcgacaccggcaccgagagcaggagcggcagtggcgggccgtcatgctcatccaggcagccattcgttcctggttaactcggaaacacatccagaggctgcatgcagctgccacagtcatcaagcgtgcatggcagaagtggagaatcagaatggcctgccttgctgctaaagagctggatggtgtggaagaaaaacacttctctcaagctccctgttccctgagcacctcgccgctgcagaccaggctcctggaggcaataatccgcctctggcccctgggactggtcctggccaatacggctatgggtgtaggcagctttcagaggaaattagtggtctgggcttgcctccagctccccaggggcagccccagtagctacactgtccagacagcacaagaccaggctggtgtcacgtccatccgagcgctgcctcaggtacgttgtgtgtgatggccatgacagctttgttcctgagaacagcaggagcaaagcctacaagttcacagcgggaatgagactgaggctgggacaagatccatccctaaccctactgggtaaaccagagggctgcatgtccccatcaggctgcaggtttggattatttattttgttataactgggaatcttccagagccctttatctttttaaaaactgcttctaattatttcagcatctctaaatcttctagtcccatttccaaatgcaatgctgcgtttctagcaagctcccagctgattctgatgctccatgaaccacactgtgagaaccaaggctttagatgagtcaggagcaggaggtgatgaaagtttagcttagggcctggagcggtggctcacgcctataatcccagtactttgggaagtcgaggcgggtgtatcacctgaggtcaggagttcaagaccagcctggccaacatggcgaaaccccatctctactaaaaatacaaaaattggttgggcgtagtggcaggcgcctgtagtcccagctgctcgggaggctgaggcatgagaattgcttgaatctgggagggagaggttgcagtgagccgagattgcgccgctgcactccagcctgggtgacaggacgagagtccatcttaattctttaaattctgcaaagaaactctgtcttcttcctcatcactattgagaaaatcagctatagagtcatcatcatctttgttttccacaggctttacggttttggtaggaagagctgatcttatttttttctcaacaggacgagtttcagggttgcactgttctgaaaaagacacaaa

SEQ ID NO: 280475 - DNA, 2251 bp, Homo sapiens
tgcggttcggcgctcccaggttcctttcctcactgcacgctcttgcccctcctcttttctctcctgcccgtgttgcttcccgccgcctgacctggcccgcccgcctttccagtctggccgggcgggggcctgaagcacggcggctcgggccgtgggaccgtgttcacaccctttccagaaattcttggctggtaaccgcgaaaccgactggagcaggagctgggagaactggagaaaactgctctaatctcacttgactccagctaggagctgatgctgcatcgtaataacatttgcagagcgctttcacaggcgctggagtgacttgtctgagattcctccagaactgagccctttgttggaaccataccccagcccatggtcccatgactaggtggatagtactccttgtacctcctgcaacccagaaccctggctgaccactttgaaggaggatgctccagcaggtcaatggccacaatccggggtctgatggccaagccagggagtacctcagagaagacctgcaggagttcctgggtggggaggtcctgctgtacaaactggatgacctcaccagggtgaatcctgtgacactagagacagtcctgaggtgcctgcaggcccggtacatggcagacacattctacaccaatgctggctgcaccctggtagccttgaaccccttcaagcctgttcctcagctctactcgcccgagctaatgagagagtaccatgctgcgcctcagccccagaaactgaagccccatgtgttcactgtgggtgaacagacctacaggaatgtcaagagcctgattgaaccagtcaaccagtctattgttgtcagtggagagagtggtgctggaaagacatggacgtctcgctgcctaatgaagttctatgctgtggtggccacctcacctgcatcttgggagagccacaagattgcagagaggatagaacagaggatcctgaactccaaccctgtcatggaagcttttgggaatgcgtgtacactgaggaataacaacagcagtcgctttgggaagttcatccagctccagctgaacagggctcagcaaatgactggagccgcagtccagacctacctcctagagaaaactcgagtggcctgccaggcttccagtgagaggaacttccacatcttctatcagatttgcaaaggagccagtgaggacgagaggctccagtggcaccttcctgagggagctgccttctcctggctgcccaacccagagaggagcttagaagaggattgttttgaggtgaccagagaggccatgctccatttgggcattgacacccctacccagaacaacatctttaaggtcctagctggactgctgcaccttggcaatatccagtttgctgcctccgaggatgaagcccagccctgccagccgatggatgatgccaagtactctgtcaggacggcagcctcgctgctggggctcccagaggacgtgctgctggagatggtgcagattagaaccatcagggcaggcagacagcagcaggtgttccggaagccctgcgcccgagccgagtgtgacacccgtagagactgcctggccaaactgatctatgcgcggttgtttgactggctggtatcagtgatcaacagcagcatctgtgcagacaccgactcgtggaccactttcataggcctgctggatgtgtatggatttgaatcatttcctgacaacagtctggaacagttgtgcatcaactacgccaatgagaagctgcagcagcattttgtggctcactacctaagggcccagcaggtgagggatggggtgagcaggaggcaggtccttcttttggatcctcaatcccttcctgaccttccagccccagtccaggttctgattagaagcctttggttccttcttattttatttttaattgacaaataataattgcacaacttgtcgagattcgaatctcgacaagttgtgcagccgagcgtggcccaactgagatcaacaatggtagacccagcgatcaactggtttttcctaaaaatgaacggtgaactggaacagactaaagacaaacgggaacaagcccaaaatgaactgagtgcctggaagtttacgcctgatagccaaacagggaaaaagttaatggcgaagtgtcgaatgcttatccaggagaatcaagagcttggaaggcagctgtcccaggaacgtatggcacaactggtcgagattcgggtaccgagctc

SEQ ID NO: 280476 - DNA, 1195 bp, Homo sapiens
tgcggttcggcgctcccaggttcctttcctcactgcacgctcttgcccctcctcttttctctcctgcccgtgttgcttcccgccgcctgacctggcccgcccgcctttccagtctggccgggcgggggcctgaagcacggcggctcgggccgtgggaccgtgttcacaccctttccagaaattcttggctggtaaccgcgaaaccgactggagcaggagctgggagaactggagaaaactgctctaatctcacttgactccagctaggagctgatgctgcatcgtaataacatttgcagagcgctttcacaggcgctggagtgacttgtctgagattcctccagaactgagccctttgttggaaccataccccagcccatggtcccatgactaggtggatagtactccttgtacctcctgcaacccagaaccctggctgaccactttgaaggaggatgctccagcaggtcaatggccacaatccggggtctgatggccaagccagggagtacctcagagaagacctgcaggagttcctgggtggggaggtcctgctgtacaaactggatgacctcaccagggtgaatcctgtgacactagagacagtcctgaggtgcctgcaggcccggtacatggcagacacattctacaccaatgctggctgcaccctggtagccttgaaccccttcaagcctgttcctcagctctactcgcccgagctaatgagagagtaccatgctgcgcctcagccccagaaactgaagccccatgtgttcactgtgggtgaacagacctacaggaatgtcaagagcctgattgaaccagtcaaccagtctattgttgtcagtggagagagtggtgctggaaagacatggacgtctcgctgcctaatgaagttctatgctgtggtggccacctcacctgcatcttgggagagccacaagattgcagagaggatagaacagaggatcctgaactccaaccctgtcatggaagcttttgggaatgcgtgtacactgaggaataacaacagcagtcgctttgggaagttcatccagctccagctgaacagggctcagcaaatgactggagccgcagtccagacctacctcctagagaaaactcgagtggcctgccaggcttccagtgagaggaacttccacatcttctatcaggtttgtgccaaatggggcca

SEQ ID NO: 280477 - DNA, 6537 bp, Homo sapiens
ttcctggttctgcgggttggcgctgagtttggaagtcgcgcgggaccccttttatagcagcgtgggcgacgtgccacacgggtgtcccagcccaggggctggtctgagctggaagaggttgtgcaaataagggccccacctccacggcaggagggtgagccctaggtccagatgctcacactggcgcaggtctgtcctgagccgacacctgcacagtggcgagaccaaggacccagagagaaaggtgagagtgcagccggggaggctgaggatcggcggagctggaagagtgagggtgaaggcaagaagtagagcacagaagcaaagattttaagaggaaagaagacatctgaacccaacaccaccctaaaccacaggctgcagggttggcatgctccgtgcaagaccagaggcactgatgctcctgggagctcttctgactggatccctgggtccatcgggcagtcaggacgcactctcactgccctgggaagtgcagcgctatgacggctggtttaacaacctgaggcaccacgagcgtggtgctgttggctgccggttgcagcgccgcgtaccagccaattacgccgacggtgtgtatcaggctctggaggagccgcagctgcccaacccgcgccggctcagcaacgcagccacgcggggcatagccggcctgccgtcgctccacaaccgcaccgtactgggggtcttctttggctaccatgttctttccgacgtggtgagcgtggaaacgcccggttgccccgccgagttcctcaacatccgcatcccacctggagaccccgtgttcgaccccgaccagcgcggggacgtggtgctgcccttccagaggagccgctgggaccccgagaccggacggagtcccagcaacccccgggacctggccaaccaggtgacgggctggctggacggcagcgccatctatggctcctcgcactcctggagcgacgcgctgcggagcttctcggggggacagctggcgtcggggcccgaccccgctttcccccgagactcgcagaaccccctgctcatgtgggcggcgcccgaccccgccaccgggcagaacgggccccgggggctgtacgccttcggggcagagagagggaaccgggaacccttcctgcaggcgctgggcctgctctggttccgctaccacaacctgtgggcgcagaggctggcccgccagcacccagactgggaggacgaggagctgttccagcacgcacgcaagagggtcatcgccacctaccagaacatcgctgtgtatgagtggctgcccagcttcctgcagaaaacactcccggagtatacaggataccgtcctttcctagaccccagcatctccccggaatttgtggtggcctctgagcagttcttctctaccatggtgccccctggtgtctacatgagaaatgccagctgtcatttccggaaggtcctgaacaagggttttcaaagctcccaagctctcagggtctgcaacaactactggattcgggagaaccccaatctgaacagtacccaggaggtgaatgagctgctgctgggaatggcctcccagatttcggagttggaggacaacatagtggttgaagatctgagggattactggcctggccctggcaaattctcccgtacagactatgtggccagcagcatccaacgtggccgagatatggggctgcccagctatagccaggccctgctggcctttgggctggacatcccaaggaactggagtgatctcaaccctaatgtggacccccaggtgctggaggccacagctgccctgtacaaccaggacctatcccagctagagctgctccttggcgggctcctggagagccatggggaccctggacccctgttcagtgccattgtcctcgaccagtttgtacggctgcgggatggtgaccgctactggtttgagaacaccaggaatgggctgttctccaagaaggagattgaagacatccgaaataccaccctgcgggacgtgctggtcgctgttatcaacattgaccccagtgccctgcagcccaatgtctttgtctggcataaaggtgcaccctgccctcaacctaagcagctcacaactgacggcctgccccagtgtgcacccctgactgtgcttgacttctttgaaggcagcagccctggttttgccatcaccatcattgctctctgctgccttcccttagtgagtctgcttctctctggagtggtggcctatttccggggccgagaacacaagaagctacaaaagaaactcaaagagagcgtgaagaaggaagcagccaaagatggagtgccagcgatggagtggccaggccccaaggagaggagcagtcccatcatcatccagctgctgtcagacaggtgtctgcaggtcctgaacaggcatctcactgtgctccgtgtggtccagctgcagcctctgcagcaggtcaacctcatcctgtccaacaaccgaggatgccgcaccctgctgctcaagatccctaaggagtatgacctggtgctgctgtttagttctgaagaggaacggggcgcctttgtgcagcagctatgggacttctgcgtgcgctgggctctgggcctccatgtggctgagatgagcgagaaggagctatttaggaaggctgtgacaaagcagcagcgggaacgcatcctggagatcttcttcagacacctttttgctcaggtgctggacatcaaccaggccgacgcagggaccctgcccctggactcctcccagaaggtgcgggaggccctgacctgcgagctgagcagggccgagtttgccgagtccctgggcctcaagccccaggacatgtttgtggagtccatgttctctctggctgacaaggatggcaatggctacctgtccttccgagagttcctggacatcctggtggtcttcatgaaaggctccccagaggataagtcccgtctaatgtttaccatgtatgacctggatgagaatggcttcctctccaaggacgaattcttcaccatgatgcgatccttcatcgagatctccaacaactgcctgtccaaggcccagctggccgaggtggtggagtctatgttccgggagtcgggattccaggacaaggaggagctgacatgggaggattttcacttcatgctgcgggaccatgacagcgagctccgcttcacgcagctctgtgtcaaaggtggaggtggaggtggaaatggtattagagatatctttaaacaaaacatcagctgtcgagtctcgttcatcactcggacacctggggagcgctcccacccccagggactggggccccctgccccagaagccccagagctgggaggccctggactgaagaagaggtttggcaaaaaggcagcagtgcccactccccggctgtacacagaggcgctgcaagagaagatgcagcgaggcttcctagcccaaaagctgcagcagtacaagcgcttcgtggagaactaccggaggcacatcgtgtgtgtggcaatcttctcggccatctgtgttggcgtgtttgcagatcgtgcttactactatggctttgccttgccaccctcggacattgcacagaccaccctcgtgggcatcatcctgtcacgaggcacggcggccagcgtctccttcatgttctcttatatcttgctcaccatgtgccgcaacctcataaccttcctgcgagagactttcctcaaccgctatgtgccttttgatgccgcagtggacttccaccgctggatcgccatggctgctgttgtcctggccattttgcacagtgctggccacgcagtcaatgtctacatcttctcagtcagcccactcagcctgctggcctgcatattccccaacgtctttgtgaatgatgggtccaagcttccccagaagttctattggtggttcttccagaccgtcccaggtatgacaggtgtgcttctgctcctggtcctggccatcatgtatgtcttcgcctcccaccacttccgccgccgcagcttccggggcttctggctgacccaccacctctacatcctgctctatgccctgctcatcatccatggcagctatgctctgatccagctgcccactttccacatctacttcctggtcccggcaatcatctatggaggtgacaagctggtgagcctgagccggaagaaggtggagatcagcgtggtgaaggcggagctgctgccctcaggagtgacctacctgcaattccagaggccccaaggctttgagtacaagtcaggacagtgggtgcggatcgcctgcctggctctggggaccaccgagtaccaccccttcacactgacctccgcgccccatgaggacacactcagcctgcacatccgggcagtggggccctggaccactcgcctcagggagatctactcatccccaaagggcaatggctgtgctggatacccaaagctgtaccttgatggaccgtttggagagggccatcaggagtggcataaatttgaggtgtcagtgttggtgggagggggcattggggtcaccccctttgcctccatcctcaaagacctggtcttcaagtcatccttgggcagccaaatgctgtgtaagaagatctacttcatctgggtgacacggacccagcgtcagtttgagtggctggctgacatcatccaagaggtggaggagaacgaccaccaggacctggtgtctgtgcacatttatgtcacccagctggctgagaagttcgacctcaggaccaccatgctatacatctgcgagcggcacttccagaaagtgctgaaccggagtctgttcacgggcctgcgctccatcacccactttggccgtccccccttcgagcccttcttcaactccctgcaggaggtccacccacaggtgcgcaagatcggggtgttcagctgcggccctccaggaatgaccaagaatgtagagaaggcctgtcagctcgtcaacaggcaggaccgagcccacttcatgcaccactatgagaacttctgagcctgtcctccctggctgctgcttccagtatcctgccttctcttctgtgcacctaagttgcccagccctgctggcaatctctccatcagaatccaccttaggcctcagctggagggctgcagagcccctcccaatattgggagaatattgacccagacaattatacaaatgagaaaaggcaggagactatgttctacaattgcagtgcatgatgattataagtccacctgtttatcaacggcaccattcctgcagccctccagacttcctgcccttagcaagtgcgcaaccagtcaggatctcccaaagaagataaagaccactcctcaccccagctcaagccatggcaggcgtggcaagcaaagtggggaggagacagtccctgcttgtgacaagtgtggaggtgaaaaggtacaatagtgcttgtctccgatagctccccacatctctaattgacttccacaaaatcgatgcgttgctttggtatttgcttggactgacatttgagggaggaggaggctgggatcctctggctgagaatctcctcagagcccagtgcagaagctgtgatgcttagaacctggacagcccgactgcctcaactctgtctccaggtctattccctccagctccaaaaggagcagccctacttctaccccttcccgtccccaaagtgtcagcaactttgaggagggcaccaggaaacaaagatgcctccccagccctgatattcttgatgtcaccagtgatacccactgccctgacccctgggcaggcccctctctgcatctactggagtggtccctgggctctggggctgaaggattccagcctctctgccagatattcagtactcgatctcaattcccctcttccacaagagttgggtgaccagctgtcctagtttgcccaggactctccctgttttagcactgaaagtctcttgccccaggaaaccccatcagtcccaggcagattgggacagctggtcaccttacgcaagagccaggctgaaacatcccctccatactcagctctttaacttttcttttcctttttcatcgggctctttcctaaaaagctgagctgtaaaatattttacatcgaggtataataaataatcatgtacatgttttaccaccacccaggtcaagacatagaatgtttcaacatttccatcaccccagaaactccccttgtacccccttccacttcgtctcccctagctcctagaagcaaccactgatgtgatttctaccaaatccagttttggtcctactaaatatactcttttgagactggcctcttttactcaccataatgcctttgtaattcatccatgctgttgtgtgtatcagcagtttgttccttttcattgctgagtagtattctattgtagagatgtaccacagtttgtttattcttctgttgatggacgtttgggttgtttctaattttgaatgattataaataaaaattctgtgagtgttcttgtacgt

SEQ ID NO: 280478 - DNA, 2501 bp, Homo sapiens
  misc_feature (18)..(18): n is a, c, g, or t
atcgagctcgctcctgtnaattcgtgtctacatcctgctctatgcctgctcatcatccatggcagctatgctctgatccagctgcccactttccacatctacttcctggtcccggcaatcatctatggaggtgacaagctggtgagcctgagccggaagaaggtggagatcagcgtggtgaaggcggagctgctgccctcaggagtgacctacctgcaattccagaggccccaaggctttgagtacaagtcaggacagtgggtgcggatcgcctgcctggctctggggaccaccgagtaccaccccttcacactgacctccgcgccccatgaggacacactcagcctgcacatccgggcagtggggccctggaccactcgcctcagggagatctactcatccccaaagggcaatggctgtgctggatacccaaagctgtaccttgatggaccgtttggagagggccatcaggagtggcataaatttgaggtgtcagtgttggtgggagggggcattggggtcaccccctttgcctccatcctcaaagacctggtcttcaagtcatccttgggcagccaaatgctgtgtaagaagatctacttcatctgggtgacacggacccagcgtcagtttgagtggctggctgacatcatccaagaggtggaggagaacgaccaccaggacctggtgtctgtgcacatttatgtcacccagctggctgagaagttcgacctcaggaccaccatgctatacatctgcgagcggcacttccagaaagtgctgaaccggagtctgttcacgggcctgcgctccatcacccactttggccgtccccccttcgagcccttcttcaactccctgcaggaggtccacccacaggtgcgcaagatcggggtgttcagctgcggccctccaggaatgaccaagaatgtagagaaggcctgtcagctcgtcaacaggcaggaccgagcccacttcatgcaccactatgagaacttctgagcctgtcctccctggctgctgcttccagtatcctgccttctcttctgtgcacctaagttgcccagccctgctggcaatctctccatcagaatccaccttaggcctcagctggagggctgcagagcccctcccaatattgggagaatattgacccagacaattatacaaatgagaaaaggcaggagactatgttctacaattgcagtgcatgatgattataagtccacctgtttatcaacggcaccattcctgcagccctccagacttcctgcccttagcaagtgcgcaaccagtcaggatctcccaaagaagataaagaccactcctcaccccagctcaagccatggcaggcgtggcaagcaaagtggggaggagacagtccctgcttgtgacaagtgtggaggtgaaaaggtacaatagtgcttgtctccgatagctccccacatctctaattgacttccacaaaatcgatgcgttgctttggtatttgcttggactgacatttgagggaggaggaggctgggatcctctggctgagaatctcctcagagcccagtgcagaagctgtgatgcttagaacctggacagcccgactgcctcaactctgtctccaggtctattccctccagctccaaaaggagcagccctacttctaccccttcccgtccccaaagtgtcagcaactttgaggagggcaccaggaaacaaagatgcctccccagccctgatattcttgatgtcaccagtgatacccactgccctgacccctgggcaggcccctctctgcatctactggagtggtccctgggctctggggctgaaggattccagcctctctgccagatattcagtactcgatctcaattcccctcttccacaagagttgggtgaccagctgtcctagtttgcccaggactctccctgttttagcactgaaagtctcttgccccaggaaaccccatcagtcccaggcagattgggacagctggtcaccttacgcaagagccaggctgaaacatcccctccatactcagctctttaacttttcttttcctttttcatcgggctctttcctaaaaagctgagctgtaaaatattttacatcgaggtataataaataatcatgtacatgttttaccaccacccaggtcaagacatagaatgtttcaacatttccatcaccccagaaactccccttgtacccccttccacttcgtctcccctagctcctagaagcaaccactgatgtgatttctaccaaatccagttttggtcctactaaatatactcttttgagactggcctcttttactcaccataatgcctttgtaattcatccatgctgttgtgtgtatcagcagtttgttccttttcattgctgagtagtattctattgtagagatgtaccacagtttgtttattcttctgttgatggacgtttgggttgtttctaattttgaatgattataaataaaaattctgtgagtgttcttgtacgt

SEQ ID NO: 280479 - DNA, 560 bp, Homo sapiens
ggctctctccctgctgctccaggccagaatcattctacaaaacaaatcatgagatcctattaattcattttgtgccttgccccctgcctggtaccaggagccactccctacctctaccccatgctctgcccagggagttgttctcctggctgcaaagacaaggggagaacagccccatttctttttctcagctcccacccccagggactggggccccctgccccagaagccccagagctgggaggccctggactgaagaagaggtttggcaaaaagtgagtgtctcccaaatccctgggcccaaagagacatggagagaagtcttagggtccctaggccccacccacatatccttgacatataagcgaccatcctgagtctcattccatttgttcctgacctgactgagaggttacagtgttgaatgacttttcatcctcttccagcctctgcaccccattcttcaggcaagggtcctggctcaacaggatgatagtaaggggtctcctggctcctgcctgctttgggcacagccttgaggcctgtgctgggatcaggaa

SEQ ID NO: 280480 - DNA, 5897 bp, Homo sapiens
ttcctggttctgcgggttggcgctgagtttggaagtcgcgcgggaccccttttatagcagcgtgggcgacgtgccacacgggtgtcccagcccaggggctggtctgagctggaagaggttgtgcaaataagggccccacctccacggcaggagggtgagccctaggtccagatgctcacactggcgcaggtctgtcctgagccgacacctgcacagtggcgagaccaaggacccagagagaaaggtgagagtgcagccggggaggctgaggatcggcggagctggaagagtgagggtgaaggcaagaagtagagcacagaagcaaagattttaagaggaaagaagacatctgaacccaacaccaccctaaaccacaggctgcagggttggcatgctccgtgcaagaccagaggcactgatgctcctgggagctcttctgactggatccctgggtccatcgggcagtcaggacgcactctcactgccctgggaagtgcagcgctatgacggctggtttaacaacctgaggcaccacgagcgtggtgctgttggctgccggttgcagcgccgcgtaccagccaattacgccgacggtgtgtatcaggctctggaggagccgcagctgcccaacccgcgccggctcagcaacgcagccacgcggggcatagccggcctgccgtcgctccacaaccgcaccgtactgggggtcttctttggctaccatgttctttccgacgtggtgagcgtggaaacgcccggttgccccgccgagttcctcaacatccgcatcccacctggagaccccgtgttcgaccccgaccagcgcggggacgtggtgctgcccttccagaggagccgctgggaccccgagaccggacggagtcccagcaacccccgggacctggccaaccaggtgacgggctggctggacggcagcgccatctatggctcctcgcactcctggagcgacgcgctgcggagcttctcggggggacagctggcgtcggggcccgaccccgctttcccccgagactcgcagaaccccctgctcatgtgggcggcgcccgaccccgccaccgggcagaacgggccccgggggctgtacgccttcggggcagagagagggaaccgggaacccttcctgcaggcgctgggcctgctctggttccgctaccacaacctgtgggcgcagaggctggcccgccagcacccagactgggaggacgaggagctgttccagcacgcacgcaagagggtcatcgccacctaccagaacatcgctgtgtatgagtggctgcccagcttcctgcagaaaacactcccggagtatacaggataccgtcctttcctagaccccagcatctccccggaatttgtggtggcctctgagcagttcttctctaccatggtgccccctggtgtctacatgagaaatgccagctgtcatttccggaaggtcctgaacaagggttttcaaagctcccaagctctcagggtctgcaacaactactggattcgggagaaccccaatctgaacagtacccaggaggtgaatgagctgctgctgggaatggcctcccagatttcggagttggaggacaacatagtggttgaagatctgagggattactggcctggccctggcaaattctcccgtacagactatgtggccagcagcatccaacgtggccgagatatggggctgcccagctatagccaggccctgctggcctttgggctggacatcccaaggaactggagtgatctcaaccctaatgtggacccccaggtgctggaggccacagctgccctgtacaaccaggacctatcccagctagagctgctccttggcgggctcctggagagccatggggaccctggacccctgttcagtgccattgtcctcgaccagtttgtacggctgcgggatggtgaccgctactggtttgagaacaccaggaatgggctgttctccaagaaggagattgaagacatccgaaataccaccctgcgggacgtgctggtcgctgttatcaacattgaccccagtgccctgcagcccaatgtctttgtctggcataaaggtgcaccctgccctcaacctaagcagctcacaactgacggcctgccccagtgtgcacccctgactgtgcttgacttctttgaaggcagcagccctggttttgccatcaccatcattgctctctgctgccttcccttagtgagtctgcttctctctggagtggtggcctatttccggggccgagaacacaagaagctacaaaagaaactcaaagagagcgtgaagaaggaagcagccaaagatggagtgccagcgatggagtggccaggccccaaggagaggagcagtcccatcatcatccagctgctgtcagacaggtgtctgcaggtcctgaacaggcatctcactgtgctccgtgtggtccagctgcagcctctgcagcaggtcaacctcatcctgtccaacaaccgaggatgccgcaccctgctgctcaagatccctaaggagtatgacctggtgctgctgtttagttctgaagaggaacggggcgcctttgtgcagcagctatgggacttctgcgtgcgctgggctctgggcctccatgtggctgagatgagcgagaaggagctatttaggaaggctgtgacaaagcagcagcgggaacgcatcctggagatcttcttcagacacctttttgctcaggtgctggacatcaaccaggccgacgcagggaccctgcccctggactcctcccagaaggtgcgggaggccctgacctgcgagctgagcagggccgagtttgccgagtccctgggcctcaagccccaggacatgtttgtggagtccatgttctctctggctgacaaggatggcaatggctacctgtccttccgagagttcctggacatcctggtggtcttcatgaaaggctccccagaggataagtcccgtctaatgtttaccatgtatgacctggatgagaatggcttcctctccaaggacgaattcttcaccatgatgcgatccttcatcgagatctccaacaactgcctgtccaaggcccagctggccgaggtggtggagtctatgttccgggagtcgggattccaggacaaggaggagctgacatgggaggattttcacttcatgctgcgggaccatgacagcgagctccgcttcacgcagctctgtgtcaaaggtggaggtggaggtggaaatggtattagagatatctttaaacaaaacatcagctgtcgagtctcgttcatcactcggacacctggggagcgctcccacccccagggactggggccccctgccccagaagccccagagctgggaggccctggactgaagaagaggtttggcaaaaaggcagcagtgcccactccccggctgtacacagaggcgctgcaagagaagatgcagcgaggcttcctagcccaaaagctgcagcagtacaagcgcttcgtggagaactaccggaggcacatcgtgtgtgtggcaatcttctcggccatctgtgttggcgtgtttgcagatcgtgcttactactatggctttgccttgccaccctcggacattgcacagaccaccctcgtgggcatcatcctgtcacgaggcacggcggccagcgtctccttcatgttctcttatatcttgctcaccatgtgccgcaacctcataaccttcctgcgagagactttcctcaaccgctatgtgccttttgatgccgcagtggacttccaccgctggatcgccatggctgctgttgtcctggccattttgcacagtgctggccacgcagtcaatgtctacatcttctcagtcagcccactcagcctgctggcctgcatattccccaacgtctttgtgaatgatgggtccaagcttccccagaagttctattggtggttcttccagaccgtcccaggtatgacaggtgtgcttctgctcctggtcctggccatcatgtatgtcttcgcctcccaccacttccgccgccgcagcttccggggcttctggctgacccaccacctctacatcctgctctatgccctgctcatcatccatggcagctatgctctgatccagctgcccactttccacatctacttcctggtcccggcaatcatctatggaggtgacaagctggtgagcctgagccggaagaaggtggagatcagcgtggtgaaggcggagctgctgccctcaggagtgacctacctgcaattccagaggccccaaggctttgagtacaagtcaggacagtgggtgcggatcgcctgcctggctctggggaccaccgagtaccaccccttcacactgacctccgcgccccatgaggacacactcagcctgcacatccgggcagtggggccctggaccactcgcctcagggagatctactcatccccaaagggcaatggctgtgctggatacccaaagctgtaccttgatggaccgtttggagagggccatcaggagtggcataaatttgaggtgtcagtgttggtgggagggggcattggggtcaccccctttgcctccatcctcaaagacctggtcttcaagtcatccttgggcagccaaatgctgtgtaagaagatctacttcatctgggtgacacggacccagcgtcagtttgagtggctggctgacatcatccaagaggtggaggagaacgaccaccaggacctggtgtctgtgcacatttatgtcacccagctggctgagaagttcgacctcaggaccaccatgctatacatctgcgagcggcacttccagaaagtgctgaaccggagtctgttcacgggcctgcgctccatcacccactttggccgtccccccttcgagcccttcttcaactccctgcaggaggtccacccacaggtgcgcaagatcggggtgttcagctgcggccctccaggaatgaccaagaatgtagagaaggcctgtcagctcgtcaacaggcaggaccgagcccacttcatgcaccactatgagaacttctgagcctgtcctccctggctgctgcttccagtatcctgccttctcttctgtgcacctaagttgcccagccctgctggcaatctctccatcagaatccaccttaggcctcagctggagggctgcagagcccctcccaatattgggagaatattgacccagacaattatacaaatgagaaaaggcaggagactatgttctacaattgcagtgcatgatgattataagtccacctgtttatcaacggcaccattcctgcagccctccagacttcctgcccttagcaagtgcgcaaccagtcaggatctcccaaagaagataaagaccactcctcaccccagctcaagccatggcaggcgtggcaagcaaagtggggaggagacagtccctccatactcagctctttaacttttcttttcctttttcatcgggctctttcctaaaaagctgagctgtaaaatattttacatcgaggtataataaataatcatgtacatgttttaccaccacccaggtcaagacatagaatgtttcaacatttccatcaccccagaaactccccttgtacccccttccacttcgtctcccctagctcctagaagcaaccactgatgtgatttctaccaaatccagttttggtcctactaaatatactcttttgagactggcctcttttactcaccataatgcctttgtaattcatccatgctgttgtgtgtatcagcagtttgttccttttcattgctgagtagtattctattgtagagatgtaccacagtttgtttattcttctgttgatggacgtttgggttgtttctaattttgaatgattataaataaaaattctgtgagtgttcttgtacgt

SEQ ID NO: 280481 - DNA, 584 bp, Homo sapiens
ccccaaggctttgagtacaagtcaggacagtgggtgcggatcgcctgcctggctctggggaccaccgagtaccaccccttcacactgacctccgcgccccatgaggacacactcagcctgcacatccgggcagtggggccctggaccactcgcctcagggagatctactcatccccaaagggcaatggctgtgctggatacccaaaggtgcccgtcactgggaaccctgcttccgggcctctggcactggcagaggatctctgcccttccctatcctgagactagaagctccagccgtcccaaagccagcctgggagaggaccggggtgcctcagaaaagactaggatgttctgtatcctccctctgcctgtgtctccgtttctggtctcagagctggggcagggtcaggctcatttcatctcccccctctcttggcagctgtaccttgatggaccgtttggagagggccatcaggagtggcataaatttgaggtgtcagtgttggtgggagggggcattggggtcaccccctttgcctccatcctcaaagacctggtcttcaagtcatccttgggcagccaaa

SEQ ID NO: 280482 - DNA, 1440 bp, Homo sapiens
tgctaggacagccgcggacggcccgcctccccgtgccccgggcctcgaggccaataaaaagctcgcccctccagctcaccgggtccgacgggtacggtacaaagtgctgtctctcgccacagccacctttgtgacaataaaagcaataaggctaatgtccatggggcgctcacggtgagctttagctttatgataaagattggcctgttacctcgtttaatcttcacaactgccccatcaactatgtactcttactgtccccagtttatgcatgaacagagaaagctgagatacggagactagtgatccgtcgaggtaataaacggcacaggtggggtttgaactccatcagtttgattgcagaggcctggaacaaccctacagccttctctcagatcttttctggacctttttctatgcgctttgcacctaggacgtgaggctgccaagcttggtattcaataaatattgatggatgaaggaacaatggaagaaaggagtgcatgggtaaacaaatgacaaatatgtcaaagcacggatgcagattcttagaatgggctaatgctgttttctgctggatttttggatgtgtacaaacgagttctctcacaatacagatccacagtgcctgggtcagaggagaactgatgctccgcatggcattttaccatcccgcctgcctgcctggggccctgggcccacaggctttggggagagtgtatggccaggctgcagccttcctgggataaagctctgccttttagtctcttatcctactttttagaagccctttaaggtctttgttaaaggaaatctaatgtgaagaattccaggagaactggataagcctgactatgggtgggcgtgactgaattacttcccgggctggctaaggaaggcctcccccgaagtgcatcggaagcctgcagcttctccttatggccactggagggcacttggaccatgaaataccagatcgtctcggcgtcccaggtctttggaaatgtgtgattcaattcagcaaacgtttcaaaatcatcactataaagatagcgcttttgtgttgaacatccaatatggcgctaaacaccttatatatatgtgtgcgtgtatatatgaacttgcttaatattaactacaattgttgtgagttacttaggctatttaggaaaaaaaaatcaaggcttaaagaagtcaaagtacttacccaagattgcttagctaaataaaatttgggagtaaggacttgaactcaagcccttgggcaccaaccataagcaataggtgcacacaaagctgaaatgaggactctcttataagcaggaagacgcacacaccacacaaatattattgttcctcaacaatttacacattctgaaattggaagatgacttacaatttgtacattacatggtaatgtttcttttttcccttgaaatg

SEQ ID NO: 280483 - DNA, 837 bp, Homo sapiens
cagggcatgcatgccacgcggactgtgacagtgagctcttccaggcccccagtgagcctgagagggggtctgggaagagtcaagagacacccagacagtgccatgtggcagtgaagcctctggtcccaatctgccagggtgcaaagccccaggactgctggtgggatgttggcactaccccgttttccttttccagctacaacagaatggcagagaggaaaggaccctccgggatcttccagttcagccagcccattttacagaggtggagactgaggccagaggcttgtcccaggaggctccatatgacgcagcaatcctcacccctctggcatcaacatttcttccaaccccaggagaggaaggtgtaacttgagtctctgcctaactcttgaggctgcagagatgtgtcctcccacagaggagatgaaaccaccaaggagctgtggacaagcggactcaggaaagctgtgagaaggcagacgaatgtgcggaggccagcgcccgggggcctccagtctggtgcctaaggtctgtgaacaagactgctgccggggcctcggtggggagatgcgcacagtgggcatctggggccacctccctgaaggcactggccaagccccgccccagcatccctcgctcactggatggtgcacttgtccctctcacgggcctggccttcccgaaggaccttggccttgatgtacttgaggtcactgttgacgctggggcggcgggcgaagggcgagaccatgccataggcgtccatctccttgacgcggcgcatgcagaagggcctggggtggaaggcgtcaccgtactgcacggagatcttgc

SEQ ID NO: 280484 - DNA, 1719 bp, Homo sapiens
tgaccggcccagcccacgtgactacaggggcacttgatgggaatcatggcagcatccaggccattgtcccgcttctgggagtggggaaagaacatcgtctgcgtggggaggaactacgcggaccacgtcagggagatgcgcagcgcggtgttgagcgagcccgtgctgttcctgaagccgtccacggcctacgcgcccgagggctcgcccatcctcatgcccgcgtacactcgcaacctgcaccacgagctggagctgggcgtggtgatgggcaagcgctgccgcgcagtccccgaggctgcggccatggactacgtgggcggctatgccctgtgcctggatatgaccgcccgggacgtgcaggacgagtgcaagaagaaggggctgccctggactctggcgaagagcttcacggcgtcctgcccggtcagcgcgttcgtgcccaaggagaagatccctgaccctcacaagctgaagctctggctcaaggtcaacggcgaactcagacaggagggtgagacatcctccatgattttttccatcccctacatcatcagctatgtttctaagatcataaccttggaagaaggagatattatcttgactgggacgccaaagggagttggaccggttaaagaaaacgatgagatcgaggctggcatacacgggctggtcagtatgacatttaaagtggaaaagccagaatattgagttatttcttaacaagtttcgagagagaagggagcaagacaagagcaagcaacggctattaaatgtcacaatcctttaattagaaaccatttattggccggacgcggtggctcacgcctgtaatcgcagcactttgggaggccgaggcgggcggctcacgacgtcaggagatccagaccatcttggctaacagggtgaaaccccgtctctactaaaaatacaaaaaattagccgggcgtggtggcgggcgcctgtagtcccagctactctggaggctgaggcaggagaatcaattgaacccgggaggcggagcttacagtgagctgagattgcgccactgtactcctgggcaacagcgagactccgtctcaaaaaaaaaaaaaaaaaaaaagaaaccatttattttaaaaatgattagattgctatgcctcaactcatagaagatgaacccttcaagaaaacgtgaagtagaacgggtgggccagaaatgaaaacaggcaagtaaagtatttcttcggaaaacattttatcaaaccaaatgttaaaaagactttccttttgtaaaactggattagagaagacttttcagtgggttatctctaggatgatcagtagttcagcacttaaaaactgcagagaaaactgaaagttatgttccagataactttccgttgtttaccaaattttcttagatttggtcatcatcaggaagcatttgtaaaaataaaaatctccacaaattactggcccatctcggacttgctgaatcaatttgataggattaatctccagtgaagctgtgtttacagggcattccaagtgattcttatcaggaaatgtgaaaaacactcctgtacataatcggttaatttaaaattttacttaataagtgaacaagtaatgaagatttcacctgtttacttagggtatctacccagacccatcgattctgagttcgggagatgattttgaaattactgttttccaaataaaggtgctcccttctaa

SEQ ID NO: 280485 - DNA, 311 bp, Homo sapiens
  misc_feature (41)..(41): n is a, c, g, or t
gctgtgtttacaggagattaatcctatcaaattgattcagnaagtccgagatgggccagtaattgctgaatcaatttgataggattaatctccagtgaagctgtgtttacagggcattccaagtgattcttatcaggaaatgtgaaaaacactcctgtacataatcggttaatttaaaattttacttaataagtgaacaagtaatgaagatttcacctgtttacttagggtatctacccagacccatcgattctgagttcgggagatgattttgaaattactgttttccaaataaaggtgctcccttctaa

SEQ ID NO: 280486 - DNA, 1882 bp, Homo sapiens
  misc_feature (1731)..(1731): n is a, c, g, or t
tgaccggcccagcccacgtgactacaggggcacttgatgggaatcatggcagcatccaggccattgtcccgcttctgggagtggggaaagaacatcgtctgcgtggggaggaactacgcggaccacgtcagggagatgcgcagcgcggtgttgagcgagcccgtgctgttcctgaagccgtccacggcctacgcgcccgagggctcgcccatcctcatgcccgcgtacactcgcaacctgcaccacgagctggagctgggcgtggtgatgggcaagcgctgccgcgcagtccccgaggctgcggccatggactacgtgggcggctatgccctgtgcctggatatgaccgcccgggacgtgcaggacgagtgcaagaagaaggggctgccctggactctggcgaagagcttcacggcgtcctgcccggtcagcgcgttcgtgcccaaggagaagatccctgaccctcacaagctgaagctctggctcaaggtcaacggcgaactcagacaggagggtgagacatcctccatgattttttccatcccctacatcatcagctatgtttctaagatcataaccttggaagaaggagatattatcttgactgggacgccaaagggagttggaccggttaaagaaaacgatgagatcgaggctggcatacacgggctggtcagtatgacatttaaagtggaaaagccagaatattgagttatttcttaacaagtttcgagagagaagggagcaagacaagagcaagcaacggctattaaatgtcacaatcctttaattagaaaccatttattggccggacgcggtggctcacgcctgtaatcgcagcactttgggaggccgaggcgggcggctcacgacgtcaggagatccagaccatcttggctaacagggtgaaaccccgtctctactaaaaatacaaaaaattagccgggcgtggtggcgggcgcctgtagtcccagctactctggaggctgaggcaggagaatcaattgaacccgggaggcggagcttacagtgagctgagattgcgccactgtactcctgggcaacagcgagactccgtctcaaaaaaaaaaaaaaaaaaaaagaaaccatttattttaaaaatgattagattgctatgcctcaactcatagaagatgaacccttcaagaaaacgtgaagtagaacgggtgggccagaaatgaaaacaggcaagtaaagtatttcttcggaaaacattttatcaaaccaaatgttaaaaagactttccttttgtaaaactggattagagaagacttttcagtgggttatctctaggatgatcagtagttcagcacttaaaaactgcagagaaaactgaaagttatgttccagataactttccgttgtttaccaaattttcttagatttggtcatcatcaggaagcatttgtaaaaataaaaatctccacaaattactggcccatctcggacttgctgaatcaatttgataggattaatctccagtgaagctgtgtttacagggcattccaagtgattcttatcaggaaatgtgaaaaacactcctgtacataatcggttaatttaaaattttacttaataagtgaacaagtaatgaagatttcacctgtttacttagggtatctacccagacccatcgattctgagttcgggagatgattttgaaattactgttttccaaataaaggtgctcccttctaaaaaaaaaaaaanaaaaaaaaaaaaaaaattttttgggggggatgggcctcgggaaaaatttttttaaaaaactttgtttgggggggggggccacttatgggttatggaaaattgggcaaaaagggtgttctaaggaaaactcggggcataaaaagggggtgga

SEQ ID NO: 280487 - DNA, 1196 bp, Homo sapiens
caggcggtccacatgattgtcacgctccgatcagctatgtttctaagatcataaccttggaagaaggagatattatcttgactgggacgccaaagggagttggaccggttaaagaaaacgatgagatcgaggctggcatacacgggctggtcagtatgacatttaaagtggaaaagccagaatattgagttatttcttaacaagtttcgagagagaagggagcaagacaagagcaagcaacggctattaaatgtcacaatcctttaattagaaaccatttattggccggacgcggtggctcacgcctgtaatcgcagcactttgggaggccgaggcgggcggctcacgacgtcaggagatccagaccatcttggctaacagggtgaaaccccgtctctactaaaaatacaaaaaattagccgggcgtggtggcgggcgcctgtagtcccagctactctggaggctgaggcaggagaatcaattgaacccgggaggcggagcttacagtgagctgagattgcgccactgtactcctgggcaacagcgagactccgtctcaaaaaaaaaaaaaaaaaaaaagaaaccatttattttaaaaatgattagattgctatgcctcaactcatagaagatgaacccttcaagaaaacgtgaagtagaacgggtgggccagaaatgaaaacaggcaagtaaagtatttcttcggaaaacattttatcaaaccaaatgttaaaaagactttccttttgtaaaactggattagagaagacttttcagtgggttatctctaggatgatcagtagttcagcacttaaaaactgcagagaaaactgaaagttatgttccagataactttccgttgtttaccaaattttcttagatttggtcatcatcaggaagcatttgtaaaaataaaaatctccacaaattactggcccatctcggacttgctgaatcaatttgataggattaatctccagtgaagctgtgtttacagggcattccaagtgattcttatcaggaaatgtgaaaaacactcctgtacataatcggttaatttaaaattttacttaataagtgaacaagtaatgaagatttcacctgtttacttagggtatctacccagacccatcgattctgagttcgggagatgattttgaaattactgttttccaaataaaggtgctcccttctaa

SEQ ID NO: 280488 - DNA, 2214 bp, Homo sapiens
  misc_feature (1731)..(1731): n is a, c, g, or t
tgaccggcccagcccacgtgactacaggggcacttgatgggaatcatggcagcatccaggccattgtcccgcttctgggagtggggaaagaacatcgtctgcgtggggaggaactacgcggaccacgtcagggagatgcgcagcgcggtgttgagcgagcccgtgctgttcctgaagccgtccacggcctacgcgcccgagggctcgcccatcctcatgcccgcgtacactcgcaacctgcaccacgagctggagctgggcgtggtgatgggcaagcgctgccgcgcagtccccgaggctgcggccatggactacgtgggcggctatgccctgtgcctggatatgaccgcccgggacgtgcaggacgagtgcaagaagaaggggctgccctggactctggcgaagagcttcacggcgtcctgcccggtcagcgcgttcgtgcccaaggagaagatccctgaccctcacaagctgaagctctggctcaaggtcaacggcgaactcagacaggagggtgagacatcctccatgattttttccatcccctacatcatcagctatgtttctaagatcataaccttggaagaaggagatattatcttgactgggacgccaaagggagttggaccggttaaagaaaacgatgagatcgaggctggcatacacgggctggtcagtatgacatttaaagtggaaaagccagaatattgagttatttcttaacaagtttcgagagagaagggagcaagacaagagcaagcaacggctattaaatgtcacaatcctttaattagaaaccatttattggccggacgcggtggctcacgcctgtaatcgcagcactttgggaggccgaggcgggcggctcacgacgtcaggagatccagaccatcttggctaacagggtgaaaccccgtctctactaaaaatacaaaaaattagccgggcgtggtggcgggcgcctgtagtcccagctactctggaggctgaggcaggagaatcaattgaacccgggaggcggagcttacagtgagctgagattgcgccactgtactcctgggcaacagcgagactccgtctcaaaaaaaaaaaaaaaaaaaaagaaaccatttattttaaaaatgattagattgctatgcctcaactcatagaagatgaacccttcaagaaaacgtgaagtagaacgggtgggccagaaatgaaaacaggcaagtaaagtatttcttcggaaaacattttatcaaaccaaatgttaaaaagactttccttttgtaaaactggattagagaagacttttcagtgggttatctctaggatgatcagtagttcagcacttaaaaactgcagagaaaactgaaagttatgttccagataactttccgttgtttaccaaattttcttagatttggtcatcatcaggaagcatttgtaaaaataaaaatctccacaaattactggcccatctcggacttgctgaatcaatttgataggattaatctccagtgaagctgtgtttacagggcattccaagtgattcttatcaggaaatgtgaaaaacactcctgtacataatcggttaatttaaaattttacttaataagtgaacaagtaatgaagatttcacctgtttacttagggtatctacccagacccatcgattctgagttcgggagatgattttgaaattactgttttccaaataaaggtgctcccttctaaaaaaaaaaaaanaaaaaaaaaaaaaaaaaaaaaaaaaaaaaaaaaaaaaaaaaaaaaaaaaaaaaaaaaaaaaaaaaaaaaaaggcaggcgaacaaaacaaaagaaaaacaaaagagaggggccgccggccacagcactgcccccaccgcgtagaccacggacacgacgccgcacccaccactggccctgctatactaaatcacgcaccccttagcggatatgattctacaaaaacaccatctattgagcgagcaaacgcacgtactaaccccagacactcccgttggtgaaacaaaggacactccttcatagtcctagctcgttcaataacctagtctcacacacatctctccgacgcagattatacacgacgaccacacacaatatcaaacataactcgacccggcgcactaggtataacaaccacctcatattcgtgccgtgtgacacaagctcgtctagtctgacttcatcaacaatccatcgtcgagcta

SEQ ID NO: 280489 - DNA, 515 bp, Homo sapiens
ctcgagccgccacgacggcccgagccggcacggacggccccaggagattcgtcacggaaacctcgccccaccaaggcggcccctaaagacaaaacggcccgcccgaggcttataggtggaagggacttgccttgtctcaggtgatgtctgatgaccctgacctgtcttcaggaaaaatcctgttagatcaggtccctgctgaagatgaggaggaagaattactggtgaaaacctgaagtttgaaaaagtaaatccaaattgctcttttgtctagtgttttgggaaacaaggaagagggaatgaaatctctgttttaaaattttattatttctgttattgcacattcacaattcactatatttcatgcattctttaaagatctaatttttttaattggatattgaatatctacaatgtgataactataaaacacctgtaaaacttaaataacaataccatgatacctatatattcaatatctagtttaagcataggctattattaccataacttcg

SEQ ID NO: 280490 - DNA, 2984 bp, Homo sapiens
ctctgtgaaggctgagtcctggggaaccgggaccgagaagatttcgaaggtggaggagcgtgtctcaagattggggctacctgttctttcgtggggcagggaaggggcggacagcagcgcctattctggaggaactggactgagatgtgaccccgaagtgttaccgcttccaaacgaaatgagggtcacctttcacaccgcccccccccccggggttggaaaagccaccgatcgttccagctgccgagcagctcttaaagctttggattcggctgtcgtggagataacgggcaccagaaaaacttgtaggagtagcaacagctatttggtcggatggaggccagaagccaagaataatcgaaacacgctgccagcgcccattagatggatgggaaatgagtgtaactcattgggaaagatattagacttcaaatcacctaaggcaaaccctacttcctggggcgcgggcgcgggcgctggcgttaggagacgtcactcccgcgcataactgacatggggccctcttggtcggcgtttccgggcgggtccttccgacggccgccgcggtgattccatcactcggctttcttcccggcctgcctcgcgcccgtagccgggctgggccagaacagcccaagatggccgacttcgatgatcgtgtgtcggatgaggagaaggtacgcatagctgctaaattcatcactcatgcacccccaggggaatttaatgaagtattcaatgacgttcggctactacttaataatgacaatctcctcagggaaggggcagcacatgcatttgcccagtataacatggatcagttcacgcctgtgaagatagaaggatatgaagatcaggtcttaattacagagcacggtgacctgggtaatagcagatttttagatccaagaaacaaaatttcctttaaatttgaccacttacggaaagaagcaagtgacccccagccagaagaagcagatggaggtctgaagtcttggagagaatcctgtgacagtgctttaagagcctatgtgaaagaccattattccaacggcttctgtactgtttatgctaaaactatcgatgggcaacagactattattgcatgtattgaaagccaccagtttcagcctaaaaacttctggaatggtcgttggagatcagagtggaagttcaccatcacaccacctacagcccaggtggttggcgtgcttaagattcaggttcactattatgaagatggcaatgttcagttggttagtcataaagatgtacaggattcactaactgtttcgaatgaagcccaaactgccaaggagtttattaaaatcatagagaatgcagaaaatgagtatcagacagcaattagtgaaaactatcaaacaatgtcagataccacattcaaggccttgcgccggcagcttccagttacccgcaccaaaatcgactggaacaagatactcagctacaagattggcaaagaaatgcagaatgcttaaaggctgaatgtaggattcttcagtatgtggaaagacaaggattcaacgtgtggtcatatgataaataagtgatttataaacaagagtgatattttgctagggctttcaaagttaaccggttttctagcctcatggaatactgttgaacctatagcgttgtcttgattcttttgtgttctctgccttgtaattttctgttactgctatatctacgtgtaaatcttttttttctttttttttttttttttttggttaattctgccacatttaatgttggtgagagagtgatctatcctaatgacattttactgtttaaaaaagtttcctagccatgaagccctgctactgatttagacaaggtattatggtcattactttgtacccctatccttccaagcacttctggtacttcagtcgtttttactgatccaccaacacctaaagaggctatgctacagtctctagctaaatggaagacacattcatccttctccctctgactgctttgatcatcatttattgcatctcataactaattttctaaagtttggattgggacttttcaggtcctttttggagggcaaaggaagtgccagcttctctggggaacttgtttttaaatccaaagacttgaaccacattccctgcacatgaacatgtttgcttttatcccttctctcattgtctccttcccatcttagtaccattgtagttataaacatctgcattttttagaagcattttacccatttatttttttaaacattcaagaactgctgacgtactgtggatgtagagtataaaacttgaaaaatgcagatgttgaaggaataataggtatcttgtgctttaatactttatggcaggattgtactataagcaaatgaattaaacagctatgtaaatcataaagaaaaactaaaaatgaaccaaagtgaaaggataacttccaggcagtatctttctattgtaacctgttatttaaggaaatactagtgatttcttctaaataggatgtaaaacttctttcaaattactcttcctcagtcctgcctgccaagaactcaagtgtaactgtgataaaataacctttcccaggtatattggcaggtatgtgtgtaatctcagaatacacaggtgacatagatatgatatgacaactggtaatggtggattcatttacattgtttacacttctatgaccaggccttaagggaaggtcagttttttaaaaaaccaagtagtgtcttcctacctatctccagatacatgtcaaaaaaagaaaggtgtttgtgcttccgttttgtttctgctcagtaatatagtcaagcaagtttgttccaagtgacccattgagctgtgtatgcatttttgtttatttcaataaaatatatttgtattatttgtccttcatactatccatccataccacactatcttctgtatcaggtagtctaatagaaatatacctgttttgttctaaaa

SEQ ID NO: 280491 - DNA, 866 bp, Homo sapiens
tttttttaataatacaaatatattttatgaaataaacaaaaatgcatacaagtgccagcttctctggggaacttgtttttaaatccaaagacttgaaccacattccctgcacatgaacatgtttgcttttatcccttctctcattgtctccttcccatcttagtaccattgtagttataaacatctgcattttttagaagcattttacccatttatttttttaaacattcaagaactgctgacgtactgtggatgtagagtataaaacttgaaaaatgcagatgttgaaggaataataggtatcttgtgctttaatactttatggcaggattgtactataagcaaatgaattaaacagctatgtaaatcataaagaaaaactaaaaatgaaccaaagtgaaaggataacttccaggcagtatctttctattgtaacctgttatttaaggaaatactagtgatttcttctaaataggatgtaaaacttctttcaaattactcttcctcagtcctgcctgccaagaactcaagtgtaactgtgataaaataacctttcccaggtatattggcaggtatgtgtgtaatctcagaatacacaggtgacatagatatgatatgacaactggtaatggtggattcatttacattgtttacacttctatgaccaggccttaagggaaggtcagttttttaaaaaaccaagtagtgtcttcctacctatctccagatacatgtcaaaaaaagaaaggtgtttgtgcttccgttttgtttctgctcagtaatatagtcaagcaagtttgttccaagtgacccattgagctgtgtatgcatttttgtttatttcaataaaatatatttgtattatt

SEQ ID NO: 280492 - DNA, 578 bp, Homo sapiens
gagagagagagttagagagagagagagagagagagagagagagagagagagagagagagagagagagagagagagagagaactagttctctcctaaaaatgaaccaaagtgaaaggataacttccaggcagtatctttctattgtaacctgttatttaaggaaatactagtgatttcttctaaataggatgtaaaacttctttcaaattactcttcctcagtcctgcctgccaagaactcaagtgtaactgtgataaaataacctttcccaggtatattggcaggtatgtgtgtaatctcagaatacacaggtgacatagatatgatatgacaactggtaatggtggattcatttacattgtttacacttctatgaccaggccttaagggaaggtcagttttttaaaaaaccaagtagtgtcttcctacctatctccagatacatgtcaaaaaaagaaaggtgtttgtgcttccgttttgtttctgctcagtaatatagtcaagcaagtttgttccaagtgacccattgagctgtgtatgcatttttgtttatttcaataaaatatatttgtattatt

SEQ ID NO: 280493 - DNA, 2413 bp, Homo sapiens
cttatgttctcgagtcgttatcggaattaaccagacaaatcgctccaccaactaagaacagcccaagatggccgacttcgatgatcgtgtgtcggatgaggagaaggtacgcatagctgctaaattcatcactcatgcacccccaggggaatttaatgaagtattcaatgacgttcggctactacttaataatgacaatctcctcagggaaggggcagcacatgcatttgcccagtataacatggatcagttcacgcctgtgaagatagaaggatatgaagatcaggtcttaattacagagcacggtgacctgggtaatagcagatttttagatccaagaaacaaaatttcctttaaatttgaccacttacggaaagaagcaagtgacccccagccagaagaagcagatggaggtctgaagtcttggagagaatcctgtgacagtgctttaagagcctatgtgaaagaccattattccaacggcttctgtactgtttatgctaaaactatcgatgggcaacagactattattgcatgtattgaaagccaccagtttcagcctaaaaacttctggaatggtcgttggagatcagagtggaagttcaccatcacaccacctacagcccaggtggttggcgtgcttaagattcaggttcactattatgaagatggcaatgttcagttggttagtcataaagatgtacaggattcactaactgtttcgaatgaagcccaaactgccaaggagtttattaaaatcatagagaatgcagaaaatgagtatcagacagcaattagtgaaaactatcaaacaatgtcagataccacattcaaggccttgcgccggcagcttccagttacccgcaccaaaatcgactggaacaagatactcagctacaagattggcaaagaaatgcagaatgcttaaaggctgaatgtaggattcttcagtatgtggaaagacaaggattcaacgtgtggtcatatgataaataagtgatttataaacaagagtgatattttgctagggctttcaaagttaaccggttttctagcctcatggaatactgttgaacctatagcgttgtcttgattcttttgtgttctctgccttgtaattttctgttactgctatatctacgtgtaaatcttttttttctttttttttttttttttttggttaattctgccacatttaatgttggtgagagagtgatctatcctaatgacattttactgtttaaaaaagtttcctagccatgaagccctgctactgatttagacaaggtattatggtcattactttgtacccctatccttccaagcacttctggtacttcagtcgtttttactgatccaccaacacctaaagaggctatgctacagtctctagctaaatggaagacacattcatccttctccctctgactgctttgatcatcatttattgcatctcataactaattttctaaagtttggattgggacttttcaggtcctttttggagggcaaaggaagtgccagcttctctggggaacttgtttttaaatccaaagacttgaaccacattccctgcacatgaacatgtttgcttttatcccttctctcattgtctccttcccatcttagtaccattgtagttataaacatctgcattttttagaagcattttacccatttatttttttaaacattcaagaactgctgacgtactgtggatgtagagtataaaacttgaaaaatgcagatgttgaaggaataataggtatcttgtgctttaatactttatggcaggattgtactataagcaaatgaattaaacagctatgtaaatcataaagaaaaactaaaaatgaaccaaagtgaaaggataacttccaggcagtatctttctattgtaacctgttatttaaggaaatactagtgatttcttctaaataggatgtaaaacttctttcaaattactcttcctcagtcctgcctgccaagaactcaagtgtaactgtgataaaataacctttcccaggtatattggcaggtatgtgtgtaatctcagaatacacaggtgacatagatatgatatgacaactggtaatggtggattcatttacattgtttacacttctatgaccaggccttaagggaaggtcagttttttaaaaaaccaagtagtgtcttcctacctatctccagatacatgtcaaaaaaagaaaggtgtttgtgcttccgttttgtttctgctcagtaatatagtcaagcaagtttgttccaagtgacccattgagctgtgtatgcatttttgtttatttcaataaaatatatttgtattatttgtccttcatactatccatccataccacactatcttctgtatcaggtagtctaatagaaatatacctgttttgttctaaaa

SEQ ID NO: 280494 - DNA, 2903 bp, Homo sapiens
ctctgtgaaggctgagtcctggggaaccgggaccgagaagatttcgaaggtggaggagcgtgtctcaagattggggctacctgttctttcgtggggcagggaaggggcggacagcagcgcctattctggaggaactggactgagatgtgaccccgaagtgttaccgcttccaaacgaaatgagggtcacctttcacaccgcccccccccccggggttggaaaagccaccgatcgttccagctgccgagcagctcttaaagctttggattcggctgtcgtggagataacgggcaccagaaaaacttgtaggagtagcaacagctatttggtcggatggaggccagaagccaagaataatcgaaacacgctgccagcgcccattagatggatgggaaatgagtgtaactcattgggaaagatattagacttcaaatcacctaaggcaaaccctacttcctggggcgcgggcgcgggcgctggcgttaggagacgtcactcccgcgcataactgacatggggccctcttggtcggcgtttccgggcgggtccttccgacggccgccgcggtgattccatcactcggctttcttcccggcctgcctcgcgcccgtagccgggctgggccagaacagcccaagatggccgacttcgatgatcgtgtgtcggatgaggagaaggtacgcatagctgctaaattcatcactcatgcacccccaggggaatttaatgaagtattcaatgacgttcggctactacttaataatgacaatctcctcagggaaggggcagcacatgcatttgcccagtataacatggatcagttcacgcctgtgaagatagaaggatatgaagatcaggtcttaattacagagcacggtgacctgggtaatagcagatttttagatccaagaaacaaaatttcctttaaatttgaccacttacggaaagaagcaagtgacccccagccagaagaagcagatggaggtctgaagtcttggagagaatcctgtgacagtgctttaagagcctatgtgaaagaccattattccaacggcttctgtactgtttatgctaaaactatcgatgggcaacagactattattgcatgtattgaaagccaccagtttcagcctaaaaacttctggaatggtcgttggagatcagagtggaagttcaccatcacaccacctacagcccaggtggttggcgtgcttaagattcaggttcactattatgaagatggcaatgttcagttggttagtcataaagatgtacaggattcactaactgtttcgaatgaagcccaaactgccaaggagtttattaaaatcatagagaatgcagaaaatgagtatcagacagcaattagtgaaaactatcaaacaatgtcagataccacattcaaggccttgcgccggcagcttccagttacccgcaccaaaatcgactggaacaagatactcagctacaagattggcaaagaaatgcagaatgcttaaaggctgaatgtaggattcttcagtatgtggaaagacaaggattcaacgtgtggtcatatgataaataagtgatttataaacaagagtgatattttgctagggctttcaaagttaaccggttttctagcctcatggaatactgttgaacctatagcgttgtcttgattcttttgtgttctctgccttgtaattttctgttactgctatatctacgtgtaaatcttttttttctttttttttttttttttttggttaattctgccacatttaatgttggtgagagagtgatctatcctaatgacattttactgtttaaaaaagtttcctagccatgaagccctgctactgatttagacaaggtattatggtcattactttgtacccctatccttccaagcacttctggtacttcagtcgtttttactgatccaccaacacctaaagaggctatgctacagtctctagctaaatggaagacacattcatccttctccctctgactgctttgatcatcatttattgcatctcataactaattttctaaagtttggattgggacttttcaggtcctttttggagggcaaaggaagtgccagcttctctggggaacttgtttttaaatccaaagacttgaaccacattccctgcacatgaacatgtttgcttttatcccttctctcattgtctccttcccatcttagtaccattgtagttataaacatctgcattttttagaagcattttacccatttatttttttaaacattcaagaactgctgacgtactgtggatgtagagtataaaacttgaaaaatgcagatgttgaaggaataataggtatcttgtgctttaatactttatggcaggattgtactataagcaaatgaattaaacagctatgtaaatcataaagaaaaactaaaaatgaaccaaagtgaaaggataacttccaggcagtatctttctattgtaacctgttatttaaggaaatactagtgatttcttctaaataggatgtaaaacttctttcaaattactcttcctcagtcctgcctgccaagaactcaagtgtaactgtgataaaataacctttcccaggtatattggcaggtatgtgtgtaatctcagaatacacaggtgacatagatatgatatgacaactggtaatggtggattcatttacattgtttacacttctatgaccaggccttaagggaaggtcagttttttaaaaaaccaagtagtgtcttcctacctatctccagatacatgtcaaaaaaagaaaggtgtttgtgcttccgttttgtttctgctcagtaatatagtcaagcaagtttgttccaagtgacccattgagctgtgtatgcatttttgtttatttcaataaaatatatttgtattatt

SEQ ID NO: 280495 - DNA, 2940 bp, Homo sapiens
ctctgtgaaggctgagtcctggggaaccgggaccgagaagatttcgaaggtggaggagcgtgtctcaagattggggctacctgttctttcgtggggcagggaaggggcggacagcagcgcctattctggaggaactggactgagatgtgaccccgaagtgttaccgcttccaaacgaaatgagggtcacctttcacaccgcccccccccccggggttggaaaagccaccgatcgttccagctgccgagcagctcttaaagctttggattcggctgtcgtggagataacgggcaccagaaaaacttgtaggagtagcaacagctatttggtcggatggaggccagaagccaagaataatcgaaacacgctgccagcgcccattagatggatgggaaatgagtgtaactcattgggaaagatattagacttcaaatcacctaaggcaaaccctacttcctggggcgcgggcgcgggcgctggcgttaggagacgtcactcccgcgcataactgacatggggccctcttggtcggcgtttccgggcgggtccttccgacggccgccgcggtgattccatcactcggctttcttcccggcctgcctcgcgcccgtagccgggctgggccagaacagcccaagatggccgacttcgatgatcgtgtgtcggatgaggagaaggtacgcatagctgctaaattcatcactcatgcacccccaggggaatttaatgaagtattcaatgacgttcggctactacttaataatgacaatctcctcagggaaggggcagcacatgcatttgcccagtataacatggatcagttcacgcctgtgaagatagaaggatatgaagatcaggtcttaattacagagcacggtgacctgggtaatagcagatttttagatccaagaaacaaaatttcctttaaatttgaccacttacggaaagaagcaagtgacccccagccagaagaagcagatggaggtctgaagtcttggagagaatcctgtgacagtgctttaagagcctatgtgaaagaccattattccaacggcttctgtactgtttatgctaaaactatcgatgggcaacagactattattgcatgtattgaaagccaccagtttcagcctaaaaacttctgctacagcccaggtggttggcgtgcttaagattcaggttcactattatgaagatggcaatgttcagttggttagtcataaagatgtacaggattcactaactgtttcgaatgaagcccaaactgccaaggagtttattaaaatcatagagaatgcagaaaatgagtatcagacagcaattagtgaaaactatcaaacaatgtcagataccacattcaaggccttgcgccggcagcttccagttacccgcaccaaaatcgactggaacaagatactcagctacaagattggcaaagaaatgcagaatgcttaaaggctgaatgtaggattcttcagtatgtggaaagacaaggattcaacgtgtggtcatatgataaataagtgatttataaacaagagtgatattttgctagggctttcaaagttaaccggttttctagcctcatggaatactgttgaacctatagcgttgtcttgattcttttgtgttctctgccttgtaattttctgttactgctatatctacgtgtaaatcttttttttctttttttttttttttttttggttaattctgccacatttaatgttggtgagagagtgatctatcctaatgacattttactgtttaaaaaagtttcctagccatgaagccctgctactgatttagacaaggtattatggtcattactttgtacccctatccttccaagcacttctggtacttcagtcgtttttactgatccaccaacacctaaagaggctatgctacagtctctagctaaatggaagacacattcatccttctccctctgactgctttgatcatcatttattgcatctcataactaattttctaaagtttggattgggacttttcaggtcctttttggagggcaaaggaagtgccagcttctctggggaacttgtttttaaatccaaagacttgaaccacattccctgcacatgaacatgtttgcttttatcccttctctcattgtctccttcccatcttagtaccattgtagttataaacatctgcattttttagaagcattttacccatttatttttttaaacattcaagaactgctgacgtactgtggatgtagagtataaaacttgaaaaatgcagatgttgaaggaataataggtatcttgtgctttaatactttatggcaggattgtactataagcaaatgaattaaacagctatgtaaatcataaagaaaaactaaaaatgaaccaaagtgaaaggataacttccaggcagtatctttctattgtaacctgttatttaaggaaatactagtgatttcttctaaataggatgtaaaacttctttcaaattactcttcctcagtcctgcctgccaagaactcaagtgtaactgtgataaaataacctttcccaggtatattggcaggtatgtgtgtaatctcagaatacacaggtgacatagatatgatatgacaactggtaatggtggattcatttacattgtttacacttctatgaccaggccttaagggaaggtcagttttttaaaaaaccaagtagtgtcttcctacctatctccagatacatgtcaaaaaaagaaaggtgtttgtgcttccgttttgtttctgctcagtaatatagtcaagcaagtttgttccaagtgacccattgagctgtgtatgcatttttgtttatttcaataaaatatatttgtattatttgtccttcatactatccatccataccacactatcttctgtatcaggtagtctaatagaaatatacctgttttgttctaaaa

SEQ ID NO: 280496 - DNA, 1901 bp, Homo sapiens
  misc_feature (13)..(13): n is a, c, g, or t
  misc_feature (15)..(15): n is a, c, g, or t
  misc_feature (17)..(17): n is a, c, g, or t
  misc_feature (44)..(44): n is a, c, g, or t
  misc_feature (51)..(52): n is a, c, g, or t
  misc_feature (60)..(60): n is a, c, g, or t
ctcttgtatatcntncnataatagtctgtgcccatcgatagttntagcatnnaaacttcnggaatggtcgttggagatcagagtggaagttcaccatcacaccacctacagcccaggtggttggcgtgcttaagattcaggttcactattatgaagatggcaatgttcagttggttagtcataaagatgtacaggattcactaactgtttcgaatgaagcccaaactgccaaggagtttattaaaatcatagagaatgcagaaaatgagtatcagacagcaattagtgaaaactatcaaacaatgtcagataccacattcaaggccttgcgccggcagcttccagttacccgcaccaaaatcgactggaacaagatactcagctacaagattggcaaagaaatgcagaatgcttaaaggctgaatgtaggattcttcagtatgtggaaagacaaggattcaacgtgtggtcatatgataaataagtgatttataaacaagagtgatattttgctagggctttcaaagttaaccggttttctagcctcatggaatactgttgaacctatagcgttgtcttgattcttttgtgttctctgccttgtaattttctgttactgctatatctacgtgtaaatcttttttttctttttttttttttttttttggttaattctgccacatttaatgttggtgagagagtgatctatcctaatgacattttactgtttaaaaaagtttcctagccatgaagccctgctactgatttagacaaggtattatggtcattactttgtacccctatccttccaagcacttctggtacttcagtcgtttttactgatccaccaacacctaaagaggctatgctacagtctctagctaaatggaagacacattcatccttctccctctgactgctttgatcatcatttattgcatctcataactaattttctaaagtttggattgggacttttcaggtcctttttggagggcaaaggaagtgccagcttctctggggaacttgtttttaaatccaaagacttgaaccacattccctgcacatgaacatgtttgcttttatcccttctctcattgtctccttcccatcttagtaccattgtagttataaacatctgcattttttagaagcattttacccatttatttttttaaacattcaagaactgctgacgtactgtggatgtagagtataaaacttgaaaaatgcagatgttgaaggaataataggtatcttgtgctttaatactttatggcaggattgtactataagcaaatgaattaaacagctatgtaaatcataaagaaaaactaaaaatgaaccaaagtgaaaggataacttccaggcagtatctttctattgtaacctgttatttaaggaaatactagtgatttcttctaaataggatgtaaaacttctttcaaattactcttcctcagtcctgcctgccaagaactcaagtgtaactgtgataaaataacctttcccaggtatattggcaggtatgtgtgtaatctcagaatacacaggtgacatagatatgatatgacaactggtaatggtggattcatttacattgtttacacttctatgaccaggccttaagggaaggtcagttttttaaaaaaccaagtagtgtcttcctacctatctccagatacatgtcaaaaaaagaaaggtgtttgtgcttccgttttgtttctgctcagtaatatagtcaagcaagtttgttccaagtgacccattgagctgtgtatgcatttttgtttatttcaataaaatatatttgtattatttgtccttcatactatccatccataccacactatcttctgtatcaggtagtctaatagaaatatacctgttttgttctaaaa

SEQ ID NO: 280497 - DNA, 2525 bp, Homo sapiens
tgttgtttaaattaaaagtgtttggagtctttaactatttttttttcccaacaataggtttatgctaaaactatcgatgggcaacagactattattgcatgtattgaaagccaccagtttcagcctaaaaacttctgctggtaagaagtagatattctcttctatttacatctgaaagaaaccagcagttgagacttggtttttaatccaactagcttggaataattatttaacttacagacttcagttttccatctataaatgagggatttagattccttacagttctaaggttttataattatattttcctttaaaagttactcttattttgagtgagaacaagtgattagtaaagtgccctgttgaaaatctgagttttacttggcttagggttactgctacttgagttaattgtgtaactcagcagcctattcatctgattttggaagagcctcccatgagcagaataggcatggttttccatttcaagggaaaaaaggaaaaatgaaagacaaaataacttagctttgggtttgccaaactggaaatgacagtttctctctctctctttttttttttctttttttgcacccctctttcccaacttctgtacctcagtggcaaatcacctctttcttgtgcttattgctaattctgcaatgttgtgtgtgtgttttaataggaatggtcgttggagatcagagtggaagttcaccatcacaccacctacagcccaggtggttggcgtgcttaagattcaggttcactattatgaagatggcaatgttcagttggttagtcataaagatgtacaggattcactaactgtttcgaatgaagcccaaactgccaaggagtttattaaaatcatagagaatgcagaaaatgagtatcagacagcaattagtgaaaactatcaaacaatgtcagataccacattcaaggccttgcgccggcagcttccagttacccgcaccaaaatcgactggaacaagatactcagctacaagattggcaaagaaatgcagaatgcttaaaggctgaatgtaggattcttcagtatgtggaaagacaaggattcaacgtgtggtcatatgataaataagtgatttataaacaagagtgatattttgctagggctttcaaagttaaccggttttctagcctcatggaatactgttgaacctatagcgttgtcttgattcttttgtgttctctgccttgtaattttctgttactgctatatctacgtgtaaatcttttttttctttttttttttttttttttggttaattctgccacatttaatgttggtgagagagtgatctatcctaatgacattttactgtttaaaaaagtttcctagccatgaagccctgctactgatttagacaaggtattatggtcattactttgtacccctatccttccaagcacttctggtacttcagtcgtttttactgatccaccaacacctaaagaggctatgctacagtctctagctaaatggaagacacattcatccttctccctctgactgctttgatcatcatttattgcatctcataactaattttctaaagtttggattgggacttttcaggtcctttttggagggcaaaggaagtgccagcttctctggggaacttgtttttaaatccaaagacttgaaccacattccctgcacatgaacatgtttgcttttatcccttctctcattgtctccttcccatcttagtaccattgtagttataaacatctgcattttttagaagcattttacccatttatttttttaaacattcaagaactgctgacgtactgtggatgtagagtataaaacttgaaaaatgcagatgttgaaggaataataggtatcttgtgctttaatactttatggcaggattgtactataagcaaatgaattaaacagctatgtaaatcataaagaaaaactaaaaatgaaccaaagtgaaaggataacttccaggcagtatctttctattgtaacctgttatttaaggaaatactagtgatttcttctaaataggatgtaaaacttctttcaaattactcttcctcagtcctgcctgccaagaactcaagtgtaactgtgataaaataacctttcccaggtatattggcaggtatgtgtgtaatctcagaatacacaggtgacatagatatgatatgacaactggtaatggtggattcatttacattgtttacacttctatgaccaggccttaagggaaggtcagttttttaaaaaaccaagtagtgtcttcctacctatctccagatacatgtcaaaaaaagaaaggtgtttgtgcttccgttttgtttctgctcagtaatatagtcaagcaagtttgttccaagtgacccattgagctgtgtatgcatttttgtttatttcaataaaatatatttgtattatttgtccttcatactatccatccataccacactatcttctgtatcaggtagtctaatagaaatatacctgttttgttctaaaa

SEQ ID NO: 280498 - DNA, 1916 bp, Homo sapiens
ccattgtgaattaccactgcttatattaattatttgttcagagttggtaaaatggctcatcaacttaaagatagcttaaagcatggatttgtgtcctaaataacaggtttctctatgaacttcccctaaaaaggctcaaacattgtctcacacaggttcactattatgaagatggcaatgttcagttggttagtcataaagatgtacaggattcactaactgtttcgaatgaagcccaaactgccaaggagtttattaaaatcatagagaatgcagaaaatgagtatcagacagcaattagtgaaaactatcaaacaatgtcagataccacattcaaggccttgcgccggcagcttccagttacccgcaccaaaatcgactggaacaagatactcagctacaagattggcaaagaaatgcagaatgcttaaaggctgaatgtaggattcttcagtatgtggaaagacaaggattcaacgtgtggtcatatgataaataagtgatttataaacaagagtgatattttgctagggctttcaaagttaaccggttttctagcctcatggaatactgttgaacctatagcgttgtcttgattcttttgtgttctctgccttgtaattttctgttactgctatatctacgtgtaaatcttttttttctttttttttttttttttttggttaattctgccacatttaatgttggtgagagagtgatctatcctaatgacattttactgtttaaaaaagtttcctagccatgaagccctgctactgatttagacaaggtattatggtcattactttgtacccctatccttccaagcacttctggtacttcagtcgtttttactgatccaccaacacctaaagaggctatgctacagtctctagctaaatggaagacacattcatccttctccctctgactgctttgatcatcatttattgcatctcataactaattttctaaagtttggattgggacttttcaggtcctttttggagggcaaaggaagtgccagcttctctggggaacttgtttttaaatccaaagacttgaaccacattccctgcacatgaacatgtttgcttttatcccttctctcattgtctccttcccatcttagtaccattgtagttataaacatctgcattttttagaagcattttacccatttatttttttaaacattcaagaactgctgacgtactgtggatgtagagtataaaacttgaaaaatgcagatgttgaaggaataataggtatcttgtgctttaatactttatggcaggattgtactataagcaaatgaattaaacagctatgtaaatcataaagaaaaactaaaaatgaaccaaagtgaaaggataacttccaggcagtatctttctattgtaacctgttatttaaggaaatactagtgatttcttctaaataggatgtaaaacttctttcaaattactcttcctcagtcctgcctgccaagaactcaagtgtaactgtgataaaataacctttcccaggtatattggcaggtatgtgtgtaatctcagaatacacaggtgacatagatatgatatgacaactggtaatggtggattcatttacattgtttacacttctatgaccaggccttaagggaaggtcagttttttaaaaaaccaagtagtgtcttcctacctatctccagatacatgtcaaaaaaagaaaggtgtttgtgcttccgttttgtttctgctcagtaatatagtcaagcaagtttgttccaagtgacccattgagctgtgtatgcatttttgtttatttcaataaaatatatttgtattatttgtccttcatactatccatccataccacactatcttctgtatcaggtagtctaatagaaatatacctgttttgttctaaaa

SEQ ID NO: 280499 - DNA, 2575 bp, Homo sapiens
ctctgtgaaggctgagtcctggggaaccgggaccgagaagatttcgaaggtggaggagcgtgtctcaagattggggctacctgttctttcgtggggcagggaaggggcggacagcagcgcctattctggaggaactggactgagatgtgaccccgaagtgttaccgcttccaaacgaaatgagggtcacctttcacaccgcccccccccccggggttggaaaagccaccgatcgttccagctgccgagcagctcttaaagctttggattcggctgtcgtggagataacgggcaccagaaaaacttgtaggagtagcaacagctatttggtcggatggaggccagaagccaagaataatcgaaacacgctgccagcgcccattagatggatgggaaatgagtgtaactcattgggaaagatattagacttcaaatcacctaaggcaaaccctacttcctggggcgcgggcgcgggcgctggcgttaggagacgtcactcccgcgcataactgacatggggccctcttggtcggcgtttccgggcgggtccttccgacggccgccgcggtgattccatcactcggctttcttcccggcctgcctcgcgcccgtagccgggctgggccagaacagcccaagatggccgacttcgatgatcgtgtgtcggatgaggagaaggtacgcatagctgctaaattcatcactcatgcacccccaggggaatttaatgaagtattcaatgacgttcggctactacttaataatgacaatctcctcagggaaggggcagcacatgcatttgcccagtataacatggatcagttcacgcctgtgaagatagaaggatatgaagatcaggtcttaattacagagcacggtgacctgggtaatagcagatttttagatccaagaaacaaaatttcctttaaatttgaccacttacggaaagaagcaagtgacccccagccagaagaagcagatggaggtctgaagtcttggagagaatcctgtgacagtgctttaagagcctatgtgaaagaccattattccaacggcttctgtactgtttatgctaaaactatcgatgggcaacagactattattgcatgtattgaaagccaccagtttcagcctaaaaacttctggaatggtcgttggagatcagagtggaagttcaccatcacaccacctacagcccaggtggttggcgtgcttaagattcaggttcactattatgaagatggcaatgttcagttggttagtcataaagatgtacaggattcactaactgtttcgaatgaagcccaaactgccaaggagtttattaaaatcatagagaatgcagaaaatgagtatcagacagcaattagtgaaaactatcaaacaatgtcagataccacattcaaggccttgcgccggcagcttccagttacccgcaccaaaatcgactggaacaagatactcagctacaagattggcaaagaaatgcagaatgcttaaaggctgaatgtaggattcttcagtatgtggaaagacaaggattcaacgtgtggtcatatgataaataagtgatttataaacaagagtgatattttgctagggctttcaaagttaaccggttttctagcctcatggaatactgttgaacctatagcgttgtcttgattcttttgtgttctctgccttgtaattttctgttactgctatatctacgtgtaaatcttttttttctttttttttttttttttttggttaattctgccacatttaatgttggtgagagagtgatctatcctaatgacattttactgtttaaaaaagtttcctagccatgaagccctgctactgatttagacaaggtattatggtcattactttgtacccctatccttccaagcacttctggtacttcagtcgtttttactgatccaccaacacctaaagaggctatgctacagtctctagctaaatggaagacacattcatccttctccctctgactgctttgatcatcatttattgcatctcataactaattttctaaagtttggattgggacttttcaggtcctttttggagggcaaaggaagtgccagcttctctggggaacttgtttttaaatccaaagacttgaaccacattccctgcacatgaacatgtttgcttttatcccttctctcattgtctccttcccatcttagtaccattgtagttataaacatctgcattttttagaagcattttacccatttatttttttaaacattcaagaactgctgacgtactgtggatgtagagtataaaacttgaaaaatgcagatgttgaaggaataataggtatcttgtgctttaatactttatggcaggattgtactataagcaaatgaattaaacagctatgtaaatcataaagaaaaactaaaaatgaaccaaagtgaaaggataacttccaggcagtatctttctattgtaacctgttatttaaggaaatactagtgatttcttctaaatagggatggttaaaaaaaaaacaccccttttttttttccccccctttttttttttttttttttccc

SEQ ID NO: 280500 - DNA, 2375 bp, Homo sapiens
ctctgtgaaggctgagtcctggggaaccgggaccgagaagatttcgaaggtggaggagcgtgtctcaagattggggctacctgttctttcgtggggcagggaaggggcggacagcagcgcctattctggaggaactggactgagatgtgaccccgaagtgttaccgcttccaaacgaaatgagggtcacctttcacaccgcccccccccccggggttggaaaagccaccgatcgttccagctgccgagcagctcttaaagctttggattcggctgtcgtggagataacgggcaccagaaaaacttgtaggagtagcaacagctatttggtcggatggaggccagaagccaagaataatcgaaacacgctgccagcgcccattagatggatgggaaatgagtgtaactcattgggaaagatattagacttcaaatcacctaaggcaaaccctacttcctggggcgcgggcgcgggcgctggcgttaggagacgtcactcccgcgcataactgacatggggccctcttggtcggcgtttccgggcgggtccttccgacggccgccgcggtgattccatcactcggctttcttcccggcctgcctcgcgcccgtagccgggctgggccagaacagcccaagatggccgacttcgatgatcgtgtgtcggatgaggagaaggtacgcatagctgctaaattcatcactcatgcacccccaggggaatttaatgaagtattcaatgacgttcggctactacttaataatgacaatctcctcagggaaggggcagcacatgcatttgcccagtataacatggatcagttcacgcctgtgaagatagaaggatatgaagatcaggtcttaattacagagcacggtgacctgggtaatagcagatttttagatccaagaaacaaaatttcctttaaatttgaccacttacggaaagaagcaagtgacccccagccagaagaagcagatggaggtctgaagtcttggagagaatcctgtgacagtgctttaagagcctatgtgaaagaccattattccaacggcttctgtactgtttatgctaaaactatcgatgggcaacagactattattgcatgtattgaaagccaccagtttcagcctaaaaacttctggaatggtcgttggagatcagagtggaagttcaccatcacaccacctacagcccaggtggttggcgtgcttaagattcaggttcactattatgaagatggcaatgttcagttggttagtcataaagatgtacaggattcactaactgtttcgaatgaagcccaaactgccaaggagtttattaaaatcatagagaatgcagaaaatgagtatcagacagcaattagtgaaaactatcaaacaatgtcagataccacattcaaggccttgcgccggcagcttccagttacccgcaccaaaatcgactggaacaagatactcagctacaagattggcaaagaaatgcagaatgcttaaaggctgaatgtaggattcttcagtatgtggaaagacaaggattcaacgtgtggtcatatgataaataagtgatttataaacaagagtgatattttgctagggctttcaaagttaaccggttttctagcctcatggaatactgttgaacctatagcgttgtcttgattcttttgtgttctctgccttgtaattttctgttactgctatatctacgtgtaaatcttttttttctttttttttttttttttttggttaattctgccacatttaatgttggtgagagagtgatctatcctaatgacattttactgtttaaaaaagtttcctagccatgaagccctgctactgatttagacaaggtattatggtcattactttgtacccctatccttccaagcacttctggtacttcagtcgtttttactgatccaccaacacctaaagaggctatgctacagtctctagctaaatggaagacacattcatccttctccctctgactgctttgatcatcatttattgcatctcataactaattttctaaagtttggattgggacttttcaggtcctttttggagggcaaaggaagtgccagcttctctggggaacttgtttttaaatccaaagacttgaaccacattccctgcacatgaacatacatgtcaaaaaaagaaaggtgtttgtgcttccgttttgtttctgctcagtaatatagtcaagcaagtttgttccaagtgacccattgagctgtgtatgcatttttgtttatttcaataaaatatatttgtattatttgtccttcatactatccatccataccacactatcttctgtatcaggtagtctaatagaaatatacctgttttgttctaaaa

SEQ ID NO: 280501 - DNA, 2195 bp, Homo sapiens
ctctgtgaaggctgagtcctggggaaccgggaccgagaagatttcgaaggtggaggagcgtgtctcaagattggggctacctgttctttcgtggggcagggaaggggcggacagcagcgcctattctggaggaactggactgagatgtgaccccgaagtgttaccgcttccaaacgaaatgagggtcacctttcacaccgcccccccccccggggttggaaaagccaccgatcgttccagctgccgagcagctcttaaagctttggattcggctgtcgtggagataacgggcaccagaaaaacttgtaggagtagcaacagctatttggtcggatggaggccagaagccaagaataatcgaaacacgctgccagcgcccattagatggatgggaaatgagtgtaactcattgggaaagatattagacttcaaatcacctaaggcaaaccctacttcctggggcgcgggcgcgggcgctggcgttaggagacgtcactcccgcgcataactgacatggggccctcttggtcggcgtttccgggcgggtccttccgacggccgccgcggtgattccatcactcggctttcttcccggcctgcctcgcgcccgtagccgggctgggccagaacagcccaagatggccgacttcgatgatcgtgtgtcggatgaggagaaggtacgcatagctgctaaattcatcactcatgcacccccaggggaatttaatgaagtattcaatgacgttcggctactacttaataatgacaatctcctcagggaaggggcagcacatgcatttgcccagtataacatggatcagttcacgcctgtgaagatagaaggatatgaagatcaggtcttaattacagagcacggtgacctgggtaatagcagatttttagatccaagaaacaaaatttcctttaaatttgaccacttacggaaagaagcaagtgacccccagccagaagaagcagatggaggtctgaagtcttggagagaatcctgtgacagtgctttaagagcctatgtgaaagaccattattccaacggcttctgtactgtttatgctaaaactatcgatgggcaacagactattattgcatgtattgaaagccaccagtttcagcctaaaaacttctggaatggtcgttggagatcagagtggaagttcaccatcacaccacctacagcccaggtggttggcgtgcttaagattcaggttcactattatgaagatggcaatgttcagttggttagtcataaagatgtacaggattcactaactgtttcgaatgaagcccaaactgccaaggagtttattaaaatcatagagaatgcagaaaatgagtatcagacagcaattagtgaaaactatcaaacaatgtcagataccacattcaaggccttgcgccggcagcttccagttacccgcaccaaaatcgactggaacaagatactcagctacaagattggcaaagaaatgcagaatgcttaaaggctgaatgtaggattcttcagtatgtggaaagacaaggattcaacgtgtggtcatatgataaataagtgatttataaacaagagtgatattttgctagggctttcaaagttaaccggttttctagcctcatggaatactgttgaacctatagcgttgtcttgattcttttgtgttctctgccttgtaattttctgttactgctatatctacgtgtaaatcttttttttctttttttttttttttttttggttaattctgccacatttaatgttggtgagagagtgatctatcctaatgacattttactgtttaaaaaagtttcctagccatgaagccctgctactgatttagacaaggtattatggtcattactttgtacccctatccttccaagcacttctggtacttcagtcgtttttactgatccaccaacacctaaagaggctatgctacagtctctagctaaatggaagacacattcatccttctccctctgactgctttgatcatcatttattgcatctcataactaattttctaaatttgttccaagtgacccattgagctgtgtatgcatttttgtttatttcaataaaatatatttgtattatttgtccttcatactatccatccataccacactatcttctgtatcaggtagtctaatagaaatatacctgttttgttctaaaa

SEQ ID NO: 280502 - DNA, 770 bp, Homo sapiens
  misc_feature (23)..(23): n is a, c, g, or t
tactgcaggtagaggcttactangaagtgtgaaaacgtaggcttggattaaggcgacagcgatttctaggatagtcagtagagtataaaacttgaaaaatgcagatgttgaaggaataataggtatcttgtgctttaatactttatggcaggattgtactataagcaaatgaattaaacagctatgtaaatcataaagaaaaactaaaaatgaaccaaagtgaaaggataacttccaggcagtatctttctattgtaacctgttatttaaggaaatactagtgatttcttctaaataggatgtaaaacttctttcaaattactcttcctcagtcctgcctgccaagaactcaagtgtaactgtgataaaataacctttcccaggtatattggcaggtatgtgtgtaatctcagaatacacaggtgacatagatatgatatgacaactggtaatggtggattcatttacattgtttacacttctatgaccaggccttaagggaaggtcagttttttaaaaaaccaagtagtgtcttcctacctatctccagatacatgtcaaaaaaagaaaggtgtttgtgcttccgttttgtttctgctcagtaatatagtcaagcaagtttgttccaagtgacccattgagctgtgtatgcatttttgtttatttcaataaaatatatttgtattatttgtccttcatactatccatccataccacactatcttctgtatcaggtagtctaatagaaatatacctgttttgttctaaaa

SEQ ID NO: 280503 - DNA, 1209 bp, Homo sapiens
ctctgtgaaggctgagtcctggggaaccgggaccgagaagatttcgaaggtggaggagcgtgtctcaagattggggctacctgttctttcgtggggcagggaaggggcggacagcagcgcctattctggaggaactggactgagatgtgaccccgaagtgttaccgcttccaaacgaaatgagggtcacctttcacaccgcccccccccccggggttggaaaagccaccgatcgttccagctgccgagcagctcttaaagctttggattcggctgtcgtggagataacgggcaccagaaaaacttgtaggagtagcaacagctatttggtcggatggaggccagaagccaagaataatcgaaacacgctgccagcgcccattagatggatgggaaatgagtgtaactcattgggaaagatattagacttcaaatcacctaaggcaaaccctacttcctggggcgcgggcgcgggcgctggcgttaggagacgtcactcccgcgcataactgacatggggccctcttggtcggcgtttccgggcgggtccttccgacggccgccgcggtgattccatcactcggctttcttcccggcctgcctcgcgcccgtagccgggctgggccagaacagcccaagatggccgacttcgatgatcgtgtgtcggatgaggagaaggtacgcatagctgctaaattcatcactcatgcacccccaggggaatttaatgaagtattcaatgacgttcggctactacttaataatgacaatctcctcagggaaggggcagcacatgcatttgcccagtataacatggatcagttcacgcctgtgaagatagaaggatatgaagatcaggtcttaattacagagcacggtgacctgggtaatagcagatttttagatccaagaaacaaaatttcctttaaatttgaccacttacggaaagaagcaagtgacccccagccagaagaagcagatggaggtctgaaacatgtcaaaaaaagaaaggtgtttgtgcttccgttttgtttctgctcagtaatatagtcaagcaagtttgttccaagtgacccattgagctgtgtatgcatttttgtttatttcaataaaatatatttgtattatttgtccttcatactatccatccataccacactatcttctgtatcaggtagtctaatagaaatatacctgttttgttctaaaa

SEQ ID NO: 280504 - DNA, 354 bp, Homo sapiens
ctttgggagtttccccctcagtcagaaaaaaaaataaaaaaaagagagagagagagaaaaaaaaaaaaaaaaaaaaaaaaaaaaaaaaaaaaaaaaaaaaaaaaaccaagtagtgtcttcctacctatctccagatacatgtcaaaaaaagaaaggtgtttgtgcttccgttttgtttctgctcagtaatatagtcaagcaagtttgttccaagtgacccattgagctgtgtatgcatttttgtttatttcaataaaatatatttgtattatttgtccttcatactatccatccataccacactatcttctgtatcaggtagtctaatagaaatatacctgttttgttctaaaa

SEQ ID NO: 280505 - DNA, 968 bp, Homo sapiens
ctctgtgaaggctgagtcctggggaaccgggaccgagaagatttcgaaggtggaggagcgtgtctcaagattggggctacctgttctttcgtggggcagggaaggggcggacagcagcgcctattctggaggaactggactgagatgtgaccccgaagtgttaccgcttccaaacgaaatgagggtcacctttcacaccgcccccccccccggggttggaaaagccaccgatcgttccagctgccgagcagctcttaaagctttggattcggctgtcgtggagataacgggcaccagaaaaacttgtaggagtagcaacagctatttggtcggatggaggccagaagccaagaataatcgaaacacgctgccagcgcccattagatggatgggaaatgagtgtaactcattgggaaagatattagacttcaaatcacctaaggcaaaccctacttcctggggcgcgggcgcgggcgctggcgttaggagacgtcactcccgcgcataactgacatggggccctcttggtcggcgtttccgggcgggtccttccgacggccgccgcggtgattccatcactcggctttcttcccggcctgcctcgcgcccgtagccgggctgggccagaacagcccaagatggccgacttcgatgatcgtgtgtcggatgaggagaaggtacgcatagctgctaaattcatcactcatgcacccccaggggaatttaatgaagtattcaatgacgttcggctactacttaataatgacaatctcctcagggaaggggcagcacatgcatttgcccagtataacatggatcagttcacgcctgtgaagatagaaggatatgaagatcaggtcttaattacagagcacggtgacctgggtaatagcagatttttaattaagacctgatcttcatatcctctagttctagatcgcgatctagaactagtccccacgcgtccg

SEQ ID NO: 280506 - DNA, 3006 bp, Homo sapiens
ctctgtgaaggctgagtcctggggaaccgggaccgagaagatttcgaaggtggaggagcgtgtctcaagattggggctacctgttctttcgtggggcagggaaggggcggacagcagcgcctattctggaggaactggactgagatgtgaccccgaagtgttaccgcttccaaacgaaatgagggtcacctttcacaccgcccccccccccggggttggaaaagccaccgatcgttccagctgccgagcagctcttaaagctttggattcggctgtcgtggagataacgggcaccagaaaaacttgtaggagtagcaacagctatttggtcggatggaggccagaagccaagaataatcgaaacacgctgccagcgcccattagatggatgggaaatgagtgtaactcattgggaaagatattagacttcaaatcacctaaggcaaaccctacttcctggggcgcgggcgcgggcgctggcgttaggagacgtcactcccgcgcataactgacatggggccctcttggtcggcgtttccgggcgggtccttccgacggccgccgcggtgattccatcactcggctttcttcccggcctgcctcgcgcccgtagccgggctgggccagaacagcccaagatggccgacttcgatgatcgtgtgtcggatgaggagaaggtacgcatagctgctaaattcatcactcatgcacccccaggggaatttaatgaagtattcaatgacgttcggctactacttaataatgacaatctcctcagggaaggggcagcacatgcatttgcccagtataacatggatcagttcacgcctgtgaagatagaaggatatgaagatcaggtcttaattacagagcacggtgacctgggtaatagcagatttttagatccaagaaacaaaatttcctttaaatttgaccacttacggaaagaagcaagtgacccccagccagaagaagcagatggaggtctgaagtcttggagagaatcctgtgacagtgctttaagagcctatgtgaaagaccattattccaacggcttctgtactgtttatgctaaaactatcgatgggcaacagactattattgcatgtattgaaagccaccagtttcagcctaaaaacttctggaatggtcgttggagatcagagtggaagttcaccatcacaccacctacagcccaggtggttggcgtgcttaagattcaggttcactattatgaagatggcaatgttcagttggttagtcataaagatgtacaggattcactaactgtttcgaatgaagcccaaactgccaaggagtttattaaaatcatagagaatgcagaaaatgagtatcagacagcaattagtgaaaactatcaaacaatgtcagataccacattcaaggccttgcgccggcagcttccagttacccgcaccaaaatcgactggaacaagatactcagctacaagattggcaaagaaatgcagaatgcttaaaggctgaatgtaggattcttcagtatgtggaaagacaaggattcaacgtgtggtcatatgataaataagtgatttataaacaagagtgatattttgctagggctttcaaagttaaccggttttctagcctcatggaatactgttgaacctatagcgttgtcttgattcttttgtgttctctgccttgtaattttctgttactgctatatctacgtgtaaatcttttttttctttttttttttttttttttggttaattctgccacatttaatgttggtgagagagtgatctatcctaatgacattttactgtttaaaaaagtttcctagccatgaagccctgctactgatttagacaaggtattatggtcattactttgtacccctatccttccaagcacttctggtacttcagtcgtttttactgatccaccaacacctaaagaggctatgctacagtctctagctaaatggaagacacattcatccttctccctctgactgctttgatcatcatttattgcatcgtcatatcatatttatcgcatctcataactaattttctaaagtttggattgggacttttcaggtcctttttggagggcaaaggaagtgccagcttctctggggaacttgtttttaaatccaaagacttgaaccacattccctgcacatgaacatgtttgcttttatcccttctctcattgtctccttcccatcttagtaccattgtagttataaacatctgcattttttagaagcattttacccatttatttttttaaacattcaagaactgctgacgtactgtggatgtagagtataaaacttgaaaaatgcagatgttgaaggaataataggtatcttgtgctttaatactttatggcaggattgtactataagcaaatgaattaaacagctatgtaaatcataaagaaaaactaaaaatgaaccaaagtgaaaggataacttccaggcagtatctttctattgtaacctgttatttaaggaaatactagtgatttcttctaaataggatgtaaaacttctttcaaattactcttcctcagtcctgcctgccaagaactcaagtgtaactgtgataaaataacctttcccaggtatattggcaggtatgtgtgtaatctcagaatacacaggtgacatagatatgatatgacaactggtaatggtggattcatttacattgtttacacttctatgaccaggccttaagggaaggtcagttttttaaaaaaccaagtagtgtcttcctacctatctccagatacatgtcaaaaaaagaaaggtgtttgtgcttccgttttgtttctgctcagtaatatagtcaagcaagtttgttccaagtgacccattgagctgtgtatgcatttttgtttatttcaataaaatatatttgtattatttgtccttcatactatccatccataccacactatcttctgtatcaggtagtctaatagaaatatacctgttttgttctaaaa

SEQ ID NO: 280507 - DNA, 3021 bp, Homo sapiens
ctctgtgaaggctgagtcctggggaaccgggaccgagaagatttcgaaggtggaggagcgtgtctcaagattggggctacctgttctttcgtggggcagggaaggggcggacagcagcgcctattctggaggaactggactgagatgtgaccccgaagtgttaccgcttccaaacgaaatgagggtcacctttcacaccgcccccccccccggggttggaaaagccaccgatcgttccagctgccgagcagctcttaaagctttggattcggctgtcgtggagataacgggcaccagaaaaacttgtaggagtagcaacagctatttggtcggatggaggccagaagccaagaataatcgaaacacgctgccagcgcccattagatggatgggaaatgagtgtaactcattgggaaagatattagacttcaaatcacctaaggcaaaccctacttcctggggcgcgggcgcgggcgctggcgttaggagacgtcactcccgcgcataactgacatggggccctcttggtcggcgtttccgggcgggtccttccgacggccgccgcggtgattccatcactcggctttcttcccggcctgcctcgcgcccgtagccgggctgggccagaacagcccaagatggccgacttcgatgatcgtgtgtcggatgaggagaaggtacgcatagctgctaaattcatcactcatgcacccccaggggaatttaatgaagtattcaatgacgttcggctactacttaataatgacaatctcctcagggaaggggcagcacatgcatttgcccagtataacatggatcagttcacgcctgtgaagatagaaggatatgaagatcaggtcttaattacagagcacggtgacctgggtaatagcagatttttagatccaagaaacaaaatttcctttaaatttgaccacttacggaaagaagcaagtgacccccagccagaagaagcagatggaggtctgaagtcttggagagaatcctgtgacagtgctttaagagcctatgtgaaagaccattattccaacggcttctgtactgtttatgctaaaactatcgatgggcaacagactattattgcatgtattgaaagccaccagtttcagcctaaaaacttctggaatggtcgttggagatcagagtggaagttcaccatcacaccacctacagcccaggtggttggcgtgcttaagattcaggttcactattatgaagatggcaatgttcagttggttagtcataaagatgtacaggattcactaactgtttcgaatgaagcccaaactgccaaggagtttattaaaatcatagagaatgcagaaaatgagtatcagacagcaattagtgaaaactatcaaacaatgtcagataccacattcaaggccttgcgccggcagcttccagttacccgcaccaaaatcgactggaacaagatactcagctacaagattggcaaagaaatgcagaatgcttaaaggctgaatgtaggattcttcagtatgtggaaagacaaggattcaacgtgtggtcatatgataaataagtgatttataaacaagagtgatattttgctagggctttcaaagttaaccggttttctagcctcatggaatactgttgaacctatagcgttgtcttgattcttttgtgttctctgccttgtaattttctgttactgctatatctacgtgtaaatcttttttttctttttttttttttttttttggttaattctgccacatttaatgttggtgagagagtgatctatcctaatgacattttactgtttaaaaaagtttcctagccatgaagccctgctactgatttagacaaggtattatggtcattactttgtacccctatccttccaagcacttctggtacttcagtcgtttttactgatccaccaacacctaaagaggctatgctacagtctctagctaaatggaagacacattcatccttctccctctgactgctttgatcatcatttattgcatctcataactaattttctaaagtttggattgggacttttcaggtcctttttggagggcaaaggaagtgccagcttctctggggaacttgtttttaaatccaaagacttgaaccacattccctgcacatgaacatgtttgcttttatcccttctctcattgtctccttcccatcttagtaccattgtagttataaacatctgcattttttagaagcattttacccatttatttttttaaacattcaagaactgctgacgtactgtggatgtagagtataaaacttgaaaaatgcagatgttgaaggaataataggtatcttgtgctttaatactttatggcaggattgtactataagcaaatgaattaaacagctatgtaaatcataaagaaaaactaaaaatgaaccaaagtgaaaggataacttccaggcagtatctttctattgtaacctgttatttaaggaaatactagtgatttcttctaaataggatgtaaaacttctttcaaattactcttcctcagtcctgcctgccaagaactcaagtgtaactgtgataaaataacctttcccaggtatattggcaggtatgtgtgtaatctcagaatacacaggtgacatagatatgatatgacaactggtaatggtggattcatttacattgtttacacttctatgaccaggccttaagggaaggtcagttttttaaaaaaccaagtagtgtcttcctacctatctccagatacatgtcaaaaaaagaaaggtgtttgtgcttccgttttgtttctgctcagtaatatagtcaagcaagtttgttccaagtgacccattgagctgtgtatgcatttttgtttatttcaataaaatatatttgtattatttgtccttcatactatccatccataccacactatcttctgtatcaggtagtctaatagaaatatacctgttttgttctaaaaaaaaaaaaaaaaaaaacaaacaaaaaaaaaaaaaaaa

SEQ ID NO: 280508 - DNA, 2940 bp, Homo sapiens
ctctgtgaaggctgagtcctggggaaccgggaccgagaagatttcgaaggtggaggagcgtgtctcaagattggggctacctgttctttcgtggggcagggaaggggcggacagcagcgcctattctggaggaactggactgagatgtgaccccgaagtgttaccgcttccaaacgaaatgagggtcacctttcacaccgcccccccccccggggttggaaaagccaccgatcgttccagctgccgagcagctcttaaagctttggattcggctgtcgtggagataacgggcaccagaaaaacttgtaggagtagcaacagctatttggtcggatggaggccagaagccaagaataatcgaaacacgctgccagcgcccattagatggatgggaaatgagtgtaactcattgggaaagatattagacttcaaatcacctaaggcaaaccctacttcctggggcgcgggcgcgggcgctggcgttaggagacgtcactcccgcgcataactgacatggggccctcttggtcggcgtttccgggcgggtccttccgacggccgccgcggtgattccatcactcggctttcttcccggcctgcctcgcgcccgtagccgggctgggccagaacagcccaagatggccgacttcgatgatcgtgtgtcggatgaggagaaggtacgcatagctgctaaattcatcactcatgcacccccaggggaatttaatgaagtattcaatgacgttcggctactacttaataatgacaatctcctcagggaaggggcagcacatgcatttgcccagtataacatggatcagttcacgcctgtgaagatagaaggatatgaagatcaggtcttaattacagagcacggtgacctgggtaatagcagatttttagatccaagaaacaaaatttcctttaaatttgaccacttacggaaagaagcaagtgacccccagccagaagaagcagatggaggtctgaagtcttggagagaatcctgtgacagtgctttaagagcctatgtgaaagaccattattccaacggcttctgtactgtttatgctaaaactatcgatgggcaacagactattattgcatgtattgaaagccaccagtttcagcctaaaaacttctggaatggtcgttggagatcagagtggaagttcaccatcacaccacctacagcccaggtggttggcgtgcttaagattcaggttcactattatgaagatggcaatgttcagttggttagtcataaagatgtacaggattcactaactgtttcgaatgaagcccaaactgccaaggagtttattaaaatcatagagaatgcagaaaatgagtatcagacagcaattagtgaaaactatcaaacaatgtcagataccacattcaaggccttgcgccggcagcttccagttacccgcaccaaaatcgactggaacaagatactcagctacaagattggcaaagaaatgcagaatgcttaaaggctgaatgtaggattcttcagtatgtggaaagacaaggattcaacgtgtggtcatatgataaataagtgatttataaacaagagtgatattttgctagggctttcaaagttaaccggttttctagcctcatggaatactgttgaacctatagcgttgtcttgattcttttgtgttctctgccttgtaattttctgttactgctatatctacgtgtaaatcttttttttctttttttttttttttttttggttaattctgccacatttaatgttggtgagagagtgatctatcctaatgacattttactgtttaaaaaagtttcctagccatgaagccctgctactgatttagacaaggtattatggtcattactttgtacccctatccttccaagcacttctggtacttcagtcgtttttactgatccaccaacacctaaagaggctatgctacagtctctagctaaatggaagacacattcatccttctccctctgactgctttgatcatcatttattgcatctcataactaattttctaaagtttggattgggacttttcaggtcctttttggagggcaaaggaagtgccagcttctctggggaacttgtttttaaatccaaagacttgaaccacattccctgcacatgaacatgtttgcttttatcccttctctcattgtctccttcccatcttagtaccattgtagttataaacatctgcattttttagaagcattttacccatttatttttttaaacattcaagaactgctgacgtactgtggatgtagagtataaaacttgaaaaatgcagatgttgaaggaataataggtatcttgtgctttaatactttatggcaggattgtactataagcaaatgaattaaacagctatgtaaatcataaagaaaaactaaaaatgaaccaaagtgaaaggataacttccaggcagtatctttctattgtaacctgttatttaaggaaatactagtgatttcttctaaataggatgtaaaacttctttcaaattactcttcctcagtcctgcctgccaagaactcaagtgtaactgtgataaaataacctttcccaggtatattggcaggtatgtgtgtaatctcagaatacacaggtgacatagatatgatatgacaactggtaatggtggattcatttacattgtttacacttctatgaccaggccttaagggaaggtcagttttttaaaaaaccaagtagtgtcttcctacctatctccagatacatgtcaaaaaaagaaaggtgtttgtgcttccgttttgtttctgctcagtaatatagtcaagcaagtttgttccaagtgacccattgagctgtgtatgcatttttgtttatttcaataaaatatatttgtattattaaaaaaaaaaaaaaaacaaacaaaaaaaaaaaaaaaa

SEQ ID NO: 280509 - DNA, 2930 bp, Homo sapiens
ctctgtgaaggctgagtcctggggaaccgggaccgagaagatttcgaaggtggaggagcgtgtctcaagattggggctacctgttctttcgtggggcagggaaggggcggacagcagcgcctattctggaggaactggactgagatgtgaccccgaagtgttaccgcttccaaacgaaatgagggtcacctttcacaccgcccccccccccggggttggaaaagccaccgatcgttccagctgccgagcagctcttaaagctttggattcggctgtcgtggagataacgggcaccagaaaaacttgtaggagtagcaacagctatttggtcggatggaggccagaagccaagaataatcgaaacacgctgccagcgcccattagatggatgggaaatgagtgtaactcattgggaaagatattagacttcaaatcacctaaggcaaaccctacttcctggggcgcgggcgcgggcgctggcgttaggagacgtcactcccgcgcataactgacatggggccctcttggtcggcgtttccgggcgggtccttccgacggccgccgcggtgattccatcactcggctttcttcccggcctgcctcgcgcccgtagccgggctgggccagaacagcccaagatggccgacttcgatgatcgtgtgtcggatgaggagaaggtacgcatagctgctaaattcatcactcatgcacccccaggggaatttaatgaagtattcaatgacgttcggctactacttaataatgacaatctcctcagggaaggggcagcacatgcatttgcccagtataacatggatcagttcacgcctgtgaagatagaaggatatgaagatcaggtcttaattacagagcacggtgacctgggtaatagcagatttttagatccaagaaacaaaatttcctttaaatttgaccacttacggaaagaagcaagtgacccccagccagaagaagcagatggaggtctgaagtcttggagagaatcctgtgacagtgctttaagagcctatgtgaaagaccattattccaacggcttctgtactgtttatgctaaaactatcgatgggcaacagactattattgcatgtattgaaagccaccagtttcagcctaaaaacttctggaatggtcgttggagatcagagtggaagttcaccatcacaccacctacagcccaggtggttggcgtgcttaagattcaggttcactattatgaagatggcaatgttcagttggttagtcataaagatgtacaggattcactaactgtttcgaatgaagcccaaactgccaaggagtttattaaaatcatagagaatgcagaaaatgagtatcagacagcaattagtgaaaactatcaaacaatgtcagataccacattcaaggccttgcgccggcagcttccagttacccgcaccaaaatcgactggaacaagatactcagctacaagattggcaaagaaatgcagaatgcttaaaggctgaatgtaggattcttcagtatgtggaaagacaaggattcaacgtgtggtcatatgataaataagtgatttataaacaagagtgatattttgctagggctttcaaagttaaccggttttctagcctcatggaatactgttgaacctatagcgttgtcttgattcttttgtgttctctgccttgtaattttctgttactgctatatctacgtgtaaatcttttttttctttttttttttttttttttggttaattctgccacatttaatgttggtgagagagtgatctatcctaatgacattttactgtttaaaaaagtttcctagccatgaagccctgctactgatttagacaaggtattatggtcattactttgtacccctatccttccaagcacttctggtacttcagtcgtttttactgatccaccaacacctaaagaggctatgctacagtctctagctaaatggaagacacattcatccttctccctctgactgctttgatcatcatttattgcatctcataactaattttctaaagtttggattgggacttttcaggtcctttttggagggcaaaggaagtgccagcttctctggggaacttgtttttaaatccaaagacttgaaccacattccctgcacatgaacatgtttgcttttatcccttctctcattgtctccttcccatcttagtaccattgtagttataaacatctgcattttttagaagcattttacccatttatttttttaaacattcaagaactgctgacgtactgtggatgtagagtataaaacttgaaaaatgcagatgttgaaggaataataggtatcttgtgctttaatactttatggcaggattgtactataagcaaatgaattaaacagctatgtaaatcataaagaaaaactaaaaatgaaccaaagtgaaaggataacttccaggcagtatctttctattgtaacctgttatttaaggaaatactagtgatttcttctaaataggatgtaaaacttctttcaaattactcttcctcagtcctgcctgccaagaactcaagtgtaactgtgataggtgacatagatatgatatgacaactggtaatggtggattcatttacattgtttacacttctatgaccaggccttaagggaaggtcagttttttaaaaaaccaagtagtgtcttcctacctatctccagatacatgtcaaaaaaagaaaggtgtttgtgcttccgttttgtttctgctcagtaatatagtcaagcaagtttgttccaagtgacccattgagctgtgtatgcatttttgtttatttcaataaaatatatttgtattatttgtccttcatactatccatccataccacactatcttctgtatcaggtagtctaatagaaatatacctgttttgttctaaaa

SEQ ID NO: 280510 - DNA, 2134 bp, Homo sapiens
  misc_feature (2098)..(2098): n is a, c, g, or t
  misc_feature (2122)..(2122): n is a, c, g, or t
ctctgtgaaggctgagtcctggggaaccgggaccgagaagatttcgaaggtggaggagcgtgtctcaagattggggctacctgttctttcgtggggcagggaaggggcggacagcagcgcctattctggaggaactggactgagatgtgaccccgaagtgttaccgcttccaaacgaaatgagggtcacctttcacaccgcccccccccccggggttggaaaagccaccgatcgttccagctgccgagcagctcttaaagctttggattcggctgtcgtggagataacgggcaccagaaaaacttgtaggagtagcaacagctatttggtcggatggaggccagaagccaagaataatcgaaacacgctgccagcgcccattagatggatgggaaatgagtgtaactcattgggaaagatattagacttcaaatcacctaaggcaaaccctacttcctggggcgcgggcgcgggcgctggcgttaggagacgtcactcccgcgcataactgacatggggccctcttggtcggcgtttccgggcgggtccttccgacggccgccgcggtgattccatcactcggctttcttcccggcctgcctcgcgcccgtagccgggctgggccagaacagcccaagatggccgacttcgatgatcgtgtgtcggatgaggagaaggtacgcatagctgctaaattcatcactcatgcacccccaggggaatttaatgaagtattcaatgacgttcggctactacttaataatgacaatctcctcagggaaggggcagcacatgcatttgcccagtataacatggatcagttcacgcctgtgaagatagaaggatatgaagatcaggtcttaattacagagcacggtgacctgggtaatagcagatttttagatccaagaaacaaaatttcctttaaatttgaccacttacggaaagaagcaagtgacccccagccagaagaagcagatggaggtctgaagtcttggagagaatcctgtgacagtgctttaagagcctatgtgaaagaccattattccaacggcttctgtactgtttatgctaaaactatcgatgggcaacagactattattgcatgtattgaaagccaccagtttcagcctaaaaacttctggaatggtcgttggagatcagagtggaagttcaccatcacaccacctacagcccaggtggttggcgtgcttaagattcaggttcactattatgaagatggcaatgttcagttggttagtcataaagatgtacaggattcactaactgtttcgaatgaagcccaaactgccaaggagtttattaaaatcatagagaatgcagaaaatgagtatcagacagcaattagtgaaaactatcaaacaatgtcagataccacattcaaggccttgcgccggcagcttccagttacccgcaccaaaatcgactggaacaagatactcagctacaagattggcaaagaaatgcagaatgcttaaaggctgaatgtaggattcttcagtatgtggaaagacaaggattcaacgtgtggtcatatgataaataagtgatttataaacaagagtgatattttgctagggctttcaaagttaaccggttttctagcctcatggaatactgttgaacctatagcgttgtcttgattcttttgtgttctctgccttgtaattttctgttactgctatatctacgtgtaaatcttttttttctttttttttttttttttttggttaattctgccacatttaatgttggtgagagagtgatctatcctaatgacattttactgtttaaaaaagtttcctagccatgaagccctgctactgatttagacaaggtattatggtcattactttgtacccctatccttccaagcacttctggtacttcagtcgtttttactgatccaccaacacctaaagaggctatgctacagtctctagctaaatggaagacacattcatccttctccctctgactgctttgatcatcatttattgcatctcataactaattttctaaagtttggattgggacttttcaggtcctttttggagggcaaaggagaccgggagcnggggcgtgcctcctcctccgagantctccgtcgact

SEQ ID NO: 280511 - DNA, 1434 bp, Homo sapiens
ctctgtgaaggctgagtcctggggaaccgggaccgagaagatttcgaaggtggaggagcgtgtctcaagattggggctacctgttctttcgtggggcagggaaggggcggacagcagcgcctattctggaggaactggactgagatgtgaccccgaagtgttaccgcttccaaacgaaatgagggtcacctttcacaccgcccccccccccggggttggaaaagccaccgatcgttccagctgccgagcagctcttaaagctttggattcggctgtcgtggagataacgggcaccagaaaaacttgtaggagtagcaacagctatttggtcggatggaggccagaagccaagaataatcgaaacacgctgccagcgcccattagatggatgggaaatgagtgtaactcattgggaaagatattagacttcaaatcacctaaggcaaaccctacttcctggggcgcgggcgcgggcgctggcgttaggagacgtcactcccgcgcataactgacatggggccctcttggtcggcgtttccgggcgggtccttccgacggccgccgcggtgattccatcactcggctttcttcccggcctgcctcgcgcccgtagccgggctgggccagaacagcccaagatggccgacttcgatgatcgtgtgtcggatgaggagaaggtacgcatagctgctaaattcatcactcatgcacccccaggggaatttaatgaagtattcaatgacgttcggctactacttaataatgacaatctcctcagggaaggggcagcacatgcatttgcccagtataacatggatcagttcacgcctgtgaagatagaaggatatgaagatcaggtcttaattacagagcacggtgacctgggtaatagcagatttttagatccaagaaacaaaatttcctttaaatttgaccacttacggaaagaagcaagtgacccccagccagaagaagcagatggaggtctgaagtcttggagagaatcctgtgacagtgctttaagagcctatgtgaaagaccattattccaacggcttctgtactgtttatgctaaaactatcgatgggcaacagactattattgcatgtattgaaagccaccagtttcagcctaaaaacttctggaatggtcgttggagatcagagtggaagttcaccatcacaccacctacagcccaggtggttggcgtgcttaagattcaggttcactattatgaagatggcaatgttcagttggttagtcataaagatgtacaggattcactaactgtttcgaatgaagcccaaactgccaaggagtttattaaaatcatagagaatgcagaaaatgagtatcagacagcaattagtgaaaactatcaaacaatgtcagataccacatagccttaagcggatcagcggtgatactctagag

SEQ ID NO: 280512 - DNA, 513 bp, Homo sapiens
tcattgaaaataatatatcctgtctatccttcacaggggactcaagcatatccattgactatagcattacttttctgttcacaaccagccccatttctgttcaagcaactcatcttcaattatctattgcagacagcaattagtgaaaactatcaaacaatgtcagataccacattcaaggccttgcgccggcagcttccagttacccgcaccaaaatcgactggaacaagatactcagctacaagattggcaaagaaatgcagaatgcttaaaggctgaatgtaggattcttcagtatgtggaaagacaaggattcaacgtgtggtcatatgataaataagtgatttataaacaagagtgatattttgctagggctttcaaagttaaccggttttctagcctcatggaatactgttgaacctatagcgttgtcttgattcttttgtgttctctgccttgtaattttctgttactgctatatctacgtgtaaatcttttttttcttttttttt

SEQ ID NO: 280513 - DNA, 847 bp, Homo sapiens
agcggatggaaacccagctgccatcgctatgtctctgcaaaagacccctccgacccgagtgttcgtggaactggttccctgggctgaccggagccgggagaacaacctggcctcagggagagagacgctaccgggcttacgccaccccctctcctcaacacaagcccaaactgctacccgcgaggtgcaagtaagcggcacctcagaagtgtctgcgggccctgaccgggcgcaggtggtggtgcgagtgagcagcaccaaggaggcggcagccgaggccaaaaagagcgtttgtcgccgtctagattacatcacgcagagcctccagcagcagggcgtgcaggcagaaaatataactgtgacaaaggattttaggagagtggaaaatgcttatcacatggaagcagaggtctgcattacatttactgaatttggaaaaatgcaaaatatttgtaactttcttgttgaaaagctagatagctctgttgtcatcagcccaccccagttctatcatactccaggttctgttgagaatcttcgacggcaagcctgtcttgttgctgttgagaatgcgtggcgcaaagctcaagaagtctgtaaccttgttggccaaaccttaggaaaacctttactaatcaaagaagaagaaacaaaagaatgggaaggccaaatagatgatcaccagtcatccagactctcaagttcattaactgtacaacaaaaaatcaaaagtgcaacaatacatgctgcttcaaaagtatttataacttttgaggtaaagggaaaagagaagagaaaaaagcacctttgaaattccaaacaaattatattgtacttgtatcttttt

SEQ ID NO: 280514 - DNA, 538 bp, Homo sapiens
gtgaatatttgacccattcttctcctagacgaaggcagaaaatataactgtgacaaaggattttaggagagtggaaaatgcttatcacatggaagcagaggtctgcattacatttactgaatttggaaaaatgcaaaatatttgtaactttcttgttgaaaagctagatagctctgttgtcatcagcccaccccagttctatcatactccaggttctgttgagaatcttcgacggcaagcctgtcttgttgctgttgagaatgcgtggcgcaaagctcaagaagtctgtaaccttgttggccaaaccttaggaaaacctttactaatcaaagaagaagaaacaaaagaatgggaaggccaaatagatgatcaccagtcatccagactctcaagttcattaactgtacaacaaaaaatcaaaagtgcaacaatacatgctgcttcaaaagtatttataacttttgaggtaaagggaaaagagaagagaaaaaagcacctttgaaattccaaacaaattatattgtacttgtatcttttt

SEQ ID NO: 280515 - DNA, 645 bp, Homo sapiens
agcggatggaaacccagctgccatcgctatgtctctgcaaaagacccctccgacccgagtgttcgtggaactggttccctgggctgaccggagccgggagaacaacctggcctcagggagagagacgctaccgggcttacgccaccccctctcctcaacacaagcccaaactgctacccgcgaggtgcaagtaagcggcacctcagaagtgtctgcgggccctgaccgggcgcaggtggtggtgcgagtgagcagcaccaaggaggcggcagccgaggccaaaaagagcgtttgtcgccgtctagattacatcacgcagagcctccagcagcagggcgtgcaggcagaaaatataactgtgacaaaggattttaggagagtggaaaatgcttatcacatggaagcagagttccattaatccagaacgaatgggtttcctccctgcaacctgtcaatcaaacagaggtggccaatcaccactctgaattttttgctctcagtgcttcttcagactatgttccagttgaaaacttctttagcagtgttctgaaagaggtaaaaattctaccctatctaaagcacatctagggactgaatttcagaaacaactaaaatagggagttgactccctaacaaataacaact

SEQ ID NO: 280516 - DNA, 557 bp, Homo sapiens
ttttcttttgagacagggtctcattctgtttaccaggatggagtgcagtggcacaataatagctcattgcagtaaatttatcaactaatacagatgtgtgacttttaagtgggcaacctgaaaagtggatataaatgctgattccaacaaaagcattatttataataaggatctactgtatcttgaaagatacaagtaataccttaccttgctcaatgacagctgatgactttgaaagagtggacgcctttgggagtacagatgacttcattttacgtttgactggcttttccttttccatgttttcttttgcagaattattcctagtgccatgactaaaactggattgaccaggactggaaagagtattcaaagctttggaatgtttcacagaattctctagtactaaaacatacaaacaaaatttaaaaattaagagttattgaacctaaagataagaaaaaaggttaacctgaattatttgaattagccaagacaacaaaacctgaaggatgcttaaagctttcttaggaaagctactttctaataggaaaaag

SEQ ID NO: 280517 - DNA, 3390 bp, Homo sapiens
aaaaaaagacctatataaattagtttaagctaacatttagacatttactattacatatatggtatttgcaaccaaatcactgagtttgttgttgtcgttgtttgaggctgttgctctgtcacccaggatggagtgcaagtagctcaatcatagcttactgcagcctaaaaactcctgggctgaagaaatcctctcacctcagccttttaagtagctgaaacattaggtgcacaccaccaggcctggctaattttttattagtgataaggtcttgctatgttgcccaggctggtctcaaactcctggcttcaagcagtcctgcctcagcttcccagagtgctggactacaggcatgagccactgcacccagccccaaatagcttctactcataacctagtgtggcctaaatttatttaaaatgcccgggtaggccaggcacgttggctcacgcctgtaatcccagcacttgggaggccgaggtaggcagatcacttgaggtcaggagttcgagaccaacctggccaatatattgaaaccctgtctcttctaaaaatacagaagttactcaggcgtggtggcgtgtgactgtaatctcagctaccggggaggctgaagcagaagaaacgctcgaacctgggaggcagagcttacagtgagccgagatcgcaccactgcacttcagcctgggtgacaaagtgagactccatctacatacatacatacatacatacatacatacatacataaaatgcccagtatcttacaagactgtagttcacagtgggtaattcaaatcagacactgctcttcaagagaggtaatattaatagaaatctttcaagaaggattgttttctactattaaaacaataaaactcttataaacctgtttatcagaaggatatttctgtttcagcaactcctggaatccttcttcaacatcccaaccaacaattactcccagatagccatgtcacctgtgaattatcatgaatcccacatcaaataaacaaatactgcctctggactctaaattgcacatttttgagaaaatatttatgcaaagtgttccactgaaatgtatctcttacgaaagtatctgaatagtgaagtatttatcactcatcacagtaacttacggtaagaaatcaataaaattgttttattaaatgtacacataaaaaggcatataagtttttgaccttcagttgttttggaattaaattacatttcggcacccaaatatcttttaactgacagttttcacactttgcaaaacacacagggcactggaaactctaatgaaccagcatttacataatggtatctgccatatgaccactttggtaagcagcttgttgagattatgtactaagtgctttatgtgatgccaaaaaactttaaaaagcaaataataaatcatgaggctctacaaaatagcttagaaaaacaagttttctatttatttaaaaataagtttgtagttactacattgcagggacaggtattcttacacatacattctagtttgtataaaaggattcaaagaattatgcatcaaaactaacatagaaagtgtccacgtaacagtaaagaaaggtccaatcagtatgtacaaaaagaaagggcactgctattctggtgtgaaactgctgtttataatatgatactccaggttcggaaggaaaaaaacaaacttcaataaagctaaataattaatttgttttaaaactctgtgttacttattacatacaacagatctgcttgtgtttaaacattgttttctgtacaaaataagcataatcttaatttgaaaatgtgtcagtttcaactttcaccctctaggtcagttactttttaaaaattgagctacattctacacatgtctaaatatcctgtgacaggatttaagttttctaaaagatcttcagtaagacccctgtcttcttgcagttttaatatggtccaaaaatgtaactttgtattgtctcatgttatagtctatcattgtgactaatcaacacacacaatcttaaagtaaccagcatgtgtgcatctgccttatatgcatgtactatattccatcttgaacctattttcttggctccttgaattgtagaaactcagccatgcactaagtatttggtctgtgccataaggttaatttcctgataatttttatctgcattaaaaaagtatttcaacacagagctatcaaaactaaaaataatatctatttatagctcatattttctactcactgttctactgcagtgtgtacaaggtttatctctggagcgccaaaagtggtacttacagtcttctgactcaatttgaccttttcttgggtactatacatagttcgtaatgacttttcatttggagcaaactttgctcagtataattaacaaaaatagtttcttagtaagtgtaatattaattttagttcagatcacttggaaattaggggaactaagggaaactgcaagggtagaagcaaagaaaagtgtatttttcaaattttaatgggaaaataaattcttgcctaagtgtaacaaaaccactgctcaatctgttatgttagaaatactttttaggttaataggagtaatcagatgataaaactacttcccctattatgacttttaaaatcatgtaactcctgcatataagcagaacacttacagtcctttaatcactcaagtatcttggtcctttcaacctactcaaaaataaatttcaggtaacaaaaacattcagaatatatccgttttcattagatagaaaactgaaaaagttgcttctagctgacatttgagagagatatacagtaggtatatatgtataaaatggaatgtcagaattgaagtaaacattgttaactggagaaattaatttatattacaaatcatatctgaaaacatgtaaatgctgctaacatataagataaaaatatttgaatacatttcttaaaatgtctgattcctctactgcactgcagatgagggacagttctagatgttaacatacatgctgcataaagatattttctctgattactgtatcttatgtaattcatttccaagtgataactaaatttagtcaatcccaagtctcagatgttacctaatccagctcacaaatattccacatacttatttacttggattggaggaagacagttttataataatgccagcagtctttaaatttgtagtgaagttgtgcaataaaaacaattgaaataaggccaatctttagtttataatacatgcagaaaatagtccaatgccactatagcaggtcacaaaggataaaattttaaaaagctatgtatctattgcccagggctgtgagtctctgattagactaaatatttaaactaatgct

SEQ ID NO: 280518 - DNA, 3476 bp, Homo sapiens
aggtttaagggaaactccttcaatttcatttaaaaatccctggtttaaaatataagttttttaatattcaagacaatattagataaatttgaaaattcaaaagcaaaaatcttaaagaacaaaataatttagttataagtatcaaataggcttttaaaaatctgttacatactataaaatgacctcatagtctggctatactttttttacttacatgtagagaaaatcttgaaacagtacatcagacatgaaaataatatcgtgtcatttcatttacaggtctgcattacatttactgaatttggaaaaatgcaaaatatttgtaactttcttgttgaaaagctagatagctctgttgtcatcagcccaccccagttctatcatactccaggttctgttgagaatcttcgacggcaagcctgtcttgttgctgttgagaatgcgtggcgcaaagctcaagaagtctgtaaccttgttggccaaaccttaggaaaacctttactaatcaaagaagaagaaacaaaagaatgggaaggccaaatagatgatcaccagtcatccagactctcaagttcattaactgtacaacaaaaaatcaaaagtgcaacaatacatgctgcttcaaaagtatttataacttttgagaagttactcaggcgtggtggcgtgtgactgtaatctcagctaccggggaggctgaagcagaagaaacgctcgaacctgggaggcagagcttacagtgagccgagatcgcaccactgcacttcagcctgggtgacaaagtgagactccatctacatacatacatacatacatacatacatacatacataaaatgcccagtatcttacaagactgtagttcacagtgggtaattcaaatcagacactgctcttcaagagaggtaatattaatagaaatctttcaagaaggattgttttctactattaaaacaataaaactcttataaacctgtttatcagaaggatatttctgtttcagcaactcctggaatccttcttcaacatcccaaccaacaattactcccagatagccatgtcacctgtgaattatcatgaatcccacatcaaataaacaaatactgcctctggactctaaattgcacatttttgagaaaatatttatgcaaagtgttccactgaaatgtatctcttacgaaagtatctgaatagtgaagtatttatcactcatcacagtaacttacggtaagaaatcaataaaattgttttattaaatgtacacataaaaaggcatataagtttttgaccttcagttgttttggaattaaattacatttcggcacccaaatatcttttaactgacagttttcacactttgcaaaacacacagggcactggaaactctaatgaaccagcatttacataatggtatctgccatatgaccactttggtaagcagcttgttgagattatgtactaagtgctttatgtgatgccaaaaaactttaaaaagcaaataataaatcatgaggctctacaaaatagcttagaaaaacaagttttctatttatttaaaaataagtttgtagttactacattgcagggacaggtattcttacacatacattctagtttgtataaaaggattcaaagaattatgcatcaaaactaacatagaaagtgtccacgtaacagtaaagaaaggtccaatcagtatgtacaaaaagaaagggcactgctattctggtgtgaaactgctgtttataatatgatactccaggttcggaaggaaaaaaacaaacttcaataaagctaaataattaatttgttttaaaactctgtgttacttattacatacaacagatctgcttgtgtttaaacattgttttctgtacaaaataagcataatcttaatttgaaaatgtgtcagtttcaactttcaccctctaggtcagttactttttaaaaattgagctacattctacacatgtctaaatatcctgtgacaggatttaagttttctaaaagatcttcagtaagacccctgtcttcttgcagttttaatatggtccaaaaatgtaactttgtattgtctcatgttatagtctatcattgtgactaatcaacacacacaatcttaaagtaaccagcatgtgtgcatctgccttatatgcatgtactatattccatcttgaacctattttcttggctccttgaattgtagaaactcagccatgcactaagtatttggtctgtgccataaggttaatttcctgataatttttatctgcattaaaaaagtatttcaacacagagctatcaaaactaaaaataatatctatttatagctcatattttctactcactgttctactgcagtgtgtacaaggtttatctctggagcgccaaaagtggtacttacagtcttctgactcaatttgaccttttcttgggtactatacatagttcgtaatgacttttcatttggagcaaactttgctcagtataattaacaaaaatagtttcttagtaagtgtaatattaattttagttcagatcacttggaaattaggggaactaagggaaactgcaagggtagaagcaaagaaaagtgtatttttcaaattttaatgggaaaataaattcttgcctaagtgtaacaaaaccactgctcaatctgttatgttagaaatactttttaggttaataggagtaatcagatgataaaactacttcccctattatgacttttaaaatcatgtaactcctgcatataagcagaacacttacagtcctttaatcactcaagtatcttggtcctttcaacctactcaaaaataaatttcaggtaacaaaaacattcagaatatatccgttttcattagatagaaaactgaaaaagttgcttctagctgacatttgagagagatatacagtaggtatatatgtataaaatggaatgtcagaattgaagtaaacattgttaactggagaaattaatttatattacaaatcatatctgaaaacatgtaaatgctgctaacatataagataaaaatatttgaatacatttcttaaaatgtctgattcctctactgcactgcagatgagggacagttctagatgttaacatacatgctgcataaagatattttctctgattactgtatcttatgtaattcatttccaagtgataactaaatttagtcaatcccaagtctcagatgttacctaatccagctcacaaatattccacatacttatttacttggattggaggaagacagttttataataatgccagcagtctttaaatttgtagtgaagttgtgcaataaaaacaattgaaataaggccaatctttagtttataatacatgcagaaaatagtccaatgccactatagcaggtcacaaaggataaaattttaaaaagctatgtatctattgcccagggctgtgagtctctgattagactaaatatttaaactaatgct

SEQ ID NO: 280519 - DNA, 3240 bp, Homo sapiens
agcggatggaaacccagctgccatcgctatgtctctgcaaaagacccctccgacccgagtgttcgtggaactggttccctgggctgaccggagccgggagaacaacctggcctcagggagagagacgctaccgggcttacgccaccccctctcctcaacacaagcccaaactgctacccgcgaggtgcaagtaagcggcacctcagaagtgtctgcgggccctgaccgggcgcaggtggtggtgcgagtgagcagcaccaaggaggcggcagccgaggccaaaaagagcgtttgtcgccgtctagattacatcacgcagagcctccagcagcagggcgtgcaggcagaaaatataactgtgacaaaggattttaggagagtggaaaatgcttatcacatggaagcagagaagttactcaggcgtggtggcgtgtgactgtaatctcagctaccggggaggctgaagcagaagaaacgctcgaacctgggaggcagagcttacagtgagccgagatcgcaccactgcacttcagcctgggtgacaaagtgagactccatctacatacatacatacatacatacatacatacatacataaaatgcccagtatcttacaagactgtagttcacagtgggtaattcaaatcagacactgctcttcaagagaggtaatattaatagaaatctttcaagaaggattgttttctactattaaaacaataaaactcttataaacctgtttatcagaaggatatttctgtttcagcaactcctggaatccttcttcaacatcccaaccaacaattactcccagatagccatgtcacctgtgaattatcatgaatcccacatcaaataaacaaatactgcctctggactctaaattgcacatttttgagaaaatatttatgcaaagtgttccactgaaatgtatctcttacgaaagtatctgaatagtgaagtatttatcactcatcacagtaacttacggtaagaaatcaataaaattgttttattaaatgtacacataaaaaggcatataagtttttgaccttcagttgttttggaattaaattacatttcggcacccaaatatcttttaactgacagttttcacactttgcaaaacacacagggcactggaaactctaatgaaccagcatttacataatggtatctgccatatgaccactttggtaagcagcttgttgagattatgtactaagtgctttatgtgatgccaaaaaactttaaaaagcaaataataaatcatgaggctctacaaaatagcttagaaaaacaagttttctatttatttaaaaataagtttgtagttactacattgcagggacaggtattcttacacatacattctagtttgtataaaaggattcaaagaattatgcatcaaaactaacatagaaagtgtccacgtaacagtaaagaaaggtccaatcagtatgtacaaaaagaaagggcactgctattctggtgtgaaactgctgtttataatatgatactccaggttcggaaggaaaaaaacaaacttcaataaagctaaataattaatttgttttaaaactctgtgttacttattacatacaacagatctgcttgtgtttaaacattgttttctgtacaaaataagcataatcttaatttgaaaatgtgtcagtttcaactttcaccctctaggtcagttactttttaaaaattgagctacattctacacatgtctaaatatcctgtgacaggatttaagttttctaaaagatcttcagtaagacccctgtcttcttgcagttttaatatggtccaaaaatgtaactttgtattgtctcatgttatagtctatcattgtgactaatcaacacacacaatcttaaagtaaccagcatgtgtgcatctgccttatatgcatgtactatattccatcttgaacctattttcttggctccttgaattgtagaaactcagccatgcactaagtatttggtctgtgccataaggttaatttcctgataatttttatctgcattaaaaaagtatttcaacacagagctatcaaaactaaaaataatatctatttatagctcatattttctactcactgttctactgcagtgtgtacaaggtttatctctggagcgccaaaagtggtacttacagtcttctgactcaatttgaccttttcttgggtactatacatagttcgtaatgacttttcatttggagcaaactttgctcagtataattaacaaaaatagtttcttagtaagtgtaatattaattttagttcagatcacttggaaattaggggaactaagggaaactgcaagggtagaagcaaagaaaagtgtatttttcaaattttaatgggaaaataaattcttgcctaagtgtaacaaaaccactgctcaatctgttatgttagaaatactttttaggttaataggagtaatcagatgataaaactacttcccctattatgacttttaaaatcatgtaactcctgcatataagcagaacacttacagtcctttaatcactcaagtatcttggtcctttcaacctactcaaaaataaatttcaggtaacaaaaacattcagaatatatccgttttcattagatagaaaactgaaaaagttgcttctagctgacatttgagagagatatacagtaggtatatatgtataaaatggaatgtcagaattgaagtaaacattgttaactggagaaattaatttatattacaaatcatatctgaaaacatgtaaatgctgctaacatataagataaaaatatttgaatacatttcttaaaatgtctgattcctctactgcactgcagatgagggacagttctagatgttaacatacatgctgcataaagatattttctctgattactgtatcttatgtaattcatttccaagtgataactaaatttagtcaatcccaagtctcagatgttacctaatccagctcacaaatattccacatacttatttacttggattggaggaagacagttttataataatgccagcagtctttaaatttgtagtgaagttgtgcaataaaaacaattgaaataaggccaatctttagtttataatacatgcagaaaatagtccaatgccactatagcaggtcacaaaggataaaattttaaaaagctatgtatctattgcccagggctgtgagtctctgattagactaaatatttaaactaatgct

SEQ ID NO: 280520 - DNA, 3553 bp, Homo sapiens
agcggatggaaacccagctgccatcgctatgtctctgcaaaagacccctccgacccgagtgttcgtggaactggttccctgggctgaccggagccgggagaacaacctggcctcagggagagagacgctaccgggcttacgccaccccctctcctcaacacaagcccaaactgctacccgcgaggtgcaagtaagcggcacctcagaagtgtctgcgggccctgaccgggcgcaggtggtggtgcgagtgagcagcaccaaggaggcggcagccgaggccaaaaagagcgtttgtcgccgtctagattacatcacgcagagcctccagcagcagggcgtgcaggcagaaaatataactgtgacaaaggattttaggagagtggaaaatgcttatcacatggaagcagaggtctgcattacatttactgaatttggaaaaatgcaaaatatttgtaactttcttgttgaaaagctagatagctctgttgtcatcagcccaccccagttctatcatactccaggttctgttgagaatcttcgacggcaagcctgtcttgttgctgttgagaatgcgtggcgcaaagctcaagaagtctgtaaccttgttggccaaaccttaggaaaacctttactaatcaaagaagaagaaacaaaagaatgggaaggccaaatagatgatcaccagtcatccagactctcaagttcattaactgtacaacaaaaaatcaaaagtgcaacaatacatgctgcttcaaaagtatttataacttttgagaagttactcaggcgtggtggcgtgtgactgtaatctcagctaccggggaggctgaagcagaagaaacgctcgaacctgggaggcagagcttacagtgagccgagatcgcaccactgcacttcagcctgggtgacaaagtgagactccatctacatacatacatacatacatacatacatacatacataaaatgcccagtatcttacaagactgtagttcacagtgggtaattcaaatcagacactgctcttcaagagaggtaatattaatagaaatctttcaagaaggattgttttctactattaaaacaataaaactcttataaacctgtttatcagaaggatatttctgtttcagcaactcctggaatccttcttcaacatcccaaccaacaattactcccagatagccatgtcacctgtgaattatcatgaatcccacatcaaataaacaaatactgcctctggactctaaattgcacatttttgagaaaatatttatgcaaagtgttccactgaaatgtatctcttacgaaagtatctgaatagtgaagtatttatcactcatcacagtaacttacggtaagaaatcaataaaattgttttattaaatgtacacataaaaaggcatataagtttttgaccttcagttgttttggaattaaattacatttcggcacccaaatatcttttaactgacagttttcacactttgcaaaacacacagggcactggaaactctaatgaaccagcatttacataatggtatctgccatatgaccactttggtaagcagcttgttgagattatgtactaagtgctttatgtgatgccaaaaaactttaaaaagcaaataataaatcatgaggctctacaaaatagcttagaaaaacaagttttctatttatttaaaaataagtttgtagttactacattgcagggacaggtattcttacacatacattctagtttgtataaaaggattcaaagaattatgcatcaaaactaacatagaaagtgtccacgtaacagtaaagaaaggtccaatcagtatgtacaaaaagaaagggcactgctattctggtgtgaaactgctgtttataatatgatactccaggttcggaaggaaaaaaacaaacttcaataaagctaaataattaatttgttttaaaactctgtgttacttattacatacaacagatctgcttgtgtttaaacattgttttctgtacaaaataagcataatcttaatttgaaaatgtgtcagtttcaactttcaccctctaggtcagttactttttaaaaattgagctacattctacacatgtctaaatatcctgtgacaggatttaagttttctaaaagatcttcagtaagacccctgtcttcttgcagttttaatatggtccaaaaatgtaactttgtattgtctcatgttatagtctatcattgtgactaatcaacacacacaatcttaaagtaaccagcatgtgtgcatctgccttatatgcatgtactatattccatcttgaacctattttcttggctccttgaattgtagaaactcagccatgcactaagtatttggtctgtgccataaggttaatttcctgataatttttatctgcattaaaaaagtatttcaacacagagctatcaaaactaaaaataatatctatttatagctcatattttctactcactgttctactgcagtgtgtacaaggtttatctctggagcgccaaaagtggtacttacagtcttctgactcaatttgaccttttcttgggtactatacatagttcgtaatgacttttcatttggagcaaactttgctcagtataattaacaaaaatagtttcttagtaagtgtaatattaattttagttcagatcacttggaaattaggggaactaagggaaactgcaagggtagaagcaaagaaaagtgtatttttcaaattttaatgggaaaataaattcttgcctaagtgtaacaaaaccactgctcaatctgttatgttagaaatactttttaggttaataggagtaatcagatgataaaactacttcccctattatgacttttaaaatcatgtaactcctgcatataagcagaacacttacagtcctttaatcactcaagtatcttggtcctttcaacattagatagaaaactgaaaaagttgcttctagctgacatttgagagagatatacagtaggtatatatgtataaaatggaatgtcagaattgaagtaaacattgttaactggagaaattaatttatattacaaatcatatctgaaaacatgtaaatgctgctaacatataagataaaaatatttgaatacatttcttaaaatgtctgattcctctactgcactgcagatgagggacagttctagatgttaacatacatgctgcataaagatattttctctgattactgtatcttatgtaattcatttccaagtgataactaaatttagtcaatcccaagtctcagatgttacctaatccagctcacaaatattccacatacttatttacttggattggaggaagacagttttataataatgccagcagtctttaaatttgtagtgaagttgtgcaataaaaacaattgaaataaggccaatctttagtttataatacatgcagaaaatagtccaatgccactatagcaggtcacaaaggataaaattttaaaaagctatgtatctattgcccagggctgtgagtctctgattagactaaatatttaaactaatgct

SEQ ID NO: 280521 - DNA, 3552 bp, Homo sapiens
agcggatggaaacccagctgccatcgctatgtctctgcaaaagacccctccgacccgagtgttcgtggaactggttccctgggctgaccggagccgggagaacaacctggcctcagggagagagacgctaccgggcttacgccaccccctctcctcaacacaagcccaaactgctacccgcgaggtgcaagtaagcggcacctcagaagtgtctgcgggccctgaccgggcgcaggtggtggtgcgagtgagcagcaccaaggaggcggcagccgaggccaaaaagagcgtttgtcgccgtctagattacatcacgcagagcctccagcagcagggcgtgcaggcagaaaatataactgtgacaaaggattttaggagagtggaaaatgcttatcacatggaagcagaggtctgcattacatttactgaatttggaaaaatgcaaaatatttgtaactttcttgttgaaaagctagatagctctgttgtcatcagcccaccccagttctatcatactccaggttctgttgagaatcttcgacggcaagcctgtcttgttgctgttgagaatgcgtggcgcaaagctcaagaagtctgtaaccttgttggccaaaccttaggaaaacctttactaatcaaagaagaagaaacaaaagaatgggaaggccaaatagatgatcaccagtcatccagactctcaagttcattaactgtacaacaaaaaatcaaaagtgcaacaatacatgctgcttcaaaagtatttataacttttgagaagttactcaggcgtggtggcgtgtgactgtaatctcagctaccggggaggctgaagcagaagaaacgctcgaacctgggaggcagagcttacagtgagccgagatcgcaccactgcacttcagcctgggtgacaaagtgagactccatctacatacatacatacatacatacatacatacatacataaaatgcccagtatcttacaagactgtagttcacagtgggtaattcaaatcagacactgctcttcaagagaggtaatattaatagaaatctttcaagaaggattgttttctactattaaaacaataaaactcttataaacctgtttatcagaaggatatttctgtttcagcaactcctggaatccttcttcaacatcccaaccaacaattactcccagatagccatgtcacctgtgaattatcatgaatcccacatcaaataaacaaatactgcctctggactctaaattgcacatttttgagaaaatatttatgcaaagtgttccactgaaatgtatctcttacgaaagtatctgaatagtgaagtatttatcactcatcacagtaacttacggtaagaaatcaataaaattgttttattaaatgtacacataaaaaggcatataagtttttgaccttcagttgttttggaattaaattacatttcggcacccaaatatcttttaactgacagttttcacactttgcaaaacacacagggcactggaaactctaatgaaccagcatttacataatggtatctgccatatgaccactttggtaagcagcttgttgagattatgtactaagtgctttatgtgatgccaaaaaactttaaaaagcaaataataaatcatgaggctctacaaaatagcttagaaaaacaagttttctatttatttaaaaataagtttgtagttactacattgcagggacaggtattcttacacatacattctagtttgtataaaaggattcaaagaattatgcatcaaaactaacatagaaagtgtccacgtaacagtaaagaaaggtccaatcagtatgtacaaaaagaaagggcactgctattctggtgtgaaactgctgtttataatatgatactccaggttcggaaggaaaaaaacaaacttcaataaagctaaataattaatttgttttaaaactctgtgttacttattacatacaacagatctgcttgtgtttaaacattgttttctgtacaaaataagcataattaaaaattgagctacattctacacatgtctaaatatcctgtgacaggatttaagttttctaaaagatcttcagtaagacccctgtcttcttgcagttttaatatggtccaaaaatgtaactttgtattgtctcatgttatagtctatcattgtgactaatcaacacacacaatcttaaagtaaccagcatgtgtgcatctgccttatatgcatgtactatattccatcttgaacctattttcttggctccttgaattgtagaaactcagccatgcactaagtatttggtctgtgccataaggttaatttcctgataatttttatctgcattaaaaaagtatttcaacacagagctatcaaaactaaaaataatatctatttatagctcatattttctactcactgttctactgcagtgtgtacaaggtttatctctggagcgccaaaagtggtacttacagtcttctgactcaatttgaccttttcttgggtactatacatagttcgtaatgacttttcatttggagcaaactttgctcagtataattaacaaaaatagtttcttagtaagtgtaatattaattttagttcagatcacttggaaattaggggaactaagggaaactgcaagggtagaagcaaagaaaagtgtatttttcaaattttaatgggaaaataaattcttgcctaagtgtaacaaaaccactgctcaatctgttatgttagaaatactttttaggttaataggagtaatcagatgataaaactacttcccctattatgacttttaaaatcatgtaactcctgcatataagcagaacacttacagtcctttaatcactcaagtatcttggtcctttcaacctactcaaaaataaatttcaggtaacaaaaacattcagaatatatccgttttcattagatagaaaactgaaaaagttgcttctagctgacatttgagagagatatacagtaggtatatatgtataaaatggaatgtcagaattgaagtaaacattgttaactggagaaattaatttatattacaaatcatatctgaaaacatgtaaatgctgctaacatataagataaaaatatttgaatacatttcttaaaatgtctgattcctctactgcactgcagatgagggacagttctagatgttaacatacatgctgcataaagatattttctctgattactgtatcttatgtaattcatttccaagtgataactaaatttagtcaatcccaagtctcagatgttacctaatccagctcacaaatattccacatacttatttacttggattggaggaagacagttttataataatgccagcagtctttaaatttgtagtgaagttgtgcaataaaaacaattgaaataaggccaatctttagtttataatacatgcagaaaatagtccaatgccactatagcaggtcacaaaggataaaattttaaaaagctatgtatctattgcccagggctgtgagtctctgattagactaaatatttaaactaatgct

SEQ ID NO: 280522 - DNA, 1473 bp, Homo sapiens
agcggatggaaacccagctgccatcgctatgtctctgcaaaagacccctccgacccgagtgttcgtggaactggttccctgggctgaccggagccgggagaacaacctggcctcagggagagagacgctaccgggcttacgccaccccctctcctcaacacaagcccaaactgctacccgcgaggtgcaagtaagcggcacctcagaagtgtctgcgggccctgaccgggcgcaggtggtggtgcgagtgagcagcaccaaggaggcggcagccgaggccaaaaagagcgtttgtcgccgtctagattacatcacgcagagcctccagcagcagggcgtgcaggcagaaaatataactgtgacaaaggattttaggagagtggaaaatgcttatcacatggaagcagaggtctgcattacatttactgaatttggaaaaatgcaaaatatttgtaactttcttgttgaaaagctagatagctctgttgtcatcagcccaccccagttctatcatactccaggttctgttgagaatcttcgacggcaagcctgtcttgttgctgttgagaatgcgtggcgcaaagctcaagaagtctgtaaccttgttggccaaaccttaggaaaacctttactaatcaaagaagaagaaacaaaagaatgggaaggccaaatagatgatcaccagtcatccagactctcaagttcattaactgtacaacaaaaaatcaaaagtgcaacaatacatgctgcttcaaaagtatttataacttttgagaagttactcaggcgtggtggcgtgtgactgtaatctcagctaccggggaggctgaagcagaagaaacgctcgaacctgggaggcagagcttacagtgagccgagatcgcaccactgcacttcagcctgggtgacaaagtgagactccatctacatacatacatacatacatacatacatacatacataaaatgcccagtatcttacaagactgtagttcacagtgggtaattcaaatcagacactgctcttcaagagaggtaatattaatagaaatctttcaagaaggattgttttctactattaaaacaataaaactcttataaacctgtttatcagaaggatatttctgtttcagcaactcctggaatccttcttcaacatcccaaccaacaattactcccagatagccatgtcacctgtgaattatcatgaatcccacatcaaataaacaaatactgcctctggactctaaaagaaaaagaaaaaaaaaaaaacaaaccgttgcggcgcacaagaagccctcaaaaaacatctaaacaacctagaaagggacacagggcacacaggggacaacgaaacacgaggacacaacacagcatcacccagtaggacaaccgcggcacaacacaagaggcaggaactccaaccagtgacaacaacgccggggggaacacgcggaacggaacaaacccaagg

SEQ ID NO: 280523 - DNA, 443 bp, Homo sapiens
aaaaatgcaaaatatttgtaactttcttgttgaaaagctagatagctctgttgtcatcagcccaccccagttctatcatactccaggttctgttgagaatcttcggtaagtttaagcacatctttaactaagatattctttaaacaaaactatccagtgctacatttcattgagtgtcatattaataatctctccatttaattcctaagacggcaagcctgtcttgttgctgttgagaatgcgtggcgcaaagctcaagaagtctgtaaccttgttggccaaaccttaggaaaacctttactaatcaaagaagaagaaacaaaagaatgggaaggccaaatagatgatcaccagtcatccagactctcaagttcattaactgtacaacaaaaaatcaaaagtgcaacaatacatgctgcttcaaaagtatttataacttttga

SEQ ID NO: 280524 - DNA, 605 bp, Homo sapiens
gttgctgaaaggtaatttttcttggctggttcttctaagtatatactaggtattgttattagcagacttcataaagaaaaggttatcaggaattttttttaccttccttcctcaacttagaaatttattatatacaaaatcattttaacaaaacatcttagggagaaattaacacaaaattacaaatcactccatgtgcttaatttgaaatgttatggccttatgtattcatatctaatggtcttcatgctaaaattgggattcttagtcaataaaaatgcatgccaatctgacaaaatttctaggaaaactgcaataaccttctttccatcattccttttttcccagaaattgcacatttttgagaaaatatttatgcaaagtgttccactgaaatgtatctcttacgaaagtatctgaatagtgaagtatttatcactcatcacagtaacttacggtaagaaatcaataaaattgttttattaaatgtacacataaaaaggcatataagtttttgaccttcagttgttttggaattaaattacatttcggcacccaaatatcttttaactgacagttttcacactttgcaaaacacacagggc

SEQ ID NO: 280525 - DNA, 891 bp, Homo sapiens
agcggatggaaacccagctgccatcgctatgtctctgcaaaagacccctccgacccgagtgttcgtggaactggttccctgggctgaccggagccgggagaacaacctggcctcagggagagagacgctaccgggcttacgccaccccctctcctcaacacaagcccaaactgctacccgcgaggtgcaagtaagcggcacctcagaagtgtctgcgggccctgaccgggcgcaggtggtggtgcgagtgagcagcaccaaggaggcggcagccgaggccaaaaagagcgtttgtcgccgtctagattacatcacgcagagcctccagcagcagggcgtgcaggcagaaaatataactgtgacaaaggattttaggagagtggaaaatgcttatcacatggaagcagaggtctgcattacatttactgaatttggaaaaatgcaaaatatttgtaactttcttgttgaaaagctagatagctctgttgtcatcagcccaccccagttctatcatactccaggttctgttgagaatcttcgaaattgcacatttttgagaaaatatttatgcaaagtgttccactgaaatgtatctcttacgaaagtatctgaatagtgaagtatttatcactcatcacagtaacttacgaattattcctagtgccatgactaaaactggattgaccaggactggaaagagtattcaaagctttggaatgtttcacagaattctctagtactaaaacatacaaacaaaatttaaaaattaagagttattgaacctaaagataagaaaaaaggttaacctgaattatttgaattagccaagacaacaaaacctgaaggatgcttaaagctttcttaggaaagctactttctaataggaaaaag

SEQ ID NO: 280526 - DNA, 3606 bp, Homo sapiens
agcggatggaaacccagctgccatcgctatgtctctgcaaaagacccctccgacccgagtgttcgtggaactggttccctgggctgaccggagccgggagaacaacctggcctcagggagagagacgctaccgggcttacgccaccccctctcctcaacacaagcccaaactgctacccgcgaggtgcaagtaagcggcacctcagaagtgtctgcgggccctgaccgggcgcaggtggtggtgcgagtgagcagcaccaaggaggcggcagccgaggccaaaaagagcgtttgtcgccgtctagattacatcacgcagagcctccagcagcagggcgtgcaggcagaaaatataactgtgacaaaggattttaggagagtggaaaatgcttatcacatggaagcagaggtctgcattacatttactgaatttggaaaaatgcaaaatatttgtaactttcttgttgaaaagctagatagctctgttgtcatcagcccaccccagttctatcatactccaggttctgttgagaatcttcgacggcaagcctgtcttgttgctgttgagaatgcgtggcgcaaagctcaagaagtctgtaaccttgttggccaaaccttaggaaaacctttactaatcaaagaagaagaaacaaaagaatgggaaggccaaatagatgatcaccagtcatccagactctcaagttcattaactgtacaacaaaaaatcaaaagtgcaacaatacatgctgcttcaaaagtatttataacttttgagaagttactcaggcgtggtggcgtgtgactgtaatctcagctaccggggaggctgaagcagaagaaacgctcgaacctgggaggcagagcttacagtgagccgagatcgcaccactgcacttcagcctgggtgacaaagtgagactccatctacatacatacatacatacatacatacatacatacataaaatgcccagtatcttacaagactgtagttcacagtgggtaattcaaatcagacactgctcttcaagagaggtaatattaatagaaatctttcaagaaggattgttttctactattaaaacaataaaactcttataaacctgtttatcagaaggatatttctgtttcagcaactcctggaatccttcttcaacatcccaaccaacaattactcccagatagccatgtcacctgtgaattatcatgaatcccacatcaaataaacaaatactgcctctggactctaaattgcacatttttgagaaaatatttatgcaaagtgttccactgaaatgtatctcttacgaaagtatctgaatagtgaagtatttatcactcatcacagtaacttacggtaagaaatcaataaaattgttttattaaatgtacacataaaaaggcatataagtttttgaccttcagttgttttggaattaaattacatttcggcacccaaatatcttttaactgacagttttcacactttgcaaaacacacagggcactggaaactctaatgaaccagcatttacataatggtatctgccatatgaccactttggtaagcagcttgttgagattatgtactaagtgctttatgtgatgccaaaaaactttaaaaagcaaataataaatcatgaggctctacaaaatagcttagaaaaacaagttttctatttatttaaaaataagtttgtagttactacattgcagggacaggtattcttacacatacattctagtttgtataaaaggattcaaagaattatgcatcaaaactaacatagaaagtgtccacgtaacagtaaagaaaggtccaatcagtatgtacaaaaagaaagggcactgctattctggtgtgaaactgctgtttataatatgatactccaggttcggaaggaaaaaaacaaacttcaataaagctaaataattaatttgttttaaaactctgtgttacttattacatacaacagatctgcttgtgtttaaacattgttttctgtacaaaataagcataatcttaatttgaaaatgtgtcagtttcaactttcaccctctaggtcagttactttttaaaaattgagctacattctacacatgtctaaatatcctgtgacaggatttaagttttctaaaagatcttcagtaagacccctgtcttcttgcagttttaatatggtccaaaaatgtaactttgtattgtctcatgttatagtctatcattgtgactaatcaacacacacaatcttaaagtaaccagcatgtgtgcatctgccttatatgcatgtactatattccatcttgaacctattttcttggctccttgaattgtagaaactcagccatgcactaagtatttggtctgtgccataaggttaatttcctgataatttttatctgcattaaaaaagtatttcaacacagagctatcaaaactaaaaataatatctatttatagctcatattttctactcactgttctactgcagtgtgtacaaggtttatctctggagcgccaaaagtggtacttacagtcttctgactcaatttgaccttttcttgggtactatacatagttcgtaatgacttttcatttggagcaaactttgctcagtataattaacaaaaatagtttcttagtaagtgtaatattaattttagttcagatcacttggaaattaggggaactaagggaaactgcaagggtagaagcaaagaaaagtgtatttttcaaattttaatgggaaaataaattcttgcctaagtgtaacaaaaccactgctcaatctgttatgttagaaatactttttaggttaataggagtaatcagatgataaaactacttcccctattatgacttttaaaatcatgtaactcctgcatataagcagaacacttacagtcctttaatcactcaagtatcttggtcctttcaacctactcaaaaataaatttcaggtaacaaaaacattcagaatatatccgttttcattagatagaaaactgaaaaagttgcttctagctgacatttgagagagatatacagtaggtatatatgtataaaatggaatgtcagaattgaagtaaacattgttaactggagaaattaatttatattacaaatcatatctgaaaacatgtaaatgctgctaacatataagataaaaatatttgaatacatttcttaaaatgtctgattcctctactgcactgcagatgagggacagttctagatgttaacatacatgctgcataaagatattttctctgattactgtatcttatgtaattcatttccaagtgataactaaatttagtcaatcccaagtctcagatgttacctaatccagctcacaaatattccacatacttatttacttggattggaggaagacagttttataataatgccagcagtctttaaatttgtagtgaagttgtgcaataaaaacaattgaaataaggccaatctttagtttataatacatgcagaaaatagtccaatgccactatagcaggtcacaaaggataaaattttaaaaagctatgtatctattgcccagggctgtgagtctctgattagactaaatatttaaactaatgct

SEQ ID NO: 280527 - DNA, 3014 bp, Homo sapiens
agcggatggaaacccagctgccatcgctatgtctctgcaaaagacccctccgacccgagtgttcgtggaactggttccctgggctgaccggagccgggagaacaacctggcctcagggagagagacgctaccgggcttacgccaccccctctcctcaacacaagcccaaactgctacccgcgaggtgcaagtaagcggcacctcagaagtgtctgcgggccctgaccgggcgcaggtggtggtgcgagtgagcagcaccaaggaggcggcagccgaggccaaaaagagcgtttgtcgccgtctagattacatcacgcagagcctccagcagcagggcgtgcaggcagaaaatataactgtgacaaaggattttaggagagtggaaaatgcttatcacatggaagcagaggtctgcattacatttactgaatttggaaaaatgcaaaatatttgtaactttcttgttgaaaagctagatagctctgttgtcatcagcccaccccagttctatcatactccaggttctgttgagaatcttcgcaactcctggaatccttcttcaacatcccaaccaacaattactcccagatagccatgtcacctgtgaattatcatgaatcccacatcaaataaacaaatactgcctctggactctaaattgcacatttttgagaaaatatttatgcaaagtgttccactgaaatgtatctcttacgaaagtatctgaatagtgaagtatttatcactcatcacagtaacttacggtaagaaatcaataaaattgttttattaaatgtacacataaaaaggcatataagtttttgaccttcagttgttttggaattaaattacatttcggcacccaaatatcttttaactgacagttttcacactttgcaaaacacacagggcactggaaactctaatgaaccagcatttacataatggtatctgccatatgaccactttggtaagcagcttgttgagattatgtactaagtgctttatgtgatgccaaaaaactttaaaaagcaaataataaatcatgaggctctacaaaatagcttagaaaaacaagttttctatttatttaaaaataagtttgtagttactacattgcagggacaggtattcttacacatacattctagtttgtataaaaggattcaaagaattatgcatcaaaactaacatagaaagtgtccacgtaacagtaaagaaaggtccaatcagtatgtacaaaaagaaagggcactgctattctggtgtgaaactgctgtttataatatgatactccaggttcggaaggaaaaaaacaaacttcaataaagctaaataattaatttgttttaaaactctgtgttacttattacatacaacagatctgcttgtgtttaaacattgttttctgtacaaaataagcataatcttaatttgaaaatgtgtcagtttcaactttcaccctctaggtcagttactttttaaaaattgagctacattctacacatgtctaaatatcctgtgacaggatttaagttttctaaaagatcttcagtaagacccctgtcttcttgcagttttaatatggtccaaaaatgtaactttgtattgtctcatgttatagtctatcattgtgactaatcaacacacacaatcttaaagtaaccagcatgtgtgcatctgccttatatgcatgtactatattccatcttgaacctattttcttggctccttgaattgtagaaactcagccatgcactaagtatttggtctgtgccataaggttaatttcctgataatttttatctgcattaaaaaagtatttcaacacagagctatcaaaactaaaaataatatctatttatagctcatattttctactcactgttctactgcagtgtgtacaaggtttatctctggagcgccaaaagtggtacttacagtcttctgactcaatttgaccttttcttgggtactatacatagttcgtaatgacttttcatttggagcaaactttgctcagtataattaacaaaaatagtttcttagtaagtgtaatattaattttagttcagatcacttggaaattaggggaactaagggaaactgcaagggtagaagcaaagaaaagtgtatttttcaaattttaatgggaaaataaattcttgcctaagtgtaacaaaaccactgctcaatctgttatgttagaaatactttttaggttaataggagtaatcagatgataaaactacttcccctattatgacttttaaaatcatgtaactcctgcatataagcagaacacttacagtcctttaatcactcaagtatcttggtcctttcaacctactcaaaaataaatttcaggtaacaaaaacattcagaatatatccgttttcattagatagaaaactgaaaaagttgcttctagctgacatttgagagagatatacagtaggtatatatgtataaaatggaatgtcagaattgaagtaaacattgttaactggagaaattaatttatattacaaatcatatctgaaaacatgtaaatgctgctaacatataagataaaaatatttgaatacatttcttaaaatgtctgattcctctactgcactgcagatgagggacagttctagatgttaacatacatgctgcataaagatattttctctgattactgtatcttatgtaattcatttccaagtgataactaaatttagtcaatcccaagtctcagatgttacctaatccagctcacaaatattccacatacttatttacttggattggaggaagacagttttataataatgccagcagtctttaaatttgtagtgaagttgtgcaataaaaacaattgaaataaggccaatctttagtttataatacatgcagaaaatagtccaatgccactatagcaggtcacaaaggataaaattttaaaaagctatgtatctattgcccagggctgtgagtctctgattagactaaatatttaaactaatgct

SEQ ID NO: 280528 - DNA, 3553 bp, Homo sapiens
agcggatggaaacccagctgccatcgctatgtctctgcaaaagacccctccgacccgagtgttcgtggaactggttccctgggctgaccggagccgggagaacaacctggcctcagggagagagacgctaccgggcttacgccaccccctctcctcaacacaagcccaaactgctacccgcgaggtgcaagtaagcggcacctcagaagtgtctgcgggccctgaccgggcgcaggtggtggtgcgagtgagcagcaccaaggaggcggcagccgaggccaaaaagagcgtttgtcgccgtctagattacatcacgcagagcctccagcagcagggcgtgcaggcagaaaatataactgtgacaaaggattttaggagagtggaaaatgcttatcacatggaagcagaggtctgcattacatttactgaatttggaaaaatgcaaaatatttgtaactttcttgttgaaaagctagatagctctgttgtcatcagcccaccccagttctatcatactccaggttctgttgagaatcttcgacggcaagcctgtcttgttgctgttgagaatgcgtggcgcaaagctcaagaagtctgtaaccttgttggccaaaccttaggaaaacctttactaatcaaagaagaagaaacaaaagaatgggaaggccaaatagatgatcaccagtcatccagactctcaagttcattaactgtacaacaaaaaatcaaaagtgcaacaatacatgctgcttcaaaagtatttataacttttgagaagttactcaggcgtggtggcgtgtgactgtaatctcagctaccggggaggctgaagcagaagaaacgctcgaacctgggaggcagagcttacagtgagccgagatcgcaccactgcacttcagcctgggtgacaaagtgagactccatctacatacatacatacatacatacatacatacatacataaaatgcccagtatcttacaagactgtagttcacagtgggtaattcaaatcagacactgctcttcaagagaggtaatattaatagaaatctttcaagaaggattgttttctactattaaaacaataaaactcttataaacctgtttatcagaaggatatttctgtttcagcaactcctggaatccttcttcaacatcccaaccaacaattactcccagatagccatgtcacctgtgaattatcatgaatcccacatcaaataaacaaatactgcctctggactctaaattgcacatttttgagaaaatatttatgcaaagtgttccactgaaatgtatctcttacgaaagtatctgaatagtgaagtatttatcactcatcacagtaacttacggtaagaaatcaataaaattgttttattaaatgtacacataaaaaggcatataagtttttgaccttcagttgttttggaattaaattacatttcggcacccaaatatcttttaactgacagttttcacactttgcaaaacacacagggcactggaaactctaatgaaccagcatttacataatggtatctgccatatgaccactttggtaagcagcttgttgagattatgtactaagtgctttatgtgatgccaaaaaactttaaaaagcaaataataaatcatgaggctctacaaaatagcttagaaaaacaagttttctatttatttaaaaataagtttgtagttactacattgcagggacaggtattcttacacatacattctagtttgtataaaaggattcaaagaattatgcatcaaaactaacatagaaagtgtccacgtaacagtaaagaaaggtccaatcagtatgtacaaaaagaaagggcactgctattctggtgtgaaactgctgtttataatatgatactccaggttcggaaggaaaaaaacaaacttcaataaagctaaataattaatttgttttaaaactctgtgttacttattacatacaacagatctgcttgtgtttaaacattgttttctgtacaaaataagcataatcttaatttgaaaatgtgtcagtttcaactttcaccctctaggtcagttactttttaaaaattgagctacattctacacatgtctaaatatcctgtgacaggatttaagttttctaaaagatcttcagtaagacccctgtcttcttgcagttttaatatggtccaaaaatgtaactttgtattgtctcatgttatagtctatcattgtgactaatcaacacacacaatcttaaagtaaccagcattggctccttgaattgtagaaactcagccatgcactaagtatttggtctgtgccataaggttaatttcctgataatttttatctgcattaaaaaagtatttcaacacagagctatcaaaactaaaaataatatctatttatagctcatattttctactcactgttctactgcagtgtgtacaaggtttatctctggagcgccaaaagtggtacttacagtcttctgactcaatttgaccttttcttgggtactatacatagttcgtaatgacttttcatttggagcaaactttgctcagtataattaacaaaaatagtttcttagtaagtgtaatattaattttagttcagatcacttggaaattaggggaactaagggaaactgcaagggtagaagcaaagaaaagtgtatttttcaaattttaatgggaaaataaattcttgcctaagtgtaacaaaaccactgctcaatctgttatgttagaaatactttttaggttaataggagtaatcagatgataaaactacttcccctattatgacttttaaaatcatgtaactcctgcatataagcagaacacttacagtcctttaatcactcaagtatcttggtcctttcaacctactcaaaaataaatttcaggtaacaaaaacattcagaatatatccgttttcattagatagaaaactgaaaaagttgcttctagctgacatttgagagagatatacagtaggtatatatgtataaaatggaatgtcagaattgaagtaaacattgttaactggagaaattaatttatattacaaatcatatctgaaaacatgtaaatgctgctaacatataagataaaaatatttgaatacatttcttaaaatgtctgattcctctactgcactgcagatgagggacagttctagatgttaacatacatgctgcataaagatattttctctgattactgtatcttatgtaattcatttccaagtgataactaaatttagtcaatcccaagtctcagatgttacctaatccagctcacaaatattccacatacttatttacttggattggaggaagacagttttataataatgccagcagtctttaaatttgtagtgaagttgtgcaataaaaacaattgaaataaggccaatctttagtttataatacatgcagaaaatagtccaatgccactatagcaggtcacaaaggataaaattttaaaaagctatgtatctattgcccagggctgtgagtctctgattagactaaatatttaaactaatgct

SEQ ID NO: 280529 - DNA, 3553 bp, Homo sapiens
agcggatggaaacccagctgccatcgctatgtctctgcaaaagacccctccgacccgagtgttcgtggaactggttccctgggctgaccggagccgggagaacaacctggcctcagggagagagacgctaccgggcttacgccaccccctctcctcaacacaagcccaaactgctacccgcgaggtgcaagtaagcggcacctcagaagtgtctgcgggccctgaccgggcgcaggtggtggtgcgagtgagcagcaccaaggaggcggcagccgaggccaaaaagagcgtttgtcgccgtctagattacatcacgcagagcctccagcagcagggcgtgcaggcagaaaatataactgtgacaaaggattttaggagagtggaaaatgcttatcacatggaagcagaggtctgcattacatttactgaatttggaaaaatgcaaaatatttgtaactttcttgttgaaaagctagatagctctgttgtcatcagcccaccccagttctatcatactccaggttctgttgagaatcttcgacggcaagcctgtcttgttgctgttgagaatgcgtggcgcaaagctcaagaagtctgtaaccttgttggccaaaccttaggaaaacctttactaatcaaagaagaagaaacaaaagaatgggaaggccaaatagatgatcaccagtcatccagactctcaagttcattaactgtacaacaaaaaatcaaaagtgcaacaatacatgctgcttcaaaagtatttataacttttgagaagttactcaggcgtggtggcgtgtgactgtaatctcagctaccggggaggctgaagcagaagaaacgctcgaacctgggaggcagagcttacagtgagccgagatcgcaccactgcacttcagcctgggtgacaaagtgagactccatctacatacatacatacatacatacatacatacatacataaaatgcccagtatcttacaagactgtagttcacagtgggtaattcaaatcagacactgctcttcaagagaggtaatattaatagaaatctttcaagaaggattgttttctactattaaaacaataaaactcttataaacctgtttatcagaaggatatttctgtttcagcaactcctggaatccttcttcaacatcccaaccaacaattactcccagatagccatgtcacctgtgaattatcatgaatcccacatcaaataaacaaatactgcctctggactctaaattgcacatttttgagaaaatatttatgcaaagtgttccactgaaatgtatctcttacgaaagtatctgaatagtgaagtatttatcactcatcacagtaacttacggtaagaaatcaataaaattgttttattaaatgtacacataaaaaggcatataagtttttgaccttcagttgttttggaattaaattacatttcggcacccaaatatcttttaactgacagttttcacactttgcaaaacacacagggcactggaaactctaatgaaccagcatttacataatggtatctgccatatgaccactttggtaagcagcttgttgagattatgtactaagtgctttatgtgatgccaaaaaactttaaaaagcaaataataaatcatgaggctctacaaaatagcttagaaaaacaagttttctatttatttaaaaataagtttgtagttactacattgcagggacaggtattcttacacatacattctagtttgtataaaaggattcaaagaattatgcatcaaaactaacatagaaagtgtccacgtaacagtaaagaaaggtccaatcagtatgtacaaaaagaaagggcactgctattctggtgtgaaactgctgtttataatatgatactccagaaactctgtgttacttattacatacaacagatctgcttgtgtttaaacattgttttctgtacaaaataagcataatcttaatttgaaaatgtgtcagtttcaactttcaccctctaggtcagttactttttaaaaattgagctacattctacacatgtctaaatatcctgtgacaggatttaagttttctaaaagatcttcagtaagacccctgtcttcttgcagttttaatatggtccaaaaatgtaactttgtattgtctcatgttatagtctatcattgtgactaatcaacacacacaatcttaaagtaaccagcatgtgtgcatctgccttatatgcatgtactatattccatcttgaacctattttcttggctccttgaattgtagaaactcagccatgcactaagtatttggtctgtgccataaggttaatttcctgataatttttatctgcattaaaaaagtatttcaacacagagctatcaaaactaaaaataatatctatttatagctcatattttctactcactgttctactgcagtgtgtacaaggtttatctctggagcgccaaaagtggtacttacagtcttctgactcaatttgaccttttcttgggtactatacatagttcgtaatgacttttcatttggagcaaactttgctcagtataattaacaaaaatagtttcttagtaagtgtaatattaattttagttcagatcacttggaaattaggggaactaagggaaactgcaagggtagaagcaaagaaaagtgtatttttcaaattttaatgggaaaataaattcttgcctaagtgtaacaaaaccactgctcaatctgttatgttagaaatactttttaggttaataggagtaatcagatgataaaactacttcccctattatgacttttaaaatcatgtaactcctgcatataagcagaacacttacagtcctttaatcactcaagtatcttggtcctttcaacctactcaaaaataaatttcaggtaacaaaaacattcagaatatatccgttttcattagatagaaaactgaaaaagttgcttctagctgacatttgagagagatatacagtaggtatatatgtataaaatggaatgtcagaattgaagtaaacattgttaactggagaaattaatttatattacaaatcatatctgaaaacatgtaaatgctgctaacatataagataaaaatatttgaatacatttcttaaaatgtctgattcctctactgcactgcagatgagggacagttctagatgttaacatacatgctgcataaagatattttctctgattactgtatcttatgtaattcatttccaagtgataactaaatttagtcaatcccaagtctcagatgttacctaatccagctcacaaatattccacatacttatttacttggattggaggaagacagttttataataatgccagcagtctttaaatttgtagtgaagttgtgcaataaaaacaattgaaataaggccaatctttagtttataatacatgcagaaaatagtccaatgccactatagcaggtcacaaaggataaaattttaaaaagctatgtatctattgcccagggctgtgagtctctgattagactaaatatttaaactaatgct

SEQ ID NO: 280530 - DNA, 1857 bp, Homo sapiens
agcggatggaaacccagctgccatcgctatgtctctgcaaaagacccctccgacccgagtgttcgtggaactggttccctgggctgaccggagccgggagaacaacctggcctcagggagagagacgctaccgggcttacgccaccccctctcctcaacacaagcccaaactgctacccgcgaggtgcaagtaagcggcacctcagaagtgtctgcgggccctgaccgggcgcaggtggtggtgcgagtgagcagcaccaaggaggcggcagccgaggccaaaaagagcgtttgtcgccgtctagattacatcacgcagagcctccagcagcagggcgtgcaggcagaaaatataactgtgacaaaggattttaggagagtggaaaatgcttatcacatggaagcagaggtctgcattacatttactgaatttggaaaaatgcaaaatatttgtaactttcttgttgaaaagctagatagctctgttgtcatcagcccaccccagttctatcatactccaggttctgttgagaatcttcgacggcaagcctgtcttgttgctgttgagaatgcgtggcgcaaagctcaagaagtctgtaaccttgttggccaaaccttaggaaaacctttactaatcaaagaagaagaaacaaaagaatgggaaggccaaatagatgatcaccagtcatccagactctcaagttcattaactgtacaacaaaaaatcaaaagtgcaacaatacatgctgcttcaaaagtatttataacttttgagaagttactcaggcgtggtggcgtgtgactgtaatctcagctaccggggaggctgaagcagaagaaacgctcgaacctgggaggcagagcttacagtgagccgagatcgcaccactgcacttcagcctgggtgacaaagtgagactccatctacatacatacatacatacatacatacatacatacataaaatgcccagtatcttacaagactgtagttcacagtgggtaattcaaatcagacactgctcttcaagagaggtaatattaatagaaatctttcaagaaggattgttttctactattaaaacaataaaactcttataaacctgtttatcagaaggatatttctgtttcagcaactcctggaatccttcttcaacatcccaaccaacaattactcccagatagccatgtcacctgtgaattatcatgaatcccacatcaaataaacaaatactgcctctggactctaaattgcacatttttgagaaaatatttatgcaaagtgttccactgaaatgtatctcttacgaaagtatctgaatagtgaagtatttatcactcatcacagtaacttacggtaagaaatcaataaaattgttttattaaatgtacacataaaaaggcatataagtttttgaccttcagttgttttggaattaaattacatttcggcacccaaatatcttttaactgacagttttcacactttgcaaaacacacagggcactggaaactctaatgaaccagcatttacataatggtatctgccatatgaccactttggtaagcagcttgttgagattatgtactaagtgctttatgtgatgccaaaaaactttaaaaagcaaataataaatcatgaggctctacaaaatagcttagaaaaacaagttttctatttatttaaaaataagtttgtagttactacattgcagggacaggtattcttacacatacattctagttttgatgcataattctttgaatccttttatacaactagaatgtatgtgtaagaatacctgtcctgcaatgtatgtgtaagaatacctgttactacattgcggacgcgtgggtc

SEQ ID NO: 280531 - DNA, 1379 bp, Homo sapiens
ctaaataataaacacttgtgtgctgggattacaggcgtgagccaccaaccttggacataaaatgggttaaaaaaaaaaaaaaaaaaagacttaagtaatttaaagtttttatcatccctcccactttcaaaatagaaaatcatggggaaaaggaaataagtaaatgtcttttattggctatctaatttgaatgtttttttctggtgtgtgtgtgtgtgtgggtgtgtgtgtggtgtatacagtggaacatgatctggatcagattgactacatagacagctgcaccgcagaggaagaggaggccgaggtgagacagcccaagggaccagacccagacagccttagttcacagtttatggcgtatattgaacagcggcgaatctctcatgaggtagtacacagattgaagcctaaatatgttgctatcccttcataaaaataattcataatagtataaagttttgttatatcagtgatttgttgactgaagcctaattgttttcattatgttcacttctgatttcagtcctgagtttttcagatttattcagaaaactcagacagcagcctcaagtaggctttaggtttatttttcaaacaagaagaaagatttcagaattttgcaggaggaataaaagaagtctaggtactgttaaggccttggaagaaagtacaaagaaaaatacagtgatgcttttcattgttgtttttattgcttttttattgttactaactgataaatcatagtttggtcagtagttaattaacagttaaaccaaaaagttgacttttgtggcaacatgcagacttaaccatagaatttttataatatgctgaattatattggagcttttgtgctaagtcacacagaatgtaaattgtttgctattaaagttcttgggtatctcttaagtggagcattgaattgccttagaaaacaaatgtgcattcagcccactacagaatctctgccaattccccaagggtctcagatagaatagcattcttcagtctatcttgtcagcataataaaatggcttcactttagtggatgtgatgttgatgtctggagctggtttcaggctctgagcagtgattatttgagaaacacttgggcccttttagagaatgatgtattatccttttagaaatagagaagaatctctttggtctgagacagctaaaaggaaagaaaaaaaaagaaatagagaataatcatttcaagtgggacatgttgtagagtgatattatcattctttatttaatgaagcagagtcactctgtcgcccaggctggtgtgccttggcacgatctcggcttactgcagcctctgcctcccaggttcaagtgattgtccttcctcagcctcccgagtagct

SEQ ID NO: 280532 - DNA, 2287 bp, Homo sapiens
aatgctagtagagcagggatgagatcggccgagggggaaatggcggccgcgggcttggtcgctgtggcagcggctgccgagtactctggcacggtagcgtcgggaggtaacctccctggtgttcactgcggcccaagctccggggcaggccctggttttggcccgggctcgtggagccgctctctcgatcgagccctggaggaggcggcggtcactggggtgctgagcctgagcggccggaaactgagggagtttccccggggagcggccaaccacgacctgacggacaccacccgggcggacctgtcgcgaaatcgcctttcagaaattcctatagaagcatgtcactttgtttctctggaaaatctcaacttgtaccaaaattgtattcgttatattccagaggcaattttaaacctacaagctctaacattcttaaatattagtcggaaccaactgtcaacattgccggtacacttgtgtaatttgccattgaaagtcttaattgctagtaataacaaattggtgtcacttccagaagaaattggacaccttagacatttgatggaacttgatgtgagctgcaatgaaattcaaactataccttcccaaattggtaacctggaggccttgagagaccttaatgtaagaagaaatcacctagtacatttgcctgaagagctggcggagttgcctttgatacggttagacttctcatgcaataaaattaccacaatccctgtttgttatcggaacctcaggcacctacagacgatcaccctagataacaatccactacaatcacctcctgcacagatatgtataaaaggcaaagtccacatatttaaatacctgaacatacaagcttgtaagattgctccagatctgccggattatgataggagaccgttgggttttggctcctgccatgaagaactgtactcaagtcgcccttatggagcccttgattcaggcttcaatagtgtggacagtggtgataagagatggtcagggaatgaacctacagatgaattttcagatctgcctcttcgagtagcagagattactaaagaacaaagactacgaagagaaagccagtaccaagagaaccgcggcagtttggtagtaacaaacggcggagtggaacatgatctggatcagattgactacatagacagctgcaccgcagaggaagaggaggccgaggtgagacagcccaagggaccagacccagacagccttagttcacagtttatggcgtatattgaacagcggcgaatctctcatgagggttcaccagtaaagccagtagccattagggagtttcaaaaaacagaagatatgagaagatatttacatcaaaacagggttccagctgagccatcttccctcctgtcactatcagcaagtcacaatcagctgtcacacacagacctggaacttcatcagagaagggagcagttagtagagcgcactcggagagaggctcagcttgctgccctgcagtatgaggaggagaaaataaggaccaagcagatccagagagatgctgtcctggactttgtcaaacaaaaagcatcacaaagtccacaaaaacagcacccgctcctagatggcgtagatggtgagtgccccttcccatccagaaggtctcagcacactgatgatagtgccttgtgcatgtcgctgtcagggttgaatcaagtgggctgtgctgctaccctgcctcattcttctgccttcacgcctcttaagagtgatgacagacctaatgctctattaagttcacctgcaacagaaacagttcatcattcccctgcatattcttttcctgctgctatccagagaaatcagcctcagcgccctgaaagcttccttttccgagcaggtgtcagggcagaaaccaacaaaggtcatgcttcaccccttcctccatctgctgcacctaccactgattctacagattccataacaggacagaattcaagacagagagaagaagagctggaattaatagaccaactgcgtaaacatattgagtaccggttgaaagtgtctctaccttgtgatctcggagcagctctaactgacggtgttgttctttgccatttggccaatcatgtgcgacctcgatctgtcccaagcattcatgttccctcaccagctgtagtaagttgataatcctaaaaagccttggctattcatcagacatttgttaagcacagtggacagacatttcttaagcattgtgctagatattaaggatacagatataaagagtccagtc

SEQ ID NO: 280533 - DNA, 1322 bp, Homo sapiens
tttgagacagagtctcactctgtcgcctaggctggagtgcagtggtgtgatcttggctcactgcaacctccacctcctggattcaatgatcctcctgctttggtctcccaaagcgcatggattacaggcatgatctgccaggctctaaaatgattgtttttaatgtttctgcttcttttttaagcctacagatgaattttcagatctgcctcttcgagtagcagagattactaaagaacaaagactacgaagagaaagccagtaccaagagaaccgcggcagtttggtagtaacaaacggcggaggtaaacataattccggtgacagctaaagtgtttgcaaccatttaactttttaaagttgtctttttcatacccactccttttgttggtgtatctatagcttcttcactcttcttttaaagacttcttttcatatatgattgaaaaatactattttccattgggatgaaactatgatttctggtttcagtcagagttaaaatacactatttctcccttgtttttattttgggaggaaactttattagagacagtacacctggagcagatctttgttaatctggatttaatcacgaccttttgaagtaacattctccctttttaagattcttgctgtggtcattatttgatctcttttaggaatttagtccttttttttttttttttcagtgtttaccttttcttcacctggaattgtcagatgctcttcaaagtcatctgaatcacagttttccttattctgacattaaaaaatttgtagttcattagcaagcagcactctctctacttgcttatacttccgaagcagactcttgattttcgcattcaattctgtattgcttgaattggtttgaatttaatgtttaatgtttaatttcatatttaaattttgagggccagttataatggaaaataactttgattttccagaaacctattgcttatccgaggagagctttcatttctcagtgacgatttcaattaaatggtttgctgtccttttccttaccatcttagattctttactcctgtcgttaccatttcatttacatttcagtagttgtcttttaagtgtttctctcatatgaggtatctttctccatcagtttatttaagacttaaaataatgttgagatctgtgccggtatgatagccactagccacatgtgataattattgagtatttgaaatgtgtttttttaggctgggcgtggtggctcacgcctgtaatcccaacactttgggaggttgaggcgggtggatcacttgaggtcaagagtttgagaccagcctggccaa

SEQ ID NO: 280534 - DNA, 5003 bp, Homo sapiens
  misc_feature (4157)..(4157): n is a, c, g, or t
  misc_feature (4164)..(4164): n is a, c, g, or t
  misc_feature (4172)..(4172): n is a, c, g, or t
  misc_feature (4205)..(4205): n is a, c, g, or t
aatgctagtagagcagggatgagatcggccgagggggaaatggcggccgcgggcttggtcgctgtggcagcggctgccgagtactctggcacggtagcgtcgggaggtaacctccctggtgttcactgcggcccaagctccggggcaggccctggttttggcccgggctcgtggagccgctctctcgatcgagccctggaggaggcggcggtcactggggtgctgagcctgagcggccggaaactgagggagtttccccggggagcggccaaccacgacctgacggacaccacccgggcggacctgtcgcgaaatcgcctttcagaaattcctatagaagcatgtcactttgtttctctggaaaatctcaacttgtaccaaaattgtattcgttatattccagaggcaattttaaacctacaagctctaacattcttaaatattagtcggaaccaactgtcaacattgccggtacacttgtgtaatttgccattgaaagtcttaattgctagtaataacaaattggtgtcacttccagaagaaattggacaccttagacatttgatggaacttgatgtgagctgcaatgaaattcaaactataccttcccaaattggtaacctggaggccttgagagaccttaatgtaagaagaaatcacctagtacatttgcctgaagagctggcggagttgcctttgatacggttagacttctcatgcaataaaattaccacaatccctgtttgttatcggaacctcaggcacctacagacgatcaccctagataacaatccactacaatcacctcctgcacagatatgtataaaaggcaaagtccacatatttaaatacctgaacatacaagcttgtaagattgctccagatctgccggattatgataggagaccgttgggttttggctcctgccatgaagaactgtactcaagtcgcccttatggagcccttgattcaggcttcaatagtgtggacagtggtgataagagatggtcagggaatgaacctacagatgaattttcagatctgcctcttcgagtagcagagattactaaagaacaaagactacgaagagaaagccagtaccaagagaaccgcggcagtttggtagtaacaaacggcggagtggaacatgatctggatcagattgactacatagacagctgcaccgcagaggaagaggaggccgaggtgagacagcccaagggaccagacccagacagccttagttcacagtttatggcgtatattgaacagcggcgaatctctcatgagggttcaccagtaaagccagtagccattagggagtttcaaaaaacagaagatatgagaagatatttacatcaaaacagggttccagctgagccatcttccctcctgtcactatcagcaagtcacaatcagctgtcacacacagacctggaacttcatcagagaagggagcagttagtagagcgcactcggagagaggctcagcttgctgccctgcagtatgaggaggagaaaataaggaccaagcagatccagagagatgctgtcctggactttgtcaaacaaaaagcatcacaaagtccacaaaaacagcacccgctcctagatggcgtagatggtgagtgccccttcccatccagaaggtctcagcacactgatgatagtgccttgtgcatgtcgctgtcagggttgaatcaagtgggctgtgctgctaccctgcctcattcttctgccttcacgcctcttaagagtgatgacagacctaatgctctattaagttcacctgcaacagaaacaggtcatgcttcaccccttcctccatctgctgcacctaccactgattctacagattccataacaggacagaattcaagacagagagaagaagagctggaattaatagaccaactgcgtaaacatattgagtaccggttgaaagtgtctctaccttgtgatctcggagcagctctaactgacggtgttgttctttgccatttggccaatcatgtgcgacctcgatctgtcccaagcattcatgttccctcaccagctgtacctaaattaacaatggcgaaatgcaggcgaaatgtggaaaatttcctagaagcttgcagaaaaattggtgtacctcaggacaatctttgttccccttccgacatccttcagctaaacctcagcgttaaaagaactgttgaaacgctcctttctcttggggcacactcagaagaatccagttttgtctgtctctctctgcagcttctgggttttgtggcattttactgtactgtgatgttaactctctgtgtgctttattactggctcttccccgctcgctgaaagattgcactccggtgactttctgcctcattcctgtgcttggtaaaggaggtttgtttctcatccagaattatttacataagtgctttttctccctgctggccctcaaagagctaacccataaaggaggtaaatcctttctttatatttgcagatgagcaccccctcacattagtaaacatttacgattgctaacaaagagtaaaagaccagcattttttctcctggtcatccgtccattctcctggcctgtggccttgtttctcttaccataaatgctgaagcatttttactaatacagttctgaacttgtacttcgaatatgacatgtagagctttatttccaagtcacacaatacaactcccatctggccatttttccgtgcctcagcacaagtgttgaattgtggagtgactgaacctttgcagcagctgctcacgaggagaaccgtcgtgccttttctggttttggccgcacccggttacttagatttctgctttgaactgtgtcctgagatcctgaatccccgctttgtcggtaggcacaggtccatataagcatttgcggtctggacgtttcaaaggtattggccataattttaataattttagtttggtcagaatgttcagtttgaagatcacccacattccctagactgctcttctgagcccagtctatacgctgtatgtgctgcacacgagcagatgggctggagctggcctctcagggtgggcaccttccagattgtgtttgttatgtgtgactgaggttcactcccagcattctgtttaaatttggaatttatgtgatttctaacatattcaaaccttcttaatagtgaaacagtagcaggagaagtattagggcagcagtccctgttctgtgctcaaggcagtgaatattgtctagctctttcagaatgcgtagcacttagctgctagacgttaatgctggaaactataattgcggttagattctagtttcataagtggtgtttctgaatattcaggaaccttctgaactctgttaacaaaattgggataaaggatgaactcaagtgtgaagagagattgtgaggagcataatatccggtttagaattcagcctgagggaggagcataacatctgggtgtagaattcagcctgaggggctcactggtttggttttcttccatatgaaatgggacagctattttcacaggtcaaaagactgttcactattaatgctgaaacactcaacactgtgatgatgaaaacttcagttttctgtgtcagtaggtgcctttcagactttggggaattgggttggttatatttttaagatgtctcagagttgaaacacctgttaaaaaacacacacaggctctcatgtggtttaggggttgtaattgtacattctcttgagaacacacggcactccctctagtccagctgggaggtgagggtgccccagaaagcacaggcttctgagtgtgaacaccggccgcgcaggtcctagggcgctgctgagaggaagagaccagggaatcagccttggagaaagcacgtctcttccgacagcaaaacactgggcaggttcattttaagtatcatttatctagacttgcagttgcactcaaagtatttctacaaagttgctagtttttttagatcaaaagattacagttacctcattttatcaaaataagtattaaataaaaagtaagcacaagtaccaataactgcctcaaaaatacttgttatatattttattgtaactggttttataaaatttcctagtaatatcgtctcaatgaaaagcaaaacaaaaaanaaaaaanaaaaaaanccaactagttgttttaacaaacatatataatcnttttttagtggcaccagaattctatattctgttctttgtaagagcaatctcttttctttttggaatatttaatcttaacagaaagctagtgataaatgctgttcttaagatttgcctttttctctcacaagaaagggttaacctaacaaattaacgatgcacacattaaggaagcgtttaacttcctcaagcaaacagtgtcaacacttctcacatgttggtaatcaacatgttcctgcctaagcttacatagtagttccctggaataattcaggctgttaaataccaggatattaaatcctttacattttcaaatactgcttttaattctgtaattcagatttttaattcagacaggcccttccatgaattattcaaattagggggaagtttctcaagagctcaggatacactgagtttcttgccctatctggtctggaaaccctggttttcacagtcaggattataatgcagatagcgtagaactcatgcaggctgagttatgttttcaaactatctttcattcttgtggtagggaacttaccctcaagtgtagtatcttttactcttgagccatctggtagcgtggaattgtttttctatttttcacctgcctattttatagacctgtattgaccttttattcatcagggataaaggatgttgctttcaccctgcggtattgttttccctctgttgtatgtatagatatatgctacttgtcaattttccaattttgaaaatgatctgtatgtacttttagttgtattaataaagtgacagtgagtgtcagacacc

SEQ ID NO: 280535 - DNA, 6128 bp, Homo sapiens
  misc_feature (4157)..(4157): n is a, c, g, or t
  misc_feature (4164)..(4164): n is a, c, g, or t
  misc_feature (4172)..(4172): n is a, c, g, or t
  misc_feature (4205)..(4205): n is a, c, g, or t
aatgctagtagagcagggatgagatcggccgagggggaaatggcggccgcgggcttggtcgctgtggcagcggctgccgagtactctggcacggtagcgtcgggaggtaacctccctggtgttcactgcggcccaagctccggggcaggccctggttttggcccgggctcgtggagccgctctctcgatcgagccctggaggaggcggcggtcactggggtgctgagcctgagcggccggaaactgagggagtttccccggggagcggccaaccacgacctgacggacaccacccgggcggacctgtcgcgaaatcgcctttcagaaattcctatagaagcatgtcactttgtttctctggaaaatctcaacttgtaccaaaattgtattcgttatattccagaggcaattttaaacctacaagctctaacattcttaaatattagtcggaaccaactgtcaacattgccggtacacttgtgtaatttgccattgaaagtcttaattgctagtaataacaaattggtgtcacttccagaagaaattggacaccttagacatttgatggaacttgatgtgagctgcaatgaaattcaaactataccttcccaaattggtaacctggaggccttgagagaccttaatgtaagaagaaatcacctagtacatttgcctgaagagctggcggagttgcctttgatacggttagacttctcatgcaataaaattaccacaatccctgtttgttatcggaacctcaggcacctacagacgatcaccctagataacaatccactacaatcacctcctgcacagatatgtataaaaggcaaagtccacatatttaaatacctgaacatacaagcttgtaagattgctccagatctgccggattatgataggagaccgttgggttttggctcctgccatgaagaactgtactcaagtcgcccttatggagcccttgattcaggcttcaatagtgtggacagtggtgataagagatggtcagggaatgaacctacagatgaattttcagatctgcctcttcgagtagcagagattactaaagaacaaagactacgaagagaaagccagtaccaagagaaccgcggcagtttggtagtaacaaacggcggagtggaacatgatctggatcagattgactacatagacagctgcaccgcagaggaagaggaggccgaggtgagacagcccaagggaccagacccagacagccttagttcacagtttatggcgtatattgaacagcggcgaatctctcatgagggttcaccagtaaagccagtagccattagggagtttcaaaaaacagaagatatgagaagatatttacatcaaaacagggttccagctgagccatcttccctcctgtcactatcagcaagtcacaatcagctgtcacacacagacctggaacttcatcagagaagggagcagttagtagagcgcactcggagagaggctcagcttgctgccctgcagtatgaggaggagaaaataaggaccaagcagatccagagagatgctgtcctggactttgtcaaacaaaaagcatcacaaagtccacaaaaacagcacccgctcctagatggcgtagatggtgagtgccccttcccatccagaaggtctcagcacactgatgatagtgccttgtgcatgtcgctgtcagggttgaatcaagtgggctgtgctgctaccctgcctcattcttctgccttcacgcctcttaagagtgatgacagacctaatgctctattaagttcacctgcaacagaaacaggtcatgcttcaccccttcctccatctgctgcacctaccactgattctacagattccataacaggacagaattcaagacagagagaagaagagctggaattaatagaccaactgcgtaaacatattgagtaccggttgaaagtgtctctaccttgtgatctcggagcagctctaactgacggtgttgttctttgccatttggccaatcatgtgcgacctcgatctgtcccaagcattcatgttccctcaccagctgtacctaaattaacaatggcgaaatgcaggcgaaatgtggaaaatttcctagaagcttgcagaaaaattggtgtacctcaggacaatctttgttccccttccgacatccttcagctaaacctcagcgttaaaagaactgttgaaacgctcctttctcttggggcacactcagaagaatccagttttgtctgtctctctctgcagcttctgggttttgtggcattttactgtactgtgatgttaactctctgtgtgctttattactggctcttccccgctcgctgaaagattgcactccggtgactttctgcctcattcctgtgcttggtaaaggaggtttgtttctcatccagaattatttacataagtgctttttctccctgctggccctcaaagagctaacccataaaggaggtaaatcctttctttatatttgcagatgagcaccccctcacattagtaaacatttacgattgctaacaaagagtaaaagaccagcattttttctcctggtcatccgtccattctcctggcctgtggccttgtttctcttaccataaatgctgaagcatttttactaatacagttctgaacttgtacttcgaatatgacatgtagagctttatttccaagtcacacaatacaactcccatctggccatttttccgtgcctcagcacaagtgttgaattgtggagtgactgaacctttgcagcagctgctcacgaggagaaccgtcgtgccttttctggttttggccgcacccggttacttagatttctgctttgaactgtgtcctgagatcctgaatccccgctttgtcggtaggcacaggtccatataagcatttgcggtctggacgtttcaaaggtattggccataattttaataattttagtttggtcagaatgttcagtttgaagatcacccacattccctagactgctcttctgagcccagtctatacgctgtatgtgctgcacacgagcagatgggctggagctggcctctcagggtgggcaccttccagattgtgtttgttatgtgtgactgaggttcactcccagcattctgtttaaatttggaatttatgtgatttctaacatattcaaaccttcttaatagtgaaacagtagcaggagaagtattagggcagcagtccctgttctgtgctcaaggcagtgaatattgtctagctctttcagaatgcgtagcacttagctgctagacgttaatgctggaaactataattgcggttagattctagtttcataagtggtgtttctgaatattcaggaaccttctgaactctgttaacaaaattgggataaaggatgaactcaagtgtgaagagagattgtgaggagcataatatccggtttagaattcagcctgagggaggagcataacatctgggtgtagaattcagcctgaggggctcactggtttggttttcttccatatgaaatgggacagctattttcacaggtcaaaagactgttcactattaatgctgaaacactcaacactgtgatgatgaaaacttcagttttctgtgtcagtaggtgcctttcagactttggggaattgggttggttatatttttaagatgtctcagagttgaaacacctgttaaaaaacacacacaggctctcatgtggtttaggggttgtaattgtacattctcttgagaacacacggcactccctctagtccagctgggaggtgagggtgccccagaaagcacaggcttctgagtgtgaacaccggccgcgcaggtcctagggcgctgctgagaggaagagaccagggaatcagccttggagaaagcacgtctcttccgacagcaaaacactgggcaggttcattttaagtatcatttatctagacttgcagttgcactcaaagtatttctacaaagttgctagtttttttagatcaaaagattacagttacctcattttatcaaaataagtattaaataaaaagtaagcacaagtaccaataactgcctcaaaaatacttgttatatattttattgtaactggttttataaaatttcctagtaatatcgtctcaatgaaaagcaaaacaaaaaanaaaaaanaaaaaaanccaactagttgttttaacaaacatatataatcnttttttagtggcaccagaattctatattctgttctttgtaagagcaatctcttttctttttggaatatttaatcttaacagaaagctagtgataaatgctgttcttaagatttgcctttttctctcacaagaaagggttaacctaacaaattaacgatgcacacattaaggaagcgtttaacttcctcaagcaaacagtgtcaacacttctcacatgttggtaatcaacatgttcctgcctaagcttacatagtagttccctggaataattcaggctgttaaataccaggatattaaatcctttacattttcaaatactgcttttaattctgtaattcagatttttaattcagacaggcccttccatgaattattcaaattagggggaagtttctcaagagctcaggatacactgagtttcttgccctatctggtctggaaaccctggttttcacagtcaggattataatgcagatagcgtagaactcatgcaggctgagttatgttttcaaactatctttcattcttgtggtagggaacttaccctcaagtgtagtatcttttactcttgagccatctggtagcgtggaattgtttttctatttttcacctgcctattttatagacctgtattgaccttttattcatcagggataaaggatgttgctttcaccctgcggtattgttttccctctgttgtatgtatagatatatgctacttgtcaattttccaattttgaaaatgatctgtatgtacttttagttgtattaataaagtgacagtgagtgtcagacaccatctctctaactcatatttacactgaggtcagtttcccaggtactaattttcatatctaagttgatgattgtgaaggggagaagtgcttattttttcctttcagttctatgatattcatccgattttcttttttgtttgttttcatgttacgttgtccctttcaggagcaattatgtttgcctctccacattttagaagagaaaggtttgagccaggttgcagtgacggtccaggctctcctggaacttgccccacccaagcaacagcagcaccagttatctgctgtttgaggatccccaggacggtgggcactggcctggccaaaacaaggaacaggacaccgtgattgctgctgccagctgtctgcttaaacaaagctcttgtgtgttctcagaagggaccgttcccatgattcctaacaggaatattttgcttcatttctccattttaggggaggttatttccatttccattgaatttttttacgaagacaccattggttttctcagatgaaacttctcttactgaaaacccagcacctaacttggctgtgttttcctggagagcaggcgtgtttcacgtgccagaaagcacatcttctgtgttaggcacaagcatgctgtgccattgtttttacctggtctcaagacaactggtctgctggtttctaaacttggttgttcattagactctcctggagtatttgttaaaatacagattcacattcagtagagctggggtaaggcctaggaatctgcattttcaacaaccattgcacatgtttttgtttttgctgaggcaggagaattgcttgaacccaggaggcggaggttgtggtgagccaagatcgtgccattgcaccccagcctgggcaacaaaagcgaaattccatctcaaaaaaagaaaacgcgccccatctcgctccaccacaagcgcctttatatactcaatgatgggtggaggaaaagggcccaagggctcacaccgcacaggagcctttactcaagtttcagctagttttccttcccctgcattttgaactccttttagttgttggtgatatcctttggtgttcactgcctttgtaaaacaagtaaataaagtaagcggaagataaaaaacaa

SEQ ID NO: 280536 - DNA, 3207 bp, Homo sapiens
aatgctagtagagcagggatgagatcggccgagggggaaatggcggccgcgggcttggtcgctgtggcagcggctgccgagtactctggcacggtagcgtcgggaggtaacctccctggtgttcactgcggcccaagctccggggcaggccctggttttggcccgggctcgtggagccgctctctcgatcgagccctggaggaggcggcggtcactggggtgctgagcctgagcggccggaaactgagggagtttccccggggagcggccaaccacgacctgacggacaccacccgggcggacctgtcgcgaaatcgcctttcagaaattcctatagaagcatgtcactttgtttctctggaaaatctcaacttgtaccaaaattgtattcgttatattccagaggcaattttaaacctacaagctctaacattcttaaatattagtcggaaccaactgtcaacattgccggtacacttgtgtaatttgccattgaaagtcttaattgctagtaataacaaattggtgtcacttccagaagaaattggacaccttagacatttgatggaacttgatgtgagctgcaatgaaattcaaactataccttcccaaattggtaacctggaggccttgagagaccttaatgtaagaagaaatcacctagtacatttgcctgaagagctggcggagttgcctttgatacggttagacttctcatgcaataaaattaccacaatccctgtttgttatcggaacctcaggcacctacagacgatcaccctagataacaatccactacaatcacctcctgcacagatatgtataaaaggcaaagtccacatatttaaatacctgaacatacaagcttgtaagattgctccagatctgccggattatgataggagaccgttgggttttggctcctgccatgaagaactgtactcaagtcgcccttatggagcccttgattcaggcttcaatagtgtggacagtggtgataagagatggtcagggaatgaacctacagatgaattttcagatctgcctcttcgagtagcagagattactaaagaacaaagactacgaagagaaagccagtaccaagagaaccgcggcagtttggtagtaacaaacggcggagtggaacatgatctggatcagattgactacatagacagctgcaccgcagaggaagaggaggccgaggtgagacagcccaagggaccagacccagacagccttagttcacagtttatggcgtatattgaacagcggcgaatctctcatgagggttcaccagtaaagccagtagccattagggagtttcaaaaaacagaagatatgagaagatatttacatcaaaacagggttccagctgagccatcttccctcctgtcactatcagcaagtcacaatcagctgtcacacacagacctggaacttcatcagagaagggagcagttagtagagcgcactcggagagaggctcagcttgctgccctgcagtatgaggaggagaaaataaggaccaagcagatccagagagatgctgtcctggactttgtcaaacaaaaagcatcacaaagtccacaaaaacagcacccgctcctagatggcgtagatggtgagtgccccttcccatccagaaggtctcagcacactgatgatagtgccttgtgcatgtcgctgtcagggttgaatcaagtgggctgtgctgctaccctgcctcattcttctgccttcacgcctcttaagagtgatgacagacctaatgctctattaagttcacctgcaacagaaacagttcatcattcccctgcatattcttttcctgctgctatccagagaaatcagcctcagcgccctgaaagcttccttttccgagcaggtgtcagggcagaaaccaacaaaggtcatgcttcaccccttcctccatctgctgcacctaccactgattctacagattccataacaggacagaattcaagacagagagaagaagagctggaattaatagaccaactgcgtaaacatattgagtaccggttgaaagtgtctctaccttgtgatctcggagcagctctaactgacggtgttgttctttgccatttggccaatcatgtgcgacctcgatctgtcccaagcattcatgttccctcaccagctgtacctaaattaacaatggcgaaatgcaggcgaaatgtggaaaatttcctagaagcttgcagaaaaattggtgtacctcaggagcaattatgtttgcctctccacattttagaagagaaaggtttgagccaggttgcagtgacggtccaggctctcctggaacttgccccacccaagcaacagcagcaccagttatctgctgtttgaggatccccaggacggtgggcactggcctggccaaaacaaggaacaggacaccgtgattgctgctgccagctgtctgcttaaacaaagctcttgtgtgttctcagaagggaccgttcccatgattcctaacaggaatattttgcttcatttctccattttaggggaggttatttccatttccattgaatttttttacgaagacaccattggttttctcagatgaaacttctcttactgaaaacccagcacctaacttggctgtgttttcctggagagcaggcgtgtttcacgtgccagaaagcacatcttctgtgttaggcacaagcatgctgtgccattgtttttacctggtctcaagacaactggtctgctggtttctaaacttggttgttcattagactctcctggagtatttgttaaaatacagattcacattcagtagagctggggtaaggcctaggaatctgcattttcaacaaccattgcacatgtttttgtttttgctgaggcaggagaattgcttgaacccaggaggcggaggttgtggtgagccaagatcgtgccattgcaccccagcctgggcaacaaaagcgaaattccatctcaaaaaaagaaaacgcgccccatctcgctccaccacaagcgcctttatatactcaatgatgggtggaggaaaagggcccaagggctcacaccgcacaggagcctttactcaagtttcagctagttttccttcccctgcattttgaactccttttagttgttggtgatatcctttggtgttcactgcctttgtaaaacaagtaaataaagtaagcggaagataaaaaacaa

SEQ ID NO: 280537 - DNA, 3442 bp, Homo sapiens
  misc_feature (2931)..(2931): n is a, c, g, or t
  misc_feature (2961)..(2962): n is a, c, g, or t
  misc_feature (3001)..(3001): n is a, c, g, or t
  misc_feature (3018)..(3018): n is a, c, g, or t
aatgctagtagagcagggatgagatcggccgagggggaaatggcggccgcgggcttggtcgctgtggcagcggctgccgagtactctggcacggtagcgtcgggaggtaacctccctggtgttcactgcggcccaagctccggggcaggccctggttttggcccgggctcgtggagccgctctctcgatcgagccctggaggaggcggcggtcactggggtgctgagcctgagcggccggaaactgagggagtttccccggggagcggccaaccacgacctgacggacaccacccgggcggacctgtcgcgaaatcgcctttcagaaattcctatagaagcatgtcactttgtttctctggaaaatctcaacttgtaccaaaattgtattcgttatattccagaggcaattttaaacctacaagctctaacattcttaaatattagtcggaaccaactgtcaacattgccggtacacttgtgtaatttgccattgaaagtcttaattgctagtaataacaaattggtgtcacttccagaagaaattggacaccttagacatttgatggaacttgatgtgagctgcaatgaaattcaaactataccttcccaaattggtaacctggaggccttgagagaccttaatgtaagaagaaatcacctagtacatttgcctgaagagctggcggagttgcctttgatacggttagacttctcatgcaataaaattaccacaatccctgtttgttatcggaacctcaggcacctacagacgatcaccctagataacaatccactacaatcacctcctgcacagatatgtataaaaggcaaagtccacatatttaaatacctgaacatacaagcttgtaagattgctccagatctgccggattatgataggagaccgttgggttttggctcctgccatgaagaactgtactcaagtcgcccttatggagcccttgattcaggcttcaatagtgtggacagtggtgataagagatggtcagggaatgaacctacagatgaattttcagatctgcctcttcgagtagcagagattactaaagaacaaagactacgaagagaaagccagtaccaagagaaccgcggcagtttggtagtaacaaacggcggagtggaacatgatctggatcagattgactacatagacagctgcaccgcagaggaagaggaggccgaggtgagacagcccaagggaccagacccagacagccttagttcacagtttatggcgtatattgaacagcggcgaatctctcatgagggttcaccagtaaagccagtagccattagggagtttcaaaaaacagaagatatgagaagatatttacatcaaaacagggttccagctgagccatcttccctcctgtcactatcagcaagtcacaatcagctgtcacacacagacctggaacttcatcagagaagggagcagttagtagagcgcactcggagagaggctcagcttgctgccctgcagtatgaggaggagaaaataaggaccaagcagatccagagagatgctgtcctggactttgtcaaacaaaaagcatcacaaagtccacaaaaacagcacccgctcctagatggcgtagatggtgagtgccccttcccatccagaaggtctcagcacactgatgatagtgccttgtgcatgtcgctgtcagggttgaatcaagtgggctgtgctgctaccctgcctcattcttctgccttcacgcctcttaagagtgatgacagacctaatgctctattaagttcacctgcaacagaaacagttcatcattcccctgcatattcttttcctgctgctatccagagaaatcagcctcagcgccctgaaagcttccttttccgagcaggtgtcagggcagaaaccaacaaaggtcatgcttcaccccttcctccatctgctgcacctaccactgattctacagattccataacaggacagaattcaagacagagagaagaagagctggaattaatagaccaactgcgtaaacatattgagtaccggttgaaagtgtctctaccttgtgatctcggagcagctctaactgacggtgttgttctttgccatttggccaatcatgtgcgacctcgatctgtcccaagcattcatgttccctcaccagctgtacctaaattaacaatggcgaaatgcaggcgaaatgtggaaaatttcctagaagcttgcagaaaaattggtgtacctcaggagcaattatgtttgcctctccacattttagaagagaaaggtttgagccaggttgcagtgacggtccaggctctcctggaacttgccccacccaagcaacagcagcaccagttatctgctgtttgaggatccccaggacggtgggcactggcctggccaaaacaaggaacaggacaccgtgattgctgctgccagctgtctgcttaaacaaagctcttgtgtgttctcagaagggaccgttcccatgattcctaacaggaatattttgcttcatttctccattttaggggaggttatttccatttccattgaatttttttacgaagacaccattggttttctcagatgaaacttctcttactgaaaacccagcacctaacttggctgtgttttcctggagagcaggcgtgtttcacgtgccagaaagcacatcttctgtgttaggcacaagcatgctgtgccattgtttttacctggtctcaagacaactggtctgctggtttctaaacttggttgttcattagactctcctggagtatttgttaaaatacagattcacattcagtagagctggggtaaggcctaggaatctgcattttcaacaaccattgcacatgtttttgtttttgttggagaaggagttctgctcagtcgcccaggctagagtgcagtggcataatctcngctcactgcaacctccgcctcccgggctcnngcgattctcctgcctcagcctcccgagtagctgggacancaggtgcccgccaccancctgaccaacatggagaaaccccgtctctactaaaaaatacaaaattagctgggcgtggtggtgcatgcctgtaatcccagctactcgggaggctgaggcaggagaattgcttgaacccaggaggcggaggttgtggtgagccaagatcgtgccattgcaccccagcctgggcaacaaaagcgaaattccatctcaaaaaaagaaaacgcgccccatctcgctccaccacaagcgcctttatatactcaatgatgggtggaggaaaagggcccaagggctcacaccgcacaggagcctttactcaagtttcagctagttttccttcccctgcattttgaactccttttagttgttggtgatatcctttggtgttcactgcctttgtaaaacaagtaaataaagtaagcggaagataaaaaacaa

SEQ ID NO: 280538 - DNA, 4237 bp, Homo sapiens
  misc_feature (2266)..(2266): n is a, c, g, or t
  misc_feature (2273)..(2273): n is a, c, g, or t
  misc_feature (2281)..(2281): n is a, c, g, or t
  misc_feature (2314)..(2314): n is a, c, g, or t
gttcagaccagtcaccaacaaacgaattttattctgctatttagtagtaagatcaggctcagcatggagaagattctttgtagtttgggttttcagcgttttatttttgttcctcaatgtaaaaatgttacaggatgtgtatatgtgaatatgactgagatgatcatatgaattctatactcaaatctgcatttctgatccactgactttgtttttctgttttcctttcctgcttacactttggacaggacaatctttgttccccttccgacatccttcagctaaacctcagcgttaaaagaactgttgaaacgctcctttctcttggggcacactcagaagaatccagttttgtctgtctctctctgcagcttctgggttttgtggcattttactgtactgtgatgttaactctctgtgtgctttattactggctcttccccgctcgctgaaagattgcactccggtgactttctgcctcattcctgtgcttggtaaaggaggtttgtttctcatccagaattatttacataagtgctttttctccctgctggccctcaaagagctaacccataaaggaggtaaatcctttctttatatttgcagatgagcaccccctcacattagtaaacatttacgattgctaacaaagagtaaaagaccagcattttttctcctggtcatccgtccattctcctggcctgtggccttgtttctcttaccataaatgctgaagcatttttactaatacagttctgaacttgtacttcgaatatgacatgtagagctttatttccaagtcacacaatacaactcccatctggccatttttccgtgcctcagcacaagtgttgaattgtggagtgactgaacctttgcagcagctgctcacgaggagaaccgtcgtgccttttctggttttggccgcacccggttacttagatttctgctttgaactgtgtcctgagatcctgaatccccgctttgtcggtaggcacaggtccatataagcatttgcggtctggacgtttcaaaggtattggccataattttaataattttagtttggtcagaatgttcagtttgaagatcacccacattccctagactgctcttctgagcccagtctatacgctgtatgtgctgcacacgagcagatgggctggagctggcctctcagggtgggcaccttccagattgtgtttgttatgtgtgactgaggttcactcccagcattctgtttaaatttggaatttatgtgatttctaacatattcaaaccttcttaatagtgaaacagtagcaggagaagtattagggcagcagtccctgttctgtgctcaaggcagtgaatattgtctagctctttcagaatgcgtagcacttagctgctagacgttaatgctggaaactataattgcggttagattctagtttcataagtggtgtttctgaatattcaggaaccttctgaactctgttaacaaaattgggataaaggatgaactcaagtgtgaagagagattgtgaggagcataatatccggtttagaattcagcctgagggaggagcataacatctgggtgtagaattcagcctgaggggctcactggtttggttttcttccatatgaaatgggacagctattttcacaggtcaaaagactgttcactattaatgctgaaacactcaacactgtgatgatgaaaacttcagttttctgtgtcagtaggtgcctttcagactttggggaattgggttggttatatttttaagatgtctcagagttgaaacacctgttaaaaaacacacacaggctctcatgtggtttaggggttgtaattgtacattctcttgagaacacacggcactccctctagtccagctgggaggtgagggtgccccagaaagcacaggcttctgagtgtgaacaccggccgcgcaggtcctagggcgctgctgagaggaagagaccagggaatcagccttggagaaagcacgtctcttccgacagcaaaacactgggcaggttcattttaagtatcatttatctagacttgcagttgcactcaaagtatttctacaaagttgctagtttttttagatcaaaagattacagttacctcattttatcaaaataagtattaaataaaaagtaagcacaagtaccaataactgcctcaaaaatacttgttatatattttattgtaactggttttataaaatttcctagtaatatcgtctcaatgaaaagcaaaacaaaaaanaaaaaanaaaaaaanccaactagttgttttaacaaacatatataatcnttttttagtggcaccagaattctatattctgttctttgtaagagcaatctcttttctttttggaatatttaatcttaacagaaagctagtgataaatgctgttcttaagatttgcctttttctctcacaagaaagggttaacctaacaaattaacgatgcacacattaaggaagcgtttaacttcctcaagcaaacagtgtcaacacttctcacatgttggtaatcaacatgttcctgcctaagcttacatagtagttccctggaataattcaggctgttaaataccaggatattaaatcctttacattttcaaatactgcttttaattctgtaattcagatttttaattcagacaggcccttccatgaattattcaaattagggggaagtttctcaagagctcaggatacactgagtttcttgccctatctggtctggaaaccctggttttcacagtcaggattataatgcagatagcgtagaactcatgcaggctgagttatgttttcaaactatctttcattcttgtggtagggaacttaccctcaagtgtagtatcttttactcttgagccatctggtagcgtggaattgtttttctatttttcacctgcctattttatagacctgtattgaccttttattcatcagggataaaggatgttgctttcaccctgcggtattgttttccctctgttgtatgtatagatatatgctacttgtcaattttccaattttgaaaatgatctgtatgtacttttagttgtattaataaagtgacagtgagtgtcagacaccatctctctaactcatatttacactgaggtcagtttcccaggtactaattttcatatctaagttgatgattgtgaaggggagaagtgcttattttttcctttcagttctatgatattcatccgattttcttttttgtttgttttcatgttacgttgtccctttcaggagcaattatgtttgcctctccacattttagaagagaaaggtttgagccaggttgcagtgacggtccaggctctcctggaacttgccccacccaagcaacagcagcaccagttatctgctgtttgaggatccccaggacggtgggcactggcctggccaaaacaaggaacaggacaccgtgattgctgctgccagctgtctgcttaaacaaagctcttgtgtgttctcagaagggaccgttcccatgattcctaacaggaatattttgcttcatttctccattttaggggaggttatttccatttccattgaatttttttacgaagacaccattggttttctcagatgaaacttctcttactgaaaacccagcacctaacttggctgtgttttcctggagagcaggcgtgtttcacgtgccagaaagcacatcttctgtgttaggcacaagcatgctgtgccattgtttttacctggtctcaagacaactggtctgctggtttctaaacttggttgttcattagactctcctggagtatttgttaaaatacagattcacattcagtagagctggggtaaggcctaggaatctgcattttcaacaaccattgcacatgtttttgtttttgctgaggcaggagaattgcttgaacccaggaggcggaggttgtggtgagccaagatcgtgccattgcaccccagcctgggcaacaaaagcgaaattccatctcaaaaaaagaaaacgcgccccatctcgctccaccacaagcgcctttatatactcaatgatgggtggaggaaaagggcccaagggctcacaccgcacaggagcctttactcaagtttcagctagttttccttcccctgcattttgaactccttttagttgttggtgatatcctttggtgttcactgcctttgtaaaacaagtaaataaagtaagcggaagataaaaaacaa

SEQ ID NO: 280539 - DNA, 2769 bp, Homo sapiens
aatgctagtagagcagggatgagatcggccgagggggaaatggcggccgcgggcttggtcgctgtggcagcggctgccgagtactctggcacggtagcgtcgggaggtaacctccctggtgttcactgcggcccaagctccggggcaggccctggttttggcccgggctcgtggagccgctctctcgatcgagccctggaggaggcggcggtcactggggtgctgagcctgagcggccggaaactgagggagtttccccggggagcggccaaccacgacctgacggacaccacccgggcggacctgtcgcgaaatcgcctttcagaaattcctatagaagcatgtcactttgtttctctggaaaatctcaacttgtaccaaaattgtattcgttatattccagaggcaattttaaacctacaagctctaacattcttaaatattagtcggaaccaactgtcaacattgccggtacacttgtgtaatttgccattgaaagtcttaattgctagtaataacaaattggtgtcacttccagaagaaattggacaccttagacatttgatggaacttgatgtgagctgcaatgaaattcaaactataccttcccaaattggtaacctggaggccttgagagaccttaatgtaagaagaaatcacctagtacatttgcctgaagagctggcggagttgcctttgatacggttagacttctcatgcaataaaattaccacaatccctgtttgttatcggaacctcaggcacctacagacgatcaccctagataacaatccactacaatcacctcctgcacagatatgtataaaaggcaaagtccacatatttaaatacctgaacatacaagcttgtaagattgctccagatctgccggattatgataggagaccgttgggttttggctcctgccatgaagaactgtactcaagtcgcccttatggagcccttgattcaggcttcaatagtgtggacagtggtgataagagatggtcagggaatgaacctacagatgaattttcagatctgcctcttcgagtagcagagattactaaagaacaaagactacgaagagaaagccagtaccaagagaaccgcggcagtttggtagtaacaaacggcggagtggaacatgatctggatcagattgactacatagacagctgcaccgcagaggaagaggaggccgaggtgagacagcccaagggaccagacccagacagccttagttcacagtttatggcgtatattgaacagcggcgaatctctcatgagggttcaccagtaaagccagtagccattagggagtttcaaaaaacagaagatatgagaagatatttacatcaaaacagggttccagctgagccatcttccctcctgtcactatcagcaagtcacaatcagctgtcacacacagacctggaacttcatcagagaagggagcagttagtagagcgcactcggagagaggctcagcttgctgccctgcagtatgaggaggagaaaataaggaccaagcagatccagagagatgctgtcctggactttgtcaaagtgagtcgtttgaatgatgctgttcaagctgctgactggctaactgcttatttgtttggtcaggcccgttggtttttattgtccattaaaatgtcgaccatttttctctctgtaaggaatcttgactaaatagagtgtctcttttacttgtgtctatctgcatgaggacagaacaagtgattatcttgttaacggtaaatctgtcattggacatgtcactttactatccagctgccatttcctcaatttctagtgtcatagtaaagatcagtaagatgaaagtgaaagtgctgtgtgaaccataaaaggcccgtgcagatgcaaactgttactcagacctctctccagcttcctcgcttttgtaaataactttctgctctccacacacatccaattaacaacgccattaatatttcttaacgttttgcagcctctatagtagtgcctgaaatgttgtcattttattttacctgtattgcttatctttttgttctgaaatcgtcattttttcttcataattaattatttgtaattttgtttacttaatatctgtctctcatttatctgtaaactccatgaaggtaagaaccatgtctgttttacttactgctgtgtccctagaccttagcaggtcttagctcatagtaatggtcaataagtatttgttgaatgattaaatgaatttttcttgtccactaaagactttcctgtatttcatactttaactagagaccatctcctttaagtacgatgcgtatgtctgttttactgttttacctgataaactctttttttctgaatgtaccagacccttggcaatgacgtttaactctctttctcacctgattcctcttcatccaacaagttcccttgtctcttgttttctataaaaatgcaggcaaatctggccgggtgtgggtggctcacgcctgtagtcccggcactttgagaggccaaggtgggtggatcacctgaggtcaggagtttgagaccagcctggccaacatggcaaaaccctgtctcaagtaaaaataaaaaaattagctgggcgtggtggtgcatgcctgtaatcccagctaaccaggaggctgaagtggaggaattgtctgagcctaggaaacggaggttgcagtgagctgagatcgtaccactgcacttcatgcagcctggttgacagagtgagactccacctcaaaaaaa

SEQ ID NO: 280540 - DNA, 2697 bp, Homo sapiens
aatgctagtagagcagggatgagatcggccgagggggaaatggcggccgcgggcttggtcgctgtggcagcggctgccgagtactctggcacggtagcgtcgggaggtaacctccctggtgttcactgcggcccaagctccggggcaggccctggttttggcccgggctcgtggagccgctctctcgatcgagccctggaggaggcggcggtcactggggtgctgagcctgagcggccggaaactgagggagtttccccggggagcggccaaccacgacctgacggacaccacccgggcggacctgtcgcgaaatcgcctttcagaaattcctatagaagcatgtcactttgtttctctggaaaatctcaacttgtaccaaaattgtattcgttatattccagaggcaattttaaacctacaagctctaacattcttaaatattagtcggaaccaactgtcaacattgccggtacacttgtgtaatttgccattgaaagtcttaattgctagtaataacaaattggtgtcacttccagaagaaattggacaccttagacatttgatggaacttgatgtgagctgcaatgaaattcaaactataccttcccaaattggtaacctggaggccttgagagaccttaatgtaagaagaaatcacctagtacatttgcctgaagagctggcggagttgcctttgatacggttagacttctcatgcaataaaattaccacaatccctgtttgttatcggaacctcaggcacctacagacgatcaccctagataacaatccactacaatcacctcctgcacagatatgtataaaaggcaaagtccacatatttaaatacctgaacatacaagcttgtaagattgctccagatctgccggattatgataggagaccgttgggttttggctcctgccatgaagaactgtactcaagtcgcccttatggagcccttgattcaggcttcaatagtgtggacagtggtgataagagatggtcagggaatgaacctacagatgaattttcagatctgcctcttcgagtagcagagattactaaagaacaaagactacgaagagaaagccagtaccaagagaaccgcggcagtttggtagtaacaaacggcggagtggaacatgatctggatcagattgactacatagacagctgcaccgcagaggaagaggaggccgaggtgagacagcccaagggaccagacccagacagccttagttcacagtttatggcgtatattgaacagcggcgaatctctcatgagggttcaccagtaaagccagtagccattagggagtttcaaaaaacagaagatatgagaagatatttacatcaaaacagggttccagctgagccatcttccctcctgtcactatcagcaagtcacaatcagctgtcacacacagacctggaacttcatcagagaagggagcagttagtagagcgcactcggagagaggctcagcttgctgccctgcagtatgaggaggagaaaataaggaccaagcagatccagagagatgctgtcctggactttgtcaaacaaaaagcatcacaaagtccacaaaaacagcacccgctcctagatggcgtagatggtgagtgccccttcccatccagaaggtctcagcacactgatgatagtgccttgtgcatgtcgctgtcagggttgaatcaagtgggctgtgctgctaccctgcctcattcttctgccttcacgcctcttaagagtgatgacagacctaatgctctattaagttcacctgcaacagaaacaggtcatgcttcaccccttcctccatctgctgcacctaccactgattctacagattccataacaggacagaattcaagacagagagaagaagagctggaattaatagaccaactgcgtaaacatattgagtaccggttgaaagtgtctctaccttgtgatctcggagcagctctaactgacggtgttgttctttgccatttggccaatcatgtgcgacctcgatctgtcccaagcattcatgttccctcaccagctgtacctaaattaacaatggcgaaatgcaggcgaaatgtggaaaatttcctagaagcttgcagaaaaattggtgtacctcagctgccagtttctgtggctgaatttacagcacttacagcatcttcctggccgggcgcggtggctcacgcctgtaatcccagcactttgggaggccgaggcgggtggatcacctgaggtcaggagttcaagactagcctgaccaacatggagaaaccccgtctctactaaaaaatacaaaattagctgggcgtggtggtgcatgcctgtaatcccagctactcgggaggctgaggcaggagaattgcttgaacccaggaggcggaggttgtggtgagccaagatcgtgccattgcaccccagcctgggcaacaaaagcgaaattccatctcaaaaaaagaaaacgcgccccatctcgctccaccacaagcgcctttatatactcaatgatgggtggaggaaaagggcccaagggctcacaccgcacaggagcctttactcaagtttcagctagttttccttcccctgcattttgaactccttttagttgttggtgatatcctttggtgttcactgcctttgtaaaacaagtaaataaagtaagcggaagataaaaaacaa

SEQ ID NO: 280541 - DNA, 2158 bp, Homo sapiens
aatgctagtagagcagggatgagatcggccgagggggaaatggcggccgcgggcttggtcgctgtggcagcggctgccgagtactctggcacggtagcgtcgggaggtaacctccctggtgttcactgcggcccaagctccggggcaggccctggttttggcccgggctcgtggagccgctctctcgatcgagccctggaggaggcggcggtcactggggtgctgagcctgagcggccggaaactgagggagtttccccggggagcggccaaccacgacctgacggacaccacccgggcggacctgtcgcgaaatcgcctttcagaaattcctatagaagcatgtcactttgtttctctggaaaatctcaacttgtaccaaaattgtattcgttatattccagaggcaattttaaacctacaagctctaacattcttaaatattagtcggaaccaactgtcaacattgccggtacacttgtgtaatttgccattgaaagtcttaattgctagtaataacaaattggtgtcacttccagaagaaattggacaccttagacatttgatggaacttgatgtgagctgcaatgaaattcaaactataccttcccaaattggtaacctggaggccttgagagaccttaatgtaagaagaaatcacctagtacatttgcctgaagagctggcggagttgcctttgatacggttagacttctcatgcaataaaattaccacaatccctgtttgttatcggaacctcaggcacctacagacgatcaccctagataacaatccactacaatcacctcctgcacagatatgtataaaaggcaaagtccacatatttaaatacctgaacatacaagcttgtaagattgctccagatctgccggattatgataggagaccgttgggttttggctcctgccatgaagaactgtactcaagtcgcccttatggagcccttgattcaggcttcaatagtgtggacagtggtgataagagatggtcagggaatgaacctacagatgaattttcagatctgcctcttcgagtagcagagattactaaagaacaaagactacgaagagaaagccagtaccaagagaaccgcggcagtttggtagtaacaaacggcggaggtaaacataattccggtgacagctaaagtgtttgcaaccatttaactttttaaagttgtctttttcatacccactccttttgttggtgtatctatagcttcttcactcttcttttaaagacttcttttcatatatgattgaaaaatactattttccattgggatgaaactatgatttctggtttcagtcagagttaaaatacactatttctcccttgtttttattttgggaggaaactttattagagacagtacacctggagcagatctttgttaatctggatttaatcacgaccttttgaagtaacattctccctttttaagattcttgctgtggtcattatttgatctcttttaggaatttagtccttttttttttttttttcagtgtttaccttttcttcacctggaattgtcagatgctcttcaaagtcatctgaatcacagttttccttattctgacattaaaaaatttgtagttcattagcaagcagcactctctctacttgcttatacttccgaagcagactcttgattttcgcattcaattctgtattgcttgaattggtttgaatttaatgtttaatgtttaatttcatatttaaattttgagggccagttataatggaaaataactttgattttccagaaacctattgcttatccgaggagagctttcatttctcagtgacgatttcaattaaatggtttgctgtccttttccttaccatcttagattctttactcctgtcgttaccatttcatttacatttcagtagttgtcttttaagtgtttctctcatatgaggtatctttctccatcagtttatttaagacttaaaataatgttgagatctgtgccggtatgatagccactagccacatgtgataattattgagtatttgaaatgtgtttttttaggctgggcgtggtggctcacgcctgtaatcccaacactttgggaggttgaggcgggtggatcacttgaggtcaagagtttgagaccagcctggccaa

SEQ ID NO: 280542 - DNA, 1480 bp, Homo sapiens
ggctgtcctggactttgtcacacaaaaagcatcacaaagtccacaaaaacagcacccgctcctagatggcgtagatggtgagtgccccttcccatccagaaggtctcagcacactgatgatagtgccttgtgcatgagtgatgacagacctaatgctctattaagttcacctgcaacagaaacaggtcatgcttcaccccttcctccatctgctgcacctaccactgattctacagattccataacaggacagaattcaagacagagagaagaagagctggaattaatagaccaactgcgtaaacatattgagtaccggttgaaagtgtctctaccttgtgatctcggagcagctctaactgacggtgttgttctttgccatttggccaatcatgtgcgacctcgatctgtcccaagcattcatgttccctcaccagctgtacctaaattaacaatggcgaaatgcaggcgaaatgtggaaaatttcctagaagcttgcagaaaaattggtgtacctcaggagcaattatgtttgcctctccacattttagaagagaaaggtttgagccaggttgcagtgacggtccaggctctcctggaacttgccccacccaagcaacagcagcaccagttatctgctgtttgaggatccccaggacggtgggcactggcctggccaaaacaaggaacaggacaccgtgattgctgctgccagctgtctgcttaaacaaagctcttgtgtgttctcagaagggaccgttcccatgattcctaacaggaatattttgcttcatttctccattttaggggaggttatttccatttccattgaatttttttacgaagacaccattggttttctcagatgaaacttctcttactgaaaacccagcacctaacttggctgtgttttcctggagagcaggcgtgtttcacgtgccagaaagcacatcttctgtgttaggcacaagcatgctgtgccattgtttttacctggtctcaagacaactggtctgctggtttctaaacttggttgttcattagactctcctggagtatttgttaaaatacagattcacattcagtagagctggggtaaggcctaggaatctgcattttcaacaaccattgcacatgtttttgtttttgctgaggcaggagaattgcttgaacccaggaggcggaggttgtggtgagccaagatcgtgccattgcaccccagcctgggcaacaaaagcgaaattccatctcaaaaaaagaaaacgcgccccatctcgctccaccacaagcgcctttatatactcaatgatgggtggaggaaaagggcccaagggctcacaccgcacaggagcctttactcaagtttcagctagttttccttcccctgcattttgaactccttttagttgttggtgatatcctttggtgttcactgcctttgtaaaacaagtaaataaagtaagcggaagataaaaaacaa

SEQ ID NO: 280543 - DNA, 1657 bp, Homo sapiens
  misc_feature (17)..(17): n is a, c, g, or t
  misc_feature (27)..(27): n is a, c, g, or t
cgctcataactccgaanctcccttganccaaatcctttacattttcaaatactgcttttaattctgtaattcagatttttaattcagacaggcccttccatgaattattcaaattagggggaagtttctcaagagctcaggatacactgagtttcttgccctatctggtctggaaaccctggttttcacagtcaggattataatgcagatagcgtagaactcatgcaggctgagttatgttttcaaactatctttcattcttgtggtagggaacttaccctcaagtgtagtatcttttactcttgagccatctggtagcgtggaattgtttttctatttttcacctgcctattttatagacctgtattgaccttttattcatcagggataaaggatgttgctttcaccctgcggtattgttttccctctgttgtatgtatagatatatgctacttgtcaattttccaattttgaaaatgatctgtatgtacttttagttgtattaataaagtgacagtgagtgtcagacaccatctctctaactcatatttacactgaggtcagtttcccaggtactaattttcatatctaagttgatgattgtgaaggggagaagtgcttattttttcctttcagttctatgatattcatccgattttcttttttgtttgttttcatgttacgttgtccctttcaggagcaattatgtttgcctctccacattttagaagagaaaggtttgagccaggttgcagtgacggtccaggctctcctggaacttgccccacccaagcaacagcagcaccagttatctgctgtttgaggatccccaggacggtgggcactggcctggccaaaacaaggaacaggacaccgtgattgctgctgccagctgtctgcttaaacaaagctcttgtgtgttctcagaagggaccgttcccatgattcctaacaggaatattttgcttcatttctccattttaggggaggttatttccatttccattgaatttttttacgaagacaccattggttttctcagatgaaacttctcttactgaaaacccagcacctaacttggctgtgttttcctggagagcaggcgtgtttcacgtgccagaaagcacatcttctgtgttaggcacaagcatgctgtgccattgtttttacctggtctcaagacaactggtctgctggtttctaaacttggttgttcattagactctcctggagtatttgttaaaatacagattcacattcagtagagctggggtaaggcctaggaatctgcattttcaacaaccattgcacatgtttttgtttttgctgaggcaggagaattgcttgaacccaggaggcggaggttgtggtgagccaagatcgtgccattgcaccccagcctgggcaacaaaagcgaaattccatctcaaaaaaagaaaacgcgccccatctcgctccaccacaagcgcctttatatactcaatgatgggtggaggaaaagggcccaagggctcacaccgcacaggagcctttactcaagtttcagctagttttccttcccctgcattttgaactccttttagttgttggtgatatcctttggtgttcactgcctttgtaaaacaagtaaataaagtaagcggaagataaaaaacaa

SEQ ID NO: 280544 - DNA, 795 bp, Homo sapiens
ggccgcgcatgcgctgagctggcgggcccgagtgttgtcggctgggaaatggcggccgcgggcttggtcgctgtggcagcggctgccgagtactctggcacggtagcgtcgggaggtaacctccctggtgttcactgcggcccaagctccggggcaggccctggttttggcccgggctcgtggagccgctctctcgatcgagccctggaggaggcggcggtcactggggtgctgagcctgagcggccggaaactgagggagtttccccggggagcggccaaccacgacctgacggacaccacccgggcggacctgtcgcgaaatcgcctttcagaaattcctatagaagcatgtcactttgtttctctggaaaatctcaacttgtaccaaaattgtattcgttatattccagaggcaattttaaacctacaagctctaacattcttaaatattagtcggaaccaactgtcaacattgccggtacacttgtgtaatttgccattgaaagtcttaattgctagtaataacaaattggtgtcacttccagaagaaattggacaccttagacatttgatggaacttgatgtgagctgcaatgaaattcaaactataccttcccaaattggtaacctggaggccttgagagaccttaatgtaagaagaaatcacctagtacatttgcctgaagacttgtcgcgagaatcgcctttcagaaatctcctatagaagcatgccactgggtttcatcctaggtaaagctcatatgtatgtaccacgctcggagccgtgactagc

SEQ ID NO: 280545 - DNA, 5012 bp, Homo sapiens
  misc_feature (4166)..(4166): n is a, c, g, or t
  misc_feature (4173)..(4173): n is a, c, g, or t
  misc_feature (4181)..(4181): n is a, c, g, or t
  misc_feature (4214)..(4214): n is a, c, g, or t
ggccgcgcatgcgctgagctggcgggcccgagtgttgtcggctgggaaatggcggccgcgggcttggtcgctgtggcagcggctgccgagtactctggcacggtagcgtcgggaggtaacctccctggtgttcactgcggcccaagctccggggcaggccctggttttggcccgggctcgtggagccgctctctcgatcgagccctggaggaggcggcggtcactggggtgctgagcctgagcggccggaaactgagggagtttccccggggagcggccaaccacgacctgacggacaccacccgggcggacctgtcgcgaaatcgcctttcagaaattcctatagaagcatgtcactttgtttctctggaaaatctcaacttgtaccaaaattgtattcgttatattccagaggcaattttaaacctacaagctctaacattcttaaatattagtcggaaccaactgtcaacattgccggtacacttgtgtaatttgccattgaaagtcttaattgctagtaataacaaattggtgtcacttccagaagaaattggacaccttagacatttgatggaacttgatgtgagctgcaatgaaattcaaactataccttcccaaattggtaacctggaggccttgagagaccttaatgtaagaagaaatcacctagtacatttgcctgaagagctggcggagttgcctttgatacggttagacttctcatgcaataaaattaccacaatccctgtttgttatcggaacctcaggcacctacagacgatcaccctagataacaatccactacaatcacctcctgcacagatatgtataaaaggcaaagtccacatatttaaatacctgaacatacaagcttgtaagattgctccagatctgccggattatgataggagaccgttgggttttggctcctgccatgaagaactgtactcaagtcgcccttatggagcccttgattcaggcttcaatagtgtggacagtggtgataagagatggtcagggaatgaacctacagatgaattttcagatctgcctcttcgagtagcagagattactaaagaacaaagactacgaagagaaagccagtaccaagagaaccgcggcagtttggtagtaacaaacggcggagtggaacatgatctggatcagattgactacatagacagctgcaccgcagaggaagaggaggccgaggtgagacagcccaagggaccagacccagacagccttagttcacagtttatggcgtatattgaacagcggcgaatctctcatgagggttcaccagtaaagccagtagccattagggagtttcaaaaaacagaagatatgagaagatatttacatcaaaacagggttccagctgagccatcttccctcctgtcactatcagcaagtcacaatcagctgtcacacacagacctggaacttcatcagagaagggagcagttagtagagcgcactcggagagaggctcagcttgctgccctgcagtatgaggaggagaaaataaggaccaagcagatccagagagatgctgtcctggactttgtcaaacaaaaagcatcacaaagtccacaaaaacagcacccgctcctagatggcgtagatggtgagtgccccttcccatccagaaggtctcagcacactgatgatagtgccttgtgcatgtcgctgtcagggttgaatcaagtgggctgtgctgctaccctgcctcattcttctgccttcacgcctcttaagagtgatgacagacctaatgctctattaagttcacctgcaacagaaacaggtcatgcttcaccccttcctccatctgctgcacctaccactgattctacagattccataacaggacagaattcaagacagagagaagaagagctggaattaatagaccaactgcgtaaacatattgagtaccggttgaaagtgtctctaccttgtgatctcggagcagctctaactgacggtgttgttctttgccatttggccaatcatgtgcgacctcgatctgtcccaagcattcatgttccctcaccagctgtacctaaattaacaatggcgaaatgcaggcgaaatgtggaaaatttcctagaagcttgcagaaaaattggtgtacctcaggacaatctttgttccccttccgacatccttcagctaaacctcagcgttaaaagaactgttgaaacgctcctttctcttggggcacactcagaagaatccagttttgtctgtctctctctgcagcttctgggttttgtggcattttactgtactgtgatgttaactctctgtgtgctttattactggctcttccccgctcgctgaaagattgcactccggtgactttctgcctcattcctgtgcttggtaaaggaggtttgtttctcatccagaattatttacataagtgctttttctccctgctggccctcaaagagctaacccataaaggaggtaaatcctttctttatatttgcagatgagcaccccctcacattagtaaacatttacgattgctaacaaagagtaaaagaccagcattttttctcctggtcatccgtccattctcctggcctgtggccttgtttctcttaccataaatgctgaagcatttttactaatacagttctgaacttgtacttcgaatatgacatgtagagctttatttccaagtcacacaatacaactcccatctggccatttttccgtgcctcagcacaagtgttgaattgtggagtgactgaacctttgcagcagctgctcacgaggagaaccgtcgtgccttttctggttttggccgcacccggttacttagatttctgctttgaactgtgtcctgagatcctgaatccccgctttgtcggtaggcacaggtccatataagcatttgcggtctggacgtttcaaaggtattggccataattttaataattttagtttggtcagaatgttcagtttgaagatcacccacattccctagactgctcttctgagcccagtctatacgctgtatgtgctgcacacgagcagatgggctggagctggcctctcagggtgggcaccttccagattgtgtttgttatgtgtgactgaggttcactcccagcattctgtttaaatttggaatttatgtgatttctaacatattcaaaccttcttaatagtgaaacagtagcaggagaagtattagggcagcagtccctgttctgtgctcaaggcagtgaatattgtctagctctttcagaatgcgtagcacttagctgctagacgttaatgctggaaactataattgcggttagattctagtttcataagtggtgtttctgaatattcaggaaccttctgaactctgttaacaaaattgggataaaggatgaactcaagtgtgaagagagattgtgaggagcataatatccggtttagaattcagcctgagggaggagcataacatctgggtgtagaattcagcctgaggggctcactggtttggttttcttccatatgaaatgggacagctattttcacaggtcaaaagactgttcactattaatgctgaaacactcaacactgtgatgatgaaaacttcagttttctgtgtcagtaggtgcctttcagactttggggaattgggttggttatatttttaagatgtctcagagttgaaacacctgttaaaaaacacacacaggctctcatgtggtttaggggttgtaattgtacattctcttgagaacacacggcactccctctagtccagctgggaggtgagggtgccccagaaagcacaggcttctgagtgtgaacaccggccgcgcaggtcctagggcgctgctgagaggaagagaccagggaatcagccttggagaaagcacgtctcttccgacagcaaaacactgggcaggttcattttaagtatcatttatctagacttgcagttgcactcaaagtatttctacaaagttgctagtttttttagatcaaaagattacagttacctcattttatcaaaataagtattaaataaaaagtaagcacaagtaccaataactgcctcaaaaatacttgttatatattttattgtaactggttttataaaatttcctagtaatatcgtctcaatgaaaagcaaaacaaaaaanaaaaaanaaaaaaanccaactagttgttttaacaaacatatataatcnttttttagtggcaccagaattctatattctgttctttgtaagagcaatctcttttctttttggaatatttaatcttaacagaaagctagtgataaatgctgttcttaagatttgcctttttctctcacaagaaagggttaacctaacaaattaacgatgcacacattaaggaagcgtttaacttcctcaagcaaacagtgtcaacacttctcacatgttggtaatcaacatgttcctgcctaagcttacatagtagttccctggaataattcaggctgttaaataccaggatattaaatcctttacattttcaaatactgcttttaattctgtaattcagatttttaattcagacaggcccttccatgaattattcaaattagggggaagtttctcaagagctcaggatacactgagtttcttgccctatctggtctggaaaccctggttttcacagtcaggattataatgcagatagcgtagaactcatgcaggctgagttatgttttcaaactatctttcattcttgtggtagggaacttaccctcaagtgtagtatcttttactcttgagccatctggtagcgtggaattgtttttctatttttcacctgcctattttatagacctgtattgaccttttattcatcagggataaaggatgttgctttcaccctgcggtattgttttccctctgttgtatgtatagatatatgctacttgtcaattttccaattttgaaaatgatctgtatgtacttttagttgtattaataaagtgacagtgagtgtcagacacc

SEQ ID NO: 280546 - DNA, 6363 bp, Homo sapiens
  misc_feature (4157)..(4157): n is a, c, g, or t
  misc_feature (4164)..(4164): n is a, c, g, or t
  misc_feature (4172)..(4172): n is a, c, g, or t
  misc_feature (4205)..(4205): n is a, c, g, or t
  misc_feature (5852)..(5852): n is a, c, g, or t
  misc_feature (5882)..(5883): n is a, c, g, or t
  misc_feature (5922)..(5922): n is a, c, g, or t
  misc_feature (5939)..(5939): n is a, c, g, or t
aatgctagtagagcagggatgagatcggccgagggggaaatggcggccgcgggcttggtcgctgtggcagcggctgccgagtactctggcacggtagcgtcgggaggtaacctccctggtgttcactgcggcccaagctccggggcaggccctggttttggcccgggctcgtggagccgctctctcgatcgagccctggaggaggcggcggtcactggggtgctgagcctgagcggccggaaactgagggagtttccccggggagcggccaaccacgacctgacggacaccacccgggcggacctgtcgcgaaatcgcctttcagaaattcctatagaagcatgtcactttgtttctctggaaaatctcaacttgtaccaaaattgtattcgttatattccagaggcaattttaaacctacaagctctaacattcttaaatattagtcggaaccaactgtcaacattgccggtacacttgtgtaatttgccattgaaagtcttaattgctagtaataacaaattggtgtcacttccagaagaaattggacaccttagacatttgatggaacttgatgtgagctgcaatgaaattcaaactataccttcccaaattggtaacctggaggccttgagagaccttaatgtaagaagaaatcacctagtacatttgcctgaagagctggcggagttgcctttgatacggttagacttctcatgcaataaaattaccacaatccctgtttgttatcggaacctcaggcacctacagacgatcaccctagataacaatccactacaatcacctcctgcacagatatgtataaaaggcaaagtccacatatttaaatacctgaacatacaagcttgtaagattgctccagatctgccggattatgataggagaccgttgggttttggctcctgccatgaagaactgtactcaagtcgcccttatggagcccttgattcaggcttcaatagtgtggacagtggtgataagagatggtcagggaatgaacctacagatgaattttcagatctgcctcttcgagtagcagagattactaaagaacaaagactacgaagagaaagccagtaccaagagaaccgcggcagtttggtagtaacaaacggcggagtggaacatgatctggatcagattgactacatagacagctgcaccgcagaggaagaggaggccgaggtgagacagcccaagggaccagacccagacagccttagttcacagtttatggcgtatattgaacagcggcgaatctctcatgagggttcaccagtaaagccagtagccattagggagtttcaaaaaacagaagatatgagaagatatttacatcaaaacagggttccagctgagccatcttccctcctgtcactatcagcaagtcacaatcagctgtcacacacagacctggaacttcatcagagaagggagcagttagtagagcgcactcggagagaggctcagcttgctgccctgcagtatgaggaggagaaaataaggaccaagcagatccagagagatgctgtcctggactttgtcaaacaaaaagcatcacaaagtccacaaaaacagcacccgctcctagatggcgtagatggtgagtgccccttcccatccagaaggtctcagcacactgatgatagtgccttgtgcatgtcgctgtcagggttgaatcaagtgggctgtgctgctaccctgcctcattcttctgccttcacgcctcttaagagtgatgacagacctaatgctctattaagttcacctgcaacagaaacaggtcatgcttcaccccttcctccatctgctgcacctaccactgattctacagattccataacaggacagaattcaagacagagagaagaagagctggaattaatagaccaactgcgtaaacatattgagtaccggttgaaagtgtctctaccttgtgatctcggagcagctctaactgacggtgttgttctttgccatttggccaatcatgtgcgacctcgatctgtcccaagcattcatgttccctcaccagctgtacctaaattaacaatggcgaaatgcaggcgaaatgtggaaaatttcctagaagcttgcagaaaaattggtgtacctcaggacaatctttgttccccttccgacatccttcagctaaacctcagcgttaaaagaactgttgaaacgctcctttctcttggggcacactcagaagaatccagttttgtctgtctctctctgcagcttctgggttttgtggcattttactgtactgtgatgttaactctctgtgtgctttattactggctcttccccgctcgctgaaagattgcactccggtgactttctgcctcattcctgtgcttggtaaaggaggtttgtttctcatccagaattatttacataagtgctttttctccctgctggccctcaaagagctaacccataaaggaggtaaatcctttctttatatttgcagatgagcaccccctcacattagtaaacatttacgattgctaacaaagagtaaaagaccagcattttttctcctggtcatccgtccattctcctggcctgtggccttgtttctcttaccataaatgctgaagcatttttactaatacagttctgaacttgtacttcgaatatgacatgtagagctttatttccaagtcacacaatacaactcccatctggccatttttccgtgcctcagcacaagtgttgaattgtggagtgactgaacctttgcagcagctgctcacgaggagaaccgtcgtgccttttctggttttggccgcacccggttacttagatttctgctttgaactgtgtcctgagatcctgaatccccgctttgtcggtaggcacaggtccatataagcatttgcggtctggacgtttcaaaggtattggccataattttaataattttagtttggtcagaatgttcagtttgaagatcacccacattccctagactgctcttctgagcccagtctatacgctgtatgtgctgcacacgagcagatgggctggagctggcctctcagggtgggcaccttccagattgtgtttgttatgtgtgactgaggttcactcccagcattctgtttaaatttggaatttatgtgatttctaacatattcaaaccttcttaatagtgaaacagtagcaggagaagtattagggcagcagtccctgttctgtgctcaaggcagtgaatattgtctagctctttcagaatgcgtagcacttagctgctagacgttaatgctggaaactataattgcggttagattctagtttcataagtggtgtttctgaatattcaggaaccttctgaactctgttaacaaaattgggataaaggatgaactcaagtgtgaagagagattgtgaggagcataatatccggtttagaattcagcctgagggaggagcataacatctgggtgtagaattcagcctgaggggctcactggtttggttttcttccatatgaaatgggacagctattttcacaggtcaaaagactgttcactattaatgctgaaacactcaacactgtgatgatgaaaacttcagttttctgtgtcagtaggtgcctttcagactttggggaattgggttggttatatttttaagatgtctcagagttgaaacacctgttaaaaaacacacacaggctctcatgtggtttaggggttgtaattgtacattctcttgagaacacacggcactccctctagtccagctgggaggtgagggtgccccagaaagcacaggcttctgagtgtgaacaccggccgcgcaggtcctagggcgctgctgagaggaagagaccagggaatcagccttggagaaagcacgtctcttccgacagcaaaacactgggcaggttcattttaagtatcatttatctagacttgcagttgcactcaaagtatttctacaaagttgctagtttttttagatcaaaagattacagttacctcattttatcaaaataagtattaaataaaaagtaagcacaagtaccaataactgcctcaaaaatacttgttatatattttattgtaactggttttataaaatttcctagtaatatcgtctcaatgaaaagcaaaacaaaaaanaaaaaanaaaaaaanccaactagttgttttaacaaacatatataatcnttttttagtggcaccagaattctatattctgttctttgtaagagcaatctcttttctttttggaatatttaatcttaacagaaagctagtgataaatgctgttcttaagatttgcctttttctctcacaagaaagggttaacctaacaaattaacgatgcacacattaaggaagcgtttaacttcctcaagcaaacagtgtcaacacttctcacatgttggtaatcaacatgttcctgcctaagcttacatagtagttccctggaataattcaggctgttaaataccaggatattaaatcctttacattttcaaatactgcttttaattctgtaattcagatttttaattcagacaggcccttccatgaattattcaaattagggggaagtttctcaagagctcaggatacactgagtttcttgccctatctggtctggaaaccctggttttcacagtcaggattataatgcagatagcgtagaactcatgcaggctgagttatgttttcaaactatctttcattcttgtggtagggaacttaccctcaagtgtagtatcttttactcttgagccatctggtagcgtggaattgtttttctatttttcacctgcctattttatagacctgtattgaccttttattcatcagggataaaggatgttgctttcaccctgcggtattgttttccctctgttgtatgtatagatatatgctacttgtcaattttccaattttgaaaatgatctgtatgtacttttagttgtattaataaagtgacagtgagtgtcagacaccatctctctaactcatatttacactgaggtcagtttcccaggtactaattttcatatctaagttgatgattgtgaaggggagaagtgcttattttttcctttcagttctatgatattcatccgattttcttttttgtttgttttcatgttacgttgtccctttcaggagcaattatgtttgcctctccacattttagaagagaaaggtttgagccaggttgcagtgacggtccaggctctcctggaacttgccccacccaagcaacagcagcaccagttatctgctgtttgaggatccccaggacggtgggcactggcctggccaaaacaaggaacaggacaccgtgattgctgctgccagctgtctgcttaaacaaagctcttgtgtgttctcagaagggaccgttcccatgattcctaacaggaatattttgcttcatttctccattttaggggaggttatttccatttccattgaatttttttacgaagacaccattggttttctcagatgaaacttctcttactgaaaacccagcacctaacttggctgtgttttcctggagagcaggcgtgtttcacgtgccagaaagcacatcttctgtgttaggcacaagcatgctgtgccattgtttttacctggtctcaagacaactggtctgctggtttctaaacttggttgttcattagactctcctggagtatttgttaaaatacagattcacattcagtagagctggggtaaggcctaggaatctgcattttcaacaaccattgcacatgtttttgtttttgttggagaaggagttctgctcagtcgcccaggctagagtgcagtggcataatctcngctcactgcaacctccgcctcccgggctcnngcgattctcctgcctcagcctcccgagtagctgggacancaggtgcccgccaccancctgaccaacatggagaaaccccgtctctactaaaaaatacaaaattagctgggcgtggtggtgcatgcctgtaatcccagctactcgggaggctgaggcaggagaattgcttgaacccaggaggcggaggttgtggtgagccaagatcgtgccattgcaccccagcctgggcaacaaaagcgaaattccatctcaaaaaaagaaaacgcgccccatctcgctccaccacaagcgcctttatatactcaatgatgggtggaggaaaagggcccaagggctcacaccgcacaggagcctttactcaagtttcagctagttttccttcccctgcattttgaactccttttagttgttggtgatatcctttggtgttcactgcctttgtaaaacaagtaaataaagtaagcggaagataaaaaacaa

SEQ ID NO: 280547 - DNA, 4189 bp, Homo sapiens
  misc_feature (25)..(25): n is a, c, g, or t
  misc_feature (2218)..(2218): n is a, c, g, or t
  misc_feature (2225)..(2225): n is a, c, g, or t
  misc_feature (2233)..(2233): n is a, c, g, or t
  misc_feature (2266)..(2266): n is a, c, g, or t
cctcgtgtcgaatcggcacgaggtncggagcagctctaactgacggtgttgttctttgccatttggccaatcatgtgcgacctcgatctgtcccaagcattcatgttccctcaccagctgtacctaaattaacaatggcgaaatgcaggcgaaatgtggaaaatttcctagaagcttgcagaaaaattggtgtacctcaggacaatctttgttccccttccgacatccttcagctaaacctcagcgttaaaagaactgttgaaacgctcctttctcttggggcacactcagaagaatccagttttgtctgtctctctctgcagcttctgggttttgtggcattttactgtactgtgatgttaactctctgtgtgctttattactggctcttccccgctcgctgaaagattgcactccggtgactttctgcctcattcctgtgcttggtaaaggaggtttgtttctcatccagaattatttacataagtgctttttctccctgctggccctcaaagagctaacccataaaggaggtaaatcctttctttatatttgcagatgagcaccccctcacattagtaaacatttacgattgctaacaaagagtaaaagaccagcattttttctcctggtcatccgtccattctcctggcctgtggccttgtttctcttaccataaatgctgaagcatttttactaatacagttctgaacttgtacttcgaatatgacatgtagagctttatttccaagtcacacaatacaactcccatctggccatttttccgtgcctcagcacaagtgttgaattgtggagtgactgaacctttgcagcagctgctcacgaggagaaccgtcgtgccttttctggttttggccgcacccggttacttagatttctgctttgaactgtgtcctgagatcctgaatccccgctttgtcggtaggcacaggtccatataagcatttgcggtctggacgtttcaaaggtattggccataattttaataattttagtttggtcagaatgttcagtttgaagatcacccacattccctagactgctcttctgagcccagtctatacgctgtatgtgctgcacacgagcagatgggctggagctggcctctcagggtgggcaccttccagattgtgtttgttatgtgtgactgaggttcactcccagcattctgtttaaatttggaatttatgtgatttctaacatattcaaaccttcttaatagtgaaacagtagcaggagaagtattagggcagcagtccctgttctgtgctcaaggcagtgaatattgtctagctctttcagaatgcgtagcacttagctgctagacgttaatgctggaaactataattgcggttagattctagtttcataagtggtgtttctgaatattcaggaaccttctgaactctgttaacaaaattgggataaaggatgaactcaagtgtgaagagagattgtgaggagcataatatccggtttagaattcagcctgagggaggagcataacatctgggtgtagaattcagcctgaggggctcactggtttggttttcttccatatgaaatgggacagctattttcacaggtcaaaagactgttcactattaatgctgaaacactcaacactgtgatgatgaaaacttcagttttctgtgtcagtaggtgcctttcagactttggggaattgggttggttatatttttaagatgtctcagagttgaaacacctgttaaaaaacacacacaggctctcatgtggtttaggggttgtaattgtacattctcttgagaacacacggcactccctctagtccagctgggaggtgagggtgccccagaaagcacaggcttctgagtgtgaacaccggccgcgcaggtcctagggcgctgctgagaggaagagaccagggaatcagccttggagaaagcacgtctcttccgacagcaaaacactgggcaggttcattttaagtatcatttatctagacttgcagttgcactcaaagtatttctacaaagttgctagtttttttagatcaaaagattacagttacctcattttatcaaaataagtattaaataaaaagtaagcacaagtaccaataactgcctcaaaaatacttgttatatattttattgtaactggttttataaaatttcctagtaatatcgtctcaatgaaaagcaaaacaaaaaanaaaaaanaaaaaaanccaactagttgttttaacaaacatatataatcnttttttagtggcaccagaattctatattctgttctttgtaagagcaatctcttttctttttggaatatttaatcttaacagaaagctagtgataaatgctgttcttaagatttgcctttttctctcacaagaaagggttaacctaacaaattaacgatgcacacattaaggaagcgtttaacttcctcaagcaaacagtgtcaacacttctcacatgttggtaatcaacatgttcctgcctaagcttacatagtagttccctggaataattcaggctgttaaataccaggatattaaatcctttacattttcaaatactgcttttaattctgtaattcagatttttaattcagacaggcccttccatgaattattcaaattagggggaagtttctcaagagctcaggatacactgagtttcttgccctatctggtctggaaaccctggttttcacagtcaggattataatgcagatagcgtagaactcatgcaggctgagttatgttttcaaactatctttcattcttgtggtagggaacttaccctcaagtgtagtatcttttactcttgagccatctggtagcgtggaattgtttttctatttttcacctgcctattttatagacctgtattgaccttttattcatcagggataaaggatgttgctttcaccctgcggtattgttttccctctgttgtatgtatagatatatgctacttgtcaattttccaattttgaaaatgatctgtatgtacttttagttgtattaataaagtgacagtgagtgtcagacaccatctctctaactcatatttacactgaggtcagtttcccaggtactaattttcatatctaagttgatgattgtgaaggggagaagtgcttattttttcctttcagttctatgatattcatccgattttcttttttgtttgttttcatgttacgttgtccctttcaggagcaattatgtttgcctctccacattttagaagagaaaggtttgagccaggttgcagtgacggtccaggctctcctggaacttgccccacccaagcaacagcagcaccagttatctgctgtttgaggatccccaggacggtgggcactggcctggccaaaacaaggaacaggacaccgtgattgctgctgccagctgtctgcttaaacaaagctcttgtgtgttctcagaagggaccgttcccatgattcctaacaggaatattttgcttcatttctccattttaggggaggttatttccatttccattgaatttttttacgaagacaccattggttttctcagatgaaacttctcttactgaaaacccagcacctaacttggctgtgttttcctggagagcaggcgtgtttcacgtgccagaaagcacatcttctgtgttaggcacaagcatgctgtgccattgtttttacctggtctcaagacaactggtctgctggtttctaaacttggttgttcattagactctcctggagtatttgttaaaatacagattcacattcagtagagctggggtaaggcctaggaatctgcattttcaacaaccattgcacatgtttttgtttttgctgaggcaggagaattgcttgaacccaggaggcggaggttgtggtgagccaagatcgtgccattgcaccccagcctgggcaacaaaagcgaaattccatctcaaaaaaagaaaacgcgccccatctcgctccaccacaagcgcctttatatactcaatgatgggtggaggaaaagggcccaagggctcacaccgcacaggagcctttactcaagtttcagctagttttccttcccctgcattttgaactccttttagttgttggtgatatcctttggtgttcactgcctttgtaaaacaagtaaataaagtaagcggaagataaaaaacaa

SEQ ID NO: 280548 - DNA, 2278 bp, Homo sapiens
aatgctagtagagcagggatgagatcggccgagggggaaatggcggccgcgggcttggtcgctgtggcagcggctgccgagtactctggcacggtagcgtcgggaggtaacctccctggtgttcactgcggcccaagctccggggcaggccctggttttggcccgggctcgtggagccgctctctcgatcgagccctggaggaggcggcggtcactggggtgctgagcctgagcggccggaaactgagggagtttccccggggagcggccaaccacgacctgacggacaccacccgggcggacctgtcgcgaaatcgcctttcagaaattcctatagaagcatgtcactttgtttctctggaaaatctcaacttgtaccaaaattgtattcgttatattccagaggcaattttaaacctacaagctctaacattcttaaatattagtcggaaccaactgtcaacattgccggtacacttgtgtaatttgccattgaaagtcttaattgctagtaataacaaattggtgtcacttccagaagaaattggacaccttagacatttgatggaacttgatgtgagctgcaatgaaattcaaactataccttcccaaattggtaacctggaggccttgagagaccttaatgtaagaagaaatcacctagtacatttgcctgaagagctggcggagttgcctttgatacggttagacttctcatgcaataaaattaccacaatccctgtttgttatcggaacctcaggcacctacagacgatcaccctagataacaatccactacaatcacctcctgcacagatatgtataaaaggcaaagtccacatatttaaatacctgaacatacaagcttgtaagattgctccagatctgccggattatgataggagaccgttgggttttggctcctgccatgaagaactgtactcaagtcgcccttatggagcccttgattcaggcttcaatagtgtggacagtggtgataagagatggtcagggaatgaacctacagatgaattttcagatctgcctcttcgagtagcagagattactaaagaacaaagactacgaagagaaagccagtaccaagagaaccgcggcagtttggtagtaacaaacggcggagtggaacatgatctggatcagattgactacatagacagctgcaccgcagaggaagaggaggccgaggtgagacagcccaagggaccagacccagacagccttagttcacagtttatggcgtatattgaacagcggcgaatctctcatgaggtagtacacagattgaagcctaaatatgttgctatcccttcataaaaataattcataatagtataaagttttgttatatcagtgatttgttgactgaagcctaattgttttcattatgttcacttctgatttcagtcctgagtttttcagatttattcagaaaactcagacagcagcctcaagtaggctttaggtttatttttcaaacaagaagaaagatttcagaattttgcaggaggaataaaagaagtctaggtactgttaaggccttggaagaaagtacaaagaaaaatacagtgatgcttttcattgttgtttttattgcttttttattgttactaactgataaatcatagtttggtcagtagttaattaacagttaaaccaaaaagttgacttttgtggcaacatgcagacttaaccatagaatttttataatatgctgaattatattggagcttttgtgctaagtcacacagaatgtaaattgtttgctattaaagttcttgggtatctcttaagtggagcattgaattgccttagaaaacaaatgtgcattcagcccactacagaatctctgccaattccccaagggtctcagatagaatagcattcttcagtctatcttgtcagcataataaaatggcttcactttagtggatgtgatgttgatgtctggagctggtttcaggctctgagcagtgattatttgagaaacacttgggcccttttagagaatgatgtattatccttttagaaatagagaagaatctctttggtctgagacagctaaaaggaaagaaaaaaaaagaaatagagaataatcatttcaagtgggacatgttgtagagtgatattatcattctttatttaatgaagcagagtcactctgtcgcccaggctggtgtgccttggcacgatctcggcttactgcagcctctgcctcccaggttcaagtgattgtccttcctcagcctcccgagtagct

SEQ ID NO: 280549 - DNA, 2321 bp, Homo sapiens
aatgctagtagagcagggatgagatcggccgagggggaaatggcggccgcgggcttggtcgctgtggcagcggctgccgagtactctggcacggtagcgtcgggaggtaacctccctggtgttcactgcggcccaagctccggggcaggccctggttttggcccgggctcgtggagccgctctctcgatcgagccctggaggaggcggcggtcactggggtgctgagcctgagcggccggaaactgagggagtttccccggggagcggccaaccacgacctgacggacaccacccgggcggacctgtcgcgaaatcgcctttcagaaattcctatagaagcatgtcactttgtttctctggaaaatctcaacttgtaccaaaattgtattcgttatattccagaggcaattttaaacctacaagctctaacattcttaaatattagtcggaaccaactgtcaacattgccggtacacttgtgtaatttgccattgaaagtcttaattgctagtaataacaaattggtgtcacttccagaagaaattggacaccttagacatttgatggaacttgatgtgagctgcaatgaaattcaaactataccttcccaaattggtaacctggaggccttgagagaccttaatgtaagaagaaatcacctagtacatttgcctgaagagctggcggagttgcctttgatacggttagacttctcatgcaataaaattaccacaatccctgtttgttatcggaacctcaggcacctacagacgatcaccctagataacaatccactacaatcacctcctgcacagatatgtataaaaggcaaagtccacatatttaaatacctgaacatacaagcttgtaagattgctccagatctgccggattatgataggagaccgttgggttttggctcctgccatgaagaactgtactcaagtcgcccttatggagcccttgattcaggcttcaatagtgtggacagtggtgataagagatggtcagggaatgaacctacagatgaattttcagatctgcctcttcgagtagcagagattactaaagaacaaagactacgaagagaaagccagtaccaagagaaccgcggcagtttggtagtaacaaacggcggagtggaacatgatctggatcagattgactacatagacagctgcaccgcagaggaagaggaggccgaggtgagacagcccaagggaccagacccagacagccttagttcacagtttatggcgtatattgaacagcggcgaatctctcatgagggttcaccagtaaagccagtagccattagggagtttcaaaaaacagaagatatgagaagatatttacatcaaaacagggttccagctgagccatcttccctcctgtcactatcagcaagtcacaatcagctgtcacacacagacctggaacttcatcagagaagggagcagttagtagagcgcactcggagagaggctcagcttgctgccctgcagtatgaggaggagaaaataaggaccaagcagatccagagagatgctgtcctggactttgtcaaacaaaaagcatcacaaagtccacaaaaacagcacccgctcctagatggcgtagatggtgagtgccccttcccatccagaaggtctcagcacactgatgatagtgccttgtgcatgtcgctgtcagggttgaatcaagtgggctgtgctgctaccctgcctcattcttctgccttcacgcctcttaagagtgatgacagacctaatgctctattaagttcacctgcaacagaaacaggtcatgcttcaccccttcctccatctgctgcacctaccactgattctacagattccataacaggacagaattcaagacagagagaagaagagctggaattaatagaccaactgcgtaaacatattgagtaccggttgaaagtgtctctaccttgtgatctcggagcagctctaactgacggtgttgttctttgccatttggccaatcatgtgcgacctcgatctgtcccaagcattcatgttccctcaccagctgtagtaagttgataatcctaaaaagccttggctattcatcagacatttgttaagcacagtggacagacatttcttaagcattgtgctagatattaaggatacagatataaagagtccagtctctaccttcctggtctcacttctactcgagaagaaatagacatgtatacagctacttacagcagtgcgataaatgtaagaaaggcatgtacagtgtgtgttatagggatataaaaaggggccacttaactccacctggagag

SEQ ID NO: 280550 - DNA, 983 bp, Homo sapiens
tgagagcttcagactagaaaagggaaaaagccccacttttgcttcgtcactagaaaccgggtcatctgagtcagccgagccaagtgacgttaggccgacccgggccccgggctagcagagcggaggcgctgccacgaaactcgtacctgcggctaagagcaggaaaaccctttcctgtatgccatctgttttctgtggggccctgagtgatgaggagaggaacaaggattcatggaagtgaggtcaaatttgtcaagatgtccacaatcccgagacactttggcctgaaatacaaagaggaatcgtatatgtttaaagagcttgagaaagttcggcaggaaactaaaaaggattttctccgattcaagcagaagttggcctccaagccggctgtagatgaaagcccagtccacagcctccatgcccccggcccggcccgccccgcgcgcgtttcctgcgccgcagcccggacgtcgagaagatacccttcgcttaaaggccctgcgatgtccgcggccgccctcctgcaggaggtgctcggaggcgcgccgcgtccctcgggcctgggtgaggcggcggctccaggcaagacccggtcgtttcgcccccgggacttttacttgcggagctccgcgttcctacggcaccaggccctgaaaaagcccccagtcatcgcctcggggttcggcacggccagacccgtggtcctgctgcctccgcccgagccacccgtgaagcgcagagcgcgcggggtcttggagagctcgcggcacgcggctcccaggcgggtcttccacttgggaagggagcgcgaacagagccaggaggtagctcctctcgcagggccctgcatggccaaagagaggaaggccagctccgtctccgcagaggacggctacatggaggccagcagcgggcggaggaaagtgaggatccgcagcaacttcgtgagcgagagcggggcccgcgaggcgcgggaagcg

SEQ ID NO: 280551 - DNA, 856 bp, Homo sapiens
agccagtcgagcccacccggcccctaggcacaggaaaggcctgttggacactcgccgagcggcggggccaagctcaccgccacctgaattggagcggaggcgccctcgatgccgggtcaaatttgtcaagatgtccacaatcccgagacactttggcctgaaatacaaagaggaatcgtatatgtttaaagagcttgagaaagttcggcaggaaactaaaaaggattttctccgattcaagcagaagttggcctccaagccggctgtagatgaaagcccagtccacagcctccatgcccccggcccggcccgccccgcgcgcgtttcctgcgccgcagcccggacgtcgagaagatacccttcgcttaaaggccctgcgatgtccgcggccgccctcctgcaggaggtgctcggaggcgcgccgcgtccctcgggcctgggtgaggcggcggctccaggcaagacccggtcgtttcgcccccgggacttttacttgcggagctccgcgttcctacggcaccaggccctgaaaaagcccccagtcatcgcctcggggttcggcacggccagacccgtggtcctgctgcctccgcccgagccacccgtgaagcgcagagcgcgcggggtcttggagagctcgcggcacgcggctcccaggcgggtcttccacttgggaagggagcgcgaacagagccaggaggtagctcctctcgcagggccctgcatggccaaagagaggaaggccagctccgtctccgcagaggacggctacatggaggccagcagcgggcggaggaaagtgaggatccgcagcaacttcgtgagcgagagcggggcccgcgaggcgcgggaagcg

SEQ ID NO: 280552 - DNA, 1186 bp, Homo sapiens
gcacagagggcacctgtacaccttcagaccagtctgcaacctcaggctgagtaacagtgaactcaggagctggagcagtccattcaccctgaaattcctccttggtcactgccttctcagcagcagcctgctcttctttttcaatctcttcagatctctgtagaagtacagatcaggcatgacctcccatgggtgttcacgggaaatggtgccacgcatgcgcagaacttcccgagccagcatccaccacatcaaacccactgagtgagctcccttgttgttgcatgggatggcaatgtccacatagcgcagaggagaatctgtgttacacagcgcaatgatgtactgttccatctggaagtcaagattggtgccacctaagtgggttcctgctgcaaggaacttaaggacatcctcctccttcatttgcaggacatcaagggctccggacattgtgaaagtttccctttaagttacgatgggaatccagaacaacgccgtatggacccctctgcagcaggagaccttatcaaaattctcctagattacatgacagcagccctgggaacagaaggcaagtttttacattctgaggtactgggagttggaatttcaacatatgaattttgggaggatgcaacaaaatactccccagtgcttagagggtcctgtgcttatcaagcatctgtttagaaagccctttcacatgcatgatctcatctgatccttagaacagaactgttaaacaggaagagatcaagccagaagtgtttgactcttcaacaataatctggtgcccaaacacgtggggccacagagaagactcaggaccctgaaggagttgcctaaaaccctagctaaggtactagcaggggcccagtgaaacctcaccaagttctagcttctcctctggtgaaactgattgtgaaaacagaaaaggagaatggctatgccctcaaactacctggaaccctgattcttctcaaacttggcctctaatatccaacgggacataacatctgggtctcgctatgttgtgcaagctggcctcaaactcctgacctcaagcgatcctctttcctcggcctctcaaagtactgagattacaagcgtgagcaactgcacccagccaactatatttctgatttactttttgttgggaaaaaatcactagtaagtggacctg

SEQ ID NO: 280553 - DNA, 419 bp, Homo sapiens
gttcttccaatgacctagggtttgggaatacaattttaaaagcccatggccactcttgtagctattactttcatgggatgacctaaacagagtttcagactatgacaatgatttcctctccttgtggcccatgtgctgttccttcacacttccacagacttccatgggatatatgagtcaatactaaggtgatagctctagttattccttccaaggacatctggaatccgattatctgatgagatattctattgctccattttacagcaggagaccttatcaaaattctcctagattacatgacagcagccctgggaacagaaggcaagtttcttaaattatttcattcttccccaaccaaaattcctatgtaggaacccattaacaagaactgtttctagaaaggacttgggcctcca

SEQ ID NO: 280554 - DNA, 987 bp, Homo sapiens
gcacagagggcacctgtacaccttcagaccagtctgcaacctcaggctgagtaacagtgaactcaggagctggagcagtccattcaccctgaaattcctccttggtcactgccttctcagcagcagcctgctcttctttttcaatctcttcagatctctgtagaagtacagatcaggcatgacctcccatgggtgttcacgggaaatggtgccacgcatgcgcagaacttcccgagccagcatccaccacatcaaacccactgagtgagctcccttgttgttgcatgggatggcaatgtccacatagcgcagaggagaatctgtgttacacagcgcaatggtaggtaggttaacataagatgcctccgtgagaggctggtggtcagccctggggtcagtaaccacaagaagccgtggctcccggaaggctgcctggatctggttagtgaaggttccaggagtgaagcggccagcaattggagtggctccagtggcagcagcaaacttcagcacagccctctggccagtattcctggaggatataacactgacatcagcagggttttcaatggcaacaattgcacgagctgccagcagaagcttctcccaggtcctcttgagatttatgatatagatgccatcacttttccttttatagatgtactgttccatctggaagtcaagattggtgccacctaagtgggttcctgctgcaaggaacttaaggacatcctcctccttcatttgcaggacatcaagggctccggacattgtgaaagtttccctttaagttacgatgggaatccagaacaacgccgtatggacccctctgcagcaggagaccttatcaaaattctcctagattacatgacagcagccctgggaacagaaggcaagtttcttaaattatttcattcttccccaaccaaaattcctatgtaggaacccattaacaagaactgtttctagaaaggacttgggcctcca

SEQ ID NO: 280555 - DNA, 725 bp, Homo sapiens
aggtccctctccggtgcccagccagacaggaagtacagatgcccatacctccagatccctgactccctccccagctctcgggtctgcaggatccctctggattgcagctgagaggagttccccagcaggcagggaccccacgagacaagacgcagctttggaaggcccccagctctgaggggtggcgctggcctcctcgatgctcctggcctctgctggcctcctcctgggcctcctctggtgctgttgctctcccagctggctggcctggcaacctggtgcccgtggcctctgcctccactgcagcacagcctgtaccacgtgctacccatgtcccagccaggtctccccagggggctgcagttgagtggcccagccttataggatcagggaggccatccctagaggggcttcgggcacatgggaatgatactaggctctggggtcagactctttgggttctaaccccctggctctctgtctgatgttggacaggccccctaaccctctgagactcagctgcccctctagaaaataggacaattcctgcctcacagggttgggggcctgggggcctcgctgatcccaagccagcttgcttcacccccagatctcacctgccctgctctgccccatccacaggctccactgagtgaagccctcatcaaagactcaggaggcccctggcggggatagcaccgtttattaagaaaaatcaagacaaa

SEQ ID NO: 280556 - DNA, 188 bp, Homo sapiens
aggtccctctccggtgcccagccagacaggaagtacagatgcccatacctccagatccctgactccctccccagctctcgggtctgcaggatccctctggattgcagctgagaggagttccccagcaggcagggaccccacgagacaagacgcagctttggaaggttacaccttgctcctactcttcc

SEQ ID NO: 280557 - DNA, 516 bp, Homo sapiens
tgagtcagggtctcactcttacccaggctggagtgccgtggcagtcacaaatcactgcagcctcaaattcccaggctcaagtgatcctcccgcctcagcctcttgagtagctgctactacaagctcatgccaccacacatagctaaatgttttaaatttattttttgtaaacacagggtctcaccatcttgcccagtctggtctcaaactcctgggctcaagggatcatcctgcctcagcctcccaaaatgctaggactacaggtgtgagccactgcatctggtgagaaactcttgtacatgatgtgaactgctttgtatttatcaaattacatgccaaaagataataatcaattacagataagaacatgatctctaagttttaaatcttaagacttttagcaatgttctcctgcttatgattcataaaacctgagaagctgaactcatccgatgatcacacgataggctgaaaagcactggaccagatcaggacacaagtgttctaatccccact

SEQ ID NO: 280558 - DNA, 590 bp, Homo sapiens
tccccagactgtaaccagatgctcctacttgagaccaaacagcaaatgggttaggctccaagccagaagagagctgggggtcccaccttctgtcctctccatggttttctacaaggagcatgtcccactttcaacattgtaaaaaatgtgcaagccttgtttctgtttctaaaagcagcctgactgctgaagcttaccttcagtcaagggaaagatttcactcatcttctggcgggccatcctcaccttgggtctcaccatcttgcccagtctggtctcaaactcctgggctcaagggatcatcctgcctcagcctcccaaaatgctaggactacaggtgtgagccactgcatctggtgagaaactcttgtacatgatgtgaactgctttgtatttatcaaattacatgccaaaagataataatcaattacagataagaacatgatctctaagttttaaatcttaagacttttagcaatgttctcctgcttatgattcataaaacctgagaagctgaactcatccgatgatcacacgataggctgaaaagcactggaccagatcaggacacaagtgttctaatccccact

SEQ ID NO: 280559 - DNA, 865 bp, Homo sapiens
tctttccctggctggtcgaactgcctctacagttgtcccatccagaagccacacacagcagcgggcctcaggaattgcattcctcgcagtgacaggagaggatgtaccggtaggtggcagtgagtcgcatgccccctgagcatcgcagccgcagtgccttcagcttggaagtctggggccggcagcagtgacaggaggaacggaagggttgcttgaggacagtgctgaacgacaccaaaggctcggagcgtgacgcctggctgcagtgcccctcgcacctggccaggagcaccatctggggaaagaaaaggaggtggttactctgtgggcatgccacaaccttagccagcacttgaacatctcctgatctcttccggatcagagcttctcagactggaatgtgcgtgtgaatcatctaggatcttgttaaaagagtctccagcaccttccacagcacctggacatgatatttcccccaggagtcaatggcaaaaggatgaagagagaagcagacattccagtcctggcccttcttctgcactgccagcaacttctcttcagagccatggccaggaggccgaagtgcatccaggcattcccatagcgctcccaccccaaggcctttgccggagatgttcgggtcactgtgatggtatgctcgttcctgccaacccggtcactccagccccgctctcggcagcccaaagggcagctaagccatgtggctgctcctctcttgtcattggaactcgaattaagattgaaaactccacaggcacatttccatctgtgggtgtcagctgcttggtacacagtcgtaagaaggcctcagccagttctcccgttacctgaaccaaatgtattt

SEQ ID NO: 280560 - DNA, 514 bp, Homo sapiens
tgcgaagtttaggatggagctgaagagactgggttccgtcctacggtgggatttctttccgtgctcgcgcgttcagccccaagtctcagggccactcgtctgggaagttgtagaatctgtatagccaacctacacaacctccaaggggcctttggacaggaccatcagctttttccttgccttcggacttgaattaaacatcatctcttccttggcgtcaagcctgctgccatcagactggaactaaaccatcagctctcatgggactccatcttgctgacttatcctgcagatcttgggatttaaccgcctccataatcacgaatcctccctccaggtcactgggagcttcaattccttagaagaaagaagcaactatcaccatactatgaagtagcacaagcccttcaccagatacagtcgcccaatcttggaccatccagccccaagaaccatgagctaaataaacctctttccttgataaattaaaaaaaaaaaggggaaaacagaagaa

SEQ ID NO: 280561 - DNA, 656 bp, Homo sapiens
tgcgaagtttaggatggagctgaagagactgggttccgtcctacggtgggatttctttccgtgctcgcgcgttcagccccaagtctcagggccactcgtctgggaagttgtagaatctgtatagccaacctacacaacctccaaggggcctttggacaggaccatcagctttttccttgccttcggacttgaattaaacatcatctcttccttggcgtcaagcctgctgccatcagactggaactaaaccatcagctctcatgggactccatcttgctgacttatcctgcagatcttgggatttaaccgcctccataatcacgaatcctccctccaggtcactgggagcttcaattccttagaagaaagaaagagatgactcctgcttcatagtccaggaaaatccccacacaccgtggaggctctttaaggcggaaggaggtctgcggggatgtgagagcttcatactcattcccacgactctgtcgcagaagccagtgtccattggcagaagcaactatcaccatactatgaagtagcacaagcccttcaccagatacagtcgcccaatcttggaccatccagccccaagaaccatgagctaaataaacctctttccttgataaattaaaaaaaaaaaggggaaaacagaagaa

SEQ ID NO: 280562 - DNA, 873 bp, Homo sapiens
aactcactctgtgggtgggggaggagcatggttccggtggcttcagaaatgagcaacaagctatcggagccactgattcctcaaagaccaagagctggagaaaaataatttattttcatttattccatatcgttctatccatccactcttctgtttgaccaacattttgaattgcctactatgtgtttaccagcaaacaaggaagaacctggcttttgtaatctataatcgtaccaaggctgaaaccttacttttaaacaaataccagaattttaaaattataactgaggcacagacttctgccaggcctgcagacagagctcaggataaagagccaagggtgtggcctgtctcgaggcccatagatgtgcgctctgcaggtggaatggccgtccggtgcttactttgactgtcctcgggtcccgagtcttctggtggttaactgaggaaactgctgccttatgatctagcagaggatgataattgctgttgcccaggacaaccacaccagttcacaagaaatccgtgaagagagagcatctctcaaggtgaaaacataaccatgaggcccctttccttggggtttacggagatgatgtttgtggagaggcatgacaggtcaggggttacgtgcaagaactctggaactcgactacctgaattgaatgcaagctcaggcattggttaggctggatgcccttgggcaagttatttagtatccacatgactcagtttccccatttgtaaaataggaatgataataacctctagagttattgtgaaattttaaaaagtgaatgtatgtaaatagctggcagtagtgcctggcagttagtaagtacttaataaatgttacccattattaccaaagat

SEQ ID NO: 280563 - DNA, 848 bp, Homo sapiens
cccacccagaggacaactggccaggaaatctgcctgtttcttgtctcaccctctagtccacactctgcctaacactacgccctacctcacattcctattgacatctgctgcagatcacacccttgtgatggacaaactgctcagtacagtcccacccacccagcctccttgtcctgggcacgaggtttttgcctccctgatttggagtatttggcccttactagagagctgccagatgagggacatttccttcacctggagaaggatggggaggagtcagcacttgacatctgccaccctaccccagaatcagtgccacccttcgccagcccacccaaacctggtctcgtatatcatcccgcagctccaccaggatctggttgaagaggaactcagaggctcctcccggctcacctgcatcctcaaatacgccttctgtccagtcctaatctccagcccatcgacctccgctggaggaatgggggccagtgctggaaggcctgcatgttggtcacccagtttgcagtccacgtagagatgtagggcagggctgggtctggagggacctcggagtcgcaggagaactgtgtgtgtgcgcccatcagccaggcccgcttgctgtaggttcacggcgtggactttgccatcctcccgctggtatcgcaccagtactgcccaggaggggagatcagtatgggcgctatcccccaccccctgcctcccagctgagccttggatcaactctgctagataccacatctctagggcccctatccctaattctactatgtggctctcaacaccttgtatttaataggtacacaataaatgtttttgaaattgcttta

SEQ ID NO: 280564 - DNA, 1186 bp, Homo sapiens
cccacccagaggacaactggccaggaaatctgcctgtttcttgtctcaccctctagtccacactctgcctaacactacgccctacctcacattcctattgacatctgctgcagatcacacccttgtgatggacaaactgctcagtacagtcccacccacccagcctccttgtcctgggcacgaggtttttgcctccctgatttggagtatttggcccttactagagagctgccagatgagggtggataacagcctcagttttcagatgaggaagctgaggctcagaaaagttaaataacctgctaaagagctagcaagaggcaaaccagtattccaaaccaagtccatgtgaacacctaatctgtgtagtgccctggggaggaggaaaggcagcaggaaatttgaagacctgaaggggcagactttgggtggaaccagacctatggtgggtctcctcagatacagcagaggacactggacaggcctcacagtggaagccgggcatggtgttgatgcagctggagcccgggaaacaggggtcagcgtgagcacactggggaccagatgagaaggcagagggacatttccttcacctggagaaggatggggaggagtcagcacttgacatctgccaccctaccccagaatcagtgccacccttcgccagcccacccaaacctggtctcgtatatcatcccgcagctccaccaggatctggttgaagaggaactcagaggctcctcccggctcacctgcatcctcaaatacgccttctgtccagtcctaatctccagcccatcgacctccgctggaggaatgggggccagtgctggaaggcctgcatgttggtcacccagtttgcagtccacgtagagatgtagggcagggctgggtctggagggacctcggagtcgcaggagaactgtgtgtgtgcgcccatcagccaggcccgcttgctgtaggttcacggcgtggactttgccatcctcccgctggtatcgcaccagtactgcccaggaggggagatcagtatgggcgctatcccccaccccctgcctcccagctgagccttggatcaactctgctagataccacatctctagggcccctatccctaattctactatgtggctctcaacaccttgtatttaataggtacacaataaatgtttttgaaattgcttta

SEQ ID NO: 280565 - DNA, 852 bp, Homo sapiens
gttgaactccctcactttccgcttcccagcattggcgggttccgggactggtggctgcggtagctcattggcctttggtctcttagacggtggagaataatcatcatcttgaaaaagaaaatggtcattactggaagaaccatcttacagttacagtcacctcctggtcaattcccaacattcaaaagctaaagaaacaggctcagaggatgttatttgattggactatgttgtatctctggagagcacagctgagatcagactgtgtgtgtgtaactccactagactacgagggtgcttctcataaagggttgcaagatcatagttctcggggtgtttaaaggcaacaccttccggaagcccctgcactaccacagccgactggtctcgcagcatcttctcatatggtacaggtaccactgtggatttgcctaaagctttccctggggcagatgaaaagcggatgaacatcattcaatgtgcaggcctacccaactatggaatgatggaacagaaggcctcaccatggactcgagagctgacatgaggaatgtcaccaccatcctgctctccgaggactcctcatcttcaacggggagggtggacattgcaacttgggccatgatccctgtgcaggagaagtaagaagaaagtgagtggtagaaatctggtgtcctgaacccacagccaaagctgtgagggcccctcaccggctgcctaatttacagttttcttgctctagagacaaaataaggctcagaaactaagtatttgacttgcccaaaccctcataagataaagaatctatcccctaattttctatatattgttatttccagaaaattgggtcaa

SEQ ID NO: 280566 - DNA, 1602 bp, Homo sapiens
  misc_feature (1)..(2): n is a, c, g, or t
  misc_feature (4)..(4): n is a, c, g, or t
  misc_feature (6)..(7): n is a, c, g, or t
nncncnncctctctctctctccctctctctctccctctctctctctccctgtgtcgcttaaacaacagtcctaacttttgtgtgttgcaaatataaaaggcaagccatgtgacagagggacagaagaacaaaagcatttggaagtaacaggacctctttctagctctcagaaaagtctgagaagaaaggagccctgcgttcccctaagctgtgcagcagatactgtgatgatggattgcaagtgcaaagagtaagacaaaactccagcacataaaggacaatgacaaccagaaagcttcagcccgatcctgccctttccttgaacgggactggatcctaggagatggtgctcctggccaggtgcgaggggcactgcagccaggcgtcacgctccgagcctttggtgtcgttcagcactgtcctcaagcaacccttccgttcctcctgtcactgctgccggccccagacttccaagctgaaggcactgcggctgcgatgctcagggggcatgcgactcactgccacctaccggtacatcctctcctgtcactgcgaggaatgcaattcctgaggcccgctgctgtgtgtggcttctggatgggacaactgtagaggcagttcgaccagccagggaaagactggcaagaaaagagttaaggcaaaaaaggatgcaacaattctcccgggactctgcatattctagtaataaagactctacatgcttgttgacagagagagatactctgggaacttctttgcagttcccatctcctttctctggtacaatttcttttggttcattttcagattcaggcattttcccccttggctctcaatgctgtttgggtttccaacaattcagcattagtgggaaaaagtgggccctcatacacaagcgtgtcaggctgtcagtgtttggtgcacgctggggaagaatttactttggaaagtagaaaagcccagcttttcctgggacatcttctgttattgttgatgtttttttttaccttgtcattttggtctaaggttgccattgctgctaaaggttaccgatttcaaagtccagataccaagcatgtggatatgtttagctacgtttactcacagccagcgaactgacattaaaataactaacaaacagattcttttatgtgatgctggaactcttgacagctataattattattcagaaatgactttttgaaagtaaaagcagcataaagaatttgtcacaggaaggctgtctcagataaattatggtaaaattttgtaagggagcagacttttaaagacttgcacaaatacggatcctgcactgactctggaaaaggcatatatgtactagtggcatggagaatgcaccatactcatgcatgcaaattagacaaccaagtatgaatctatttgtgggtgtgctatagctttagccgtgtcacgggcatcattctctaatatccacttgtccatgtgaaacatgttgccaaaatggtggcctggcttgtcttctgaacgtttggttcaaatgtgttttggtcctggaggctcaaattttgagttattcccacgttttgaaataaaaagagtatattcaaaatttaaaaa

SEQ ID NO: 280567 - DNA, 1671 bp, Homo sapiens
  misc_feature (1)..(2): n is a, c, g, or t
  misc_feature (4)..(4): n is a, c, g, or t
  misc_feature (6)..(7): n is a, c, g, or t
nncncnncctctctctctctccctctctctctccctctctctctctccctgtgtcgcttaaacaacagtcctaacttttgtgtgttgcaaatataaaaggcaagccatgtgacagagggacagaagaacaaaagcatttggaagtaacaggacctctttctagctctcagaaaagtctgagaagaaaggagccctgcgttcccctaagctgtgcagcagatactgtgatgatggattgcaagtgcaaagagtaagacaaaactccagcacataaaggacaatgacaaccagaaagcttcagcccgatcctgccctttccttgaacgggactggatcctaggaggtgaagccatttccaattttttgtcctctgcctccctctgctgttcttctagagaagtttttccttacaacaatgagaaaacatgtactagctgcatccttttctatgctctccctgctggtgataatgggagatacagacagtaaaacggacagctcattcataatggactcggaccctcgacgctgcatgaggcaccactatgtggattctatcagtcacccattgtacaagtgtagctcaaagatggtgctcctggccaggtgcgaggggcactgcagccaggcgtcacgctccgagcctttggtgtcgttcagcactgtcctcaagcaacccttccgttcctcctgtcactgctgccggccccagacttccaagctgaaggcactgcggctgcgatgctcagggggcatgcgactcactgccacctaccggtacatcctctcctgtcactgcgaggaatgcaattcctgaggcccgctgctgtgtgtggcttctggatgggacaactgtagaggcagttcgaccagccagggaaagactggcaagaaaagagttaaggcaaaaaaggatgcaacaattctcccgggactctgcatattctagtaataaagactctacatgcttgttgacagagagagatactctgggaacttctttgcagttcccatctcctttctctggtacaatttcttttggttcattttcagattcaggcattttcccccttggctctcaatgctgtttgggtttccaacaattcagcattagtgggaaaaagtgggccctcatacacaagcgtgtcaggctgtcagtgtttggtgcacgctggggaagaatttactttggaaagtagaaaagcccagcttttcctgggacatcttctgttattgttgatgtttttttttaccttgtcattttggtctaaggttgccattgctgctaaaggttaccgatttcaaagtccagataccaagcatgtggatatgtttagctacgtttactcacagccagcgaactgacattaaaataactaacaaacagattcttttatgtgatgctggaactcttgacagctataattattattcagaaatgactttttgaaagtaaaagcagcataaagaatttgtcacaggaaggctgtctcagataaattatggtaaaattttgtaagggagcagacttttaaagacttgcatgttgccaaaatggtggcctggcttgtcttctgaacgtttggttcaaatgtgttttggtcctggaggctcaaattttgagttattcccacgttttgaaataaaaagagtatattcaaaatttaaaaa

SEQ ID NO: 280568 - DNA, 1848 bp, Homo sapiens
  misc_feature (1)..(2): n is a, c, g, or t
  misc_feature (4)..(4): n is a, c, g, or t
  misc_feature (6)..(7): n is a, c, g, or t
nncncnncctctctctctctccctctctctctccctctctctctctccctgtgtcgcttaaacaacagtcctaacttttgtgtgttgcaaatataaaaggcaagccatgtgacagagggacagaagaacaaaagcatttggaagtaacaggacctctttctagctctcagaaaagtctgagaagaaaggagccctgcgttcccctaagctgtgcagcagatactgtgatgatggattgcaagtgcaaagagtaagacaaaactccagcacataaaggacaatgacaaccagaaagcttcagcccgatcctgccctttccttgaacgggactggatcctaggaggtgaagccatttccaattttttgtcctctgcctccctctgctgttcttctagagaagtttttccttacaacaatgagaaaacatgtactagctgcatccttttctatgctctccctgctggtgataatgggagatacagacagtaaaacggacagctcattcataatggactcggaccctcgacgctgcatgaggcaccactatgtggattctatcagtcacccattgtacaagtgtagctcaaagatggtgctcctggccaggtgcgaggggcactgcagccaggcgtcacgctccgagcctttggtgtcgttcagcactgtcctcaagcaacccttccgttcctcctgtcactgctgccggccccagacttccaagctgaaggcactgcggctgcgatgctcagggggcatgcgactcactgccacctaccggtacatcctctcctgtcactgcgaggaatgcaattcctgaggcccgctgctgtgtgtggcttctggatgggacaactgtagaggcagttcgaccagccagggaaagactggcaagaaaagagttaaggcaaaaaaggatgcaacaattctcccgggactctgcatattctagtaataaagactctacatgcttgttgacagagagagatactctgggaacttctttgcagttcccatctcctttctctggtacaatttcttttggttcattttcagattcaggcattttcccccttggctctcaatgctgtttgggtttccaacaattcagcattagtgggaaaaagtgggccctcatacacaagcgtgtcaggctgtcagtgtttggtgcacgctggggaagaatttactttggaaagtagaaaagcccagcttttcctgggacatcttctgttattgttgatgtttttttttaccttgtcattttggtctaaggttgccattgctgctaaaggttaccgatttcaaagtccagataccaagcatgtggatatgtttagctacgtttactcacagccagcgaactgacattaaaataactaacaaacagattcttttatgtgatgctggaactcttgacagctataattattattcagaaatgactttttgaaagtaaaagcagcataaagaatttgtcacaggaaggctgtctcagataaattatggtaaaattttgtaagggagcagacttttaaagacttgcacaaatacggatcctgcactgactctggaaaaggcatatatgtactagtggcatggagaatgcaccatactcatgcatgcaaattagacaaccaagtatgaatctatttgtgggtgtgctatagctttagccgtgtcacgggcatcattctctaatatccacttgtccatgtgaaacatgttgccaaaatggtggcctggcttgtcttctgaacgtttggttcaaatgtgttttggtcctggaggctcaaattttgagttattcccacgttttgaaataaaaagagtatattcaaaatttaaaaa

SEQ ID NO: 280569 - DNA, 787 bp, Homo sapiens
agcgggggctggcgcttccggcaccggccgaggtgcgggtcgcctccagagatcctgtgccttcaaaccctacgagtccatactttaaaacaaaatgaagaaagtaaggcttaaggaactagagagtcgcctgcaacaagtggatggatttgaaaagcccaagctacttctggaacagtatcctaccaggccgcacattgcagcatgtatgctctatacaatccataacacttatgatgacattgaaaataaagtcgttgcagatctaggatgtggttgtggagtacttagcatcggaactgcaatgttaggagcagggttgtgtgttggatttgacatagatgaagacgcattggaaatatttaataggaatgcagaagagtttgagttaacaaatattgacatggttcaatgtgatgtgtgcttattatctaacagaatgtccaagtcattcgatacagtaattatgaatcctccctttgggaccaaaaataataaagggacagatatggcttttctaaagactgctttggaaatggcaagaacagcagtatattccttacacaaatcctcaactagagaacatgttcaaaagaaagctgcagaatggaaaatcaagatagatattatagcagaacttcgatatgacctgccagcatcatacaagtttcacaaaaagaaatcagtggacattgaagtggacctaattcggttttccttttaaaagccccgcaaacaaaagtcgtttaaaacctatttaaaatgaataaaaaattggtttactaaa

SEQ ID NO: 280570 - DNA, 873 bp, Homo sapiens
agcgggggctggcgcttccggcaccggccgaggtgcgggtcgcctccagaggtgcgtggtcgtggcgcgagggatcctgaggctgctccagcagtgcgccgccgccgtctcctggggcggcttgggttagccgggagatcctgtgccttcaaaccctacgagtccatactttaaaacaaaatgaagaaagtaaggcttaaggaactagagagtcgcctgcaacaagtggatggatttgaaaagcccaagctacttctggaacagtatcctaccaggccgcacattgcagcatgtatgctctatacaatccataacacttatgatgacattgaaaataaagtcgttgcagatctaggatgtggttgtggagtacttagcatcggaactgcaatgttaggagcagggttgtgtgttggatttgacatagatgaagacgcattggaaatatttaataggaatgcagaagagtttgagttaacaaatattgacatggttcaatgtgatgtgtgcttattatctaacagaatgtccaagtcattcgatacagtaattatgaatcctccctttgggaccaaaaataataaagggacagatatggcttttctaaagactgctttggaaatggcaagaacagcagtatattccttacacaaatcctcaactagagaacatgttcaaaagaaagctgcagaatggaaaatcaagatagatattatagcagaacttcgatatgacctgccagcatcatacaagtttcacaaaaagaaatcagtggacattgaagtggacctaattcggttttccttttaaaagccccgcaaacaaaagtcgtttaaaacctatttaaaatgaataaaaaattggtttactaaa

SEQ ID NO: 280571 - DNA, 949 bp, Homo sapiens
agcgggggctggcgcttccggcaccggccgaggtgcgggtcgcctccagagatcctgtgccttcaaaccctacgagtccatactttaaaacaaaatgaagaaagtaaggcttaaggaactagagagtcgcctgcaacaagtggatggatttgaaaagcccaagctacttctggaacagtatcctaccaggccgcacattgcagcatgtatgctctatacaatccataacacttatgatgacattgaaaataaagtcgttgcagatctaggatgtggttgtggagtacttagcatcggaactgcaatgttaggagcagggttgtgtgttggatttgacatagatgaagacgcattggaaatatttaataggaatgcagaagagtttgagttaacaaatattgacatggttcaatgtgatgtgtgcttattatctaacagaatgtccaagtcattcgatacagtaattatgaatcctccctttgggaccaaaaataataaagggacagatatggcttttctaaagactgctttggaaatggcaagaacagcagtatattccttacacaaatcctcaactagagaacatgttcaaaagaaagctgcagaatggaaaatcaagatagatattatagcagaacttcgatatgacctgccagcatcatacaagtttcacaaaaagaaatcagtggacattgaagtggacctaattcggttttccttttaaaagccccgcaaacaaaagtcgtttaaaacctatttaaaatgaataaaaaattggtttactaaaaaaaaacgcaacaccaaaacacagaagcaaaaaaaccaaacggaaccgaccacacaaaaaaaggggcgggggaaagagcaacaatcactgcgcgcaggagcgagaccacaaggagacgagcagacagaatgtgggaacaaagagcgagcaacacaaagcggg

SEQ ID NO: 280572 - DNA, 805 bp, Homo sapiens
agcgggggctggcgcttccggcaccggccgaggtgcgggtcgcctccagagatcctgtgccttcaaaccctacgagtccatactttaaaacaaaatgaagaaagtaaggcttaaggaactagagagtcgcctgcaacaagtggatggatttgaaaagcccaagctacttctggaacagtatcctaccaggccgcacattgcagcatgtatgctctatacaatccataacacttatgatgacattgaaaataaagtcgttgcagatctaggatgtggttgtggagtacttagcatcggaactgcaatgttaggagcagggttgtgtgttggatttgacatagatgaagacgcattggaaatatttaataggaatgcagaagagtttgagttaacaaatattgacatggttcaatgtgatgtgtgcttattatctaacagaatgtccaagtcattcgatacagtaattatgaatcctccctttgggaccaaaaataataaagggacagatatggcttttctaaagactgctttggaaatggcaagaacagcagtatattccttacacaaatcctcaactagagaacatgttcaaaagaaagctgcagaatggaaaatcaagatagatattatagcaggtggcttttgttttacagaacttcgatatgacctgccagcatcatacaagtttcacaaaaagaaatcagtggacattgaagtggacctaattcggttttccttttaaaagccccgcaaacaaaagtcgtttaaaacctatttaaaatgaataaaaaattggtttactaaa

SEQ ID NO: 280573 - DNA, 691 bp, Homo sapiens
agcgggggctggcgcttccggcaccggccgaggtgcgggtcgcctccagaggtgcgtggtcgtggcgcgagggatcctgaggctgctccagcagtgcgccgccgccgtctcctggggcggcttgggttagccgggagatcctgtgccttcaaaccctacgagtccatactttaaaacaaaatgaagaaagtaaggcttaaggaactagagagtcgcctgcaacaagtggatggatttgaaaagcccaagctacttctggaacagtatcctaccaggccgcacattgcagcatgtatgctctatacaatccataacacttatgatgacattgaaaataaagtcgttgcagatctaggatgtggttgtggagtacttagcatcggaactgcaatgttaggagcaggggacagatatggcttttctaaagactgctttggaaatggcaagaacagcagtatattccttacacaaatcctcaactagagaacatgttcaaaagaaagctgcagaatggaaaatcaagatagatattatagcagaacttcgatatgacctgccagcatcatacaagtttcacaaaaagaaatcagtggacattgaagtggacctaattcggttttccttttaaaagccccgcaaacaaaagtcgtttaaaacctatttaaaatgaataaaaaattggtttactaaa

SEQ ID NO: 280574 - DNA, 819 bp, Homo sapiens
agcgggggctggcgcttccggcaccggccgaggtgcgggtcgcctccagagatcctgtgccttcaaaccctacgagtccatactttaaaacaaaatgaagaaagtaaggcttaaggaactagagagtcgcctgcaacaagtggatggatttgaaaagcccaagctacttctggaacagtatcctaccaggccgcacattgcagcatgtatgctctatacaatccataacacttatgatgacattgaaaataaagtcgttgcagatctaggatgtggttgtggagtacttagcatcggaactgcaatgttaggagcagggttgtgtgttggatttgacatagatgaagacgcattggaaatatttaataggaatgcagaagagtttgagttaacaaatattgacatggttcaatgtgatgtgtgcttattatctaacagaatgtccaagtcattcgatacagtaattatgaatcctccctttgggaccaaaaataataaagggacagatatggcttttctaaagactgctttggaaatggcaagaacagcagtatattccttacacaaatcctcaactagagaacatgttcaaaagaaagctgcagaatggaaaatcaagatagatattatagcagaacttcgatatgacctgccagcatcatacaagtttcacaaaaagaaatcagtggacattgaagtggacctaattcggttttccttttaaaagccccgcaaacaaaagtcgtttaaaacctatttaaaatgaataaaaaattggtttactaaatactacaaaacaacaagaaaactctccagcac

SEQ ID NO: 280575 - DNA, 949 bp, Homo sapiens
agcgggggctggcgcttccggcaccggccgaggtgcgggtcgcctccagagatcctgtgccttcaaaccctacgagtccatactttaaaacaaaatgaagaaagtaaggcttaaggaactagagagtcgcctgcaacaagtggatggatttgaaaagcccaagctacttctggaacagtatcctaccaggccgcacattgcagcatgtatgctctatacaatccataacacttatgatgacattgaaaataaagtcgttgcagatctaggatgtggttgtggagtacttagcatcggaactgcaatgttaggagcagggttgtgtgttggatttgacatagatgaagacgcattggaaatatttaataggaatgcagaagagtttgagttaacaaatattgacatggttcaatgtgatgtgtgcttattatctaacagaatgtccaagtcattcgatacagtaattatgaatcctccctttgggaccaaaaataataaagggacagatatggcttttctaaagactgctttggaaatggcaagaacagcagtatattccttacacaaatcctcaactagagaacatgttcaaaagaaagctgcagaatggaaaatcaagatagatattatagcagaacttcgatatgacctgccagcatcatacaagtttcacaaaaagaaatcagtctgatcatctaaatcacccgaaaatttcagcaagcatccaatcttttcttctagagatttctataaaaatatacaaagtgatcaaaaagtttcttaaaagcaacaacagaccagaaatgactcacaccaccttatagctatacaagaaaaagactagaaaccaaaatgctattttaaagtagtttcttccgccggggcagcaagagcgaaactccatctcaaaaaataataataataataaataaataaagtagtttcatag

SEQ ID NO: 280576 - DNA, 735 bp, Homo sapiens
agcgggggctggcgcttccggcaccggccgaggtgcgggtcgcctccagagatcctgtgccttcaaaccctacgagtccatactttaaaacaaaatgaagaaagtaaggcttaaggaactagagagtcgcctgcaacaagtggatggatttgaaaagcccaagctacttctggaacagtatcctaccaggccgcacattgcagcatgtatgctctatacaatccataacacttatgatgacattgaaaataaagtcgttgcagatctaggatgtggttgtggagtacttagcatcggaactgcaatgttaggagcagggttgtgtgttggatttgacatagatgaagacgcattggaaatatttaataggaatgcagaagagtttgagttaacaaatattgacatggttcaatgtgatgtgtgcttattatctaacagaatgtccaagtcattcgatacagtaattatgaatcctccctttgggaccaaaaataataaagggacagatatggcttttctaaagactgctttggaaatggcaagaacagcagtatattccttacacaaatcctcaactagagaaaacttcgatatgacctgccagcatcatacaagtttcacaaaaagaaatcagtggacattgaagtggacctaattcggttttccttttaaaagccccgcaaacaaaagtcgtttaaaacctatttaaaatgaataaaaaattggtttactaaa

SEQ ID NO: 280577 - DNA, 1014 bp, Homo sapiens
agcgggggctggcgcttccggcaccggccgaggtgcgggtcgcctccagaggtgcgtggtcgtggcgcgagggatcctgaggctgctccagcagtgcgccgccgccgtctcctggggcggcttgggttagccgggaggtgggtcagaggctcgccccgtgccctgcgtccgggcgtctccttagggcgcgtcttcgggtccggccagcggtgctgaaaaagggagaaggttgggggtagggaggaaacaagatcccagttcaatagatttctccgcagatcctgtgccttcaaaccctacgagtccatactttaaaacaaaatgaagaaagtaaggcttaaggaactagagagtcgcctgcaacaagtggatggatttgaaaagcccaagctacttctggaacagtatcctaccaggccgcacattgcagcatgtatgctctatacaatccataacacttatgatgacattgaaaataaagtcgttgcagatctaggatgtggttgtggagtacttagcatcggaactgcaatgttaggagcagggttgtgtgttggatttgacatagatgaagacgcattggaaatatttaataggaatgcagaagagtttgagttaacaaatattgacatggttcaatgtgatgtgtgcttattatctaacagaatgtccaagtcattcgatacagtaattatgaatcctccctttgggaccaaaaataataaagggacagatatggcttttctaaagactgctttggaaatggcaagaacagcagtatattccttacacaaatcctcaactagagaacatgttcaaaagaaagctgcagaatggaaaatcaagatagatattatagcagaacttcgatatgacctgccagcatcatacaagtttcacaaaaagaaatcagtggacattgaagtggacctaattcggttttccttttaaaagccccgcaaacaaaagtcgtttaaaacctatttaaaatgaataaaaaattggtttactaaa

SEQ ID NO: 280578 - DNA, 213 bp, Homo sapiens
ctcgttttgaacacgtagttctgtgtccggaactggtgggttcttggtctcactgacttcaagaatgaagctgcggaccctcgcggcaaagttggacatcccaaagatggcatagataaacatgaccaggaagagcaggaggccgatgttaaacaacgcaggaagggacatcatcaaagcaaagagcagcgtgcggatcccctttgctccttt

SEQ ID NO: 280579 - DNA, 765 bp, Homo sapiens
cgcctctggctcgtgagtgccccaagttcagctgcacgcttggagtagatggagccttctgtctggtttagcaccaacccgaggggttcccgcccctcagactgcgccttagaccgttgtggggaaggcggggagggactcaggctccgcccgtctcggctccgccccggcctcactgcaggcgcagccctatacccgcacctggtcgctgcaccagtaccagcccgagacgattgtgagtccgaggagcagcgcgggccacggcagatccccggtcacggggtgccggagcaggtggtaggagtcgggccggggtcgatagcagaagctggagatgtttcccacggctggatcctcggacaccgtcagcgaagtcgctgctcccaggtatttgtcgaagagacccgaatacccgcccacctcgtggaaggctgccgggcaaggccgtcaggggaccctccttaggaccctcagaccggagacgcgcaacggccccgcgcgcaggccgagagctccgcgaccatgccctccgcgcccctccctggtaggcgagcccctaccgtaacccatgaggatgcaggcgccccccagaatgacgaaggtctgtaccgtgtccgtgtacatcagcgcggccagccctcctgcaacaggccggggtcaggggacagcccagctgtttatgttacaggctggccttagcaataaggcgtctttgtgggaatttgaaagagttccccttcctggagaataaatttcaaaacgata

SEQ ID NO: 280580 - DNA, 493 bp, Homo sapiens
cagggcggctgcagctgcgcgagggacgacccctcccagcagcgggctccgcagcgagcttgcgcctgtggcccggggctgcccttaccgttgggcatgagcttcacgacgagccgcgggcgcagccctatacccgcacctggtcgctgcaccagtaccagcccgagacgattgtgagtccgaggagcagcgcgggccacggcagatccccggtcacggggtgccggagcaggccgagagctccgcgaccatgccctccgcgcccctccctggtaggcgagcccctaccgtaacccatgaggatgcaggcgccccccagaatgacgaaggtctgtaccgtgtccgtgtacatcagcgcggccagccctcctgcaacaggccggggtcaggggacagcccagctgtttatgttacaggctggccttagcaataaggcgtctttgtgggaatttgaaagagttccccttcctggagaataaatttcaaaacgata

SEQ ID NO: 280581 - DNA, 392 bp, Homo sapiens
acaaaaaaaaaaagttatgtcataaagatataaaccggtgctgtgactcacctgctcttagccgcaggtgcgagcgtctttgtgcggcggacaaatggggagaggacgaggaggtgggcactcaagcgacgtaagatccacatcagctcaactgcacttgcctcgcagaggcagcccgctcacttcccgcggaggcgctccccggcgccgcgctccgcggcagccgcctgcccccggcgctgcccccgcccgccgcgccgccgccgccgccgcgcacgccgcgccccgcagctctgggcttcctcttcgcccgggtggcgttgggcccgcgcgggcgctcgggtgactgcagctgctcagctcccctcccccgccccgcgccgcgcggccgc

SEQ ID NO: 280582 - DNA, 3275 bp, Homo sapiens
cggggctgtctccagggaaacgcgacgctctccgtaggcgcagggctggcaagcagtcgggacgggagcgcgggcgtccgcggtggctgcagtcccgtcggtctccctgctgtccggcgcgagctcttcgagtcttgcttgggatgtttcagcagcccctgagaaggaagaggaggaagctgagggcccgctgagggcgcaggacctgagggagtcctacatccagctcgtccagggtgtgcaggagtggcaggatggttgcatgtaccagggggagtttgggttgaacatgaagcttggatatggcaaattctcttggcccacaggcgagtcataccatgggcagttttaccgggaccactgccatggcctgggtacctacatgtggccagatggctccagtttcacgggcacattttacctcagccaccgagaaggctacggcaccatgtacatgaagacacggcttttccaggggctatacaaagcggaccagcggtttgggccaggtgtcgagacctaccccgatggcagccaggacgtggggctgtggttccgagagcagctcatcaagctgtgcacccagatccccagtggcttctccctcctcagataccctgagttctccagcttcatcacccacagccctgccaggatcagcctctcagaagaggagaaaacggagtggggactgcaggagggacaggatccctttttctatgactataagcggtttcttctgaatgacaacctaacgctgcctccagaaatgtatgtctactcgaccaacagtgaccacctgcccatgacaagctctttccgcaaagagctggacgcccgcatcttcctcaatgaaattcctccgttcgttgaggatggagaaccatggttcataatcaatgagacccctttgttggtcaaaatccagaagcaaacttacaagttcaggaacaagccagctcacaccagctggaacatgggcgccatcctggaggggaagcgcagtggctttgcaccctgtgggcccaaagagcaactttccatggagatgatcctaaaggctgaggaagggaaccacgaatggatttgtaggatcctgaaggacaactttgctagtgctgacgtggcggacgcaaagggctacactgtgcttgctgcggctgctactcactgccacaacgacattgtcaaccttctcctggactgtggggccgacgtgaacaagtgctcagatgagggtctcacggcactcagcatgtgtttcctcctccactaccccgcccagtccttcaagcccaatgttgctgaacggaccatacctgagccccaggaacctccaaaattcccagttgttccaatcctttcatcatcatttatggacacaaacctggagtctctgtactatgaggtgaacgtgccttcccagggtagctatgagctgaggccaccgccagcaccactgctcctgccacgcgtctcaggcagccacgagggcggccacttccaggacaccgggcagtgtggggggtccatagaccacaggagcagctctctgaagggggactccccgttggtgaagggcagccttggccatgtggaaagcgggcttgaggacgtgttgggaaacacagaccggggcagtctgtgcagtgctgagacgaaatttgagtccaacgtgtgtgtgtgcgacttctccatcgagctctcgcaggccatgctggagagaagcgcccagtcccacagcttgctgaagatggcctcgccctcaccgtgcaccagcagcttcgacaaagggaccatgcggaggatggcgctgtccatgatcgagcggaggaagcgctggcggaccatcaagctgctgctgcgccggggcgcggaccccaacctgtgctgcgtgcccatgcaggtcctgttccttgctgtgaaggccggggacgtggatggggtgaggctgctgctggagcacggggcgaggaccgacatctgctttccgccgcagctgagcaccctgacaccactccacatcgctgccgcccttcctggggaggagggggtacagattgtggagctgctgttgcatgccatcaccgatgtggacgccaaggcatccgacgaggacgacacttacaagcccggcaagctggacctgctgccctcaagtctgaagctcagcaatgagccaggccctccccaagcctactacagcacggacacagccctcccggaggaggggggcaggacggctctgcacatggcctgcgagcgggaggatgacaacaagtgtgccagggacatagtccggctccttctatcccacggagcaaatcctaacctgctgtggagtggccactccccgctctccctgtccattgccagtgggaatgagctggttgtgaaggagctcctgacccagggagctgaccccaacctgcccctgaccaaaggcttgggcagtgccctgtgtgttgcctgtgacctgacctacgagcaccagaggaacatggacagcaagctggccctgattgaccgactcatcagtcacggggccgacatcctgaagcctgtaatgctcaggcagggagaaaaggaggcagtgggcacagccgtggactatggctacttcagattcttccaggaccggaggattgcccgctgccccttccacacgctgatgccagcagagcgcgagacgttcctggcgcggaagcggctcctggagtacatgggcttgcagctacggcaggctgtctttgccaaggagagccagtgggaccccacgtggctgtacctgtgcaagagagcggagctgatccccagccacaggatgaagaagaagggccccagcctgcccaggggcctggatgtgaaggagcaggggcaaattcccttcttcaagttctgctaccagtgtggccgctccatcggggtccgcctcttgccctgccctcgctgctacgggatcctgacctgcagcaagtactgcaagaccaaggcctggaccgagttccacaagaaggactgcggggacctggtggccatcgtgacacaactggagcaagtttccaggaggagagaagaattccagtgaagcagcagctgcacgtccgaggcttggggaggacccaggactgtgtgggtttcttacctgcctgagccacctcagggaatcttccagcctaatgcaggcatttctgcacctttggggtcatgctttgtagcagtgtctcccttgcgacctcgcaataaattggccccacggggtgattttgacagtc

SEQ ID NO: 280583 - DNA, 2499 bp, Homo sapiens
cggggctgtctccagggaaacgcgacgctctccgtaggcgcagggctggcaagcagtcgggacgggagcgcgggcgtccgcggtggctgcagtcccgtcggtctccctgctgtccggcgcgagctcttcgagtcttgcttggttggaagaccacagacatggaaggggcccatgcctcccttagcttagaggacgaagtctctggggctggcagccgccaacgcccgctagaggggaagggcggcgagacccctgctgccgaggagccggggtccctgaagaactacgctgtcttcgccacaagggatgtttcagcagcccctgagaaggaagaggaggaagctgagggcccgctgagggcgcaggacctgagggagtcctacatccagctcgtccagggtgtgcaggagtggcaggatggttgcatgtaccagggggagtttgggttgaacatgaagcttggatatggcaaattctcttggcccacaggcgagtcataccatgggcagttttaccgggaccactgccatggcctgggtacctacatgtggccagatggctccagtttcacgggcacattttacctcagccaccgagaaggctacggcaccatgtacatgaagacacggcttttccagactcactgccacaacgacattgtcaaccttctcctggactgtggggccgacgtgaacaagtgctcagatgagggtctcacggcactcagcatgtgtttcctcctccactaccccgcccagtccttcaagcccaatgttgctgaacggaccatacctgagccccaggaacctccaaaattcccagttgttccaatcctttcatcatcatttatggacacaaacctggagtctctgtactatgaggtgaacgtgccttcccagggtagctatgagctgaggccaccgccagcaccactgctcctgccacgcgtctcaggcagccacgagggcggccacttccaggacaccgggcagtgtggggggtccatagaccacaggagcagctctctgaagggggactccccgttggtgaagggcagccttggccatgtggaaagcgggcttgaggacgtgttgggaaacacagaccggggcagtctgtgcagtgctgagacgaaatttgagtccaacgtgtgtgtgtgcgacttctccatcgagctctcgcaggccatgctggagagaagcgcccagtcccacagcttgctgaagatggcctcgccctcaccgtgcaccagcagcttcgacaaagggaccatgcggaggatggcgctgtccatgatcgagcggaggaagcgctggcggaccatcaagctgctgctgcgccggggcgcggaccccaacctgtgctgcgtgcccatgcaggtcctgttccttgctgtgaaggccggggacgtggatggggtgaggctgctgctggagcacggggcgaggaccgacatctgctttccgccgcagctgagcaccctgacaccactccacatcgctgccgcccttcctggggaggagggggtacagattgtggagctgctgttgcatgccatcaccgatgtggacgccaaggcatccgacgaggacgacacttacaagcccggcaaggttgtgaaggagctcctgacccagggagctgaccccaacctgcccctgaccaaaggcttgggcagtgccctgtgtgttgcctgtgacctgacctacgagcaccagaggaacatggacagcaagctggccctgattgaccgactcatcagtcacggggccgacatcctgaagcctgtaatgctcaggcagggagaaaaggaggcagtgggcacagccgtggactatggctacttcagattcttccaggaccggaggattgcccgctgccccttccacacgctgatgccagcagagcgcgagacgttcctggcgcggaagcggctcctggagtacatgggcttgcagctacggcaggctgtctttgccaaggagagccagtgggaccccacgtggctgtacctgtgcaagagagcggagctgatccccagccacaggatgaagaagaagggccccagcctgcccaggggcctggatgtgaaggagcaggggcaaattcccttcttcaagttctgctaccagtgtggccgctccatcggggtccgcctcttgccctgccctcgctgctacgggatcctgacctgcagcaagtactgcaagaccaaggcctggaccgagttccacaagaaggactgcggggacctggtggccatcgtgacacaactggagcaagtttccaggaggagagaagaattccagtgaagcagcagctgcacgtccgaggcttggggaggacccaggactgtgtgggtttcttacctgcctgagccacctcagggaatcttccagcctaatgcaggcatttctgcacctttggggtcatgctttgtagcagtgtctcccttgcgacctcgcaataaattggccccacggggtgattttgacagtc

SEQ ID NO: 280584 - DNA, 663 bp, Homo sapiens
cggcctccatggcggcgcacgtgggctccaggtgcgccagcaggtcctcagccgggtcgtcgaacacgggcacgcgcagctctgccacgccgggcgcgcgcgggccgggctgctggcgggagacgttgacgcacagcgtgactcccgcgcgcgccagctgctcctccgcgcccgcggctggcgcgctcccgaggaagagtgagggcgcgacgcgcaccaacggtggaggtacgggcgaggcggccccgcggcgcccagcttctgccggtcccatggcgcccgccgaagagtctgcttttgggccctgaggatctattttgggggctcaggcgcccgcccaggagtctatttgtgggagccgggcgggccgccgggcgcccccgggtcctagaggcctccgaggtggaccaggctggggcttgggtcccccgcgggcgctgggccgggacagggggcttgggtctcgttggggccggggcatggcgggaggtttgggcctcaccagggcgccggggccttggaccgctctgcgtcccatgttctctgtccccgggcgccgtcctccccgcccccgcggcctgtggcactgggcttgcgtctgtggctcttgggcgcagcgccctgcccgctctactgcggcgtctggcgcggaggcgtccgctt

SEQ ID NO: 280585 - DNA, 416 bp, Homo sapiens
cctccgtgaagcccctgctttcaggggttagttctggagtggcccagccctggggccttcccctctgtcaggggaagtgacatggtggccactgatgagactgtctgtgtatgttcaggttgtgaaggagctcctgacccagggagctgaccccaacctgcccctgaccaaaggcttgggcagtgccctgtgtgttgcctgtgacctgacctacgagcaccagaggaacatggacagcaagctggccctgattgaccgactcatcagtcacggggccgacatcctgaagcctgagccacctcagggaatcttccagcctaatgcaggcatttctgcacctttggggtcatgctttgtagcagtgtctcccttgcgacctcgcaataaattggccccacggggtgattttgacagtc

SEQ ID NO: 280586 - DNA, 3870 bp, Homo sapiens
  misc_feature (2594)..(2594): n is a, c, g, or t
cggcctccatggcggcgcacgtgggctccaggtgcgccagcaggtcctcagccgggtcgtcgaacacgggcacgcgcagctctgccacgccgggcgcgcgcgggccgggctgctggcgggagacgttgacgcacagcgtgactcccgcgcgcgccagctgctcctccgcgcccgcggctggcgcgctcccgaggaagagtgagggcgcgacgcgcaccaacggtggagggatgtttcagcagcccctgagaaggaagaggaggaagctgagggcccgctgagggcgcaggacctgagggagtcctacatccagctcgtccagggtgtgcaggagtggcaggatggttgcatgtaccagggggagtttgggttgaacatgaagcttggatatggcaaattctcttggcccacaggcgagtcataccatgggcagttttaccgggaccactgccatggcctgggtacctacatgtggccagatggctccagtttcacgggcacattttacctcagccaccgagaaggctacggcaccatgtacatgaagacacggcttttccaggggctatacaaagcggaccagcggtttgggccaggtgtcgagacctaccccgatggcagccaggacgtggggctgtggttccgagagcagctcatcaagctgtgcacccagatccccagtggcttctccctcctcagataccctgagttctccagcttcatcacccacagccctgccaggatcagcctctcagaagaggagaaaacggagtggggactgcaggagggacaggatccctttttctatgactataagcggtttcttctgaatgacaacctaacgctgcctccagaaatgtatgtctactcgaccaacagtgaccacctgcccatgacaagctctttccgcaaagagctggacgcccgcatcttcctcaatgaaattcctccgttcgttgaggatggagaaccatggttcataatcaatgagacccctttgttggtcaaaatccagaagcaaacttacaagttcaggaacaagccagctcacaccagctggaacatgggcgccatcctggaggggaagcgcagtggctttgcaccctgtgggcccaaagagcaactttccatggagatgatcctaaaggctgaggaagggaaccacgaatggatttgtaggatcctgaaggacaactttgctagtgctgacgtggcggacgcaaagggctacactgtgcttgctgcggctgctactcactgccacaacgacattgtcaaccttctcctggactgtggggccgacgtgaacaagtgctcagatgagggtctcacggcactcagcatgtgtttcctcctccactaccccgcccagtccttcaagcccaatgttgctgaacggaccatacctgagccccaggaacctccaaaattcccagttgttccaatcctttcatcatcatttatggacacaaacctggagtctctgtactatgaggtgaacgtgccttcccagggtagctatgagctgaggccaccgccagcaccactgctcctgccacgcgtctcaggcagccacgagggcggccacttccaggacaccgggcagtgtggggggtccatagaccacaggagcagctctctgaagggggactccccgttggtgaagggcagccttggccatgtggaaagcgggcttgaggacgtgttgggaaacacagaccggggcagtctgtgcagtgctgagacgaaatttgagtccaacgtgtgtgtgtgcgacttctccatcgagctctcgcaggccatgctggagagaagcgcccagtcccacagcttgctgaagatggcctcgccctcaccgtgcaccagcagcttcgacaaagggaccatgcggaggatggcgctgtccatgatcgagtaggtcctggcaccagctggtgggggtggagggccaccatcagggctgaatcctatgctcagcagacccacgtctcttccctgtgccagtgggaggcgttgtgtctggagatgtgtgtctgaatgtgtgagcatccctgtgtcggtggctccacgccatggccagccctgtgggggtgccacggtgacgggctgttttcagtgccaccccagccctgtgggggtgccacggtgacgggctgttttcagtaccacgccagccctgctttggcctttggcactggcctgaagtgtctctgtgggagcctcagcaggggccactgtcaggggtcctatcctagccatagtgcacgtgagtgacacctgcctgggcagctctcacacccctgctgtccaccctgtctataccagtgtgtctcaaaatgtggtctatgcacccccgggggtccaagaccctttcagggagtctgtggggtcaaaatgattctcttgataaccctgagactctgttagccttctccttgtgttgatgttggtggatggtatgaagacagggccgtgcagaccaccagcccccagcgtgcagggcagcagtgcccggcctgcttgggggcatggtattccttcaccacggtgtgcacttgcggggatgcctgtctcactgaagaatgcctttgacnaagcagaaaagcaatgacaaattgcattaaatcttgctccttgcgtacacacccctcgaatattctgggtcggaaaacatgggaaggacactgatgtgtgtctgccacagaccaaggcacaccgcttccccgcaagaagcgcttcccccagggccagagtagcaacagaatgcggcatcttcccaacctcctgccccatttttgattggaagaatgaccactggtatgtggctgttcattctcctgaacacagcctgccactttaaggaaaacatatgacactatttgttgctggcgaaatttacattttcaagtgaatagcagaattctggacacttgccaccaccaccaagaccttcatagcttcccttaactttgagacatgggtgttcagaggtttttcacgtgagatggcgttagcagcgcagttttgtgatactgcctgaagacatgccgacagtgcccagatctcttctattggtgagccagcttttcccacacggccaagttctgatgttgaaccattgccaggtgggtgaagatccattgacagtgagaggtgggcccgtgggcttcagtgcagccaggcgcagaaggctggttcatgagtgtccagctccgccaggtagctagctcaccacccccagcctgggttcatgtagttcaaataggaagaccacgatgatcagaaaggctgctcaaatactccttcgtccagccgcgtacctgggggaggctgaatctccactcacttccaccaaggctgtgcagagcagataggggaatccagcaaaggtggaaaacagtgccatccttctccccaactggttttgttttgtaaaataactttttgtgacagtgttacttattagtaacatgcagtgggtttgttatggttaacaagttggtgagcattattgagaggtgaagccagctgagcttctgggttgggtggggacttggagaacttttgtgtctagctaaaggattgtaaatgcaccaatcaatgctcagtgtctagctaaaggattgtaaatgcaccaatcagcactctgtaaaattgaccaatcagcgttctgtaaaatggaccaatcagtggtctgtaaaatggaccagtcagcaggatgtgggcggggccaaaaaagggaataaaagctggccaccgccaggctccccaccagcctgcagcgacaacctgcttagtttcctttctgtgctgtggaagctttgttctttcagtcttcacaataaatcttgctgctgctcaaaaaaaggt

SEQ ID NO: 280587 - DNA, 3316 bp, Homo sapiens
cggcctccatggcggcgcacgtgggctccaggtgcgccagcaggtcctcagccgggtcgtcgaacacgggcacgcgcagctctgccacgccgggcgcgcgcgggccgggctgctggcgggagacgttgacgcacagcgtgactcccgcgcgcgccagctgctcctccgcgcccgcggctggcgcgctcccgaggaagagtgagggcgcgacgcgcaccaacggtggagggatgtttcagcagcccctgagaaggaagaggaggaagctgagggcccgctgagggcgcaggacctgagggagtcctacatccagctcgtccagggtgtgcaggagtggcaggatggttgcatgtaccagggggagtttgggttgaacatgaagcttggatatggcaaattctcttggcccacaggcgagtcataccatgggcagttttaccgggaccactgccatggcctgggtacctacatgtggccagatggctccagtttcacgggcacattttacctcagccaccgagaaggctacggcaccatgtacatgaagacacggcttttccaggggctatacaaagcggaccagcggtttgggccaggtgtcgagacctaccccgatggcagccaggacgtggggctgtggttccgagagcagctcatcaagctgtgcacccagatccccagtggcttctccctcctcagataccctgagttctccagcttcatcacccacagccctgccaggatcagcctctcagaagaggagaaaacggagtggggactgcaggagggacaggatccctttttctatgactataagcggtttcttctgaatgacaacctaacgctgcctccagaaatgtatgtctactcgaccaacagtgaccacctgcccatgacaagctctttccgcaaagagctggacgcccgcatcttcctcaatgaaattcctccgttcgttgaggatggagaaccatggttcataatcaatgagacccctttgttggtcaaaatccagaagcaaacttacaagttcaggaacaagccagctcacaccagctggaacatgggcgccatcctggaggggaagcgcagtggctttgcaccctgtgggcccaaagagcaactttccatggagatgatcctaaaggctgaggaagggaaccacgaatggatttgtaggatcctgaaggacaactttgctagtgctgacgtggcggacgcaaagggctacactgtgcttgctgcggctgctactcactgccacaacgacattgtcaaccttctcctggactgtggggccgacgtgaacaagtgctcagatgagggtctcacggcactcagcatgtgtttcctcctccactaccccgcccagtccttcaagcccaatgttgctgaacggaccatacctgagccccaggaacctccaaaattcccagttgttccaatcctttcatcatcatttatggacacaaacctggagtctctgtactatgaggtgaacgtgccttcccagggtagctatgagctgaggccaccgccagcaccactgctcctgccacgcgtctcaggcagccacgagggcggccacttccaggacaccgggcagtgtggggggtccatagaccacaggagcagctctctgaagggggactccccgttggtgaagggcagccttggccatgtggaaagcgggcttgaggacgtgttgggaaacacagaccggggcagtctgtgcagtgctgagacgaaatttgagtccaacgtgtgtgtgtgcgacttctccatcgagctctcgcaggccatgctggagagaagcgcccagtcccacagcttgctgaagatggcctcgccctcaccgtgcaccagcagcttcgacaaagggaccatgcggaggatggcgctgtccatgatcgagcggaggaagcgctggcggaccatcaagctgctgctgcgccggggcgcggaccccaacctgtgctgcgtgcccatgcaggtcctgttccttgctgtgaaggccggggacgtggatggggtgaggctgctgctggagcacggggcgaggaccgacatctgctttccgccgcagctgagcaccctgacaccactccacatcgctgccgcccttcctggggaggagggggtacagattgtggagctgctgttgcatgccatcaccgatgtggacgccaaggcatccgacgaggacgacacttacaagcccggcaagctggacctgctgccctcaagtctgaagctcagcaatgagccaggccctccccaagcctactacagcacggacacagccctcccggaggaggggggcaggacggctctgcacatggcctgcgagcgggaggatgacaacaagtgtgccagggacatagtccggctccttctatcccacggagcaaatcctaacctgctgtggagtggccactccccgctctccctgtccattgccagtgggaatgagctggttgtgaaggagctcctgacccagggagctgaccccaacctgcccctgaccaaaggcttgggcagtgccctgtgtgttgcctgtgacctgacctacgagcaccagaggaacatggacagcaagctggccctgattgaccgactcatcagtcacggggccgacatcctgaagcctgtaatgctcaggcagggagaaaaggaggcagtgggcacagccgtggactatggctacttcagattcttccaggaccggaggattgcccgctgccccttccacacgctgatgccagcagagcgcgagacgttcctggcgcggaagcggctcctggagtacatgggcttgcagctacggcaggctgtctttgccaaggagagccagtgggaccccacgtggctgtacctgtgcaagagagcggagctgatccccagccacaggatgaagaagaagggccccagcctgcccaggggcctggatgtgaaggagcaggggcaaattcccttcttcaagttctgctaccagtgtggccgctccatcggggtccgcctcttgccctgccctcgctgctacgggatcctgacctgcagcaagtactgcaagaccaaggcctggaccgagttccacaagaaggactgcggggacctggtggccatcgtgacacaactggagcaagtttccaggaggagagaagaattccagtgaagcagcagctgcacgtccgaggcttggggaggacccaggactgtgtgggtttcttacctgcctgagccacctcagggaatcttccagcctaatgcaggcatttctgcactaacacggccgcggtgcagggccctttagtac

SEQ ID NO: 280588 - DNA, 3180 bp, Homo sapiens
  misc_feature (1904)..(1904): n is a, c, g, or t
cggcctccatggcggcgcacgtgggctccaggtgcgccagcaggtcctcagccgggtcgtcgaacacgggcacgcgcagctctgccacgccgggcgcgcgcgggccgggctgctggcgggagacgttgacgcacagcgtgactcccgcgcgcgccagctgctcctccgcgcccgcggctggcgcgctcccgaggaagagtgagggcgcgacgcgcaccaacggtggagggatgtttcagcagcccctgagaaggaagaggaggaagctgagggcccgctgagggcgcaggacctgagggagtcctacatccagctcgtccagggtgtgcaggagtggcaggatggttgcatgtaccagggggagtttgggttgaacatgaagcttggatatggcaaattctcttggcccacaggcgagtcataccatgggcagttttaccgggaccactgccatggcctgggtacctacatgtggccagatggctccagtttcacgggcacattttacctcagccaccgagaaggctacggcaccatgtacatgaagacacggcttttccagactcactgccacaacgacattgtcaaccttctcctggactgtggggccgacgtgaacaagtgctcagatgagggtctcacggcactcagcatgtgtttcctcctccactaccccgcccagtccttcaagcccaatgttgctgaacggaccatacctgagccccaggaacctccaaaattcccagttgttccaatcctttcatcatcatttatggacacaaacctggagtctctgtactatgaggtgaacgtgccttcccagggtagctatgagctgaggccaccgccagcaccactgctcctgccacgcgtctcaggcagccacgagggcggccacttccaggacaccgggcagtgtggggggtccatagaccacaggagcagctctctgaagggggactccccgttggtgaagggcagccttggccatgtggaaagcgggcttgaggacgtgttgggaaacacagaccggggcagtctgtgcagtgctgagacgaaatttgagtccaacgtgtgtgtgtgcgacttctccatcgagctctcgcaggccatgctggagagaagcgcccagtcccacagcttgctgaagatggcctcgccctcaccgtgcaccagcagcttcgacaaagggaccatgcggaggatggcgctgtccatgatcgagtaggtcctggcaccagctggtgggggtggagggccaccatcagggctgaatcctatgctcagcagacccacgtctcttccctgtgccagtgggaggcgttgtgtctggagatgtgtgtctgaatgtgtgagcatccctgtgtcggtggctccacgccatggccagccctgtgggggtgccacggtgacgggctgttttcagtgccaccccagccctgtgggggtgccacggtgacgggctgttttcagtaccacgccagccctgctttggcctttggcactggcctgaagtgtctctgtgggagcctcagcaggggccactgtcaggggtcctatcctagccatagtgcacgtgagtgacacctgcctgggcagctctcacacccctgctgtccaccctgtctataccagtgtgtctcaaaatgtggtctatgcacccccgggggtccaagaccctttcagggagtctgtggggtcaaaatgattctcttgataaccctgagactctgttagccttctccttgtgttgatgttggtggatggtatgaagacagggccgtgcagaccaccagcccccagcgtgcagggcagcagtgcccggcctgcttgggggcatggtattccttcaccacggtgtgcacttgcggggatgcctgtctcactgaagaatgcctttgacnaagcagaaaagcaatgacaaattgcattaaatcttgctccttgcgtacacacccctcgaatattctgggtcggaaaacatgggaaggacactgatgtgtgtctgccacagaccaaggcacaccgcttccccgcaagaagcgcttcccccagggccagagtagcaacagaatgcggcatcttcccaacctcctgccccatttttgattggaagaatgaccactggtatgtggctgttcattctcctgaacacagcctgccactttaaggaaaacatatgacactatttgttgctggcgaaatttacattttcaagtgaatagcagaattctggacacttgccaccaccaccaagaccttcatagcttcccttaactttgagacatgggtgttcagaggtttttcacgtgagatggcgttagcagcgcagttttgtgatactgcctgaagacatgccgacagtgcccagatctcttctattggtgagccagcttttcccacacggccaagttctgatgttgaaccattgccaggtgggtgaagatccattgacagtgagaggtgggcccgtgggcttcagtgcagccaggcgcagaaggctggttcatgagtgtccagctccgccaggtagctagctcaccacccccagcctgggttcatgtagttcaaataggaagaccacgatgatcagaaaggctgctcaaatactccttcgtccagccgcgtacctgggggaggctgaatctccactcacttccaccaaggctgtgcagagcagataggggaatccagcaaaggtggaaaacagtgccatccttctccccaactggttttgttttgtaaaataactttttgtgacagtgttacttattagtaacatgcagtgggtttgttatggttaacaagttggtgagcattattgagaggtgaagccagctgagcttctgggttgggtggggacttggagaacttttgtgtctagctaaaggattgtaaatgcaccaatcaatgctcagtgtctagctaaaggattgtaaatgcaccaatcagcactctgtaaaattgaccaatcagcgttctgtaaaatggaccaatcagtggtctgtaaaatggaccagtcagcaggatgtgggcggggccaaaaaagggaataaaagctggccaccgccaggctccccaccagcctgcagcgacaacctgcttagtttcctttctgtgctgtggaagctttgttctttcagtcttcacaataaatcttgctgctgctcaaaaaaaggt

SEQ ID NO: 280589 - DNA, 531 bp, Homo sapiens
gagaagacagagagggagcctggctatcaggctgactgcctggtaacccctctgggtgcttcagttgccgactctaatagtcgcatgccaggcatccctgagttctgccacagccctgggtggtccccattcattgccaaccaggcatggtggctcagcctcaagggcatcccgtcaggttctggaagagcagcaatttctcaccaacttctccatctcacagtcataccatgggcagttttaccgggaccactgccatggcctgggtacctacatgtggccagatggctccagtttcacgggcacattttacctcagccaccgagaaggctacggcaccatgtacatgaagacacggcttttccaggtgagggggctgccatgtgttcagctggggtcgaagtggctgtgtgtgtctaagccactggacaaaaagatatttcggtcctggggaagtttatttgtttagctacaagtagcttttttacttttaatgattaaaatggtaccaataataaggatatagactga

SEQ ID NO: 280590 - DNA, 3675 bp, Homo sapiens
  misc_feature (2399)..(2399): n is a, c, g, or t
gagaagacagagagggagcctggctatcaggctgactgcctggtaacccctctgggtgcttcagttgccgactctaatagtcgcatgccaggcatccctgagttctgccacagccctgggtggtccccattcattgccaaccaggcatggtggctcagcctcaagggcatcccgtcaggttctggaagagcagcaatttctcaccaacttctccatctcacagtcataccatgggcagttttaccgggaccactgccatggcctgggtacctacatgtggccagatggctccagtttcacgggcacattttacctcagccaccgagaaggctacggcaccatgtacatgaagacacggcttttccaggggctatacaaagcggaccagcggtttgggccaggtgtcgagacctaccccgatggcagccaggacgtggggctgtggttccgagagcagctcatcaagctgtgcacccagatccccagtggcttctccctcctcagataccctgagttctccagcttcatcacccacagccctgccaggatcagcctctcagaagaggagaaaacggagtggggactgcaggagggacaggatccctttttctatgactataagcggtttcttctgaatgacaacctaacgctgcctccagaaatgtatgtctactcgaccaacagtgaccacctgcccatgacaagctctttccgcaaagagctggacgcccgcatcttcctcaatgaaattcctccgttcgttgaggatggagaaccatggttcataatcaatgagacccctttgttggtcaaaatccagaagcaaacttacaagttcaggaacaagccagctcacaccagctggaacatgggcgccatcctggaggggaagcgcagtggctttgcaccctgtgggcccaaagagcaactttccatggagatgatcctaaaggctgaggaagggaaccacgaatggatttgtaggatcctgaaggacaactttgctagtgctgacgtggcggacgcaaagggctacactgtgcttgctgcggctgctactcactgccacaacgacattgtcaaccttctcctggactgtggggccgacgtgaacaagtgctcagatgagggtctcacggcactcagcatgtgtttcctcctccactaccccgcccagtccttcaagcccaatgttgctgaacggaccatacctgagccccaggaacctccaaaattcccagttgttccaatcctttcatcatcatttatggacacaaacctggagtctctgtactatgaggtgaacgtgccttcccagggtagctatgagctgaggccaccgccagcaccactgctcctgccacgcgtctcaggcagccacgagggcggccacttccaggacaccgggcagtgtggggggtccatagaccacaggagcagctctctgaagggggactccccgttggtgaagggcagccttggccatgtggaaagcgggcttgaggacgtgttgggaaacacagaccggggcagtctgtgcagtgctgagacgaaatttgagtccaacgtgtgtgtgtgcgacttctccatcgagctctcgcaggccatgctggagagaagcgcccagtcccacagcttgctgaagatggcctcgccctcaccgtgcaccagcagcttcgacaaagggaccatgcggaggatggcgctgtccatgatcgagtaggtcctggcaccagctggtgggggtggagggccaccatcagggctgaatcctatgctcagcagacccacgtctcttccctgtgccagtgggaggcgttgtgtctggagatgtgtgtctgaatgtgtgagcatccctgtgtcggtggctccacgccatggccagccctgtgggggtgccacggtgacgggctgttttcagtgccaccccagccctgtgggggtgccacggtgacgggctgttttcagtaccacgccagccctgctttggcctttggcactggcctgaagtgtctctgtgggagcctcagcaggggccactgtcaggggtcctatcctagccatagtgcacgtgagtgacacctgcctgggcagctctcacacccctgctgtccaccctgtctataccagtgtgtctcaaaatgtggtctatgcacccccgggggtccaagaccctttcagggagtctgtggggtcaaaatgattctcttgataaccctgagactctgttagccttctccttgtgttgatgttggtggatggtatgaagacagggccgtgcagaccaccagcccccagcgtgcagggcagcagtgcccggcctgcttgggggcatggtattccttcaccacggtgtgcacttgcggggatgcctgtctcactgaagaatgcctttgacnaagcagaaaagcaatgacaaattgcattaaatcttgctccttgcgtacacacccctcgaatattctgggtcggaaaacatgggaaggacactgatgtgtgtctgccacagaccaaggcacaccgcttccccgcaagaagcgcttcccccagggccagagtagcaacagaatgcggcatcttcccaacctcctgccccatttttgattggaagaatgaccactggtatgtggctgttcattctcctgaacacagcctgccactttaaggaaaacatatgacactatttgttgctggcgaaatttacattttcaagtgaatagcagaattctggacacttgccaccaccaccaagaccttcatagcttcccttaactttgagacatgggtgttcagaggtttttcacgtgagatggcgttagcagcgcagttttgtgatactgcctgaagacatgccgacagtgcccagatctcttctattggtgagccagcttttcccacacggccaagttctgatgttgaaccattgccaggtgggtgaagatccattgacagtgagaggtgggcccgtgggcttcagtgcagccaggcgcagaaggctggttcatgagtgtccagctccgccaggtagctagctcaccacccccagcctgggttcatgtagttcaaataggaagaccacgatgatcagaaaggctgctcaaatactccttcgtccagccgcgtacctgggggaggctgaatctccactcacttccaccaaggctgtgcagagcagataggggaatccagcaaaggtggaaaacagtgccatccttctccccaactggttttgttttgtaaaataactttttgtgacagtgttacttattagtaacatgcagtgggtttgttatggttaacaagttggtgagcattattgagaggtgaagccagctgagcttctgggttgggtggggacttggagaacttttgtgtctagctaaaggattgtaaatgcaccaatcaatgctcagtgtctagctaaaggattgtaaatgcaccaatcagcactctgtaaaattgaccaatcagcgttctgtaaaatggaccaatcagtggtctgtaaaatggaccagtcagcaggatgtgggcggggccaaaaaagggaataaaagctggccaccgccaggctccccaccagcctgcagcgacaacctgcttagtttcctttctgtgctgtggaagctttgttctttcagtcttcacaataaatcttgctgctgctcaaaaaaaggt

SEQ ID NO: 280591 - DNA, 1052 bp, Homo sapiens
tgttctaatagggcagccttgaacataccaggaagcaataggaaaaaactggagaaagtgaaaaggctgcgatgaaggaaaagaggagacaaacaagggtgacattggctgggcagcaaagatgaccaaaaggccaagaagcctgtgctgttccagtattgatccggtgctcctccgtcaccatccgaccacagaacctcaggctgatagttgttcactaactcatagagctctggcaatgtcttagaaactggaaattgccgcttatggaatgaactggattcatcctcaaggaagagcggatgaaaccattcaaaaagggaatagtacagtccaaaacgcagcttgggaaagttcctagacatcaggaaatcagcatgttctcaagcaaatacacttgatagacattcatctcagcaggataaatatctacaggagaaaatcatgaagctaccagaatgtggccaaagggaaaaatatcctatgatcattccagattttttgtgttggttctcctctcctattcccatcccatccctggagaaaacaataaggcaaagtttcccgttttttttttttttttttttggagacaggatctccctccgccacctagactggagtgtagtaagcctatctccgctcactgcagcctcaagcagtcctccaacctaagcctcccaagtagctgggactacagagacataccactacgctaattttttagtttttgtttgtttgtgtgtttttgtagagacagggtctcactatgttgcccaggctggtcttgaacccctgggctcaaatgatcctccttcctcggcctcccaaaattttgggattacagacatgagcgaccacatccagtgcaaatttttttataccaaggcaaagatgatcatgcaaaagaaactaatgaatgaacaagccgttggaacaaaaacaatttgttaatgcttccctggccttacaaatactggagtggtaatgggtggaatccattctattaaaatagaatggattttaaatgtgtgggggtttagatattcttct

SEQ ID NO: 280592 - DNA, 376 bp, Homo sapiens
tgttctaatagggcagccttgaacataccaggaagcaataggaaaaaactggagaaagtgaaaaggctgcgatgaaggaaaagaggagacaaacaagggtgacattggctgggcagcaaagatgaccaaaaggtaagaggataaaaagaagcagtctgcgggattcagaagcaaatagtcagaaatagtgatgaagaaacagagttgtcccagaatagaggccataaaggaccagggtaggagagaaaaaggggggacccacaaaattaacaccttcaaagttcttgatcctgtgatttttagtctgatctcaaaatcagaccattgagttggattttactcctgatttatttacccttgattatgttgagtaaat

SEQ ID NO: 280593 - DNA, 454 bp, Homo sapiens
tctgtgcagtccacagcctggtttgactgcacctcatgaggcgcaggccacagccttccccctccttggcagaggagagatgaggctgctgcagggatctcctgagctggccatctgcaggtcccttgctctgctgcccacctccctgccctgtctggcctcagtgagtcctcttggcgatgtctccctccaggttccaagccctgcgtctgacgatgctgcagcgcctggagcagctggtggaggccaagtaactggccaacacctgcctcttccaaagtccccagcagtggcaggtgtacactgagccctggttgctggccccggccggtcacattgactgatggccaccgcctgacgaatcgagtgcctgtgtgtctacctctctgaagcctgagcacctggcagcatagatccttaggtgctcaataaaggtgtgctgtattgaactgaa

SEQ ID NO: 280594 - DNA, 2488 bp, Homo sapiens
agcgggaggcctggggtcagcaggcgctgcgggcgcagctccggtgcaagcgaggacacgacacatgcagtggcttctggactgcgcgatgactggacgcaagtaacttctaggtctgcagacaagaggaagagaagatgaaggaagactgtctgccgagttctcacgtgcccatcagtgacagcaagtccattcagaagtcggagctcttaggcctgctgaaaacctacaactgctaccatgagggcaagagcttccagctgagacaccgtgaggaagaagggactctgatcatcgaggggctcctcaacattgcctgggggctgaggcggcccatccggctgcagatgcaggatgaccgggagcaggtgcacctcccctccacctcatggatgcccagacggcctagctgccctctaaaggagccatcgccccagaacgggaacatcacagcccaggggccaagcattcagccagtgcacaaggctgagagttccacagacagctcggggcccctggaggaggcagaggaggccccccagctgatgcggaccaagagcgacgccagttgcatgagccagaggaggcccaagtgccgcgcccccggtgaggcccagcgcatccggcgacaccggttctctatcaacggccacttctacaatcataagacctccgtgtttactccagcctatggatccgtgaccaatgtgagggtcaacagcaccatgacaaccctgcaggtgctcaccctgctgctgaacaaatttagggtggaagatggccccagtgagttcgcactctacatcgttcacgagtctggggagcggacaaaattaaaagactgcgagtacccgctgatttccagaatcctgcatgggccatgtgagaagatcgccaggatcttcctgatggaagctgacttgggcgtggaagtcccccatgaagtcgctcagtacattaagtttgaaatgccggtgctggacagttttgttgaaaaattaaaagaagaggaagaaagagaaataatcaaactgaccatgaagttccaagccctgcgtctgacgatgctgcagcgcctggagcagctggtggaggccaagtaactggccaacacctgcctcttccaaagtccccagcagtggcaggtgtacactgagccctggttgctggccccggccggtcacattgactgatggccaccgcctgacgaatcgagtgcctgtgtgtctacctctctgaagcctgagcaccatgattcccacagccagctcttggctccaagatgagcacccacaggaagccgacccaggcctgaggggccaggaacttgctgggtcagatctgtgtggccagccctgtccacaccatgcctctcctgcactggagagcagtgctggcccagcccctgcggcttaggcttcatctgcttgcacattgcctgtcccagagcccctgtgggtccacaagcccctgtcctcttccttcatatgagattcttgtctgccctcatatcacgctgccccacaggaatgctgctgggaaaagcagggcctgccagcaggtatgagatctagcctgctttcagccatcaccttgccacagtgtccccggcttctaagcctccaatatcaccctgtgagcctcgcacagctcagccccaacacagaggtgagaccaggaataaggccacaagtatctcactttctctgcagaaatcaatctttacttcatcagagagacctaaagcgattcttacaaggagcttgctgcaagaaacacggtcattcaatcacattgaggagggtccacatggcattgagagggtgctgcccgctcaatgcccagcagcagctctggaaggcagtgctcagccccatcaccactgtcccgtggatgcctgtgtacctcttgccttttctgggcttgcgtttctctcctctagtgggtggggatgactttcaatgactttcaatacttcccctgaaggaagaatgataaggagaaatgtctgttttgaggaaagggctttgaattccccagatactgaacaatttgtgtttgtgactgatggagaatttcaggaatgaatgagaaagcctttgcgaaactatgcaacagtttacatcagtcatgtgaagtatttgtctaaaacagagcaaactgaagaccaaattattctcctgttgaggtccgtggatggcagatttaaagggaagaaccacaaaggcttgcaaagataggagaggctccatctctaatgcatgtagaagctccttacgggtgcccatcaagagcatagcttggaagccaccatgctgtgcggaactgcgtcagggcaaatgtcacagcaggatttccccaacccagctccatcatcacagacacagagagctgcaggggaggcctgcccactgttttgtcgactctgccctcctctggcagcatagatccttaggtgctcaataaaggtgtgctgtattgaactgaa

SEQ ID NO: 280595 - DNA, 4000 bp, Homo sapiens
agcgggaggcctggggtcagcaggcgctgcgggcgcagctccggtgcaagcgaggacacgacacatgcagtggcttctggactgcgcgatgactggacgcaagtaacttctaggtctgcagacaagaggaagagaagatgaaggaagactgtctgccgagttctcacgtgcccatcagtgacagcaagtccattcagaagtcgaagctcttaggtgtgcaggttgggcgggggagtcttcacatttgccatccccctcatcctgggcagcctttaggtggaggggttctgagcacttgttcagagatctgatggggtgccctgggggacagtgatggggtgcttctttttgagcctgtccaataggggatccccaagctacacatgaccatggctgggaggcatgggcaatagaaaagaggctccagatggcaggcactttatacgaaataggtgtgtacagggcctcattataacttttacattgattgcatgttgacaaatagtaatttagatatattgagttcaataaaatgtgttattaatgctaatttcacctgtttcattttcccctctgtattaggccattcttgtgttgctataaagaaatacctgaagctgggtaatttacaaagaaaagagatttagttggctcacggttctggaggctttacaagaagtgtggtgctggcatctgctcggcttccagggaggcctcaaggagcctccagtcatgttggaaggcgaacggggagcaggcacttcacatggcgaaagcaggagcaagagagagggagtggagggtggtgccacacacttttaaatgaccagacctcgtgtgaactcagagcaaaagctcacttatcaccacggggatggcccaagccactcatgagggatctgctcccatgatccaaacacctcccacctggccccacctccaacactgggaattacaattccacatgagatttgggtggggacacacatccaaaccatatcacctcctaacatgtactagaagattgaaattaccagtgtggctcacatcccacgtctgctggccccacagccccacagagcccagcttgggttcaggcagctgtccaggcctccccttcctccaacattagccagggctgtggctttcccttcgggaagggagacagcgttgagggaaagtggcttactgcagacttcagggccttactcacagggccatcaccttccactgcgcctttggaaagtcagggtggggaagaagcaggcacccctcagggtggcccgcagcagccacagcaggccttgtaggaagtgatatggggaaaagcaagaggctgtacaatgccaaaagcaagtccagggcatttactgtgaggaagcaacgcaggtggagggcagggaggctgccagggccttacctgtgatagtgaaagtgtcggcaccctggacatcctggaccagacgcaggcctgtcccgtgagtctcgcctcctcctcagcccgacccccatgccccccaccagggccatgtgcagaaccatccgggtgcattgcgatggcagtctggtctcctctggttatgcctggccggcgagaagggtgctgtcacactcctgttacaaatgaggaaacagaggccagggaagccaaaggccagaagctgaggccctgccacaccctaggagtacatgtgcgtctttccctttttaggtcggagctcttaggcctgctgaaaacctacaactgctaccatgagggcaagagcttccagctgagacaccgtgaggaagaagggactctgatcatcgaggggctcctcaacattgcctgggggctgaggcggcccatccggctgcagatgcaggatgaccgggagcaggtgcacctcccctccacctcatggatgcccagacggcctagctgccctctaaaggagccatcgccccagaacgggaacatcacagcccaggggccaagcattcagccagtgcacaaggctgagagttccacagacagctcggggcccctggaggaggcagaggaggccccccagctgatgcggaccaagagcgacgccagttgcatgagccagaggaggcccaagtgccgcgcccccggtgaggcccagcgcatccggcgacaccggttctctatcaacggccacttctacaatcataagacctccgtgtttactccagcctatggatccgtgaccaatgtgagggtcaacagcaccatgacaaccctgcaggtgctcaccctgctgctgaacaaatttagggtggaagatggccccagtgagttcgcactctacatcgttcacgagtctggggagcggacaaaattaaaagactgcgagtacccgctgatttccagaatcctgcatgggccatgtgagaagatcgccaggatcttcctgatggaagctgacttgggcgtggaagtcccccatgaagtcgctcagtacattaagtttgaaatgccggtgctggacagttttgttgaaaaattaaaagaagaggaagaaagagaaataatcaaactgaccatgaagttccaagccctgcgtctgacgatgctgcagcgcctggagcagctggtggaggccaagtaactggccaacacctgcctcttccaaagtccccagcagtggcaggtgtacactgagccctggttgctggccccggccggtcacattgactgatggccaccgcctgacgaatcgagtgcctgtgtgtctacctctctgaagcctgagcaccatgattcccacagccagctcttggctccaagatgagcacccacaggaagccgacccaggcctgaggggccaggaacttgctgggtcagatctgtgtggccagccctgtccacaccatgcctctcctgcactggagagcagtgctggcccagcccctgcggcttaggcttcatctgcttgcacattgcctgtcccagagcccctgtgggtccacaagcccctgtcctcttccttcatatgagattcttgtctgccctcatatcacgctgccccacaggaatgctgctgggaaaagcagggcctgccagcaggtatgagatctagcctgctttcagccatcaccttgccacagtgtccccggcttctaagcctccaatatcaccctgtgagcctcgcacagctcagccccaacacagaggtgagaccaggaataaggccacaagtatctcactttctctgcagaaatcaatctttacttcatcagagagacctaaagcgattcttacaaggagcttgctgcaagaaacacggtcattcaatcacattgaggagggtccacatggcattgagagggtgctgcccgctcaatgcccagcagcagctctggaaggcagtgctcagccccatcaccactgtcccgtggatgcctgtgtacctcttgccttttctgggcttgcgtttctctcctctagtgggtggggatgactttcaatgactttcaatacttcccctgaaggaagaatgataaggagaaatgtctgttttgaggaaagggctttgaattccccagatactgaacaatttgtgtttgtgactgatggagaatttcaggaatgaatgagaaagcctttgcgaaactatgcaacagtttacatcagtcatgtgaagtatttgtctaaaacagagcaaactgaagaccaaattattctcctgttgaggtccgtggatggcagatttaaagggaagaaccacaaaggcttgcaaagataggagaggctccatctctaatgcatgtagaagctccttacgggtgcccatcaagagcatagcttggaagccaccatgctgtgcggaactgcgtcagggcaaatgtcacagcaggatttccccaacccagctccatcatcacagacacagagagctgcaggggaggcctgcccactgttttgtcgactctgccctcctctggcagcatagatccttaggtgctcaataaaggtgtgctgtattgaactgaa

SEQ ID NO: 280596 - DNA, 2515 bp, Homo sapiens
agcgggaggcctggggtcagcaggcgctgcgggcgcagctccggtgcaagcgaggacacgacacatgcagtggcttctggactgcgcgatgactggacgcaagtaacttctaggtctgcagacaagaggaagagaagatgaaggaagactgtctgccgagttctcacgtgcccatcagtgacagcaagtccattcagaagtcgaagctcttaggtgtgcaggaagaagggactctgatcatcgaggggctcctcaacattgcctgggggctgaggcggcccatccggctgcagatgcaggatgaccgggagcaggtgcacctcccctccacctcatggatgcccagacggcctagctgccctctgggctgctggtctcttctccttggcctgagctccctttctctgccggcagccatctcagccctgcagttgtctgttttcagaaaggagccatcgccccagaacgggaacatcacagcccaggggccaagcattcagccagtgcacaaggctgagagttccacagacagctcggggcccctggaggaggcagaggaggccccccagctgatgcggaccaagagcgacgccagttgcatgagccagaggaggcccaagtgccgcgcccccggtgaggcccagcgcatccggcgacaccggttctctatcaacggccacttctacaatcataagacctccgtgtttactccagcctatggatccgtgaccaatgtgagggtcaacagcaccatgacaaccctgcaggtgctcaccctgctgctgaacaaatttagggtggaagatggccccagtgagttcgcactctacatcgttcacgagtctggggagcggacaaaattaaaagactgcgagtacccgctgatttccagaatcctgcatgggccatgtgagaagatcgccaggatcttcctgatggaagctgacttgggcgtggaagtcccccatgaagtcgctcagtacattaagtttgaaatgccggtgctggacagttttgttgaaaaattaaaagaagaggaagaaagagaaataatcaaactgaccatgaagttccaagccctgcgtctgacgatgctgcagcgcctggagcagctggtggaggccaagtaactggccaacacctgcctcttccaaagtccccagcagtggcaggtgtacactgagccctggttgctggccccggccggtcacattgactgatggccaccgcctgacgaatcgagtgcctgtgtgtctacctctctgaagcctgagcaccatgattcccacagccagctcttggctccaagatgagcacccacaggaagccgacccaggcctgaggggccaggaacttgctgggtcagatctgtgtggccagccctgtccacaccatgcctctcctgcactggagagcagtgctggcccagcccctgcggcttaggcttcatctgcttgcacattgcctgtcccagagcccctgtgggtccacaagcccctgtcctcttccttcatatgagattcttgtctgccctcatatcacgctgccccacaggaatgctgctgggaaaagcagggcctgccagcaggtatgagatctagcctgctttcagccatcaccttgccacagtgtccccggcttctaagcctccaatatcaccctgtgagcctcgcacagctcagccccaacacagaggtgagaccaggaataaggccacaagtatctcactttctctgcagaaatcaatctttacttcatcagagagacctaaagcgattcttacaaggagcttgctgcaagaaacacggtcattcaatcacattgaggagggtccacatggcattgagagggtgctgcccgctcaatgcccagcagcagctctggaaggcagtgctcagccccatcaccactgtcccgtggatgcctgtgtacctcttgccttttctgggcttgcgtttctctcctctagtgggtggggatgactttcaatgactttcaatacttcccctgaaggaagaatgataaggagaaatgtctgttttgaggaaagggctttgaattccccagatactgaacaatttgtgtttgtgactgatggagaatttcaggaatgaatgagaaagcctttgcgaaactatgcaacagtttacatcagtcatgtgaagtatttgtctaaaacagagcaaactgaagaccaaattattctcctgttgaggtccgtggatggcagatttaaagggaagaaccacaaaggcttgcaaagataggagaggctccatctctaatgcatgtagaagctccttacgggtgcccatcaagagcatagcttggaagccaccatgctgtgcggaactgcgtcagggcaaatgtcacagcaggatttccccaacccagctccatcatcacagacacagagagctgcaggggaggcctgcccactgttttgtcgactctgccctcctctggcagcatagatccttaggtgctcaataaaggtgtgctgtattgaactgaa

SEQ ID NO: 280597 - DNA, 3908 bp, Homo sapiens
agcgggaggcctggggtcagcaggcgctgcgggcgcagctccggtgcaagcgaggacacgacacatgcagtggcttctggactgcgcgatgactggacgcaagtaacttctaggtctgcagacaagaggaagagaagatgaaggaagactgtctgccgagttctcacgtgcccatcagtgacagcaagtccattcagaagtcgaagctcttaggtgtgcaggttgggcgggggagtcttcacatttgccatccccctcatcctgggcagcctttaggtggaggggttctgagcacttgttcagagatctgatggggtgccctgggggacagtgatggggtgcttctttttgagcctgtccaataggggatccccaagctacacatgaccatggctgggaggcatgggcaatagaaaagaggctccagatggcaggcactttatacgaaataggtgtgtacagggcctcattataacttttacattgattgcatgttgacaaatagtaatttagatatattgagttcaataaaatgtgttattaatgctaatttcacctgtttcattttcccctctgtattaggccattcttgtgttgctataaagaaatacctgaagctgggtaatttacaaagaaaagagatttagttggctcacggttctggaggctttacaagaagtgtggtgctggcatctgctcggcttccagggaggcctcaaggagcctccagtcatgttggaaggcgaacggggagcaggcacttcacatggcgaaagcaggagcaagagagagggagtggagggtggtgccacacacttttaaatgaccagacctcgtgtgaactcagagcaaaagctcacttatcaccacggggatggcccaagccactcatgagggatctgctcccatgatccaaacacctcccacctggccccacctccaacactgggaattacaattccacatgagatttgggtggggacacacatccaaaccatatcacctcctaacatgtactagaagattgaaattaccagtgtggctcacatcccacgtctgctggccccacagccccacagagcccagcttgggttcaggcagctgtccaggcctccccttcctccaacattagccagggctgtggctttcccttcgggaagggagacagcgttgagggaaagtggcttactgcagacttcagggccttactcacagggccatcaccttccactgcgcctttggaaagtcagggtggggaagaagcaggcacccctcagggtggcccgcagcagccacagcaggccttgtaggaagtgatatggggaaaagcaagaggctgtacaatgccaaaagcaagtccagggcatttactgtgaggaagcaacgcaggtggagggcagggaggctgccagggccttacctgtgatagtgaaagtgtcggcaccctggacatcctggaccagacgcaggcctgtcccgtgagtctcgcctcctcctcagcccgacccccatgccccccaccagggccatgtgcagaaccatccgggtgcattgcgatggcagtctggtctcctctggttatgcctggccggcgagaagggtgctgtcacactcctgttacaaatgaggaaacagaggccagggaagccaaaggccagaagctgaggccctgccacaccctaggagtacatgtgcgtctttccctttttaggtcggagctcttaggcctgctgaaaacctacaactgctaccatgagggcaagagcttccagctgagacaccgtgaggaagaagggactctgatcatcgaggggctcctcaacattgcctgggggctgaggcggcccatccggctgcagatgcaggatgaccgggagcaggtgcacctcccctccacctcatggatgcccagacggcctagctgccctctggcccctggaggaggcagaggaggccccccagctgatgcggaccaagagcgacgccagttgcatgagccagaggaggcccaagtgccgcgcccccggtgaggcccagcgcatccggcgacaccggttctctatcaacggccacttctacaatcataagacctccgtgtttactccagcctatggatccgtgaccaatgtgagggtcaacagcaccatgacaaccctgcaggtgctcaccctgctgctgaacaaatttagggtggaagatggccccagtgagttcgcactctacatcgttcacgagtctggggagcggacaaaattaaaagactgcgagtacccgctgatttccagaatcctgcatgggccatgtgagaagatcgccaggatcttcctgatggaagctgacttgggcgtggaagtcccccatgaagtcgctcagtacattaagtttgaaatgccggtgctggacagttttgttgaaaaattaaaagaagaggaagaaagagaaataatcaaactgaccatgaagttccaagccctgcgtctgacgatgctgcagcgcctggagcagctggtggaggccaagtaactggccaacacctgcctcttccaaagtccccagcagtggcaggtgtacactgagccctggttgctggccccggccggtcacattgactgatggccaccgcctgacgaatcgagtgcctgtgtgtctacctctctgaagcctgagcaccatgattcccacagccagctcttggctccaagatgagcacccacaggaagccgacccaggcctgaggggccaggaacttgctgggtcagatctgtgtggccagccctgtccacaccatgcctctcctgcactggagagcagtgctggcccagcccctgcggcttaggcttcatctgcttgcacattgcctgtcccagagcccctgtgggtccacaagcccctgtcctcttccttcatatgagattcttgtctgccctcatatcacgctgccccacaggaatgctgctgggaaaagcagggcctgccagcaggtatgagatctagcctgctttcagccatcaccttgccacagtgtccccggcttctaagcctccaatatcaccctgtgagcctcgcacagctcagccccaacacagaggtgagaccaggaataaggccacaagtatctcactttctctgcagaaatcaatctttacttcatcagagagacctaaagcgattcttacaaggagcttgctgcaagaaacacggtcattcaatcacattgaggagggtccacatggcattgagagggtgctgcccgctcaatgcccagcagcagctctggaaggcagtgctcagccccatcaccactgtcccgtggatgcctgtgtacctcttgccttttctgggcttgcgtttctctcctctagtgggtggggatgactttcaatgactttcaatacttcccctgaaggaagaatgataaggagaaatgtctgttttgaggaaagggctttgaattccccagatactgaacaatttgtgtttgtgactgatggagaatttcaggaatgaatgagaaagcctttgcgaaactatgcaacagtttacatcagtcatgtgaagtatttgtctaaaacagagcaaactgaagaccaaattattctcctgttgaggtccgtggatggcagatttaaagggaagaaccacaaaggcttgcaaagataggagaggctccatctctaatgcatgtagaagctccttacgggtgcccatcaagagcatagcttggaagccaccatgctgtgcggaactgcgtcagggcaaatgtcacagcaggatttccccaacccagctccatcatcacagacacagagagctgcaggggaggcctgcccactgttttgtcgactctgccctcctctggcagcatagatccttaggtgctcaataaaggtgtgctgtattgaactgaa

SEQ ID NO: 280598 - DNA, 4053 bp, Homo sapiens
agcgggaggcctggggtcagcaggcgctgcgggcgcagctccggtgcaagcgaggacacgacacatgcagtggcttctggactgcgcgatgactggacgcaagtaacttctaggtctgcagacaagaggaagagaagatgaaggaagactgtctgccgagttctcacgtgcccatcagtgacagcaagtccattcagaagtcgaagctcttaggtgtgcaggttgggcgggggagtcttcacatttgccatccccctcatcctgggcagcctttaggtggaggggttctgagcacttgttcagagatctgatggggtgccctgggggacagtgatggggtgcttctttttgagcctgtccaataggggatccccaagctacacatgaccatggctgggaggcatgggcaatagaaaagaggctccagatggcaggcactttatacgaaataggtgtgtacagggcctcattataacttttacattgattgcatgttgacaaatagtaatttagatatattgagttcaataaaatgtgttattaatgctaatttcacctgtttcattttcccctctgtattaggccattcttgtgttgctataaagaaatacctgaagctgggtaatttacaaagaaaagagatttagttggctcacggttctggaggctttacaagaagtgtggtgctggcatctgctcggcttccagggaggcctcaaggagcctccagtcatgttggaaggcgaacggggagcaggcacttcacatggcgaaagcaggagcaagagagagggagtggagggtggtgccacacacttttaaatgaccagacctcgtgtgaactcagagcaaaagctcacttatcaccacggggatggcccaagccactcatgagggatctgctcccatgatccaaacacctcccacctggccccacctccaacactgggaattacaattccacatgagatttgggtggggacacacatccaaaccatatcacctcctaacatgtactagaagattgaaattaccagtgtggctcacatcccacgtctgctggccccacagccccacagagcccagcttgggttcaggcagctgtccaggcctccccttcctccaacattagccagggctgtggctttcccttcgggaagggagacagcgttgagggaaagtggcttactgcagacttcagggccttactcacagggccatcaccttccactgcgcctttggaaagtcagggtggggaagaagcaggcacccctcagggtggcccgcagcagccacagcaggccttgtaggaagtgatatggggaaaagcaagaggctgtacaatgccaaaagcaagtccagggcatttactgtgaggaagcaacgcaggtggagggcagggaggctgccagggccttacctgtgatagtgaaagtgtcggcaccctggacatcctggaccagacgcaggcctgtcccgtgagtctcgcctcctcctcagcccgacccccatgccccccaccagggccatgtgcagaaccatccgggtgcattgcgatggcagtctggtctcctctggttatgcctggccggcgagaagggtgctgtcacactcctgttacaaatgaggaaacagaggccagggaagccaaaggccagaagctgaggccctgccacaccctaggagtacatgtgcgtctttccctttttaggtcggagctcttaggcctgctgaaaacctacaactgctaccatgagggcaagagcttccagctgagacaccgtgaggaagaagggactctgatcatcgaggggctcctcaacattgcctgggggctgaggcggcccatccggctgcagatgcaggatgaccgggagcaggtgcacctcccctccacctcatggatgcccagacggcctagctgccctctaaaggagccatcgccccagaacgggaacatcacagcccaggggccaagcattcagccagtgcacaaggctgagagttccacagacagctcggggcccctggaggaggcagaggaggccccccagctgatgcggaccaagagcgacgccagttgcatgagccagaggaggcccaagtgccgcgcccccggtgaggcccagcgcatccggcgacaccggttctctatcaacggccacttctacaatcataagacctccgtgtttactccagcctatggatccgtgaccaatgtgagggtcaacagcaccatgacaaccctgcaggtgctcaccctgctgctgaacaaatttaggttctctcccatctccaagcaccgtgatctgacttcctgtgactgcctgtgcaggtggaagatggccccagtgagttcgcactctacatcgttcacgagtctggggagcggacaaaattaaaagactgcgagtacccgctgatttccagaatcctgcatgggccatgtgagaagatcgccaggatcttcctgatggaagctgacttgggcgtggaagtcccccatgaagtcgctcagtacattaagtttgaaatgccggtgctggacagttttgttgaaaaattaaaagaagaggaagaaagagaaataatcaaactgaccatgaagttccaagccctgcgtctgacgatgctgcagcgcctggagcagctggtggaggccaagtaactggccaacacctgcctcttccaaagtccccagcagtggcaggtgtacactgagccctggttgctggccccggccggtcacattgactgatggccaccgcctgacgaatcgagtgcctgtgtgtctacctctctgaagcctgagcaccatgattcccacagccagctcttggctccaagatgagcacccacaggaagccgacccaggcctgaggggccaggaacttgctgggtcagatctgtgtggccagccctgtccacaccatgcctctcctgcactggagagcagtgctggcccagcccctgcggcttaggcttcatctgcttgcacattgcctgtcccagagcccctgtgggtccacaagcccctgtcctcttccttcatatgagattcttgtctgccctcatatcacgctgccccacaggaatgctgctgggaaaagcagggcctgccagcaggtatgagatctagcctgctttcagccatcaccttgccacagtgtccccggcttctaagcctccaatatcaccctgtgagcctcgcacagctcagccccaacacagaggtgagaccaggaataaggccacaagtatctcactttctctgcagaaatcaatctttacttcatcagagagacctaaagcgattcttacaaggagcttgctgcaagaaacacggtcattcaatcacattgaggagggtccacatggcattgagagggtgctgcccgctcaatgcccagcagcagctctggaaggcagtgctcagccccatcaccactgtcccgtggatgcctgtgtacctcttgccttttctgggcttgcgtttctctcctctagtgggtggggatgactttcaatgactttcaatacttcccctgaaggaagaatgataaggagaaatgtctgttttgaggaaagggctttgaattccccagatactgaacaatttgtgtttgtgactgatggagaatttcaggaatgaatgagaaagcctttgcgaaactatgcaacagtttacatcagtcatgtgaagtatttgtctaaaacagagcaaactgaagaccaaattattctcctgttgaggtccgtggatggcagatttaaagggaagaaccacaaaggcttgcaaagataggagaggctccatctctaatgcatgtagaagctccttacgggtgcccatcaagagcatagcttggaagccaccatgctgtgcggaactgcgtcagggcaaatgtcacagcaggatttccccaacccagctccatcatcacagacacagagagctgcaggggaggcctgcccactgttttgtcgactctgccctcctctggcagcatagatccttaggtgctcaataaaggtgtgctgtattgaactgaa

SEQ ID NO: 280599 - DNA, 2423 bp, Homo sapiens
agcgggaggcctggggtcagcaggcgctgcgggcgcagctccggtgcaagcgaggacacgacacatgcagtggcttctggactgcgcgatgactggacgcaagtaacttctaggtctgcagacaagaggaagagaagatgaaggaagactgtctgccgagttctcacgtgcccatcagtgacagcaagtccattcagaagtcggagctcttaggcctgctgaaaacctacaactgctaccatgagggcaagagcttccagctgagacaccgtgaggaagaagggactctgatcatcgaggggctcctcaacattgcctgggggctgaggcggcccatccggctgcagatgcaggatgaccgggagcaggtgcacctcccctccacctcatggatgcccagacggcctagctgccctctaaaggagccatcgccccagaacgggaacatcacagcccaggggccaagcattcagccagtgcacaaggctgagagttccacagacagctcggggcccctggaggaggcagaggaggccccccagctgatgcggaccaagagcgacgccagttgcatgagccagaggaggcccaagtgccgcgcccccggtgaggcccagcgcatccggcgacaccggttctctatcaacggccacttctacaatcataagacctccgtgtttactccagcctatggatccgtgaccaatgtgagggtcaacagcaccatgacaaccctgcaggtgctcaccctgctgctgaacaaatttagggtggaagatggccccagtgagttcgcactctacatcgttcacgagtctggggaagatcgccaggatcttcctgatggaagctgacttgggcgtggaagtcccccatgaagtcgctcagtacattaagtttgaaatgccggtgctggacagttttgttgaaaaattaaaagaagaggaagaaagagaaataatcaaactgaccatgaagttccaagccctgcgtctgacgatgctgcagcgcctggagcagctggtggaggccaagtaactggccaacacctgcctcttccaaagtccccagcagtggcaggtgtacactgagccctggttgctggccccggccggtcacattgactgatggccaccgcctgacgaatcgagtgcctgtgtgtctacctctctgaagcctgagcaccatgattcccacagccagctcttggctccaagatgagcacccacaggaagccgacccaggcctgaggggccaggaacttgctgggtcagatctgtgtggccagccctgtccacaccatgcctctcctgcactggagagcagtgctggcccagcccctgcggcttaggcttcatctgcttgcacattgcctgtcccagagcccctgtgggtccacaagcccctgtcctcttccttcatatgagattcttgtctgccctcatatcacgctgccccacaggaatgctgctgggaaaagcagggcctgccagcaggtatgagatctagcctgctttcagccatcaccttgccacagtgtccccggcttctaagcctccaatatcaccctgtgagcctcgcacagctcagccccaacacagaggtgagaccaggaataaggccacaagtatctcactttctctgcagaaatcaatctttacttcatcagagagacctaaagcgattcttacaaggagcttgctgcaagaaacacggtcattcaatcacattgaggagggtccacatggcattgagagggtgctgcccgctcaatgcccagcagcagctctggaaggcagtgctcagccccatcaccactgtcccgtggatgcctgtgtacctcttgccttttctgggcttgcgtttctctcctctagtgggtggggatgactttcaatgactttcaatacttcccctgaaggaagaatgataaggagaaatgtctgttttgaggaaagggctttgaattccccagatactgaacaatttgtgtttgtgactgatggagaatttcaggaatgaatgagaaagcctttgcgaaactatgcaacagtttacatcagtcatgtgaagtatttgtctaaaacagagcaaactgaagaccaaattattctcctgttgaggtccgtggatggcagatttaaagggaagaaccacaaaggcttgcaaagataggagaggctccatctctaatgcatgtagaagctccttacgggtgcccatcaagagcatagcttggaagccaccatgctgtgcggaactgcgtcagggcaaatgtcacagcaggatttccccaacccagctccatcatcacagacacagagagctgcaggggaggcctgcccactgttttgtcgactctgccctcctctggcagcatagatccttaggtgctcaataaaggtgtgctgtattgaactgaa

SEQ ID NO: 280600 - DNA, 1639 bp, Homo sapiens
tctgtgcagtccacagcctggtttgactgcacctcatgaggcgcaggccacagccttccccctccttggcagaggagagatgaggctgctgcagggatctcctgagctggccatctgcaggtcccttgctctgctgcccacctccctgccctgtctggcctcagtgagtcctcttggcgatgtctccctccaggttccaagccctgcgtctgacgatgctgcagcgcctggagcagctggtggaggccaagtaactggccaacacctgcctcttccaaagtccccagcagtggcaggtgtacactgagccctggttgctggccccggccggtcacattgactgatggccaccgcctgacgaatcgagtgcctgtgtgtctacctctctgaagcctgagcaccatgattcccacagccagctcttggctccaagatgagcacccacaggaagccgacccaggcctgaggggccaggaacttgctgggtcagatctgtgtggccagccctgtccacaccatgcctctcctgcactggagagcagtgctggcccagcccctgcggcttaggcttcatctgcttgcacattgcctgtcccagagcccctgtgggtccacaagcccctgtcctcttccttcatatgagattcttgtctgccctcatatcacgctgccccacaggaatgctgctgggaaaagcagggcctgccagcaggtatgagatctagcctgctttcagccatcaccttgccacagtgtccccggcttctaagcctccaatatcaccctgtgagcctcgcacagctcagccccaacacagaggtgagaccaggaataaggccacaagtatctcactttctctgcagaaatcaatctttacttcatcagagagacctaaagcgattcttacaaggagcttgctgcaagaaacacggtcattcaatcacattgaggagggtccacatggcattgagagggtgctgcccgctcaatgcccagcagcagctctggaaggcagtgctcagccccatcaccactgtcccgtggatgcctgtgtacctcttgccttttctgggcttgcgtttctctcctctagtgggtggggatgactttcaatgactttcaatacttcccctgaaggaagaatgataaggagaaatgtctgttttgaggaaagggctttgaattccccagatactgaacaatttgtgtttgtgactgatggagaatttcaggaatgaatgagaaagcctttgcgaaactatgcaacagtttacatcagtcatgtgaagtatttgtctaaaacagagcaaactgaagaccaaattattctcctgttgaggtccgtggatggcagatttaaagggaagaaccacaaaggcttgcaaagataggagaggctccatctctaatgcatgtagaagctccttacgggtgcccatcaagagcatagcttggaagccaccatgctgtgcggaactgcgtcagggcaaatgtcacagcaggatttccccaacccagctccatcatcacagacacagagagctgcaggggaggcctgcccactgttttgtcgactctgccctcctctggcagcatagatccttaggtgctcaataaaggtgtgctgtattgaactgaa

SEQ ID NO: 280601 - DNA, 1538 bp, Homo sapiens
  misc_feature (56)..(56): n is a, c, g, or t
acgggctatggggtagtcgagtacgtcggggcattccggataggcgagaaagtgtngtgggaagaaagagaaataatcaaactgaccatgaagttccaagccctgcgtctgacgatgctgcagcgcctggagcagctggtggaggccaagtaactggccaacacctgcctcttccaaagtccccagcagtggcaggtgtacactgagccctggttgctggccccggccggtcacattgactgatggccaccgcctgacgaatcgagtgcctgtgtgtctacctctctgaagcctgagcaccatgattcccacagccagctcttggctccaagatgagcacccacaggaagccgacccaggcctgaggggccaggaacttgctgggtcagatctgtgtggccagccctgtccacaccatgcctctcctgcactggagagcagtgctggcccagcccctgcggcttaggcttcatctgcttgcacattgcctgtcccagagcccctgtgggtccacaagcccctgtcctcttccttcatatgagattcttgtctgccctcatatcacgctgccccacaggaatgctgctgggaaaagcagggcctgccagcaggtatgagatctagcctgctttcagccatcaccttgccacagtgtccccggcttctaagcctccaatatcaccctgtgagcctcgcacagctcagccccaacacagaggtgagaccaggaataaggccacaagtatctcactttctctgcagaaatcaatctttacttcatcagagagacctaaagcgattcttacaaggagcttgctgcaagaaacacggtcattcaatcacattgaggagggtccacatggcattgagagggtgctgcccgctcaatgcccagcagcagctctggaaggcagtgctcagccccatcaccactgtcccgtggatgcctgtgtacctcttgccttttctgggcttgcgtttctctcctctagtgggtggggatgactttcaatgactttcaatacttcccctgaaggaagaatgataaggagaaatgtctgttttgaggaaagggctttgaattccccagatactgaacaatttgtgtttgtgactgatggagaatttcaggaatgaatgagaaagcctttgcgaaactatgcaacagtttacatcagtcatgtgaagtatttgtctaaaacagagcaaactgaagaccaaattattctcctgttgaggtccgtggatggcagatttaaagggaagaaccacaaaggcttgcaaagataggagaggctccatctctaatgcatgtagaagctccttacgggtgcccatcaagagcatagcttggaagccaccatgctgtgcggaactgcgtcagggcaaatgtcacagcaggatttccccaacccagctccatcatcacagacacagagagctgcaggggaggcctgcccactgttttgtcgactctgccctcctctggcagcatagatccttaggtgctcaataaaggtgtgctgtattgaactgaa

SEQ ID NO: 280602 - DNA, 1415 bp, Homo sapiens
agcgggaggcctggggtcagcaggcgctgcgggcgcagctccggtgcaagcgaggacacgacacatgcagtggcttctggactgcgcgatgactggacgcaagtaacttctaggtctgcagacaagaggaagagaagatgaaggaagactgtctgccgagttctcacgtgcccatcagtgacagcaagtccattcagaagtcggagctcttaggcctgctgaaaacctacaactgctaccatgagggcaagagcttccagctgagacaccgtgaggaagaagggactctgatcatcgaggggctcctcaacattgcctgggggctgaggcggcccatccggctgcagatgcaggatgaccgggagcaggtgcacctcccctccacctcatggatgcccagacggcctagctgccctctaaaggagccatcgccccagaacgggaacatcacagcccaggggccaagcattcagccagtgcacaaggctgagagttccacagacagctcggggcccctggaggaggcagaggaggccccccagctgatgcggaccaagagcgacgccagttgcatgagccagaggaggcccaagtgccgcgcccccggtgaggcccagcgcatccggcgacaccggttctctatcaacggccacttctacaatcataagacctccgtgtttactccagcctatggatccgtgaccaatgtgagggtcaacagcaccatgacaaccctgcaggtgctcaccctgctgctgaacaaatttagggtggaagatggccccagtgagttcgcactctacatcgttcacgagtctggggagcggacaaaattaaaagactgcgagtacccgctgatttccagaatcctgcatgggccatgtgagaagatcgccaggatcttcctgatggaagctgacttgggcgtggaagtcccccatgaagtcgctcagtacattaagtttgaaatgccggtgctggacagttttgttgaaaaattaaaagaagaggaagaaagagaaataatcaaactgaccatgaagttccaagccctgcgtctgacgatgctgcagcgcctggagcagctggtggaggccaagtaactggccaacacctgcctcttccaaagtccccagcagtggcaggtgtacactgagccctggttgctggccccggccggtcacattgactgatggccaccgcctgacgaatcgacaagagcatagcttggaagccaccatgctgtgcggaactgcgtcagggcaaatgtcacagcaggatttccccaacccagctccatcatcacagacacagagagctgcaggggaggcctgcccactgttttgtcgactctgccctcctctggcagcatagatccttaggtgctcaataaaggtgtgctgtattgaactgaa

SEQ ID NO: 280603 - DNA, 2247 bp, Homo sapiens
  misc_feature (2045)..(2045): n is a, c, g, or t
  misc_feature (2073)..(2073): n is a, c, g, or t
agcgggaggcctggggtcagcaggcgctgcgggcgcagctccggtgcaagcgaggacacgacacatgcagtggcttctggactgcgcgatgactggacgcaagtaacttctaggtctgcagacaagaggaagagaagatgaaggaagactgtctgccgagttctcacgtgcccatcagtgacagcaagtccattcagaagtcgaagctcttaggtgtgcaggttgggcgggggagtcttcacatttgccatccccctcatcctgggcagcctttaggtggaggggttctgagcacttgttcagagatctgatggggtgccctgggggacagtgatggggtgcttctttttgagcctgtccaataggggatccccaagctacacatgaccatggctgggaggcatgggcaatagaaaagaggctccagatggcaggcactttatacgaaataggtgtgtacagggcctcattataacttttacattgattgcatgttgacaaatagtaatttagatatattgagttcaataaaatgtgttattaatgctaatttcacctgtttcattttcccctctgtattaggccattcttgtgttgctataaagaaatacctgaagctgggtaatttacaaagaaaagagatttagttggctcacggttctggaggctttacaagaagtgtggtgctggcatctgctcggcttccagggaggcctcaaggagcctccagtcatgttggaaggcgaacggggagcaggcacttcacatggcgaaagcaggagcaagagagagggagtggagggtggtgccacacacttttaaatgaccagacctcgtgtgaactcagagcaaaagctcacttatcaccacggggatggcccaagccactcatgagggatctgctcccatgatccaaacacctcccacctggccccacctccaacactgggaattacaattccacatgagatttgggtggggacacacatccaaaccatatcacctcctaacatgtactagaagattgaaattaccagtgtggctcacatcccacgtctgctggccccacagccccacagagcccagcttgggttcaggcagctgtccaggcctccccttcctccaacattagccagggctgtggctttcccttcgggaagggagacagcgttgagggaaagtggcttactgcagacttcagggccttactcacagggccatcaccttccactgcgcctttggaaagtcagggtggggaagaagcaggcacccctcagggtggcccgcagcagccacagcaggccttgtaggaagtgatatggggaaaagcaagaggctgtacaatgccaaaagcaagtccagggcatttactgtgaggaagcaacgcaggtggagggcagggaggctgccagggccttacctgtgatagtgaaagtgtcggcaccctggacatcctggaccagacgcaggcctgtcccgtgagtctcgcctcctcctcagcccgacccccatgccccccaccagggccatgtgcagaaccatccgggtgcattgcgatggcagtctggtctcctctggttatgcctggccggcgagaagggtgctgtcacactcctgttacaaatgaggaaacagaggccagggaagccaaaggccagaagctgaggccctgccacaccctaggagtacatgtgcgtctttccctttttaggtcggagctcttaggcctgctgaaaacctacaactgctaccatgagggcaagagcttccagctgagacaccgtgaggaagaagggactctgatcatcgaggggctcctcaacattgcctgggggctgaggcggcccatccggctgcagatgcaggatgaccgggagcaggtgcacctcccctccacctcatggatgcccagacggcctagctgccctctaaaggagccatcgccccagaacgggaacatcacagcccaggggccaagcattcagccagtgcacaaggctgagagttccacagacagctcggggccctcttgaaggaaaaagttnatattttaaggacacattttatattaantgtttgaatttcattttcagttttcatgtttcaaactgagtaattaacatttgtcttatgtatacagatattgctaagccaatatagtgtatctcaacaggtaccggatttaatatcttttgagaatgcgtatgatgaacgttagtgcctgtaagtcgatcccgtgggccaact

SEQ ID NO: 280604 - DNA, 461 bp, Homo sapiens
agcgggaggcctggggtcagcaggcgctgcgggcgcagctccggtgcaagcgaggacacgacacatgcagtggcttctggactgcgcgatgactggacgcaagtaacttctaggtctgcagacaagaggaagagaagatgaaggaagactgtctgccgagttctcacgtgcccatcagtgacagcaagtccattcagaagtcggagctcttaggcctgctgaaaacctacaactgctaccatgagggcaagagcttccagctgagacaccgtgaggaagaagggactctgatcatcgaggggctcctcaacattgcctgggggctgaggcggcccatccggctgcagatgcaggatgaccgggagcaggtgcacctcccctccacctcatggatgcccagacggcctagctgccctctactgactctcgtggtttgaaatccaggcctcacctcagcctgc

SEQ ID NO: 280605 - DNA, 358 bp, Homo sapiens
cagcctatggatccgtgaccaatgtgagggtcaacagcaccatgacaaccctgcaggtgctcaccctgctgctgaacaaatttagggtaagcctggtcaggagcagccttgccccaggatgccagtggtctgctattctgttgggggtggggttctggggaaagctgcccgtggcagaagctgcctgggcagaaggtctagcaagggtccctctgctgagctttggtttctcggatttcaagcaagaggaggttgggagaggacaggttccttgcaacttgcgtgtgtgttactgggggtgtagttactgtcaggggaccctctcagttctctcccatctccaagcaccgtgatctga

SEQ ID NO: 280606 - DNA, 419 bp, Homo sapiens
taggtcgctcagtacattaagtttaattctttcaggattctgaaggagaatcccaccaagctataggaagcctccctctccgcctcttccagagaaatggatgggtgggtacctagctccttggcgccgagtcaggaagggtggggtgcgtgtcgcagtgcatcaggccctggccctcccgtctcagctttcctttctcccacccctcagatcttgtttctcttcaagctgcacctttgctgaatgacactgtaggggaggaaaattatcttctctttctacccatttaggttcactggctggggccctgtatttagattaacaaaagacagattaaggagaagaacaaacagaagtttgttaacacttgcatcatgcatgccctttggaatatccagggatgaatggtcagaatttgg

SEQ ID NO: 280607 - DNA, 430 bp, Homo sapiens
atttttgtaaaccaccttctttttcagagcggacaaaattaaaagactgcgagtacccgctgatttccagaatcctgcatgggccatgtgagaagatcgccaggatcttcctgatggaagctgacttgggcgtggaagtcccccatgaagtgagtgggggccaaggctggggaggcctgctctagggtgaggggttcttgggtgacggggcctcccaaggactcctggccagagccctgtcagttgatgtctccaggagctccacactctcccaaagggctcccagcctagcacagggaggcgccagccctccctctcccatcagtgaccgccagcaccagcagcttaggggaaagaagaatttgggtcctataaaaccatggcctgtccttttcctctagggaagtaaagtcttttccttcattggaat

SEQ ID NO: 280608 - DNA, 235 bp, Homo sapiens
gcggccgcctactactactactactgctcgaattcaagcttctaacgatgtacggggacatgctgtgcggaactgcgtcagggcaaatgtcacagcaggatttccccaacccagctccatcatcacagacacagagagctgcaggggaggcctgcccactgttttgtcgactctgccctcctctggcagcatagatccttaggtgctcaataaaggtgtgctgtattgaactgaa

SEQ ID NO: 280609 - DNA, 2865 bp, Homo sapiens
agcgggaggcctggggtcagcaggcgctgcgggcgcagctccggtgcaagcgaggacacgacacatgcagtggcttctggactgcgcgatgactggacgcaagtaacttctaggtctgcagacaagaggaagagaagatgaaggaagactgtctgccgagttctcacgtgcccatcagtgacagcaagtccattcagaagtcggagctcttaggcctgctgaaaacctacaactgctaccatgagggcaagagcttccagctgagacaccgtgaggaagaagggactctgatcatcgaggggctcctcaacattgcctgggggctgaggcggcccatccggctgcagatgcaggatgaccgggagcaggtgcacctcccctccacctcatggatgcccagacggcctagctgccctctaaaggagccatcgccccagaacgggaacatcacagcccaggggccaagcattcagccagtgcacaaggctgagagttccacagacagctcggggcccctggaggaggcagaggaggccccccagctgatgcggaccaagagcgacgccagttgcatgagccagaggaggcccaagtgccgcgcccccggtgaggcccagcgcatccggcgacaccggttctctatcaacggccacttctacaatcataagacctccgtgtttactccagcctatggatccgtgaccaatgtgagggtcaacagcaccatgacaaccctgcaggtgctcaccctgctgctgaacaaatttagggtggaagatggccccagtgagttcgcactctacatcgttcacgagtctggggagcggacaaaattaaaagactgcgagtacccgctgatttccagaatcctgcatgggccatgtgagaagatcgccaggatcttcctgatggaagctgacttgggcgtggaagtcccccatgaagtcgctcagtacattaagtttgaaatgccggtgctggacagttttgttgaaaaattaaaagaagaggaagaaagagaaataatcaaactgaccatgaagttccaagccctgcgtctgacgatgctgcagcgcctggagcagctggtggaggccaagtaactggccaacacctgcctcttccaaagtccccagcagtggcaggtgtacactgagccctggttgctggccccggccggtcacattgactgatggccaccgcctgacgaatcgagtgcctgtgtgtctacctctctgaagcctgagcaccatgattcccacagccagctcttggctccaagatgagcacccacaggaagccgacccaggcctgaggggccaggaacttgctgggtcagatctgtgtggccagccctgtccacaccatgcctctcctgcactggagagcagtgctggcccagcccctgcggcttaggcttcatctgcttgcacattgcctgtcccagagcccctgtgggtccacaagcccctgtcctcttccttcatatgagattcttgtctgccctcatatcacgctgccccacaggaatgctgctgggaaaagcagggcctgccagcaggtatgagatctagcctgctttcagccatcaccttgccacagtgtccccggcttctaagcctccaatatcaccctgtgagcctcgcacagctcagccccaacacagaggtgagaccaggaataaggccacaagtatctcactttctctgcagaaatcaatctttacttcatcagagagacctaaagcgattcttacaaggagcttgctgcaagaaacacggtcattcaatcacattgaggagggtccacatggcattgagagggtgctgcccgctcaatgcccagcagcagctctggaaggcagtgctcagccccatcaccactgtcccgtggatgcctgtgtacctcttgccttttctgggcttgcgtttctctcctctagtgggtggggatgactttcaatgactttcaatacttcccctgaaggaagaatgataaggagaaatgtctgttttgaggaaagggctttgaattccccagatactgaacaatttgtgtttgtgactgatggagaatttcaggaatgaatgagaaagcctttgcgaaactatgcaacagtttacatcagtcatgtgaagtatttgtctaaaacagagcaaactgaagaccaaattattctcctgttgaggtccgtggatggcagatttaaagggaagaaccacaaaggcttgcaaagataggagaggctccatctctaatgcatgtagaagctccttacgggtgcccatcaagagcatagcttggaagccaccatgctgtgcggaactgcgtcagggcaaatgtcacagcaggatttccccaacccagctccatcatcacagacacagagagctgcaggggaggcctgcccactgttttgtcgactctgccctcctctggcagcatagatccttaggtgctcaataaaggtgtgctgtattgaactgaaaaaaaaaaaaaaaaaaaaaaaaaaaaaaaaaaaaaaaaacaaaaaaaaaaaaaaaaaaagaagaaaaaagaaagacagagaacaacaagaaggagggcgggcggagccgaaacaaaatactaccccggaggggagggccacaaaagagaggagacacaccaccgtagttgcaggcaaaagcaaggggggcaacccactagagcagcggagcagactaaaaacaaaccacagcggcagcgggcgggcactcaacaacacacgagtaggagacagggaggaaaccacgacgcagtcagacgagaacatagcaggagagagaacacacaacaaccacggggcggcagcagaacaatacagacgaaaaccaaccaacaaat

SEQ ID NO: 280610 - DNA, 2524 bp, Homo sapiens
agcgggaggcctggggtcagcaggcgctgcgggcgcagctccggtgcaagcgaggacacgacacatgcagtggcttctggactgcgcgatgactggacgcaagtaacttctaggtctgcagacaagaggaagagaagatgaaggaagactgtctgccgagttctcacgtgcccatcagtgacagcaagtccattcagaagtcggagctcttaggcctgctgaaaacctacaactgctaccatgagggcaagagcttccagctgagacaccgtgaggaagctcagtgacacatctgtgcttgtagagcaccagaagaagggactctgatcatcgaggggctcctcaacattgcctgggggctgaggcggcccatccggctgcagatgcaggatgaccgggagcaggtgcacctcccctccacctcatggatgcccagacggcctagctgccctctaaaggagccatcgccccagaacgggaacatcacagcccaggggccaagcattcagccagtgcacaaggctgagagttccacagacagctcggggcccctggaggaggcagaggaggccccccagctgatgcggaccaagagcgacgccagttgcatgagccagaggaggcccaagtgccgcgcccccggtgaggcccagcgcatccggcgacaccggttctctatcaacggccacttctacaatcataagacctccgtgtttactccagcctatggatccgtgaccaatgtgagggtcaacagcaccatgacaaccctgcaggtgctcaccctgctgctgaacaaatttagggtggaagatggccccagtgagttcgcactctacatcgttcacgagtctggggagcggacaaaattaaaagactgcgagtacccgctgatttccagaatcctgcatgggccatgtgagaagatcgccaggatcttcctgatggaagctgacttgggcgtggaagtcccccatgaagtcgctcagtacattaagtttgaaatgccggtgctggacagttttgttgaaaaattaaaagaagaggaagaaagagaaataatcaaactgaccatgaagttccaagccctgcgtctgacgatgctgcagcgcctggagcagctggtggaggccaagtaactggccaacacctgcctcttccaaagtccccagcagtggcaggtgtacactgagccctggttgctggccccggccggtcacattgactgatggccaccgcctgacgaatcgagtgcctgtgtgtctacctctctgaagcctgagcaccatgattcccacagccagctcttggctccaagatgagcacccacaggaagccgacccaggcctgaggggccaggaacttgctgggtcagatctgtgtggccagccctgtccacaccatgcctctcctgcactggagagcagtgctggcccagcccctgcggcttaggcttcatctgcttgcacattgcctgtcccagagcccctgtgggtccacaagcccctgtcctcttccttcatatgagattcttgtctgccctcatatcacgctgccccacaggaatgctgctgggaaaagcagggcctgccagcaggtatgagatctagcctgctttcagccatcaccttgccacagtgtccccggcttctaagcctccaatatcaccctgtgagcctcgcacagctcagccccaacacagaggtgagaccaggaataaggccacaagtatctcactttctctgcagaaatcaatctttacttcatcagagagacctaaagcgattcttacaaggagcttgctgcaagaaacacggtcattcaatcacattgaggagggtccacatggcattgagagggtgctgcccgctcaatgcccagcagcagctctggaaggcagtgctcagccccatcaccactgtcccgtggatgcctgtgtacctcttgccttttctgggcttgcgtttctctcctctagtgggtggggatgactttcaatgactttcaatacttcccctgaaggaagaatgataaggagaaatgtctgttttgaggaaagggctttgaattccccagatactgaacaatttgtgtttgtgactgatggagaatttcaggaatgaatgagaaagcctttgcgaaactatgcaacagtttacatcagtcatgtgaagtatttgtctaaaacagagcaaactgaagaccaaattattctcctgttgaggtccgtggatggcagatttaaagggaagaaccacaaaggcttgcaaagataggagaggctccatctctaatgcatgtagaagctccttacgggtgcccatcaagagcatagcttggaagccaccatgctgtgcggaactgcgtcagggcaaatgtcacagcaggatttccccaacccagctccatcatcacagacacagagagctgcaggggaggcctgcccactgttttgtcgactctgccctcctctggcagcatagatccttaggtgctcaataaaggtgtgctgtattgaactgaa

SEQ ID NO: 280611 - DNA, 2557 bp, Homo sapiens
agcgggaggcctggggtcagcaggcgctgcgggcgcagctccggtgcaagcgaggacacgacacatgcagtggcttctggactgcgcgatgactggacgcaagtaacttctaggtctgcagacaagaggaagagaagatgaaggaagactgtctgccgagttctcacgtgcccatcagtgacagcaagtccattcagaagtcggagctcttaggcctgctgaaaacctacaactgctaccatgagggcaagagcttccagctgagacaccgtgaggaagaagggactctgatcatcgaggggctcctcaacattgcctgggggctgaggcggcccatccggctgcagatgcaggatgaccgggagcaggtgcacctcccctccacctcatggatgcccagacggcctagctgccctctaaaggagccatcgccccagaacgggaacatcacagcccaggggccaagcattcagccagtgcacaaggctgagagttccacagacagctcggggcccctggaggaggcagaggaggccccccagctgatgcggaccaagagcgacgccagttgcatgagccagaggaggcccaagtgccgcgcccccggtgaggcccagcgcatccggcgacaccggttctctatcaacggccacttctacaatcataagacctccgtgtttactccagcctatggatccgtgaccaatgtgagggtcaacagcaccatgacaaccctgcaggtgctcaccctgctgctgaacaaatttagggtggaagatggccccagtgagttcgcactctacatcgttcacgagtctgggggattctgaaggagaatcccaccaagctataggaagcctccctctccgcctcttccagagaaatggatggagcggacaaaattaaaagactgcgagtacccgctgatttccagaatcctgcatgggccatgtgagaagatcgccaggatcttcctgatggaagctgacttgggcgtggaagtcccccatgaagtcgctcagtacattaagtttgaaatgccggtgctggacagttttgttgaaaaattaaaagaagaggaagaaagagaaataatcaaactgaccatgaagttccaagccctgcgtctgacgatgctgcagcgcctggagcagctggtggaggccaagtaactggccaacacctgcctcttccaaagtccccagcagtggcaggtgtacactgagccctggttgctggccccggccggtcacattgactgatggccaccgcctgacgaatcgagtgcctgtgtgtctacctctctgaagcctgagcaccatgattcccacagccagctcttggctccaagatgagcacccacaggaagccgacccaggcctgaggggccaggaacttgctgggtcagatctgtgtggccagccctgtccacaccatgcctctcctgcactggagagcagtgctggcccagcccctgcggcttaggcttcatctgcttgcacattgcctgtcccagagcccctgtgggtccacaagcccctgtcctcttccttcatatgagattcttgtctgccctcatatcacgctgccccacaggaatgctgctgggaaaagcagggcctgccagcaggtatgagatctagcctgctttcagccatcaccttgccacagtgtccccggcttctaagcctccaatatcaccctgtgagcctcgcacagctcagccccaacacagaggtgagaccaggaataaggccacaagtatctcactttctctgcagaaatcaatctttacttcatcagagagacctaaagcgattcttacaaggagcttgctgcaagaaacacggtcattcaatcacattgaggagggtccacatggcattgagagggtgctgcccgctcaatgcccagcagcagctctggaaggcagtgctcagccccatcaccactgtcccgtggatgcctgtgtacctcttgccttttctgggcttgcgtttctctcctctagtgggtggggatgactttcaatgactttcaatacttcccctgaaggaagaatgataaggagaaatgtctgttttgaggaaagggctttgaattccccagatactgaacaatttgtgtttgtgactgatggagaatttcaggaatgaatgagaaagcctttgcgaaactatgcaacagtttacatcagtcatgtgaagtatttgtctaaaacagagcaaactgaagaccaaattattctcctgttgaggtccgtggatggcagatttaaagggaagaaccacaaaggcttgcaaagataggagaggctccatctctaatgcatgtagaagctccttacgggtgcccatcaagagcatagcttggaagccaccatgctgtgcggaactgcgtcagggcaaatgtcacagcaggatttccccaacccagctccatcatcacagacacagagagctgcaggggaggcctgcccactgttttgtcgactctgccctcctctggcagcatagatccttaggtgctcaataaaggtgtgctgtattgaactgaa

SEQ ID NO: 280612 - DNA, 2196 bp, Homo sapiens
ggccatgtgacattgtgacccaggttaccctgtctgggtctcaccttcctatctgcaagctgggaatatccagcctccagtccaggaatggccctcacgtccccatctgccccagtgcacgtgaccacagggctctagggtgccagatctcccgacagcaggcagttgctctgtcagcatcacccaccctgccattctctcacccatttctcatgcagggcccctggaggaggcagaggaggccccccagctgatgcggaccaagagcgacgccagttgcatgagccagaggaggcccaagtgccgcgcccccggtgaggcccagcgcatccggcgacaccggttctctatcaacggccacttctacaatcataagacctccgtgtttactccagcctatggatccgtgaccaatgtgagggtcaacagcaccatgacaaccctgcaggtgctcaccctgctgctgaacaaatttagggtggaagatggccccagtgagttcgcactctacatcgttcacgagtctggggagcggacaaaattaaaagactgcgagtacccgctgatttccagaatcctgcatgggccatgtgagaagatcgccaggatcttcctgatggaagctgacttgggcgtggaagtcccccatgaagtcgctcagtacattaagtttgaaatgccggtgctggacagttttgttgaaaaattaaaagaagaggaagaaagagaaataatcaaactgaccatgaagttccaagccctgcgtctgacgatgctgcagcgcctggagcagctggtggaggccaagtaactggccaacacctgcctcttccaaagtccccagcagtggcaggtgtacactgagccctggttgctggccccggccggtcacattgactgatggccaccgcctgacgaatcgagtgcctgtgtgtctacctctctgaagcctgagcaccatgattcccacagccagctcttggctccaagatgagcacccacaggaagccgacccaggcctgaggggccaggaacttgctgggtcagatctgtgtggccagccctgtccacaccatgcctctcctgcactggagagcagtgctggcccagcccctgcggcttaggcttcatctgcttgcacattgcctgtcccagagcccctgtgggtccacaagcccctgtcctcttccttcatatgagattcttgtctgccctcatatcacgctgccccacaggaatgctgctgggaaaagcagggcctgccagcaggtatgagatctagcctgctttcagccatcaccttgccacagtgtccccggcttctaagcctccaatatcaccctgtgagcctcgcacagctcagccccaacacagaggtgagaccaggaataaggccacaagtatctcactttctctgcagaaatcaatctttacttcatcagagagacctaaagcgattcttacaaggagcttgctgcaagaaacacggtcattcaatcacattgaggagggtccacatggcattgagagggtgctgcccgctcaatgcccagcagcagctctggaaggcagtgctcagccccatcaccactgtcccgtggatgcctgtgtacctcttgccttttctgggcttgcgtttctctcctctagtgggtggggatgactttcaatgactttcaatacttcccctgaaggaagaatgataaggagaaatgtctgttttgaggaaagggctttgaattccccagatactgaacaatttgtgtttgtgactgatggagaatttcaggaatgaatgagaaagcctttgcgaaactatgcaacagtttacatcagtcatgtgaagtatttgtctaaaacagagcaaactgaagaccaaattattctcctgttgaggtccgtggatggcagatttaaagggaagaaccacaaaggcttgcaaagataggagaggctccatctctaatgcatgtagaagctccttacgggtgcccatcaagagcatagcttggaagccaccatgctgtgcggaactgcgtcagggcaaatgtcacagcaggatttccccaacccagctccatcatcacagacacagagagctgcaggggaggcctgcccactgttttgtcgactctgccctcctctggcagcatagatccttaggtgctcaataaaggtgtgctgtattgaactgaa

SEQ ID NO: 280613 - DNA, 1969 bp, Homo sapiens
gggcttcagtttcgggacgtgctgtgcaggttcctctggtgccctctccaggctgaggaggggctcgggttgtctctggtgattaactccatcattgcctagagagggacgggggcacaccttgacaaatttatgtcctgctttttggcaaataggggagggcaaagagcctcacttgtatcttcttcttctcaattgccagccgctccacttaatccttatgccaaagtggcagatctgggggccctgttctgcctcccttctgcatgagcaggaatctctcagggcagcgctgttagcgagagcggacaaaattaaaagactgcgagtacccgctgatttccagaatcctgcatgggccatgtgagaagatcgccaggatcttcctgatggaagctgacttgggcgtggaagtcccccatgaagtcgctcagtacattaagtttgaaatgccggtgctggacagttttgttgaaaaattaaaagaagaggaagaaagagaaataatcaaactgaccatgaagttccaagccctgcgtctgacgatgctgcagcgcctggagcagctggtggaggccaagtaactggccaacacctgcctcttccaaagtccccagcagtggcaggtgtacactgagccctggttgctggccccggccggtcacattgactgatggccaccgcctgacgaatcgagtgcctgtgtgtctacctctctgaagcctgagcaccatgattcccacagccagctcttggctccaagatgagcacccacaggaagccgacccaggcctgaggggccaggaacttgctgggtcagatctgtgtggccagccctgtccacaccatgcctctcctgcactggagagcagtgctggcccagcccctgcggcttaggcttcatctgcttgcacattgcctgtcccagagcccctgtgggtccacaagcccctgtcctcttccttcatatgagattcttgtctgccctcatatcacgctgccccacaggaatgctgctgggaaaagcagggcctgccagcaggtatgagatctagcctgctttcagccatcaccttgccacagtgtccccggcttctaagcctccaatatcaccctgtgagcctcgcacagctcagccccaacacagaggtgagaccaggaataaggccacaagtatctcactttctctgcagaaatcaatctttacttcatcagagagacctaaagcgattcttacaaggagcttgctgcaagaaacacggtcattcaatcacattgaggagggtccacatggcattgagagggtgctgcccgctcaatgcccagcagcagctctggaaggcagtgctcagccccatcaccactgtcccgtggatgcctgtgtacctcttgccttttctgggcttgcgtttctctcctctagtgggtggggatgactttcaatgactttcaatacttcccctgaaggaagaatgataaggagaaatgtctgttttgaggaaagggctttgaattccccagatactgaacaatttgtgtttgtgactgatggagaatttcaggaatgaatgagaaagcctttgcgaaactatgcaacagtttacatcagtcatgtgaagtatttgtctaaaacagagcaaactgaagaccaaattattctcctgttgaggtccgtggatggcagatttaaagggaagaaccacaaaggcttgcaaagataggagaggctccatctctaatgcatgtagaagctccttacgggtgcccatcaagagcatagcttggaagccaccatgctgtgcggaactgcgtcagggcaaatgtcacagcaggatttccccaacccagctccatcatcacagacacagagagctgcaggggaggcctgcccactgttttgtcgactctgccctcctctggcagcatagatccttaggtgctcaataaaggtgtgctgtattgaactgaa

SEQ ID NO: 280614 - DNA, 1450 bp, Homo sapiens
agcgggaggcctggggtcagcaggcgctgcgggcgcagctccggtgcaagcgaggacacgacacatgcagtggcttctggactgcgcgatgactggacgcaagtaacttctaggtctgcagacaagaggaagagaagatgaaggaagactgtctgccgagttctcacgtgcccatcagtgacagcaagtccattcagaagtcggagctcttaggcctgctgaaaacctacaactgctaccatgagggcaagagcttccagctgagacaccgtgaggaagaagggactctgatcatcgaggggctcctcaacattgcctgggggctgaggcggcccatccggctgcagatgcaggatgaccgggagcaggtgcacctcccctccacctcatggatgcccagacggcctagctgccctctaaaggagccatcgccccagaacgggaacatcacagcccaggggccaagcattcagccagtgcacaaggctgagagttccacagacagctcggggcccctggaggaggcagaggaggccccccagctgatgcggaccaagagcgacgccagttgcatgagccagaggaggcccaagtgccgcgcccccggtgaggcccagcgcatccggcgacaccggttctctatcaacggccacttctacaatcataagacctccgtgtttactccagcctatggatccgtgaccaatgtgagggtcaacagcaccatgacaaccctgcaggtgctcaccctgctgctgaacaaatttagggtggaagatggccccagtgagttcgcactctacatcgttcacgagtctggggagcggacaaaattaaaagactgcgagtacccgctgatttccagaatcctgcatgggccatgtgagaagatcgccaggatcttcctgatggaagctgacttgggcgtggaagtcccccatgaagtcgctcagtacattaagtttgaaatgccggtgctggacagttttgttgaaaaattaaaagaagaggaagaaagagaaataatcaaactgaccatgaagttccaagccctgcgtctgacgatgctgcagcgcctggagcagctggtggaggccaagtaactggccaacacctgcctcttccaaagtccccagcagtggcaggtgtacactgagccctggttgctggccccggccggtcacattgactgatggccaccgcctgacgaatcgagtgcctgtgtgtctacctctctgaagcctgagcaccaagagcatagcttggaagccaccatgctgtgcggaactgcgtcagggcaaatgtcacagcaggatttccccaacccagctccatcatcacagacacagagagctgcaggggaggcctgcccactgttttgtcgactctgccctcctctggcagcatagatccttaggtgctcaataaaggtgtgctgtattgaactgaa

SEQ ID NO: 280615 - DNA, 1226 bp, Homo sapiens
agcgggaggcctggggtcagcaggcgctgcgggcgcagctccggtgcaagcgaggacacgacacatgcagtggcttctggactgcgcgatgactggacgcaagtaacttctaggtctgcagacaagaggaagagaagatgaaggaagactgtctgccgagttctcacgtgcccatcagtgacagcaagtccattcagaagtcggagctcttaggcctgctgaaaacctacaactgctaccatgagggcaagagcttccagctgagacaccgtgaggaagaagggactctgatcatcgaggggctcctcaacattgcctgggggctgaggcggcccatccggctgcagatgcaggatgaccgggagcaggtgcacctcccctccacctcatggatgcccagacggcctagctgccctctaaaggagccatcgccccagaacgggaacatcacagcccaggggccaagcattcagccagtgcacaaggctgagagttccacagacagctcggggcccctggaggaggcagaggaggccccccagctgatgcggaccaagagcgacgccagttgcatgagccagaggaggcccaagtgccgcgcccccggtgaggcccagcgcatccggcgacaccggttctctatcaacggccacttctacaatcataagacctccgtgtttactccagcctatggatccgtgaccaatgtgagggtcaacagcaccatgacaaccctgcaggtgctcaccctgctgctgaacaaatttagggtggaagatggccccagtgagttcgcactctacatcgttcacgagtctggggagcggacaaaattaaaagactgcgagtacccgctgatttccagaatcctgcatgggccatgtgagaagatcgccaggatcttcctgatggaagctgacttgggcgtggaagtcccccatgaagtgagtgggggccaaggctggggaggcctgctctagggtgaggggttcttgggtgacggggcctcccaaggactcctggccagagccctgtcagttgatgtctccaggagctccacactctcccaaagggctcccagcctagcacagggaggcgccagccctccctctcccatcagtgaccgccagcaccagcagcttaggggaaagaagaatttgggtcctataaaaccatggcctgtccttttcctctagggaagtaaagtcttttccttcattggaatg

SEQ ID NO: 280616 - DNA, 2578 bp, Homo sapiens
agcgggaggcctggggtcagcaggcgctgcgggcgcagctccggtgcaagcgaggacacgacacatgcagtggcttctggactgcgcgatgactggacgcaagtaacttctaggtctgcagacaagaggaagagaagatgaaggaagactgtctgccgagttctcacgtgcccatcagtgacagcaagtccattcagaagtcgaagctcttaggtgtgcaggttgggcgggggagtcttcacatttgccatccccctcatcctgggcagcctttaggtggaggggttctgagcacttgttcagagatctgatggggtgccctgggggacagtgatggggtgcttctttttgagcctgtccaataggggatccccaagctacacatgaccatggctgggaggcatgggcaatagaaaagaggctccagatggcaggcactttatacgaaataggtgtgtacagggcctcattataacttttacattgattgcatgttgacaaatagtaatttagatatattgagttcaataaaatgtgttattaatgctaatttcacctgtttcattttcccctctgtattaggccattcttgtgttgctataaagaaatacctgaagctgggtaatttacaaagaaaagagatttagttggctcacggttctggaggctttacaagaagtgtggtgctggcatctgctcggcttccagggaggcctcaaggagcctccagtcatgttggaaggcgaacggggagcaggcacttcacatggcgaaagcaggagcaagagagagggagtggagggtggtgccacacacttttaaatgaccagacctcgtgtgaactcagagcaaaagctcacttatcaccacggggatggcccaagccactcatgagggatctgctcccatgatccaaacacctcccacctggccccacctccaacactgggaattacaattccacatgagatttgggtggggacacacatccaaaccatatcacctcctaacatgtactagaagattgaaattaccagtgtggctcacatcccacgtctgctggccccacagccccacagagcccagcttgggttcaggcagctgtccaggcctccccttcctccaacattagccagggctgtggctttcccttcgggaagggagacagcgttgagggaaagtggcttactgcagacttcagggccttactcacagggccatcaccttccactgcgcctttggaaagtcagggtggggaagaagcaggcacccctcagggtggcccgcagcagccacagcaggccttgtaggaagtgatatggggaaaagcaagaggctgtacaatgccaaaagcaagtccagggcatttactgtgaggaagcaacgcaggtggagggcagggaggctgccagggccttacctgtgatagtgaaagtgtcggcaccctggacatcctggaccagacgcaggcctgtcccgtgagtctcgcctcctcctcagcccgacccccatgccccccaccagggccatgtgcagaaccatccgggtgcattgcgatggcagtctggtctcctctggttatgcctggccggcgagaagggtgctgtcacactcctgttacaaatgaggaaacagaggccagggaagccaaaggccagaagctgaggccctgccacaccctaggagtacatgtgcgtctttccctttttaggtcggagctcttaggcctgctgaaaacctacaactgctaccatgagggcaagagcttccagctgagacaccgtgaggaagaagggactctgatcatcgaggggctcctcaacattgcctgggggctgaggcggcccatccggctgcagatgcaggatgaccgggagcaggtgcacctcccctccacctcatggatgcccagacggcctagctgccctctaaaggagccatcgccccagaacgggaacatcacagcccaggggccaagcattcagccagtgcacaaggctgagagttccacagacagctcggggcccctggaggaggcagaggaggccccccagctgatgcggaccaagagcgacgccagttgcatgagccagaggaggcccaagtgccgcgcccccggtgaggcccagcgcatccggcgacaccggttctctatcaacggccacttctacaatcataagacctccgtgtttactccagcctatggatccgtgaccaatgtgagggtcaacagcaccatgacaaccctgcaggtgctcaccctgctgctgaacaaatttaggggaagatggccccagtgagttcgaactctgtaccgttttattcctcaaggcctatagcctgtcactccttgaagccttctctgcctgtccctccgatccttgtccaccgtctatttattgcccaatttattgtttatacggatgactgggaggcactgcaccacaacgtaggaccctggctcccctttccttgggtccttgtgttccttgcccctgtccaaccctggacagttggctctacctcagtaacactttatagcaaaatcagtgcaaataaaaatccctcagtgacctca

SEQ ID NO: 280617 - DNA, 595 bp, Homo sapiens
agcgggaggcctggggtcagcaggcgctgcgggcgcagctccggtgcaagcgaggacacgacacatgcagtggcttctggactgcgcgatgactggacgcaagtaacttctaggtctgcagacaagaggaagagaagatgaaggaagactgtctgccgagttctcacgtgcccatcagtgacagcaagtccattcagaagtcggagctcttaggcctgctgaaaacctacaactgctaccatgagggcaagagcttccagctgagacaccgtgaggaagaagggactctgatcatcgaggggctcctcaacattgcctgggggctgaggcggcccatccggctgcagatgcaggatgaccgggagcaggtgcacctcccctccacctcatggatgcccagacggcctagctgccctctccaccttgctggcaagaagggacgactacagccaggggggctcccaacacctatgcaagccgaacatgtctcgccatctcttgttctatctttaaaattcacacgaatttagcctcttactactctgttttcattttaatgtcaaaattttaaaaataaatttatcagaatttcaca

SEQ ID NO: 280618 - DNA, 3054 bp, Homo sapiens
ccagcctccgctaggggaccccctccatggcttcccaccgggttgttccaggcctcagcttcgccgaaaggcctcaccacctccgacctccgcctgccctggggatgctcccagccctgctgcggcagaacgcgacatgctaaccggaatccctaggccgcctgtctcctacccatacttagaggccccgctcagacggtccttaaaacgtctgaaaggccgttcctgccagagtccctgctacctgttacctccacccctatttagtcctagtggacagcctcgctcaccttccctgggatgacacttctggcggctgagatgagcgagcctctctgggctctgccgccgggtgtgggctgacctgcctacagctggggcctgataaggcagcagcaaaagggtggaggggaggcagtgttgaagctggggcaagtaattttccccaatttacagggaaaaaccgaaattcagaaaagtttaatgtcacccaggggctggagcccagacctctggcagctctcactttcacaatgcccttgggctgactaggctgcagaggggtttcaccccaaccccagggcacctcaagtgtccccaccaaaccttcctaacacctgtccactaagctgtactaggcccttgcaactgacctatgggacctgaggcctggcccctcatggctcctgtcaccaggtctcaggtcagggtccagcaggccctgagctgacgtgtggagccagagccacccaatcccgtagggacaggtttcacaacttcccggatggggctgtggtgggtcacagtgcagcctccagccagaaggatggggtggctcccactcctgctgcttctgactcaatgcttaggggtccctgggcagcgctcgccattgaatgacttccaagtgctccggggcacagagctacagcacctgctacatgcggtggtgcccgggccttggcaggaggatgtggcagatgctgaagagtgtgctggtcgctgtgggcccttaatggactgccgggccttccactacaacgtgagcagccatggttgccaactgctgccatggactcaacactcgccccacacgaggctgcggcgttctgggcgctgtgacctcttccagaagaaagactacgtacggacctgcatcatgaacaatggggttgggtaccggggcaccatggccacgaccgtgggtggcctgccctgccaggcttggagccacaagttcccgaatgatcacaagtacacgcccactctccggaatggcctggaagagaacttctgccgtaaccctgatggcgaccccggaggtccttggtgctacacaacagaccctgctgtgcgcttccagagctgcggcatcaaatcctgccgggaggccgcgtgtgtctggtgcaatggcgaggaataccgcggcgcggtagaccgcacggagtcagggcgcgagtgccagcgctgggatcttcagcacccgcaccagcaccccttcgagccgggcaagttcctcgaccaaggtctggacgacaactattgccggaatcctgacggctccgagcggccatggtgctacactacggatccgcagatcgagcgagagttctgtgacctcccccgctgcgggtccgaggcacagccccgccaagaggccacaactgtcagctgcttccgcgggaagggtgagggctaccggggcacagccaataccaccactgcgggcgtaccttgccagcgttgggacgcgcaaatccctcatcagcaccgatttacgccagaaaaatacgcgtgcaaagaccttcgggagaacttctgccggaaccccgacggctcagaggcgccctggtgcttcacactgcggcccggcatgcgcgcggccttttgctaccagatccggcgttgtacagacgacgtgcggccccaggactgctaccacggcgcaggggagcagtaccgcggcacggtcagcaagacccgcaagggtgtccagtgccagcgctggtccgctgagacgccgcacaagccgcagttcacgtttacctccgaaccgcatgcacaactggaggagaacttctgccggaacccagatggggatagccatgggccctggtgctacacgatggacccaaggaccccattcgactactgtgccctgcgacgctgcgctgatgaccagccgccatcaatcctggaccccccagaccaggtgcagtttgagaagtgtggcaagagggtggatcggctggatcagcggcgttccaagctgcgcgtggttgggggccatccgggcaactcaccctggacagtcagcttgcggaatcggcagggccagcatttctgcggggggtctctagtgaaggagcagtggatactgactgcccggcagtgcttctcctcctgccatatgcctctcacgggctatgaggtatggttgggcaccctgttccagaacccacagcatggagagccaagcctacagcgggtcccagtagccaagatggtgtgtgggccctcaggctcccagcttgtcctgctcaagctggagagatctgtgaccctgaaccagcgtgtggccctgatctgcctgccccctgaatggtatgtggtgcctccagggaccaagtgtgagattgcaggctggggtgagaccaaaggtacgggtaatgacacagtcctaaatgtggccttgctgaatgtcatctccaaccaggagtgtaacatcaagcaccgaggacgtgtgcgggagagtgagatgtgcactgagggactgttggcccctgtgggggcctgtgagggtgactacgggggcccacttgcctgctttacccacaactgctgggtcctggaaggaattataatccccaaccgagtatgcgcaaggtcccgctggccagctgtcttcacgcgtgtctctgtgtttgtggactggattcacaaggtcatgagactgggttaggcccagccttgatgccatatgccttggggaggacaaaacttcttgtcagacataaagccatgtttcctctttatgcctgtaaaaaaaaaact

SEQ ID NO: 280619 - DNA, 3273 bp, Homo sapiens
ccagcctccgctaggggaccccctccatggcttcccaccgggttgttccaggcctcagcttcgccgaaaggcctcaccacctccgacctccgcctgccctggggatgctcccagccctgctgcggcagaacgcgacatgctaaccggaatccctaggccgcctgtctcctacccatacttagaggccccgctcagacggtccttaaaacgtctgaaaggccgttcctgccagagtccctgctacctgttacctccacccctatttagtcctagtggacagcctcgctcaccttccctgggatgacacttctggcggctgagatgagcgagcctctctgggctctgccgccgggtgtgggctgacctgcctacagctggggcctgataaggcagcagcaaaagggtggaggggaggcagtgttgaagctggggcaagtaattttccccaatttacagggaaaaaccgaaattcagaaaagtttaatgtcacccaggggctggagcccagacctctggcagctctcactttcacaatgcccttgggctgactaggctgcagaggggtttcaccccaaccccagggcacctcaagtgtccccaccaaaccttcctaacacctgtccactaagctgtactaggcccttgcaactgacctatgggacctgaggcctggcccctcatggctcctgtcaccaggtctcaggtcagggtccagcaggccctgagctgacgtgtggagccagagccacccaatcccgtagggacaggtttcacaacttcccggatggggctgtggtgggtcacagtgcagcctccagccagaaggatggggtggctcccactcctgctgcttctgactcaatgcttaggggtccctgggcagcgctcgccattgaatgacttccaagtgctccggggcacagagctacagcacctgctacatgcggtggtgcccgggccttggcaggaggatgtggcagatgctgaagagtgtgctggtcgctgtgggcccttaatggactgccgggccttccactacaacgtgagcagccatggttgccaactgctgccatggactcaacactcgccccacacgaggctgcggcgttctgggcgctgtgacctcttccagaagaaagactacgtacggacctgcatcatgaacaatggggttgggtaccggggcaccatggccacgaccgtgggtggcctgccctgccaggcttggagccacaagttcccgaatgatcacaagtacacgcccactctccggaatggcctggaagagaacttctgccgtaaccctgatggcgaccccggaggtccttggtgctacacaacagaccctgctgtgcgcttccagagctgcggcatcaaatcctgccgggaggccgcgtgtgtctggtgcaatggcgaggaataccgcggcgcggtagaccgcacggagtcagggcgcgagtgccagcgctgggatcttcagcacccgcaccagcaccccttcgagccgggcaagttcctcgaccaaggtctggacgacaactattgccggaatcctgacggctccgagcggccatggtgctacactacggatccgcagatcgagcgagagttctgtgacctcccccgctgcgggtccgaggcacagccccgccaagaggccacaactgtcagctgcttccgcgggaagggtgagggctaccggggcacagccaataccaccactgcgggcgtaccttgccagcgttgggacgcgcaaatccctcatcagcaccgatttacgccagaaaaatacgcgtgcaagtgaggtggggggggggggcgggcgttgggacgtgctgctgcgggtgagacgggaggaaggtagtcacgggctcaaggctggaggctggcgggctagggctgagtggagcgcctgcttagagaccttcgggagaacttctgccggaaccccgacggctcagaggcgccctggtgcttcacactgcggcccggcatgcgcgcggccttttgctaccagatccggcgttgtacagacgacgtgcggccccagggtgaggcccaagcttgggggctacagagccgggctggaagcctggaaccggagggccggggcgaggtctcggcctgatggctgcccgcacccgccacagactgctaccacggcgcaggggagcagtaccgcggcacggtcagcaagacccgcaagggtgtccagtgccagcgctggtccgctgagacgccgcacaagccgcagttcacgtttacctccgaaccgcatgcacaactggaggagaacttctgccggaacccagatggggatagccatgggccctggtgctacacgatggacccaaggaccccattcgactactgtgccctgcgacgctgcgctgatgaccagccgccatcaatcctggaccccccagaccaggtgcagtttgagaagtgtggcaagagggtggatcggctggatcagcggcgttccaagctgcgcgtggttgggggccatccgggcaactcaccctggacagtcagcttgcggaatcggcagggccagcatttctgcggggggtctctagtgaaggagcagtggatactgactgcccggcagtgcttctcctcctgccatatgcctctcacgggctatgaggtatggttgggcaccctgttccagaacccacagcatggagagccaagcctacagcgggtcccagtagccaagatggtgtgtgggccctcaggctcccagcttgtcctgctcaagctggagagatctgtgaccctgaaccagcgtgtggccctgatctgcctgccccctgaatggtatgtggtgcctccagggaccaagtgtgagattgcaggctggggtgagaccaaaggtacgggtaatgacacagtcctaaatgtggccttgctgaatgtcatctccaaccaggagtgtaacatcaagcaccgaggacgtgtgcgggagagtgagatgtgcactgagggactgttggcccctgtgggggcctgtgagggtgactacgggggcccacttgcctgctttacccacaactgctgggtcctggaaggaattataatccccaaccgagtatgcgcaaggtcccgctggccagctgtcttcacgcgtgtctctgtgtttgtggactggattcacaaggtcatgagactgggttaggcccagccttgatgccatatgccttggggaggacaaaacttcttgtcagacataaagccatgtttcctctttatgcctgtaaaaaaaaaact

SEQ ID NO: 280620 - DNA, 3473 bp, Homo sapiens
ccagcctccgctaggggaccccctccatggcttcccaccgggttgttccaggcctcagcttcgccgaaaggcctcaccacctccgacctccgcctgccctggggatgctcccagccctgctgcggcagaacgcgacatgctaaccggaatccctaggccgcctgtctcctacccatacttagaggccccgctcagacggtccttaaaacgtctgaaaggccgttcctgccagagtccctgctacctgttacctccacccctatttagtcctagtggacagcctcgctcaccttccctgggatgacacttctggcggctgagatgagcgagcctctctgggctctgccgccgggtgtgggctgacctgcctacagctggggcctgataaggcagcagcaaaagggtggaggggaggcagtgttgaagctggggcaagtaattttccccaatttacagggaaaaaccgaaattcagaaaagtttaatgtcacccaggggctggagcccagacctctggcagctctcactttcacaatgcccttgggctgactaggctgcagaggggtttcaccccaaccccagggcacctcaagtgtccccaccaaaccttcctaacacctgtccactaagctgtactaggcccttgcaactgacctatgggacctgaggcctggcccctcatggctcctgtcaccaggtctcaggtcagggtccagcaggccctgagctgacgtgtggagccagagccacccaatcccgtagggacaggtttcacaacttcccggatggggctgtggtgggtcacagtgcagcctccagccagaaggatggggtggctcccactcctgctgcttctgactcaatgcttaggggtccctgggcagcgctcgccattgaatgacttccaagtgctccggggcacagagctacagcacctgctacatgcggtggtgcccgggccttggcaggaggatgtggcagatgctgaagagtgtgctggtcgctgtgggcccttaatggactgccgggccttccactacaacgtgagcagccatggttgccaactgctgccatggactcaacactcgccccacacgaggctgcggcgttctgggcgctgtgacctcttccagaagaaagactacgtacggacctgcatcatgaacaatggggttgggtaccggggcaccatggccacgaccgtgggtggcctgccctgccaggcttggagccacaagttcccgaatgatcacaagtacacgcccactctccggaatggcctggaagagaacttctgccgtaaccctgatggcgaccccggaggtccttggtgctacacaacagaccctgctgtgcgcttccagagctgcggcatcaaatcctgccgggaggccgcgtgtgtctggtgcaatggcgaggaataccgcggcgcggtagaccgcacggagtcagggcgcgagtgccagcgctgggatcttcagcacccgcaccagcaccccttcgagccgggcaagttcctcgaccaaggtctggacgacaactattgccggaatcctgacggctccgagcggccatggtgctacactacggatccgcagatcgagcgagagttctgtgacctcccccgctgcgggtccgaggcacagccccgccaagaggccacaactgtcagctgcttccgcgggaagggtgagggctaccggggcacagccaataccaccactgcgggcgtaccttgccagcgttgggacgcgcaaatccctcatcagcaccgatttacgccagaaaaatacgcgtgcaagtgaggtggggggggggggcgggcgttgggacgtgctgctgcgggtgagacgggaggaaggtagtcacgggctcaaggctggaggctggcgggctagggctgagtggagcgcctgcttagagaccttcgggagaacttctgccggaaccccgacggctcagaggcgccctggtgcttcacactgcggcccggcatgcgcgcggccttttgctaccagatccggcgttgtacagacgacgtgcggccccaggactgctaccacggcgcaggggagcagtaccgcggcacggtcagcaagacccgcaagggtgtccagtgccagcgctggtccgctgagacgccgcacaagccgcagttcacgtttacctccgaaccgcatgcacaactggaggagaacttctgccggaacccagatggggatagccatgggccctggtgctacacgatggacccaaggaccccattcgactactgtgccctgcgacgctgcgctgatgaccagccgccatcaatcctggaccccccagaccaggtgcagtttgagaagtgtggcaagagggtggatcggctggatcagcggcgttccaagctgcgcgtggttgggggccatccgggcaactcaccctggacagtcagcttgcggaatcggtgaggcacaactgcctgtctcccacagagaggagctgaggttgtgtcctctgtggttatcccactgggggctgggaatctatccctgcccccagaggtcctagccagaagatggcaggtctagcatctgtcccaggagtctgttacctgtcctaattccccactcctctaggcagggccagcatttctgcggggggtctctagtgaaggagcagtggatactgactgcccggcagtgcttctcctcctggtgagcctcccttgtgtttggggacccagtctcatcccaccttcccccttccccaggcaagctaacaagtgagccttggggcaatggactgagagtcacaaatgacctagcagagcttctctcccagccatatgcctctcacgggctatgaggtatggttgggcaccctgttccagaacccacagcatggagagccaagcctacagcgggtcccagtagccaagatggtgtgtgggccctcaggctcccagcttgtcctgctcaagctggagagatctgtgaccctgaaccagcgtgtggccctgatctgcctgccccctgaatggtatgtggtgcctccagggaccaagtgtgagattgcaggctggggtgagaccaaaggtacgggtaatgacacagtcctaaatgtggccttgctgaatgtcatctccaaccaggagtgtaacatcaagcaccgaggacgtgtgcgggagagtgagatgtgcactgagggactgttggcccctgtgggggcctgtgagggtgactacgggggcccacttgcctgctttacccacaactgctgggtcctggaaggaattataatccccaaccgagtatgcgcaaggtcccgctggccagctgtcttcacgcgtgtctctgtgtttgtggactggattcacaaggtcatgagactgggttaggcccagccttgatgccatatgccttggggaggacaaaacttcttgtcagacataaagccatgtttcctctttatgcctgtaaaaaaaaaact

SEQ ID NO: 280621 - DNA, 3346 bp, Homo sapiens
ccagcctccgctaggggaccccctccatggcttcccaccgggttgttccaggcctcagcttcgccgaaaggcctcaccacctccgacctccgcctgccctggggatgctcccagccctgctgcggcagaacgcgacatgctaaccggaatccctaggccgcctgtctcctacccatacttagaggccccgctcagacggtccttaaaacgtctgaaaggccgttcctgccagagtccctgctacctgttacctccacccctatttagtcctagtggacagcctcgctcaccttccctgggatgacacttctggcggctgagatgagcgagcctctctgggctctgccgccgggtgtgggctgacctgcctacagctggggcctgataaggcagcagcaaaagggtggaggggaggcagtgttgaagctggggcaagtaattttccccaatttacagggaaaaaccgaaattcagaaaagtttaatgtcacccaggggctggagcccagacctctggcagctctcactttcacaatgcccttgggctgactaggctgcagaggggtttcaccccaaccccagggcacctcaagtgtccccaccaaaccttcctaacacctgtccactaagctgtactaggcccttgcaactgacctatgggacctgaggcctggcccctcatggctcctgtcaccaggtctcaggtcagggtccagcaggccctgagctgacgtgtggagccagagccacccaatcccgtagggacaggtttcacaacttcccggatggggctgtggtgggtcacagtgcagcctccagccagaaggatggggtggctcccactcctgctgcttctgactcaatgcttaggggtccctgggcagcgctcgccattgaatgacttccaagtgctccggggcacagagctacagcacctgctacatgcggtggtgcccgggccttggcaggaggatgtggcagatgctgaagagtgtgctggtcgctgtgggcccttaatggactgccgggccttccactacaacgtgagcagccatggttgccaactgctgccatggactcaacactcgccccacacgaggctgcggcgttctgggcgctgtgacctcttccagaagaaagactacgtacggacctgcatcatgaacaatggggttgggtaccggggcaccatggccacgaccgtgggtggcctgccctgccaggcttggagccacaagttcccgaatgatcacaagtacacgcccactctccggaatggcctggaagagaacttctgccgtaaccctgatggcgaccccggaggtccttggtgctacacaacagaccctgctgtgcgcttccagagctgcggcatcaaatcctgccgggaggccgcgtgtgtctggtgcaatggcgaggaataccgcggcgcggtagaccgcacggagtcagggcgcgagtgccagcgctgggatcttcagcacccgcaccagcaccccttcgagccgggcaagttcctcgaccaaggtctggacgacaactattgccggaatcctgacggctccgagcggccatggtgctacactacggatccgcagatcgagcgagagttctgtgacctcccccgctgcgggtccgaggcacagccccgccaagaggccacaactgtcagctgcttccgcgggaagggtgagggctaccggggcacagccaataccaccactgcgggcgtaccttgccagcgttgggacgcgcaaatccctcatcagcaccgatttacgccagaaaaatacgcgtgcaagtgaggtggggggggggggcgggcgttgggacgtgctgctgcgggtgagacgggaggaaggtagtcacgggctcaaggctggaggctggcgggctagggctgagtggagcgcctgcttagagaccttcgggagaacttctgccggaaccccgacggctcagaggcgccctggtgcttcacactgcggcccggcatgcgcgcggccttttgctaccagatccggcgttgtacagacgacgtgcggccccaggactgctaccacggcgcaggggagcagtaccgcggcacggtcagcaagacccgcaagggtgtccagtgccagcgctggtccgctgagacgccgcacaagccgcagttcacgtttacctccgaaccgcatgcacaactggaggagaacttctgccggaacccagatggggatagccatgggccctggtgctacacgatggacccaaggaccccattcgactactgtgccctgcgacgctgcgctgatgaccagccgccatcaatcctggaccccccagaccaggtgcagtttgagaagtgtggcaagagggtggatcggctggatcagcggcgttccaagctgcgcgtggttgggggccatccgggcaactcaccctggacagtcagcttgcggaatcggtgaggcacaactgcctgtctcccacagagaggagctgaggttgtgtcctctgtggttatcccactgggggctgggaatctatccctgcccccagaggtcctagccagaagatggcaggtctagcatctgtcccaggagtctgttacctgtcctaattccccactcctctaggcagggccagcatttctgcggggggtctctagtgaaggagcagtggatactgactgcccggcagtgcttctcctcctgccatatgcctctcacgggctatgaggtatggttgggcaccctgttccagaacccacagcatggagagccaagcctacagcgggtcccagtagccaagatggtgtgtgggccctcaggctcccagcttgtcctgctcaagctggagagatctgtgaccctgaaccagcgtgtggccctgatctgcctgccccctgaatggtatgtggtgcctccagggaccaagtgtgagattgcaggctggggtgagaccaaaggtacgggtaatgacacagtcctaaatgtggccttgctgaatgtcatctccaaccaggagtgtaacatcaagcaccgaggacgtgtgcgggagagtgagatgtgcactgagggactgttggcccctgtgggggcctgtgagggtgactacgggggcccacttgcctgctttacccacaactgctgggtcctggaaggaattataatccccaaccgagtatgcgcaaggtcccgctggccagctgtcttcacgcgtgtctctgtgtttgtggactggattcacaaggtcatgagactgggttaggcccagccttgatgccatatgccttggggaggacaaaacttcttgtcagacataaagccatgtttcctctttatgcctgtaaaaaaaaaact

SEQ ID NO: 280622 - DNA, 3219 bp, Homo sapiens
  misc_feature (2961)..(2961): n is a, c, g, or t
  misc_feature (3005)..(3005): n is a, c, g, or t
  misc_feature (3010)..(3011): n is a, c, g, or t
  misc_feature (3095)..(3096): n is a, c, g, or t
  misc_feature (3100)..(3100): n is a, c, g, or t
  misc_feature (3102)..(3102): n is a, c, g, or t
  misc_feature (3124)..(3124): n is a, c, g, or t
  misc_feature (3127)..(3127): n is a, c, g, or t
  misc_feature (3149)..(3149): n is a, c, g, or t
  misc_feature (3155)..(3155): n is a, c, g, or t
  misc_feature (3158)..(3158): n is a, c, g, or t
  misc_feature (3188)..(3189): n is a, c, g, or t
  misc_feature (3194)..(3195): n is a, c, g, or t
  misc_feature (3204)..(3204): n is a, c, g, or t
ccagcctccgctaggggaccccctccatggcttcccaccgggttgttccaggcctcagcttcgccgaaaggcctcaccacctccgacctccgcctgccctggggatgctcccagccctgctgcggcagaacgcgacatgctaaccggaatccctaggccgcctgtctcctacccatacttagaggccccgctcagacggtccttaaaacgtctgaaaggccgttcctgccagagtccctgctacctgttacctccacccctatttagtcctagtggacagcctcgctcaccttccctgggatgacacttctggcggctgagatgagcgagcctctctgggctctgccgccgggtgtgggctgacctgcctacagctggggcctgataaggcagcagcaaaagggtggaggggaggcagtgttgaagctggggcaagtaattttccccaatttacagggaaaaaccgaaattcagaaaagtttaatgtcacccaggggctggagcccagacctctggcagctctcactttcacaatgcccttgggctgactaggctgcagaggggtttcaccccaaccccagggcacctcaagtgtccccaccaaaccttcctaacacctgtccactaagctgtactaggcccttgcaactgacctatgggacctgaggcctggcccctcatggctcctgtcaccaggtctcaggtcagggtccagcaggccctgagctgacgtgtggagccagagccacccaatcccgtagggacaggtttcacaacttcccggatggggctgtggtgggtcacagtgcagcctccagccagaaggatggggtggctcccactcctgctgcttctgactcaatgcttaggggtccctgggcagcgctcgccattgaatgacttccaagtgctccggggcacagagctacagcacctgctacatgcggtggtgcccgggccttggcaggaggatgtggcagatgctgaagagtgtgctggtcgctgtgggcccttaatggactgccgggccttccactacaacgtgagcagccatggttgccaactgctgccatggactcaacactcgccccacacgaggctgcggcgttctgggcgctgtgacctcttccagaagaaagactacgtacggacctgcatcatgaacaatggggttgggtaccggggcaccatggccacgaccgtgggtggcctgccctgccaggcttggagccacaagttcccgaatgatcacaagtacacgcccactctccggaatggcctggaagagaacttctgccgtaaccctgatggcgaccccggaggtccttggtgctacacaacagaccctgctgtgcgcttccagagctgcggcatcaaatcctgccgggaggccgcgtgtgtctggtgcaatggcgaggaataccgcggcgcggtagaccgcacggagtcagggcgcgagtgccagcgctgggatcttcagcacccgcaccagcaccccttcgagccgggcaagttcctcgaccaaggtctggacgacaactattgccggaatcctgacggctccgagcggccatggtgctacactacggatccgcagatcgagcgagagttctgtgacctcccccgctgcgggtccgaggcacagccccgccaagaggccacaactgtcagctgcttccgcgggaagggtgagggctaccggggcacagccaataccaccactgcgggcgtaccttgccagcgttgggacgcgcaaatccctcatcagcaccgatttacgccagaaaaatacgcgtgcaagtgaggtggggggggggggcgggcgttgggacgtgctgctgcgggtgagacgggaggaaggtagtcacgggctcaaggctggaggctggcgggctagggctgagtggagcgcctgcttagagaccttcgggagaacttctgccggaaccccgacggctcagaggcgccctggtgcttcacactgcggcccggcatgcgcgcggccttttgctaccagatccggcgttgtacagacgacgtgcggccccaggactgctaccacggcgcaggggagcagtaccgcggcacggtcagcaagacccgcaagggtgtccagtgccagcgctggtccgctgagacgccgcacaagccgcagttcacgtttacctccgaaccgcatgcacaactggaggagaacttctgccggaacccagatggggatagccatgggccctggtgctacacgatggacccaaggaccccattcgactactgtgccctgcgacgctgcgctgatgaccagccgccatcaatcctggaccccccagaccaggtgcagtttgagaagtgtggcaagagggtggatcggctggatcagcggcgttccaagctgcgcgtggttgggggccatccgggcaactcaccctggacagtcagcttgcggaatcggcagggccagcatttctgcggggggtctctagtgaaggagcagtggatactgactgcccggcagtgcttctcctcctggtgagcctcccttgtgtttggggacccagtctcatcccaccttcccccttccccaggcaagctaacaagtgagccttggggcaatggactgagagtcacaaatgacctagcagagcttctctcccagccatatgcctctcacgggctatgaggtatggttgggcaccctgttccagaacccacagcatggagagccaagcctacagcgggtcccagtagccaagatggtgtgtgggccctcaggctcccagcttgtcctgctcaagctggagagatctgtgaccctgaaccagcgtgtggccctgatctgcctgccccctgaatggtatgtggtgcctccagggaccaagtgtgagattgcaggctggggtgagaccaaaggtaagagcacagtgcacaggactgctggtccccgtggacgatcaggcgaaaccngccctgctggtcctcctggtcctggaccccctggtctccaggtnccccnngccctggcatcgacatgtacgcctttgctgcttaggcccgagagagaagggccccgaccccctgcagtacatgcgggccgaccnngcangncggtgcctgagacagcatgacnccnaggtggatgccacactcaagtncctcancanccagattgagagcattcgcaggcccgaggnntccgnnagccctgcntggacttgcgacttg

SEQ ID NO: 280623 - DNA, 3174 bp, Homo sapiens
ccagcctccgctaggggaccccctccatggcttcccaccgggttgttccaggcctcagcttcgccgaaaggcctcaccacctccgacctccgcctgccctggggatgctcccagccctgctgcggcagaacgcgacatgctaaccggaatccctaggccgcctgtctcctacccatacttagaggccccgctcagacggtccttaaaacgtctgaaaggccgttcctgccagagtccctgctacctgttacctccacccctatttagtcctagtggacagcctcgctcaccttccctgggatgacacttctggcggctgagatgagcgagcctctctgggctctgccgccgggtgtgggctgacctgcctacagctggggcctgataaggcagcagcaaaagggtggaggggaggcagtgttgaagctggggcaagtaattttccccaatttacagggaaaaaccgaaattcagaaaagtttaatgtcacccaggggctggagcccagacctctggcagctctcactttcacaatgcccttgggctgactaggctgcagaggggtttcaccccaaccccagggcacctcaagtgtccccaccaaaccttcctaacacctgtccactaagctgtactaggcccttgcaactgacctatgggacctgaggcctggcccctcatggctcctgtcaccaggtctcaggtcagggtccagcaggccctgagctgacgtgtggagccagagccacccaatcccgtagggacaggtttcacaacttcccggatggggctgtggtgggtcacagtgcagcctccagccagaaggatggggtggctcccactcctgctgcttctgactcaatgcttaggggtccctgggcagcgctcgccattgaatgacttccaagtgctccggggcacagagctacagcacctgctacatgcggtggtgcccgggccttggcaggaggatgtggcagatgctgaagagtgtgctggtcgctgtgggcccttaatggactgccgggccttccactacaacgtgagcagccatggttgccaactgctgccatggactcaacactcgccccacacgaggctgcggcgttctgggcgctgtgacctcttccagaagaaagactacgtacggacctgcatcatgaacaatggggttgggtaccggggcaccatggccacgaccgtgggtggcctgccctgccaggcttggagccacaagttcccgaatgatcacaagtacacgcccactctccggaatggcctggaagagaacttctgccgtaaccctgatggcgaccccggaggtccttggtgctacacaacagaccctgctgtgcgcttccagagctgcggcatcaaatcctgccgggaggccgcgtgtgtctggtgcaatggcgaggaataccgcggcgcggtagaccgcacggagtcagggcgcgagtgccagcgctgggatcttcagcacccgcaccagcaccccttcgagccgggcaagttcctcgaccaaggtctggacgacaactattgccggaatcctgacggctccgagcggccatggtgctacactacggatccgcagatcgagcgagagttctgtgacctcccccgctgcgggtccgaggcacagccccgccaagaggccacaactgtcagctgcttccgcgggaagggtgagggctaccggggcacagccaataccaccactgcgggcgtaccttgccagcgttgggacgcgcaaatccctcatcagcaccgatttacgccagaaaaatacgcgtgcaagtgaggtggggggggggggcgggcgttgggacgtgctgctgcgggtgagacgggaggaaggtagtcacgggctcaaggctggaggctggcgggctagggctgagtggagcgcctgcttagagaccttcgggagaacttctgccggaaccccgacggctcagaggcgccctggtgcttcacactgcggcccggcatgcgcgcggccttttgctaccagatccggcgttgtacagacgacgtgcggccccaggactgctaccacggcgcaggggagcagtaccgcggcacggtcagcaagacccgcaagggtgtccagtgccagcgctggtccgctgagacgccgcacaagccgcagttcacgtttacctccgaaccgcatgcacaactggaggagaacttctgccggaacccagatggggatagccatgggccctggtgctacacgatggacccaaggaccccattcgactactgtgccctgcgacgctgcgctgatgaccagccgccatcaatcctggaccccccagaccaggtgcagtttgagaagtgtggcaagagggtggatcggctggatcagcggcgttccaagctgcgcgtggttgggggccatccgggcaactcaccctggacagtcagcttgcggaatcggcagggccagcatttctgcggggggtctctagtgaaggagcagtggatactgactgcccggcagtgcttctcctcctgccatatgcctctcacgggctatgaggtatggttgggcaccctgttccagaacccacagcatggagagccaagcctacagcgggtcccagtagccaagatggtgtgtgggccctcaggctcccagcttgtcctgctcaagctggagagatctgtgaccctgaaccagcgtgtggccctgatctgcctgccccctgaatggtatgtggtgcctccagggaccaagtgtgagattgcaggctggggtgagaccaaaggtacgggtaatgacacagtcctaaatgtggccttgctgaatgtcatctccaaccaggagtgtaacatcaagcaccgaggacgtgtgcgggagagtgagatgtgcactgagggactgttggcccctgtgggggcctgtgagggtgactacgggggcccacttgcctgctttacccacaactgctgggtcctggaaggaattataatccccaaccgagtatgcgcaaggtcccgctggccagctgtcttcacgcgtgtctctgtgtttgtggactggattcacaaggtcatgagactgggttaggcccagccttgatgccatatgccttggggaggacaaaacttcttgtcagacataaagccatgtttcctctttatgcctgtaaaaaaaaaact

SEQ ID NO: 280624 - DNA, 3153 bp, Homo sapiens
ccagcctccgctaggggaccccctccatggcttcccaccgggttgttccaggcctcagcttcgccgaaaggcctcaccacctccgacctccgcctgccctggggatgctcccagccctgctgcggcagaacgcgacatgctaaccggaatccctaggccgcctgtctcctacccatacttagaggccccgctcagacggtccttaaaacgtctgaaaggccgttcctgccagagtccctgctacctgttacctccacccctatttagtcctagtggacagcctcgctcaccttccctgggatgacacttctggcggctgagatgagcgagcctctctgggctctgccgccgggtgtgggctgacctgcctacagctggggcctgataaggcagcagcaaaagggtggaggggaggcagtgttgaagctggggcaagtaattttccccaatttacagggaaaaaccgaaattcagaaaagtttaatgtcacccaggggctggagcccagacctctggcagctctcactttcacaatgcccttgggctgactaggctgcagaggggtttcaccccaaccccagggcacctcaagtgtccccaccaaaccttcctaacacctgtccactaagctgtactaggcccttgcaactgacctatgggacctgaggcctggcccctcatggctcctgtcaccaggtctcaggtcagggtccagcaggccctgagctgacgtgtggagccagagccacccaatcccgtagggacaggtttcacaacttcccggatggggctgtggtgggtcacagtgcagcctccagccagaaggatggggtggctcccactcctgctgcttctgactcaatgcttaggggtccctgggcagcgctcgccattgaatgacttccaagtgctccggggcacagagctacagcacctgctacatgcggtggtgcccgggccttggcaggaggatgtggcagatgctgaagagtgtgctggtcgctgtgggcccttaatggactgccgggccttccactacaacgtgagcagccatggttgccaactgctgccatggactcaacactcgccccacacgaggctgcggcgttctgggcgctgtgacctcttccagaagaaagactacgtacggacctgcatcatgaacaatggggttgggtaccggggcaccatggccacgaccgtgggtggcctgccctgccaggcttggagccacaagttcccgaatgatcacaagtacacgcccactctccggaatggcctggaagagaacttctgccgtaaccctgatggcgaccccggaggtccttggtgctacacaacagaccctgctgtgcgcttccagagctgcggcatcaaatcctgccgggaggccgcgtgtgtctggtgcaatggcgaggaataccgcggcgcggtagaccgcacggagtcagggcgcgagtgccagcgctgggatcttcagcacccgcaccagcaccccttcgagccgggcaagttcctcgaccaaggtctggacgacaactattgccggaatcctgacggctccgagcggccatggtgctacactacggatccgcagatcgagcgagagttctgtgacctcccccgctgcgggtccgaggcacagccccgccaagaggccacaactgtcagctgcttccgcgggaagggtgagggctaccggggcacagccaataccaccactgcgggcgtaccttgccagcgttgggacgcgcaaatccctcatcagcaccgatttacgccagaaaaatacgcgtgcaaagaccttcgggagaacttctgccggaaccccgacggctcagaggcgccctggtgcttcacactgcggcccggcatgcgcgcggccttttgctaccagatccggcgttgtacagacgacgtgcggccccagggtgaggcccaagcttgggggctacagagccgggctggaagcctggaaccggagggccggggcgaggtctcggcctgatggctgcccgcacccgccacagactgctaccacggcgcaggggagcagtaccgcggcacggtcagcaagacccgcaagggtgtccagtgccagcgctggtccgctgagacgccgcacaagccgcagttcacgtttacctccgaaccgcatgcacaactggaggagaacttctgccggaacccagatggggatagccatgggccctggtgctacacgatggacccaaggaccccattcgactactgtgccctgcgacgctgcgctgatgaccagccgccatcaatcctggaccccccagaccaggtgcagtttgagaagtgtggcaagagggtggatcggctggatcagcggcgttccaagctgcgcgtggttgggggccatccgggcaactcaccctggacagtcagcttgcggaatcggcagggccagcatttctgcggggggtctctagtgaaggagcagtggatactgactgcccggcagtgcttctcctcctgccatatgcctctcacgggctatgaggtatggttgggcaccctgttccagaacccacagcatggagagccaagcctacagcgggtcccagtagccaagatggtgtgtgggccctcaggctcccagcttgtcctgctcaagctggagagatctgtgaccctgaaccagcgtgtggccctgatctgcctgccccctgaatggtatgtggtgcctccagggaccaagtgtgagattgcaggctggggtgagaccaaaggtacgggtaatgacacagtcctaaatgtggccttgctgaatgtcatctccaaccaggagtgtaacatcaagcaccgaggacgtgtgcgggagagtgagatgtgcactgagggactgttggcccctgtgggggcctgtgagggtgactacgggggcccacttgcctgctttacccacaactgctgggtcctggaaggaattataatccccaaccgagtatgcgcaaggtcccgctggccagctgtcttcacgcgtgtctctgtgtttgtggactggattcacaaggtcatgagactgggttaggcccagccttgatgccatatgccttggggaggacaaaacttcttgtcagacataaagccatgtttcctctttatgcctgtaaaaaaaaaact

SEQ ID NO: 280625 - DNA, 1689 bp, Homo sapiens
ttgttcacgccccattaccgcccccaggttcctcgaccaaggtctggacgacaactattgccggaatcctgacggctccgagcggccatggtgctacactacggatccgcagatcgagcgagagttctgtgacctcccccgctgcgggtccgaggcacagccccgccaagaggccacaactgtcagctgcttccgcgggaagggtgagggctaccggggcacagccaataccaccactgcgggcgtaccttgccagcgttgggacgcgcaaatccctcatcagcaccgatttacgccagaaaaatacgcgtgcaagtgaggtggggggggggggcgggcgttgggacgtgctgctgcgggtgagacgggaggaaggtagtcacgggctcaaggctggaggctggcgggctagggctgagtggagcgcctgcttagagaccttcgggagaacttctgccggaaccccgacggctcagaggcgccctggtgcttcacactgcggcccggcatgcgcgcggccttttgctaccagatccggcgttgtacagacgacgtgcggccccaggactgctaccacggcgcaggggagcagtaccgcggcacggtcagcaagacccgcaagggtgtccagtgccagcgctggtccgctgagacgccgcacaagccgcagttcacgtttacctccgaaccgcatgcacaactggaggagaacttctgccggaacccagatggggatagccatgggccctggtgctacacgatggacccaaggaccccattcgactactgtgccctgcgacgctgcgctgatgaccagccgccatcaatcctggaccccccagaccaggtgcagtttgagaagtgtggcaagagggtggatcggctggatcagcggcgttccaagctgcgcgtggttgggggccatccgggcaactcaccctggacagtcagcttgcggaatcggcagggccagcatttctgcggggggtctctagtgaaggagcagtggatactgactgcccggcagtgcttctcctcctgccatatgcctctcacgggctatgaggtatggttgggcaccctgttccagaacccacagcatggagagccaagcctacagcgggtcccagtagccaagatggtgtgtgggccctcaggctcccagcttgtcctgctcaagctggagagatctgtgaccctgaaccagcgtgtggccctgatctgcctgccccctgaatggtatgtggtgcctccagggaccaagtgtgagattgcaggctggggtgagaccaaaggtacgggtaatgacacagtcctaaatgtggccttgctgaatgtcatctccaaccaggagtgtaacatcaagcaccgaggacgtgtgcgggagagtgagatgtgcactgagggactgttggcccctgtgggggcctgtgagggtgactacgggggcccacttgcctgctttacccacaactgctgggtcctggaaggaattataatccccaaccgagtatgcgcaaggtcccgctggccagctgtcttcacgcgtgtctctgtgtttgtggactggattcacaaggtcatgagactgggttaggcccagccttgatgccatatgccttggggaggacaaaacttcttgtcagacataaagccatgtttcctctttatgcctgtaaaaaaaaaact

SEQ ID NO: 280626 - DNA, 454 bp, Homo sapiens
taagagcacagtgcacaggactgctggtggccaggaggcccagccctggatcttcctgcaggaccctctccctctccccattcccctcactgcaggtacgggtaatgacacagtcctaaatgtggccttgctgaatgtcatctccaaccaggagtgtaacatcaagcaccgaggacgtgtgcgggagagtgagatgtgcactgagggactgttggcccctgtgggggcctgtgaggttggtggcagggccctgggccagccctggaagggtatggggggctagaaatgaactattttatcatgaagcaggctagtcattgctgtggcccggggccctcatcagttctcctacctgccagggtgactacgggggcccacttgcctgctttacccacaactgctgggtcctggaaggaattataatccccaaccgagtatgcgcaaggtcccgctg

SEQ ID NO: 280627 - DNA, 382 bp, Homo sapiens
ctacctcctgatcctcaggcctgctaccagacccggggaccagggacaaacagcacgatagggtagggcaggaaaaagtggcccctcagtcctgttggggacggccagacctacttgattatgtgggccctggatccctctcctttccctgggctttgagaactacttagcatccatccctgacctagactgcttctgggctacccctgctctccactgaggtttcctcgtctgtgcaggcacatcacacaccggacaccaggacccaagcccagcagacacaggatctgctaacgcagctggcagctgaggtggctatcgatgaaagctggaaaggaggaggcccagtcttccaagtatcgggatactctagaacagcatg

SEQ ID NO: 280628 - DNA, 3533 bp, Homo sapiens
aggcgcagaggaggctagcgttccttgctgcctcgccccgcggcctctaggagacaggggccacggggagagcacagccacccggcgcgaagagccctctgtaccccgcttcctcttgaggccctcggaccgtccaggaaatgtctgggagcccgcctgcggagggcatagcgccgaccctcgctccccgcccaggacccgaatgaacctggagagcggatgccagcagtggccgaggcgctaggacaggaaggaccgccagacctctcaagatcagccttcctcgccaccgttctcacctctttgtccgctgccttctcctcaatgcctagcagcgcgtacaggtccatctgtaagagctccttggtcactgccatggttccggcctgacggattcgtactacaactcccaagagtctaagcgcgcgtgaggactgcaggctccgagcggcgcctagccctctgggaattgtgttctgggtcaggcttgactgactctgagggaggccggcagtcgtgaatgaactacgactcccagcagcccccgttgccgccgctgccgtacgctggctgcaggagagcgtccggattccctgctctaggtcgcggcgggacagtgccagtgggcgtgtgggcggggcggggcagggcagggaagggaagggcggagctggggtgagggtccaaggggcccaggacttggccggcgtgatctcagctctgcagaccctgcggtgctgggagccaccatggagagtaggtgctacggctgcgctgtcaagttcaccctcttcaagaaggaggcgagtcttccctccccgagggctgcagggccagggaggagaggagggaaaagcgcgggacttaacgtccaaagacttggtcttacggctcctttccagctgtgtggttttgatgaagtcattgatcctcagtttccatttctgtaaaatggggctaacattctctcgctttcagggtttatgtgagggtccactgaagtgctttaggtgagagttccctataaactgtaaagcgcgctgccgtcgtttttgcaaagctactcttttctgtcggcccagtgtagcatctggcggttttcttctctccaccctgctcctccgaagcgcggtgtccatcacaccaagcccgttactccctctgctctgaaatcttccccatcccgcagcctgcccttctccaggtcgctggagttagattaccacacttcctcctgcttccggggcaccatggtgaaggctgactgtcctgtccctatcacagacctgccagattcctctggtaaactgcaggttccctctgcctcagttgtggccagggattctgaccaggagatgatgggaactagatggagtaaattagtgtcacgcaggaaggcaggaccgtgcagcattcaccaacctggattttggagtcagcgttcaaatctgagctctgctgtcttattgaggcggtgaccttggtttggataagttatgtaacctctctggccctctcaaaataaggataatcacggttggcatcaagattaagtaaaataatgtgtgtaaattgtaaggaataaatcacatgatgaatgttaagtactgggtttagtgcctggcacatagtaagtgcttaataaatggaggctattgttagcccatcctgagccaagcctccctccatctctgcaagagcagaggaggcatcggctctgccctgtctctctgattctcctttgtggaagagtcagtggcctgaaatactgggctttatctatctgtcttctacatccctgggtcagggaattgaagacagggtagaaagcatgggaattttgtataaaccttcatttggcttgaataaggtactggaaaccgaggaattgctttactcaccatccctaggccttaggggccccactcctcttcttcctcccagcagctggtcataacttcagtgacttctctctgtgtgtgcttggagagtccctgggagcagcctgcaggggcgggtgagagggggatctcccgcttcatgtttcttgtagtacggctgtaagaattgtggcagggccttctgttcaggctgcctaagcttcagtgcagcagtgcctcggactgggaacacccaacagaaagtctgcaagcaatgccatgaggtcctgaccagagggtcttctgccaatgcctccaagtggtcaccacctcagaactataagaagcgtgtggcagccttggaagccaagcaaaagcccagcacttcccagagccagggactgacacgacaagaccagatgattgctgagcgcctagcacgactccgccaggagaacaagcccaagttagtcccctcacaggcagagatagaggcacggctggctgccctaaaggatgaacgtcagggttccatcccttccacccaggaaatggaggcacgacttgcagcgttgcagggcagagttctaccttctcaaaccccccagccggcacatcacacaccggacaccaggacccaagcccagcagacacaggatctgctaacgcagctggcagctgaggtggctatcgatgaaagctggaaaggaggaggcccagctgcctctctccagaatgatctcaaccagggtggcccagggagcactaattccaagaggcaggccaactggtccttggaggaggagaagagcagactgctggctgaggcagcacttgagttgcgggaggagaacacgaggcaggaacggattctggccctggccaagcgactagccatgctgcggggacaggaccccgagagagtgaccctccaggactatcgcctcccagacagtgatgacgacgaggatgaggagacagccatccaaagagtcctgcagcagctcactgaagaagctgccctggatgaggcaagtggctttaacatccctgcagagcaggcttctcgaccctggacgcaaccccgcggggcagagcctgaggcccaggatgtggaccccaggcctgaggctgaggaagaggagctcccctggtgctgcatctgcaatgaggatgccaccctacgctgcgctggctgcgatggggacctcttctgtgcccgctgcttccgagagggccatgatgcctttgagcttaaagagcaccagacatctgcctactctcctccacgtgcaggccaagagcactgaagacaccctggtcctcccggaagggcagtcccacaggcagcggcacccatttctgggcccagccacaggacgtccgatgggagagcttgtctggctctactgatgatggataggccccttcctgagccttggtgtccctggaatgaggaaagattctccattcgagagaatgactgggagggaagaagtcggggccctcctattagaagcccagactggaagtgagaggcatgatggggagagaccagactgaatctacgggtgagccctgtaacctggctctagggcacaggcccctcccctggcacttagtgggtctaataaagtatgttgattcattggg

SEQ ID NO: 280629 - DNA, 2780 bp, Homo sapiens
aggcgcagaggaggctagcgttccttgctgcctcgccccgcggcctctaggagacaggggccacggggagagcacagccacccggcgcgaagagccctctgtaccccgcttcctcttgaggccctcggaccgtccaggaaatgtctgggagcccgcctgcggagggcatagcgccgaccctcgctccccgcccaggacccgaatgaacctggagagcggatgccagcagtggccgaggcgctaggacaggaaggaccgccagacctctcaagatcagccttcctcgccaccgttctcacctctttgtccgctgccttctcctcaatgcctagcagcgcgtacaggtccatctgtaagagctccttggtcactgccatggttccggcctgacggattcgtactacaactcccaagagtctaagcgcgcgtgaggactgcaggctccgagcggcgcctagccctctgggaattgtgttctgggtcaggcttgactgactctgagggaggccggcagtcgtgaatgaactacgactcccagcagcccccgttgccgccgctgccgtacgctggctgcaggagagcgtccggattccctgctctaggtcgcggcgggacagtgccagtgggcgtgtgggcggggcggggcagggcagggaagggaagggcggagctggggtgagggtccaaggggcccaggacttggccggcgtgatctcagctctgcagaccctgcggtgctgggagccaccatggagagtaggtgctacggctgcgctgtcaagttcaccctcttcaagaaggagtacggctgtaagaattgtggcagggccttctgttcaggctgcctaagcttcagtgcagcagtgcctcggactgggaacacccaacagaaagtctgcaagcaatgccatgaggtcctgaccagagggtcttctgccaatgcctccaagtggtcaccacctcagaactataagaagcgtgtggcagccttggaagccaagcaaaagcccagcacttcccagagccagggactgacacgacaagaccagatgattgctgagcgcctagcacgactccgccaggagaacaagcccaagttagtcccctcacaggcagagatagaggcacggctggctgccctaaaggatgaacgtcagggttccatcccttccacccaggaaatggaggcacgacttgcagcgttgcagggcagagttctaccttctcaaaccccccagccggcacatcacacaccggacaccaggacccaagcccagcagacacaggatctgctaacgcagctggcagctgaggtggctatcgatgaaagctggaaaggaggaggcccagctgcctctctccagaatgatctcaaccagggtggcccagggagcactaattccaagaggcaggccaactggtccttggaggaggagaagagcagactgctggctgaggcagcacttgagttgcgggaggagaacacgaggcaggaacggattctggccctggccaagcgactagccatgctgcggggacaggaccccgagagagtgaccctccaggactatcgcctcccagacagtgatgacgacgaggatgaggagacagccatccaaagagtcctgcagcagctcactgaagaagctgccctggatgaggcaagtggctttaacatccctgcagagcaggcttctcgaccctggacgcaaccccgcggggcagagcctgaggcccaggatgtggaccccaggcctgaggctgaggaagaggagctcccctggtgctgcatctgcaatgaggatgccaccctacgctgcgctggctgcgatggggacctcttctgtgcccgctgcttccgagagggccatgatgcctttgagcttaaagagcaccagacatctgcctactctcctccacgtgcaggccaagagcactgaagacaccctggtcctcccggaagggcagtcccacaggcagcggcacccatttctgggcccagccacaggacgtccgatgggagagcttgtctggctctactgatgatggataggccccttcctgagccttggtgtccctggaatgaggaaagattctccattcgagagaatgactgggagggaagaagtcggggccctcctattagaagcccagactggaagtgagaggcatgatggggagagaccagactgaatctacgggtgagccctgtaacctggctctagggcacaggcccctcccctggcacttagtgggtctaataaagtatgttgattcattgggaaaaaaaaaaaaaaaaaaaaaaaaaaaaaaaaacaaaaacaaaaaaacacacaccacacaacaaaactctctctctctctctctctctctctcgccgccgcgcgcgcggtgttgcgtctcccacaaaaagagcagcactctccacggtgtgtgggagagaacaaacacagagggggcgcgagtgtgtgtggtgaggagtacaaaaagagagaggaggggccccctctctgtgtgtgagattatttttggtgggcgccttctcctcgaaaagaggaggcttctttggagtggggtgtcttacgaggagaacgcgcggtcgatgtgtgtcccaccaaaaaaaaacagaaaagacgagggtgtgtggggaggtcacactcacacacactcgagaattatttattggggggagagggagagaggtgggcacacaagagaaggaggcgggagagtaaattatttgcgagcaacaagaggagaggcgacccacacggagttga

SEQ ID NO: 280630 - DNA, 2918 bp, Homo sapiens
aggcgcagaggaggctagcgttccttgctgcctcgccccgcggcctctaggagacaggggccacggggagagcacagccacccggcgcgaagagccctctgtaccccgcttcctcttgaggccctcggaccgtccaggaaatgtctgggagcccgcctgcggagggcatagcgccgaccctcgctccccgcccaggacccgaatgaacctggagagcggatgccagcagtggccgaggcgctaggacaggaaggaccgccagacctctcaagatcagccttcctcgccacgcgccaccatgcccggctaatttttgtatttttagtagagacggggtttcaccgtgttagccaggatggtctcgatctcctgacctcgtgatccgcccgtctcggcctcccaaagtgctgggattacaggcgtgagccaccgcgcccggccaaagctactcttttctgtcggcccagtgtagcatctggcggttttcttctctccaccctgctcctccgaagcgcggtgtccatcacaccaagcccgttactccctctgctctgaaatcttccccatcccgcagcctgcccttctccaggtcgctggagttagattaccacacttcctcctgcttccggggcaccatggtgaaggctgactgtcctgtccctatcacagacctgccagattcctctggtaaactgcaggttccctctgcctcagttgtggccagggattctgaccaggagatgatgggaactagatggagtaaattagtgtcacgcaggaaggcaggaccgtgcagcattcaccaacctggattttggagtcagcgttcaaatctgagctctgctgtcttattgaggcggtgaccttggtttggataagttatgtaacctctctggccctctcaaaataaggataatcacggttggcatcaagattaagtaaaataatgtgtgtaaattgtaaggaataaatcacatgatgaatgttaagtactgggtttagtgcctggcacatagtaagtgcttaataaatggaggctattgttagcccatcctgagccaagcctccctccatctctgcaagagcagaggaggcatcggctctgccctgtctctctgattctcctttgtggaagagtcagtggcctgaaatactgggctttatctatctgtcttctacatccctgggtcagggaattgaagacagggtagaaagcatgggaattttgtataaaccttcatttggcttgaataaggtactggaaaccgaggaattgctttactcaccatccctaggccttaggggccccactcctcttcttcctcccagcagctggtcataacttcagtgacttctctctgtgtgtgcttggagagtccctgggagcagcctgcaggggcgggtgagagggggatctcccgcttcatgtttcttgtagtacggctgtaagaattgtggcagggccttctgttcaggctgcctaagcttcagtgcagcagtgcctcggactgggaacacccaacagaaagtctgcaagcaatgccatgaggtcctgaccagagggtcttctgccaatgcctccaagtggtcaccacctcagaactataagaagcgtgtggcagccttggaagccaagcaaaagcccagcacttcccagagccagggactgacacgacaagaccagatgattgctgagcgcctagcacgactccgccaggagaacaagcccaagttagtcccctcacaggcagagatagaggcacggctggctgccctaaaggatgaacgtcagggttccatcccttccacccaggaaatggaggcacgacttgcagcgttgcagggcagagttctaccttctcaaaccccccagccggcacatcacacaccggacaccaggacccaagcccagcagacacaggatctgctaacgcagctggcagctgaggtggctatcgatgaaagctggaaaggaggaggcccagctgcctctctccagaatgatctcaaccagggtggcccagggagcactaattccaagaggcaggccaactggtccttggaggaggagaagagcagactgctggctgaggcagcacttgagttgcgggaggagaacacgaggcaggaacggattctggccctggccaagcgactagccatgctgcggggacaggaccccgagagagtgaccctccaggactatcgcctcccagacagtgatgacgacgaggatgaggagacagccatccaaagagtcctgcagcagctcactgaagaagctgccctggatgaggcaagtggctttaacatccctgcagagcaggcttctcgaccctggacgcaaccccgcggggcagagcctgaggcccaggatgtggaccccaggcctgaggctgaggaagaggagctcccctggtgctgcatctgcaatgaggatgccaccctacgctgcgctggctgcgatggggacctcttctgtgcccgctgcttccgagagggccatgatgcctttgagcttaaagagcaccagacatctgcctactctcctccacgtgcaggccaagagcactgaagacaccctggtcctcccggaagggcagtcccacaggcagcggcacccatttctgggcccagccacaggacgtccgatgggagagcttgtctggctctactgatgatggataggccccttcctgagccttggtgtccctggaatgaggaaagattctccattcgagagaatgactgggagggaagaagtcggggccctcctattagaagcccagactggaagtgagaggcatgatggggagagaccagactgaatctacgggtgagccctgtaacctggctctagggcacaggcccctcccctggcacttagtgggtctaataaagtatgttgattcattggg

SEQ ID NO: 280631 - DNA, 1753 bp, Homo sapiens
aactccgtatatatcgtctctatccggtagtctctctatacttagtctccctattcttaatctctctatccttaatctctctatccttaatctctggaaaccgaggaattgctttactcaccatccctaggccttaggggccccactcctcttcttcctcccagcagctggtcataacttcagtgacttctctctgtgtgtgcttggagagtccctgggagcagcctgcaggggcgggtgagagggggatctcccgcttcatgtttcttgtagtacggctgtaagaattgtggcagggccttctgttcaggctgcctaagcttcagtgcagcagtgcctcggactgggaacacccaacagaaagtctgcaagcaatgccatgaggtcctgaccagagggtcttctgccaatgcctccaagtggtcaccacctcagaactataagaagcgtgtggcagccttggaagccaagcaaaagcccagcacttcccagagccagggactgacacgacaagaccagatgattgctgagcgcctagcacgactccgccaggagaacaagcccaagttagtcccctcacaggcagagatagaggcacggctggctgccctaaaggatgaacgtcagggttccatcccttccacccaggaaatggaggcacgacttgcagcgttgcagggcagagttctaccttctcaaaccccccagccggcacatcacacaccggacaccaggacccaagcccagcagacacaggatctgctaacgcagctggcagctgaggtggctatcgatgaaagctggaaaggaggaggcccagctgcctctctccagaatgatctcaaccagggtggcccagggagcactaattccaagaggcaggccaactggtccttggaggaggagaagagcagactgctggctgaggcagcacttgagttgcgggaggagaacacgaggcaggaacggattctggccctggccaagcgactagccatgctgcggggacaggaccccgagagagtgaccctccaggactatcgcctcccagacagtgatgacgacgaggatgaggagacagccatccaaagagtcctgcagcagctcactgaagaagctgccctggatgaggcaagtggctttaacatccctgcagagcaggcttctcgaccctggacgcaaccccgcggggcagagcctgaggcccaggatgtggaccccaggcctgaggctgaggaagaggagctcccctggtgctgcatctgcaatgaggatgccaccctacgctgcgctggctgcgatggggacctcttctgtgcccgctgcttccgagagggccatgatgcctttgagcttaaagagcaccagacatctgcctactctcctccacgtgcaggccaagagcactgaagacaccctggtcctcccggaagggcagtcccacaggcagcggcacccatttctgggcccagccacaggacgtccgatgggagagcttgtctggctctactgatgatggataggccccttcctgagccttggtgtccctggaatgaggaaagattctccattcgagagaatgactgggagggaagaagtcggggccctcctattagaagcccagactggaagtgagaggcatgatggggagagaccagactgaatctacgggtgagccctgtaacctggctctagggcacaggcccctcccctggcacttagtgggtctaataaagtatgttgattcattggg

SEQ ID NO: 280632 - DNA, 1740 bp, Homo sapiens
  misc_feature (56)..(56): n is a, c, g, or t
ccaagtggtcaccacctcaagaactataagaagcgtgtggcagccttggaagccanagcaaaagcccagcacttcccagagccagggactgacacaacagaaagtctgcaagcaatgccatgaggtcctgaccagagggtcttctgccaatgcctccaagtggtcaccacctcagctctgcagaccctgcggtgctgggagccaccatggagagtaggtgctacggctgcgctgtcaagttcaccctcttcaagaaggagtacggctgtaagaattgtggcagggccttctgttcaggctgcctaagcttcagtgcagcagtgcctcggactgggaacacccaacagaaagtctgcaagcaatgccatgaggtcctgaccagagggtcttctgccaatgcctccaagtggtcaccacctcagaactataagaagcgtgtggcagccttggaagccaagcaaaagcccagcacttcccagagccagggactgacacgacaagaccagatgattgctgagcgcctagcacgactccgccaggagaacaagcccaagttagtcccctcacaggcagagatagaggcacggctggctgccctaaaggatgaacgtcagggttccatcccttccacccaggaaatggaggcacgacttgcagcgttgcagggcagagttctaccttctcaaaccccccagccggcacatcacacaccggacaccaggacccaagcccagcagacacaggatctgctaacgcagctggcagctgaggtggctatcgatgaaagctggaaaggaggaggcccagctgcctctctccagaatgatctcaaccagggtggcccagggagcactaattccaagaggcaggccaactggtccttggaggaggagaagagcagactgctggctgaggcagcacttgagttgcgggaggagaacacgaggcaggaacggattctggccctggccaagcgactagccatgctgcggggacaggaccccgagagagtgaccctccaggactatcgcctcccagacagtgatgacgacgaggatgaggagacagccatccaaagagtcctgcagcagctcactgaagaagctgccctggatgaggcaagtggctttaacatccctgcagagcaggcttctcgaccctggacgcaaccccgcggggcagagcctgaggcccaggatgtggaccccaggcctgaggctgaggaagaggagctcccctggtgctgcatctgcaatgaggatgccaccctacgctgcgctggctgcgatggggacctcttctgtgcccgctgcttccgagagggccatgatgcctttgagcttaaagagcaccagacatctgcctactctcctccacgtgcaggccaagagcactgaagacaccctggtcctcccggaagggcagtcccacaggcagcggcacccatttctgggcccagccacaggacgtccgatgggagagcttgtctggctctactgatgatggataggccccttcctgagccttggtgtccctggaatgaggaaagattctccattcgagagaatgactgggagggaagaagtcggggccctcctattagaagcccagactggaagtgagaggcatgatggggagagaccagactgaatctacgggtgagccctgtaacctggctctagggcacaggcccctcccctggcacttagtgggtctaataaagtatgttgattcattggg

SEQ ID NO: 280633 - DNA, 2649 bp, Homo sapiens
aggcgcagaggaggctagcgttccttgctgcctcgccccgcggcctctaggagacaggggccacggggagagcacagccacccggcgcgaagagccctctgtaccccgcttcctcttgaggccctcggaccgtccaggaaatgtctgggagcccgcctgcggagggcatagcgccgaccctcgctccccgcccaggacccgaatgaacctggagagcggatgccagcagtggccgaggcgctaggacaggaaggaccgccagacctctcaagatcagccttcctcgccaccgttctcacctctttgtccgctgccttctcctcaatgcctagcagcgcgtacaggtccatctgtaagagctccttggtcactgccatggttccggcctgacggattcgtactacaactcccaagagtctaagcgcgcgtgaggactgcaggctccgagcggcgcctagccctctgggaattgtgttctgggtcaggcttgactgactctgagggaggccggcagtcgtgaatgaactacgactcccagcagcccccgttgccgccgctgccgtacgctggctgcaggagagcgtccggattccctgctctaggtcgcggcgggacagtgccagtgggcgtgtgggcggggcggggcagggcagggaagggaagggcggagctggggtgagggtccaaggggcccaggacttggccggcgtgatctcagctctgcagaccctgcggtgctgggagccaccatggagagtaggtgctacggctgcgctgtcaagttcaccctcttcaagaaggagtacggctgtaagaattgtggcagggccttctgttcaggctgcctaagcttcagtgcagcagtgcctcggactgggaacacccaacagaaagtctgcaagcaatgccatgaggtcctgaccagagggtcttctgccaatgcctccaagtggtcaccacctcagaactataagaagcgtgtggcagccttggaagccaagcaaaagcccagcacttcccagagccagggactgacacgacaagaccagatgattgctgagcgcctagcacgactccgccaggagaacaagcccaagttagtcccctcacaggcagagatagaggcacggctggctgccctaaaggatgaacgtcagggttccatcccttccacccaggaaatggaggcacgacttgcagcgttgcagggcagagttctaccttctcaaaccccccagccggcacatcacacaccggacaccaggacccaagcccagcagacacaggatctgctaacgcagctggcagctgaggtggctatcgatgaaagctggaaaggaggaggcccagctgcctctctccagaatgatctcaaccagggtggcccagggagcactaattccaagaggcaggccaactggtccttggaggaggagaagagcagactgctggctgaggcagcacttgagttgcgggaggagaacacgaggcaggaacggattctggccctggccaagcgactagccatgctgcggggacaggaccccgagagagtgaccctccaggactatcgcctcccagacagtgatgacgacgaggatgaggagacagccatccaaagagtcctgcagcagctcactgaagaagctgccctggatgaggcaagtggctttaacatccctgcagagcaggcttctcgaccctggacgcaaccccgcggggcagagcctgaggcccaggatgtggaccccaggcctgaggctgaggaagaggagctcccctggtgctgcatctgcaatgaggatgccaccctacgctgcgctggctgcgatggggacctcttctgtgcccgctgcttccggtgggtgcaggtggaatgttctgtgcgagagctcaagggctgcctggatccctgacttgtatccctttgttccacagagagggccatgatgcctttgagcttaaagagcaccagacatctgcctactctcctccacgtgcaggccaagagcactgaagacaccctggtcctcccggaagggcagtcccacaggcagcggcacccatttctgggcccagccacaggacgtccgatgggagagcttgtctggctctactgatgatggataggccccttcctgagccttggtgtccctggaatgaggaaagattctccattcgagagaatgactgggggacgagtgggcttctattaaagcagatggatgaaggtgaggggggagacagatgaattagggtgagccgaatggttaggaagcctcctggtaggtgtataatgtgttaaaaaataaaaaaaaaaaaaaaaaaaaaaaaaaaaatttattggtgacgttgaagaaaagggctgaggggtggatggctggagctggggctacgtaggcggcccctcctggtcttcctgctgcatccgtgcgatcagctgttgccgctcggccgcctggcgcatgcgcatcatgacgaggctctcgtagtccctctctgacagcactgagccctttgacagtcctgagtggctgcggcccacggcatcctggggctgtccctccaaccaggaaatcttcagagggttatccaccaggccaacttcattctggacagcctgctttgcacccaggggatacctctaga

SEQ ID NO: 280634 - DNA, 1536 bp, Homo sapiens
  misc_feature (56)..(56): n is a, c, g, or t
ccaagtggtcaccacctcaagaactataagaagcgtgtggcagccttggaagccanagcaaaagcccagcacttcccagagccagggactgacacaacagaaagtctgcaagcaatgccatgaggtcctgaccagagggtcttctgccaatgcctccaagtggtcaccacctcagctctgcagaccctgcggtgctgggagccaccatggagagtaggtgctacggctgcgctgtcaagttcaccctcttcaagaaggagtacggctgtaagaattgtggcagggccttctgttcaggctgcctaagcttcagtgcagcagtgcctcggactgggaacacccaacagaaagtctgcaagcaatgccatgaggtcctgaccagagggtcttctgccaatgcctccaagtggtcaccacctcagaactataagaagcgtgtggcagccttggaagccaagcaaaagcccagcacttcccagagccagggactgacacgacaagaccagatgattgctgagcgcctagcacgactccgccaggagaacaagcccaagttagtcccctcacaggcagagatagaggcacggctggctgccctaaaggatgaacgtcagggttccatcccttccacccaggaaatggaggcacgacttgcagcgttgcagggcagagttctaccttctcaaaccccccagccggcacatcacacaccggacaccaggacccaagcccagcagacacaggatctgctaacgcagctggcagctgaggtggctatcgatgaaagctggaaaggaggaggcccagtgaccctccaggactatcgcctcccagacagtgatgacgacgaggatgaggagacagccatccaaagagtcctgcagcagctcactgaagaagctgccctggatgaggcaagtggctttaacatccctgcagagcaggcttctcgaccctggacgcaaccccgcggggcagagcctgaggcccaggatgtggaccccaggcctgaggctgaggaagaggagctcccctggtgctgcatctgcaatgaggatgccaccctacgctgcgctggctgcgatggggacctcttctgtgcccgctgcttccgagagggccatgatgcctttgagcttaaagagcaccagacatctgcctactctcctccacgtgcaggccaagagcactgaagacaccctggtcctcccggaagggcagtcccacaggcagcggcacccatttctgggcccagccacaggacgtccgatgggagagcttgtctggctctactgatgatggataggccccttcctgagccttggtgtccctggaatgaggaaagattctccattcgagagaatgactgggagggaagaagtcggggccctcctattagaagcccagactggaagtgagaggcatgatggggagagaccagactgaatctacgggtgagccctgtaacctggctctagggcacaggcccctcccctggcacttagtgggtctaataaagtatgttgattcattggg

SEQ ID NO: 280635 - DNA, 2766 bp, Homo sapiens
aggcgcagaggaggctagcgttccttgctgcctcgccccgcggcctctaggagacaggggccacggggagagcacagccacccggcgcgaagagccctctgtaccccgcttcctcttgaggccctcggaccgtccaggaaatgtctgggagcccgcctgcggagggcatagcgccgaccctcgctccccgcccaggacccgaatgaacctggagagcggatgccagcagtggccgaggcgctaggacaggaaggaccgccagacctctcaagatcagccttcctcgccaccgttctcacctctttgtccgctgccttctcctcaatgcctagcagcgcgtacaggtccatctgtaagagctccttggtcactgccatggttccggcctgacggattcgtactacaactcccaagagtctaagcgcgcgtgaggactgcaggctccgagcggcgcctagccctctgggaattgtgttctgggtcaggcttgactgactctgagggaggccggcagtcgtgaatgaactacgactcccagcagcccccgttgccgccgctgccgtacgctggctgcaggagagcgtccggattccctgctctaggtcgcggcgggacagtgccagtgggcgtgtgggcggggcggggcagggcagggaagggaagggcggagctggggtgagggtccaaggggcccaggacttggccggcgtgatctcagctctgcagaccctgcggtgctgggagccaccatggagagtaggtgctacggctgcgctgtcaagttcaccctcttcaagaaggaggcgagtcttccctccccgagggctgcagggccagggaggagaggagggaaaagcgcgggacttaacgtccaaagacttggtcttacggctcctttccagctgtgtggttttgatgaagtcattgatcctcagtttccatttctgtaaaatggggctaacattctctcgctttcagggtttatgtgagggtccactgaagtgctttaggtgagagttccctataaactgtaaagcgcgctgccgtcgtttttgcaaagctactcttttctgtcggcccagtgtagcatctggcggttttcttctctccaccctgctcctccgaagcgcggtgtccatcacaccaagcccgttactccctctgctctgaaatcttccccatcccgcagcctgcccttctccaggtcgctggagttagattaccacacttcctcctgcttccggggcaccatggtgaaggctgactgtcctgtccctatcacagacctgccagattcctctggtaaactgcaggttccctctgcctcagttgtggccagggattctgaccaggagatgatgggaactagatggagtaaattagtgtcacgcaggaaggcaggaccgtgcagcattcaccaacctggattttggagtcagcgttcaaatctgagctctgctgtcttattgaggcggtgaccttggtttggataagttatgtaacctctctggccctctcaaaataaggataatcacggttggcatcaagattaagtaaaataatgtgtgtaaattgtaaggaataaatcacatgatgaatgttaagtactgggtttagtgcctggcacatagtaagtgcttaataaatggaggctattgttagcccatcctgagccaagcctccctccatctctgcaagagcagaggaggcatcggctctgccctgtctctctgattctcctttgtggaagagtcagtggcctgaaatactgggctttatctatctgtcttctacatccctgggtcagggaattgaagacagggtagaaagcatgggaattttgtataaaccttcatttggcttgaataaggtactggaaaccgaggaattgctttactcaccatccctaggccttaggggccccactcctcttcttcctcccagcagctggtcataacttcagtgacttctctctgtgtgtgcttggagagtccctgggagcagcctgcaggggcgggtgagagggggatctcccgcttcatgtttcttgtagtacggctgtaagaattgtggcagggccttctgttcaggctgcctaagcttcagtgcagcagtgcctcggactgggaacacccaacagaaagtctgcaagcaatgccatgaggtcctgaccagagggtcttctgccaatgcctccaagtggtcaccacctcagaactataagaagcgtgtggcagccttggaagccaagcaaaagcccagcacttcccagagccagggactgacacgacaagaccagatgattgctgagcgcctagcacgactccgccaggagaacaagcccagtgagcaggggcagatggggttgcctagaggacacagtccagggcttctgggactgagatgcctctggcccttacaaggcttcccccatgccaattgcagagttagtcccctcacaggcagagatagaggcacggctggctgccctaaaggatgaacgtcagggttccatcccttccacccaggaaatggaggcacgacttgcagcgttgcagggcagagttctaccttctcaaaccccccagccggtgagtgttatggcttaggagagaagcgggggtgctagcgggaggacccagcagaagcccagatacaggtattggggtgatacaaaagtaattgtggtttttgtcattacttttaattgcaaaaacctcagttacttttgcaccaacctttgtactttatgtactttgcaggagt

SEQ ID NO: 280636 - DNA, 300 bp, Homo sapiens
aggcatgatggggagagaccagactgaatctacgggtgagccctgtaacctggctctagggcacaggcccctcccctggcacttagtgggtctaataaagtatgttgattcattgggcccagcatctcatttctacaaccctatgagcctgggccctgtgagaggtggcaggaacagagcaggctgtaagcacagttgtggggaatgggggaaaaggttgagccatcctatgaacttctccaggcaggaacagccctacccatcctggtggcctcatacgaagtaaacatgtattcattc

SEQ ID NO: 280637 - DNA, 2283 bp, Homo sapiens
aggcgcagaggaggctagcgttccttgctgcctcgccccgcggcctctaggagacaggggccacggggagagcacagccacccggcgcgaagagccctctgtaccccgcttcctcttgaggccctcggaccgtccaggaaatgtctgggagcccgcctgcggagggcatagcgccgaccctcgctccccgcccaggacccgaatgaacctggagagcggatgccagcagtggccgaggcgctaggacaggaaggaccgccagacctctcaagatcagccttcctcgccaccgttctcacctctttgtccgctgccttctcctcaatgcctagcagcgcgtacaggtccatctgtaagagctccttggtcactgccatggttccggcctgacggattcgtactacaactcccaagagtctaagcgcgcgtgaggactgcaggctccgagcggcgcctagccctctgggaattgtgttctgggtcaggcttgactgactctgagggaggccggcagtcgtgaatgaactacgactcccagcagcccccgttgccgccgctgccgtacgctggctgcaggagagcgtccggattccctgctctaggtcgcggcgggacagtgccagtgggcgtgtgggcggggcggggcagggcagggaagggaagggcggagctggggtgagggtccaaggggcccaggacttggccggcgtgatctcagctctgcagaccctgcggtgctgggagccaccatggagagtaggtgctacggctgcgctgtcaagttcaccctcttcaagaaggagtacggctgtaagaattgtggcagggccttctgttcaggctgcctaagcttcagtgcagcagtgcctcggactgggaacacccaacagaaagtctgcaagcaatgccatgaggtcctgaccagagggtcttctgccaatgcctccaagtggtcaccacctcagaactataagaagcgtgtggcagccttggaagccaagcaaaagcccagcacttcccagagccagggactgacacgacaagaccagatgattgctgagcgcctagcacgactccgccaggagaacaagcccaagttagtcccctcacaggcagagatagaggcacggctggctgccctaaaggatgaacgtcagggttccatcccttccacccaggaaatggaggcacgacttgcagcgttgcagggcagagttctaccttctcaaaccccccagccggcacatcacacaccggacaccaggacccaagcccagcagacacaggatctgctaacgcagctggcagctgaggtggctatcgatgaaagctggaaaggaggaggcccagctgcctctctccagaatgatctcaaccagggtggcccagggagcactaattccaagaggcaggccaactggtccttggaggaggagaagagcagactgctggctgaggcagcacttgagttgcgggaggagaacacgaggcaggaacggattctggccctggccaagcgactagccatgctgcggggacaggaccccgagagagtgaccctccaggactatcgcctcccagacagtgatgacgacgaggatgaggagacagccatccaaagagtcctgcagcagctcactgaagaagctgccctggatgaggcaagtggctttaacatccctgcagagcaggcttctcgaccctggacgcaaccccgcggggcagagcctgaggcccaggatgtggaccccaggcctgaggctgaggaagaggagctcccctggtgctgcatctgcaatgaggatgccaccctacgctgcgctggctgcgatggggacctcttctgtgcccgctgcttccgagagggccatgatgcctttgagcttaaagagcaccagacatctgcctactctcctccacgtgcaggccaagagcactgaagacaccctggtcctcccggaagggcagtcccacaggcagcggcacccatttctgggcccagccacaggacgtccgatgggagagcttgtctggctctactgatgatggataggccccttcctgagccttggtgtccctggaatgaggaaagattctccattcgagagaatgactgggagggaagaagtcggggccctcctattagaagcccagactggaagtgagaggcatgatggggagagaccagactgaatctacgggtgagccctgtaacctggctctagggcacaggcccctcccctggcacttagtgggtctaataaagtatgttgattcattggg

SEQ ID NO: 280638 - DNA, 2236 bp, Homo sapiens
aggcgcagaggaggctagcgttccttgctgcctcgccccgcggcctctaggagacaggggccacggggagagcacagccacccggcgcgaagagccctctgtaccccgcttcctcttgaggccctcggaccgtccaggaaatgtctgggagcccgcctgcggagggcatagcgccgaccctcgctccccgcccaggacccgaatgaacctggagagcggatgccagcagtggccgaggcgctaggacaggaaggaccgccagacctctcaagatcagccttcctcgccaccgttctcacctctttgtccgctgccttctcctcaatgcctagcagcgcgtacaggtccatctgtaagagctccttggtcactgccatggttccggcctgacggattcgtactacaactcccaagagtctaagcgcgcgtgaggactgcaggctccgagcggcgcctagccctctgggaattgtgttctgggtcaggcttgactgactctgagggaggccggcagtcgtgaatgaactacgactcccagcagcccccgttgccgccgctgccgtacgctggctgcaggagagcgtccggattccctgctctaggtcgcggcgggacagtgccagtgggcgtgtgggcggggcggggcagggcagggaagggaagggcggagctggggtgagggtccaaggggcccaggacttggccggcgtgatctcagctctgcagaccctgcggtgctgggagccaccatggagatacggctgtaagaattgtggcagggccttctgttcaggctgcctaagcttcagtgcagcagtgcctcggactgggaacacccaacagaaagtctgcaagcaatgccatgaggtcctgaccagagggtcttctgccaatgcctccaagtggtcaccacctcagaactataagaagcgtgtggcagccttggaagccaagcaaaagcccagcacttcccagagccagggactgacacgacaagaccagatgattgctgagcgcctagcacgactccgccaggagaacaagcccaagttagtcccctcacaggcagagatagaggcacggctggctgccctaaaggatgaacgtcagggttccatcccttccacccaggaaatggaggcacgacttgcagcgttgcagggcagagttctaccttctcaaaccccccagccggcacatcacacaccggacaccaggacccaagcccagcagacacaggatctgctaacgcagctggcagctgaggtggctatcgatgaaagctggaaaggaggaggcccagctgcctctctccagaatgatctcaaccagggtggcccagggagcactaattccaagaggcaggccaactggtccttggaggaggagaagagcagactgctggctgaggcagcacttgagttgcgggaggagaacacgaggcaggaacggattctggccctggccaagcgactagccatgctgcggggacaggaccccgagagagtgaccctccaggactatcgcctcccagacagtgatgacgacgaggatgaggagacagccatccaaagagtcctgcagcagctcactgaagaagctgccctggatgaggcaagtggctttaacatccctgcagagcaggcttctcgaccctggacgcaaccccgcggggcagagcctgaggcccaggatgtggaccccaggcctgaggctgaggaagaggagctcccctggtgctgcatctgcaatgaggatgccaccctacgctgcgctggctgcgatggggacctcttctgtgcccgctgcttccgagagggccatgatgcctttgagcttaaagagcaccagacatctgcctactctcctccacgtgcaggccaagagcactgaagacaccctggtcctcccggaagggcagtcccacaggcagcggcacccatttctgggcccagccacaggacgtccgatgggagagcttgtctggctctactgatgatggataggccccttcctgagccttggtgtccctggaatgaggaaagattctccattcgagagaatgactgggagggaagaagtcggggccctcctattagaagcccagactggaagtgagaggcatgatggggagagaccagactgaatctacgggtgagccctgtaacctggctctagggcacaggcccctcccctggcacttagtgggtctaataaagtatgttgattcattggg

SEQ ID NO: 280639 - DNA, 2082 bp, Homo sapiens
aggcgcagaggaggctagcgttccttgctgcctcgccccgcggcctctaggagacaggggccacggggagagcacagccacccggcgcgaagagccctctgtaccccgcttcctcttgaggccctcggaccgtccaggaaatgtctgggagcccgcctgcggagggcatagcgccgaccctcgctccccgcccaggacccgaatgaacctggagagcggatgccagcagtggccgaggcgctaggacaggaaggaccgccagacctctcaagatcagccttcctcgccaccgttctcacctctttgtccgctgccttctcctcaatgcctagcagcgcgtacaggtccatctgtaagagctccttggtcactgccatggttccggcctgacggattcgtactacaactcccaagagtctaagcgcgcgtgaggactgcaggctccgagcggcgcctagccctctgggaattgtgttctgggtcaggcttgactgactctgagggaggccggcagtcgtgaatgaactacgactcccagcagcccccgttgccgccgctgccgtacgctggctgcaggagagcgtccggattccctgctctagtacggctgtaagaattgtggcagggccttctgttcaggctgcctaagcttcagtgcagcagtgcctcggactgggaacacccaacagaaagtctgcaagcaatgccatgaggtcctgaccagagggtcttctgccaatgcctccaagtggtcaccacctcagaactataagaagcgtgtggcagccttggaagccaagcaaaagcccagcacttcccagagccagggactgacacgacaagaccagatgattgctgagcgcctagcacgactccgccaggagaacaagcccaagttagtcccctcacaggcagagatagaggcacggctggctgccctaaaggatgaacgtcagggttccatcccttccacccaggaaatggaggcacgacttgcagcgttgcagggcagagttctaccttctcaaaccccccagccggcacatcacacaccggacaccaggacccaagcccagcagacacaggatctgctaacgcagctggcagctgaggtggctatcgatgaaagctggaaaggaggaggcccagctgcctctctccagaatgatctcaaccagggtggcccagggagcactaattccaagaggcaggccaactggtccttggaggaggagaagagcagactgctggctgaggcagcacttgagttgcgggaggagaacacgaggcaggaacggattctggccctggccaagcgactagccatgctgcggggacaggaccccgagagagtgaccctccaggactatcgcctcccagacagtgatgacgacgaggatgaggagacagccatccaaagagtcctgcagcagctcactgaagaagctgccctggatgaggcaagtggctttaacatccctgcagagcaggcttctcgaccctggacgcaaccccgcggggcagagcctgaggcccaggatgtggaccccaggcctgaggctgaggaagaggagctcccctggtgctgcatctgcaatgaggatgccaccctacgctgcgctggctgcgatggggacctcttctgtgcccgctgcttccgagagggccatgatgcctttgagcttaaagagcaccagacatctgcctactctcctccacgtgcaggccaagagcactgaagacaccctggtcctcccggaagggcagtcccacaggcagcggcacccatttctgggcccagccacaggacgtccgatgggagagcttgtctggctctactgatgatggataggccccttcctgagccttggtgtccctggaatgaggaaagattctccattcgagagaatgactgggagggaagaagtcggggccctcctattagaagcccagactggaagtgagaggcatgatggggagagaccagactgaatctacgggtgagccctgtaacctggctctagggcacaggcccctcccctggcacttagtgggtctaataaagtatgttgattcattggg

SEQ ID NO: 280640 - DNA, 2360 bp, Homo sapiens
aggcgcagaggaggctagcgttccttgctgcctcgccccgcggcctctaggagacaggggccacggggagagcacagccacccggcgcgaagagccctctgtaccccgcttcctcttgaggccctcggaccgtccaggaaatgtctgggagcccgcctgcggagggcatagcgccgaccctcgctccccgcccaggacccgaatgaacctggagagcggatgccagcagtggccgaggcgctaggacaggaaggaccgccagacctctcaagatcagccttcctcgccaccgttctcacctctttgtccgctgccttctcctcaatgcctagcagcgcgtacaggtccatctgtaagagctccttggtcactgccatggttccggcctgacggattcgtactacaactcccaagagtctaagcgcgcgtgaggactgcaggctccgagcggcgcctagccctctgggaattgtgttctgggtcaggcttgactgactctgagggaggccggcagtcgtgaatgaactacgactcccagcagcccccgttgccgccgctgccgtacgctggctgcaggagagcgtccggattccctgctctaggtcgcggcgggacagtgccagtgggcgtgtgggcggggcggggcagggcagggaagggaagggcggagctggggtgagggtccaaggggcccaggacttggccggcgtgatctcagctctgcagaccctgcggtgctgggagccaccatggagagtaggtgctacggctgcgctgtcaagttcaccctcttcaagaaggagtacggctgtaagaattgtggcagggccttctgttcaggctgcctaagcttcagtgcagcagtgcctcggactgggaacacccaacagaaagtctgcaagcaatgccatgaggtcctgaccagagggtcttctgccaatgcctccaagtggtcaccacctcagaactataagaagcgtgtggcagccttggaagccaagcaaaagcccagcacttcccagagccagggactgacacgacaagaccagatgattgctgagcgcctagcacgactccgccaggagaacaagcccaagttagtcccctcacaggcagagatagaggcacggctggctgccctaaaggatgaacgtcagggttccatcccttccacccaggaaatggaggcacgacttgcagcgttgcagggcagagttctaccttctcaaaccccccagccggcacatcacacaccggacaccaggacccaagcccagcagacacaggatctgctaacgcagctggcagctgaggtggctatcgatgaaagctggaaaggaggaggcccagctgcctctctccagaatgatctcaaccagggtggcccagggagcactaattccaagaggcaggccaactggtccttggaggaggagaagagcagactgctggctgaggcagcacttgagttgcgggaggagaacacgaggcaggaacggattctggccctggccaagcgactagccatgctgcggggacaggaccccgagagagtgaccctccaggactatcgcctcccagacagtgatgacgacgaggatgaggagacagccatccaaagagtcctgcagcagctcactgaagaagctgccctggatgaggcaagtggctttaacatccctgcagagcaggcttctcgaccctggacgcaaccccgcggggcagagcctgaggcccaggatgtggaccccaggcctgaggctgaggaagaggagctcccctggtgctgcatctgcaatgaggatgccaccctacgctgcgctggctgcgatggggacctcttctgtgcccgctgcttccggtgggtgcaggtggaatgttctgtgcgagagctcaagggctgcctggatccctgacttgtatccctttgttccacagagagggccatgatgcctttgagcttaaagagcaccagacatctgcctactctcctccacgtgcaggccaagagcactgaagacaccctggtcctcccggaagggcagtcccacaggcagcggcacccatttctgggcccagccacaggacgtccgatgggagagcttgtctggctctactgatgatggataggccccttcctgagccttggtgtccctggaatgaggaaagattctccattcgagagaatgactgggagggaagaagtcggggccctcctattagaagcccagactggaagtgagaggcatgatggggagagaccagactgaatctacgggtgagccctgtaacctggctctagggcacaggcccctcccctggcacttagtgggtctaataaagtatgttgattcattggg

SEQ ID NO: 280641 - DNA, 3329 bp, Homo sapiens
aggcgcagaggaggctagcgttccttgctgcctcgccccgcggcctctaggagacaggggccacggggagagcacagccacccggcgcgaagagccctctgtaccccgcttcctcttgaggccctcggaccgtccaggaaatgtctgggagcccgcctgcggagggcatagcgccgaccctcgctccccgcccaggacccgaatgaacctggagagcggatgccagcagtggccgaggcgctaggacaggaaggaccgccagacctctcaagatcagccttcctcgccaccgttctcacctctttgtccgctgccttctcctcaatgcctagcagcgcgtacaggtccatctgtaagagctccttggtcactgccatggttccggcctgacggattcgtactacaactcccaagagtctaagcgcgcgtgaggactgcaggctccgagcggcgcctagccctctgggaattgtgttctgggtcaggcttgactgactctgagggaggccggcagtcgtgaatgaactacgactcccagcagcccccgttgccgccgctgccgtacgctggctgcaggagagcgtccggattccctgctctaggtcgcggcgggacagtgccagtgggcgtgtgggcggggcggggcagggcagggaagggaagggcggagctggggtgagggtccaaggggcccaggacttggccggcgtgatctcagctctgcagaccctgcggtgctgggagccaccatggagagtaggtgctacggctgcgctgtcaagttcaccctcttcaagaaggaggcgagtcttccctccccgagggctgcagggccagggaggagaggagggaaaagcgcgggacttaacgtccaaagacttggtcttacggctcctttccagctgtgtggttttgatgaagtcattgatcctcagtttccatttctgtaaaatggggctaacattctctcgctttcagggtttatgtgagggtccactgaagtgctttaggtgagagttccctataaactgtaaagcgcgctgccgtcgtttttgcaaagctactcttttctgtcggcccagtgtagcatctggcggttttcttctctccaccctgctcctccgaagcgcggtgtccatcacaccaagcccgttactccctctgctctgaaatcttccccatcccgcagcctgcccttctccaggtcgctggagttagattaccacacttcctcctgcttccggggcaccatggtgaaggctgactgtcctgtccctatcacagacctgccagattcctctggtaaactgcaggttccctctgcctcagttgtggccagggattctgaccaggagatgatgggaactagatggagtaaattagtgtcacgcaggaaggcaggaccgtgcagcattcaccaacctggattttggagtcagcgttcaaatctgagctctgctgtcttattgaggcggtgaccttggtttggataagttatgtaacctctctggccctctcaaaataaggataatcacggttggcatcaagattaagtaaaataatgtgtgtaaattgtaaggaataaatcacatgatgaatgttaagtactgggtttagtgcctggcacatagtaagtgcttaataaatggaggctattgttagcccatcctgagccaagcctccctccatctctgcaagagcagaggaggcatcggctctgccctgtctctctgattctcctttgtggaagagtcagtggcctgaaatactgggctttatctatctgtcttctacatccctgggtcagggaattgaagacagggtagaaagcatgggaattttgtataaaccttcatttggcttgaataaggtactggaaaccgaggaattgctttactcaccatccctaggccttaggggccccactcctcttcttcctcccagcagctggtcataacttcagtgacttctctctgtgtgtgcttggagagtccctgggagcagcctgcaggggcgggtgagagggggatctcccgcttcatgtttcttgtagtacggctgtaagaattgtggcagggccttctgttcaggctgcctaagcttcagtgcagcagtgcctcggactgggaacacccaacagaaagtctgcaagcaatgccatgaggtcctgaccagagggtcttctgccaatgcctccaagtggtcaccacctcagaactataagaagcgtgtggcagccttggaagccaagcaaaagcccagcacttcccagagccagggactgacacgacaagaccagatgattgctgagcgcctagcacgactccgccaggagaacaagcccaagttagtcccctcacaggcagagatagaggcacggctggctgccctaaaggatgaacgtcagggttccatcccttccacccaggaaatggaggcacgacttgcagcgttgcagggcagagttctaccttctcaaaccccccagccggcacatcacacaccggacaccaggacccaagcccagcagacacaggatctgctaacgcagctggcagctgaggtggctatcgatgaaagctggaaaggaggaggcccagtgaccctccaggactatcgcctcccagacagtgatgacgacgaggatgaggagacagccatccaaagagtcctgcagcagctcactgaagaagctgccctggatgaggcaagtggctttaacatccctgcagagcaggcttctcgaccctggacgcaaccccgcggggcagagcctgaggcccaggatgtggaccccaggcctgaggctgaggaagaggagctcccctggtgctgcatctgcaatgaggatgccaccctacgctgcgctggctgcgatggggacctcttctgtgcccgctgcttccgagagggccatgatgcctttgagcttaaagagcaccagacatctgcctactctcctccacgtgcaggccaagagcactgaagacaccctggtcctcccggaagggcagtcccacaggcagcggcacccatttctgggcccagccacaggacgtccgatgggagagcttgtctggctctactgatgatggataggccccttcctgagccttggtgtccctggaatgaggaaagattctccattcgagagaatgactgggagggaagaagtcggggccctcctattagaagcccagactggaagtgagaggcatgatggggagagaccagactgaatctacgggtgagccctgtaacctggctctagggcacaggcccctcccctggcacttagtgggtctaataaagtatgttgattcattggg

SEQ ID NO: 280642 - DNA, 2572 bp, Homo sapiens
aggcgcagaggaggctagcgttccttgctgcctcgccccgcggcctctaggagacaggggccacggggagagcacagccacccggcgcgaagagccctctgtaccccgcttcctcttgaggccctcggaccgtccaggaaatgtctgggagcccgcctgcggagggcatagcgccgaccctcgctccccgcccaggacccgaatgaacctggagagcggatgccagcagtggccgaggcgctaggacaggaaggaccgccagacctctcaagatcagccttcctcgccaccgttctcacctctttgtccgctgccttctcctcaatgcctagcagcgcgtacaggtccatctgtaagagctccttggtcactgccatggttccggcctgacggattcgtactacaactcccaagagtctaagcgcgcgtgaggactgcaggctccgagcggcgcctagccctctgggaattgtgttctgggtcaggcttgactgactctgagggaggccggcagtcgtgaatgaactacgactcccagcagcccccgttgccgccgctgccgtacgctggctgcaggagagcgtccggattccctgctctaggtcgcggcgggacagtgccagtgggcgtgtgggcggggcggggcagggcagggaagggaagggcggagctggggtgagggtccaaggggcccaggacttggccggcgtgatctcagctctgcagaccctgcggtgctgggagccaccatggagagtaggtgctacggctgcgctgtcaagttcaccctcttcaagaaggagtacggctgtaagaattgtggcagggccttctgttcaggctgcctaagcttcagtgcagcagtgcctcggactgggaacacccaacagaaagtctgcaagcaatgccatgaggtcctgaccagagggtcttctgccaatgcctccaagtggtcaccacctcagaactataagaagcgtgtggcagccttggaagccaagcaaaagcccagcacttcccagagccagggactgacacgacaagaccagatgattgctgagcgcctagcacgactccgccaggagaacaagcccaagttagtcccctcacaggcagagatagaggcacggctggctgccctaaaggatgaacgtcagggttccatcccttccacccaggaaatggaggcacgacttgcagcgttgcagggcagagttctaccttctcaaaccccccagccggcacatcacacaccggacaccaggacccaagcccagcagacacaggatctgctaacgcagctggcagctgaggtggctatcgatgaaagctggaaaggaggaggcccagctgcctctctccagaatgatctcaaccagggtggcccagggagcactaattccaagaggcaggccaactggtccttggaggaggagaagagcagactgctggctgaggcagcacttgagttgcgggaggagaacacgaggcaggaacggattctggccctggccaagcgactagccatgctgcggggacaggaccccgagagagtgaccctccaggactatcgcctcccagacagtgatgacgacgaggatgaggagacagccatccaaagagtcctgcagcagctcactgaagaagctgccctggatgaggcaagtggctttaacatccctgcagagcaggcttctcgaccctggacgcaaccccgcggggcagagcctgaggcccaggatgtggaccccaggcctgaggctgaggaagaggagctcccctggtgctgcatctgcaatgaggatgccaccctacgctgcgctggctgcgatggggacctcttctgtgcccgctgcttccgagagggccatgatgcctttgagcttaaagagcaccagacatctgcctactctcctccacgtgcaggccaagagcactgaagacaccctggtcctcccggaagggcagtcccacaggcagcggcacccatttctgggcccagccacaggacgtccgatgggagagcttgtctggctctactgatgatggataggccccttcctgagccttggtgtccctggaatgaggaaagattctccattcgagagaatgactgggggacgagtgggcttctattaaagcagatggatgaaggtgaggggggagacagatgaattagggtgagccgaatggttaggaagcctcctggtaggtgtataatgtgttaaaaaataaaaaaaaaaaaaaaaaaaaaaaaaaaaatttattggtgacgttgaagaaaagggctgaggggtggatggctggagctggggctacgtaggcggcccctcctggtcttcctgctgcatccgtgcgatcagctgttgccgctcggccgcctggcgcatgcgcatcatgacgaggctctcgtagtccctctctgacagcactgagccctttgacagtcctgagtggctgcggcccacggcatcctggggctgtccctccaaccaggaaatcttcagagggttatccaccaggccaacttcattctggacagcctgctttgcacccaggggatacctctaga

SEQ ID NO: 280643 - DNA, 1843 bp, Homo sapiens
aggcgcagaggaggctagcgttccttgctgcctcgccccgcggcctctaggagacaggggccacggggagagcacagccacccggcgcgaagagccctctgtaccccgcttcctcttgaggccctcggaccgtccaggaaatgtctgggagcccgcctgcggagggcatagcgccgaccctcgctccccgcccaggacccgaatgaacctggagagcggatgccagcagtggccgaggcgctaggacaggaaggaccgccagacctctcaagatcagccttcctcgccaccgttctcacctctttgtccgctgccttctcctcaatgcctagcagcgcgtacaggtccatctgtaagagctccttggtcactgccatggttccggcctgacggattcgtactacaactcccaagagtctaagcgcgcgtgaggactgcaggctccgagcggcgcctagccctctgggaattgtgttctgggtcaggcttgactgactctgagggaggccggcagtcgtgaatgaactacgactcccagcagcccccgttgccgccgctgccgtacgctggctgcaggagagcgtccggattccctgctctaggtcgcggcgggacagtgccagtgggcgtgtgggcggggcggggcagggcagggaagggaagggcggagctggggtgagggtccaaggggcccaggacttggccggcgtgatctcagctctgcagaccctgcggtgctgggagccaccatggagagtaggtgctacggctgcgctgtcaagttcaccctcttcaagaaggagtacggctgtaagaattgtggcagggccttctgttcaggctgcctaagcttcagtgcagcagtgcctcggactgggaacacccaacagaaagtctgcaagcaatgccatgaggtcctgaccagagggtcttctgccaatgcctccaagtggtcaccacctcagaactataagaagcgtgtggcagccttggaagccaagcaaaagcccagcacttcccagagccagggactgacacgacaagaccagatgattgctgagcgcctagcacgactccgccaggagaacaagcccaagttagtcccctcacaggcagagatagaggcacggctggctgccctaaaggatgaacgtcagggttccatcccttccacccaggaaatggaggcacgacttgcagcgttgcagggcagagttctaccttctcaaaccccccagccggcacatcacacaccggacaccaggacccaagcccagcagacacaggatctgctaacgcagctggcagctgaggtggctatcgatgaaagctggaaaggaggaggcccagctgcctctctccagaatgatctcaaccagggtggcccagggagcactaattccaagaggcaggccaactggtccttggaggaggagaagagcagactgctggctgaggcagcacttgagttgcgggaggagaacacgaggcaggaacggattctggccctggccaagcgactagccatgctgcggggacaggaccccgagagagtgaccctccaggactatcgcctcccagaagtccggtcaccatccaggggagactccacctctcatcaccccaggctcagcccaaagctgatgaggacagaccagctgaaattgggtggaggaccgttctctgtccccaggtcctgtctctgcacagaaacttgaactccaggatggaattcttcctcctctgctgggactcctttgcatggcagggcctcatctcccctctcgcaagagggtctctttgttcaattttttttaatttaaaatgattgtgcctctgccca

SEQ ID NO: 280644 - DNA, 2915 bp, Homo sapiens
aggcgcagaggaggctagcgttccttgctgcctcgccccgcggcctctaggagacaggggccacggggagagcacagccacccggcgcgaagagccctctgtaccccgcttcctcttgaggccctcggaccgtccaggaaatgtctgggagcccgcctgcggagggcatagcgccgaccctcgctccccgcccaggacccgaatgaacctggagagcggatgccagcagtggccgaggcgctaggacaggaaggaccgccagacctctcaagatcagccttcctcgccaccgttctcacctctttgtccgctgccttctcctcaatgcctagcagcgcgtacaggtccatctgtaagagctccttggtcactgccatggttccggcctgacggattcgtactacaactcccaagagtctaagcgcgcgtgaggactgcaggctccgagcggcgcctagccctctgggaattgtgttctgggtcaggcttgactgactctgagggaggccggcagtcgtgaatgaactacgactcccagcagcccccgttgccgccgctgccgtacgctggctgcaggagagcgtccggattccctgctctaggtcgcggcgggacagtgccagtgggcgtgtgggcggggcggggcagggcagggaagggaagggcggagctggggtgagggtccaaggggcccaggacttggccggcgtgatctcagctctgcagaccctgcggtgctgggagccaccatggagagtaggtgctacggctgcgctgtcaagttcaccctcttcaagaaggaggcgagtcttccctccccgagggctgcagggccagggaggagaggagggaaaagcgcgggacttaacgtccaaagacttggtcttacggctcctttccagctgtgtggttttgatgaagtcattgatcctcagtttccatttctgtaaaatggggctaacattctctcgctttcagggtttatgtgagggtccactgaagtgctttaggtgagagttccctataaactgtaaagcgcgctgccgtcgtttttgcaaagctactcttttctgtcggcccagtgtagcatctggcggttttcttctctccaccctgctcctccgaagcgcggtgtccatcacaccaagcccgttactccctctgctctgaaatcttccccatcccgcagcctgcccttctccaggtcgctggagttagattaccacacttcctcctgcttccggggcaccatggtgaaggctgactgtcctgtccctatcacagacctgccagattcctctggtaaactgcaggttccctctgcctcagttgtggccagggattctgaccaggagatgatgggaactagatggagtaaattagtgtcacgcaggaaggcaggaccgtgcagcattcaccaacctggattttggagtcagcgttcaaatctgagctctgctgtcttattgaggcggtgaccttggtttggataagttatgtaacctctctggccctctcaaaataaggataatcacggttggcatcaagattaagtaaaataatgtgtgtaaattgtaaggaataaatcacatgatgaatgttaagtactgggtttagtgcctggcacatagtaagtgcttaataaatggaggctattgttagcccatcctgagccaagcctccctccatctctgcaagagcagaggaggcatcggctctgccctgtctctctgattctcctttgtggaagagtcagtggcctgaaatactgggctttatctatctgtcttctacatccctgggtcagggaattgaagacagggtagaaagcatgggaattttgtataaaccttcatttggcttgaataaggtactggaaaccgaggaattgctttactcaccatccctaggccttaggggccccactcctcttcttcctcccagcagctggtcataacttcagtgacttctctctgtgtgtgcttggagagtccctgggagcagcctgcaggggcgggtgagagggggatctcccgcttcatgtttcttgtagtacggctgtaagaattgtggcagggccttctgttcaggctgcctaagcttcagtgcagcagtgcctcggactgggaacacccaacagaaagtctgcaagcaatgccatgaggtcctgaccagagggtcttctgccaatgcctccaagtggtcaccacctcagaactataagaagcgtgtggcagccttggaagccaagcaaaagcccagcacttcccagagccagggactgacacgacaagaccagatgattgctgagcgcctagcacgactccgccaggagaacaagcccaagttagtcccctcacaggcagagatagaggcacggctggctgccctaaaggatgaacgtcagggttccatcccttccacccaggaaatggaggcacgacttgcagcgttgcagggcagagttctaccttctcaaaccccccagccggcacatcacacaccggacaccaggacccaagcccagcagacacaggatctgctaacgcagctggcagctgaggtggctatcgatgaaagctggaaaggaggaggcccagaacccctccacttggctccctaggaatctgccctacctctttccccagactggagaggctctgctgtccaccctctgggagatgaatataaatcggagagtgatcaacgttataagagttaccattcattgagtgcttactccaaagggagccagtgtaagcctagtgtttaagtgcacgggctttagaatcagacagtgattcccatttctaccacgtattagctgtgtgatgctggacaagttacttgacctaagtctcactttcctcatgtgtaaaatgaaggtatgtatggaaaaacctacctcacaggga

SEQ ID NO: 280645 - DNA, 2666 bp, Homo sapiens
aggcgcagaggaggctagcgttccttgctgcctcgccccgcggcctctaggagacaggggccacggggagagcacagccacccggcgcgaagagccctctgtaccccgcttcctcttgaggccctcggaccgtccaggaaatgtctgggagcccgcctgcggagggcatagcgccgaccctcgctccccgcccaggacccgaatgaacctggagagcggatgccagcagtggccgaggcgctaggacaggaaggaccgccagacctctcaagatcagccttcctcgccaccgttctcacctctttgtccgctgccttctcctcaatgcctagcagcgcgtacaggtccatctgtaagagctccttggtcactgccatggttccggcctgacggattcgtactacaactcccaagagtctaagcgcgcgtgaggactgcaggctccgagcggcgcctagccctctgggaattgtgttctgggtcaggcttgactgactctgagggaggccggcagtcgtgaatgaactacgactcccagcagcccccgttgccgccgctgccgtacgctggctgcaggagagcgtccggattccctgctctaggtcgcggcgggacagtgccagtgggcgtgtgggcggggcggggcagggcagggaagggaagggcggagctggggtgagggtccaaggggcccaggacttggccggcgtgatctcagctctgcagaccctgcggtgctgggagccaccatggagagtaggtgctacggctgcgctgtcaagttcaccctcttcaagaaggaggcgagtcttccctccccgagggctgcagggccagggaggagaggagggaaaagcgcgggacttaacgtccaaagacttggtcttacggctcctttccagctgtgtggttttgatgaagtcattgatcctcagtttccatttctgtaaaatggggctaacattctctcgctttcagggtttatgtgagggtccactgaagtgctttaggtgagagttccctataaactgtaaagcgcgctgccgtcgtttttgcaaagctactcttttctgtcggcccagtgtagcatctggcggttttcttctctccaccctgctcctccgaagcgcggtgtccatcacaccaagcccgttactccctctgctctgaaatcttccccatcccgcagcctgcccttctccaggtcgctggagttagattaccacacttcctcctgcttccggggcaccatggtgaaggctgactgtcctgtccctatcacagacctgccagattcctctggtaaactgcaggttccctctgcctcagttgtggccagggattctgaccaggagatgatgggaactagatggagtaaattagtgtcacgcaggaaggcaggaccgtgcagcattcaccaacctggattttggagtcagcgttcaaatctgagctctgctgtcttattgaggcggtgaccttggtttggataagttatgtaacctctctggccctctcaaaataaggataatcacggttggcatcaagattaagtaaaataatgtgtgtaaattgtaaggaataaatcacatgatgaatgttaagtactgggtttagtgcctggcacatagtaagtgcttaataaatggaggctattgttagcccatcctgagccaagcctccctccatctctgcaagagcagaggaggcatcggctctgccctgtctctctgattctcctttgtggaagagtcagtggcctgaaatactgggctttatctatctgtcttctacatccctgggtcagggaattgaagacagggtagaaagcatgggaattttgtataaaccttcatttggcttgaataaggtactggaaaccgaggaattgctttactcaccatccctaggccttaggggccccactcctcttcttcctcccagcagctggtcataacttcagtgacttctctctgtgtgtgcttggagagtccctgggagcagcctgcaggggcgggtgagagggggatctcccgcttcatgtttcttgtagtacggctgtaagaattgtggcagggccttctgttcaggctgcctaagcttcagtgcagcagtgcctcggactgggaacacccaacagaaagtctgcaagcaatgccatgaggtcctgaccagagggtcttctgccaatgcctccaagtggtcaccacctcagaactataagaagcgtgtggcagccttggaagccaagcaaaagcccagcacttcccagagccagggactgacacgacaagaccagatgattgctgagcgcctagcacgactccgccaggagaacaagcccaagttagtcccctcacaggcagagatagaggcacggctggctgccctaaaggatgaacgtcagggttccatcccttccacccaggaaatggaggcacgacttgcagcgttgcagggcagagttctaccttctcaaaccccccagccggtgagtgttatggcttaggagagaagcgggggtgctagcgggaggacccagcagaagcccagatacaggtattggggtgatacaaaagtaattgtggtttttgtcattacttttaattgcaaaaacctcagttacttttgcaccaacctttgtactttatgtactttgcaggagt

SEQ ID NO: 280646 - DNA, 4000 bp, Homo sapiens
tgcaggtgaggtgaagtgaggtcgagggtggtgttgggccggtgctgctgccgctgccgccggggaggaggtggaaagcggggctgtggcgggccggcgggggcggcctgtcagccgctgctttgtctccttagctcgggtcccttctgcgctgccgcagggaggccgcccgggccaggcgagccgaaccaatgctggacctggaggtagtgcccgaacgctctctggggaacgagcaatgggaattcacgctgggaatgcctctggctcaggcagtagccattcttcagaagcactgtcgcatcatcaaaaacgtccaggttctctacagtgaacagtctcctctaagccatgacctcattcttaacctgactcaggacgggatcaaactaatgtttgatgctttcaatcagagacttaaggtgatcgaagtatgtgatttgactaaagtaaagttaaaatattgtggcgtgcattttaattctcaggccatagctcctaccattgaacagattgaccagtcttttggcgcaacccatcctggagtgtacaactccgctgagcagctcttccatctcaacttcagaggactgtctttctcttttcagttagactcatggactgaggctccaaagtatgagcccaattttgcccatggcctggcttctctccagataccccatggagcaactgtaaaacgaatgtacatctacagtggcaacagcctgcaggataccaaggctcccatgatgcctctgagctgtttcctgggcaatgtctatgctgagagtgtagatgttcttcgagatggaactggacctgcaggtttacgacttcgcctacttgctgcaggttgtggacctggcctattagcagatgccaagatgcgggtatttgaacgttcagtgtattttggtgattcctgccaagatgttcttagcatgcttggctctccacacaaagtcttctataaatcagaagacaagatgaaaattcattctccttcccctcataaacaagttccatcgaagtgtaatgactacttttttaactacttcactcttggagtggacatcctctttgatgcgaatacacacaaagtgaagaagtttgttctacacaccaattaccctgggcattataatttcaacatgtgagtacacctgtctgtacctcccctctgtgaagtgagttttgggctgaaaaccccaggaaagagcttttggctttgggtgttcactaatttatctacacctgaattcttgctgtttcatgggaagtgaatttcctgagtgcttgctgtgttcctggcacagggtccaatgccttacatctctctgtttgaacccattttacaaatagggaaataagttcagaaagcttgatgtcttatccaaggtaataggctctccagaacccagggccaagatcttttctgttcgacttccgtgcctaaatctggcctcccccagtgaacactgtcaggcactcagagccagggctttgggcaggtgtgtttggttctgtttctcctggggtgtggggttggaatatgggagtggccaggccttctaggaggcccagcctttacccatttgccttctctctagttatcatcgctgtgagttcaagatcccactagccataaagaaagaaaacgcagatggtcagacagaaacatgcacgacctacagcaagtgggacaacatccaggagctcctgggccaccctgtggagaagcctgttgtcctgcacaggtcttcctccccaaacaacaccaacccatttggttccacattctgctttggtcttcagcgaatgatctttgaggtcatgcagaacaaccacattgcctcggtgaccctgtatggcccccccaggcctggtagccacctgagaacagcggaactcccctagggacaccaccacccatgcccctctgtcccgtggaactgtgcatcacatcctgctcagtgggcctctgtaccaccctgtgggttttcttggacacctggccagtgctgaagggctgttgtgatgttctgaggttgggctcaggctgggtgctctgccatgggctgagtggcccagatattcttctgtccatctttggcctgctggtgccagcaggggacacagactgcaaagagaagcacaaagtttgagccttgattcctggacccaggagctctcaactaacaaggaggcaggagaggtcaacccttgtcccatgcacattgggaagacttggggctctttctgtgactgaggacacaggcacccaggataaggacaaggtcctgcctttggctccacattgccacatgacccttaaggcaagcaggtagcgtgtccatagtacttggttgcgacatttgcactacatccactttagttacttgatgagctggctgtggccagggtggcccacctgcccttccctgttcctttcttgcacgcgctccctgcctgggcacaccaaactggttgaaacacagctttctaccatccaggtacatgcccaggcctggttctcacccctgttggagtcagctttcaagattgcctgtgcccctgctctgccccatcctggctggcagggctgcatgtttccatcctgtttgcctcttttatttaatgccaaagttttagccaaagacatcttcctacttttgttgtgtttcagcattctgttctgcactgtgggctggctctctgccccaaccctgggcactggcccctggctgggccatttcatggctcaaagcctctgggggctcaaggaaggctgggctgctcagtcccttcatgggtcttgctaatggaaagtagcatatatgtgctttaaaaatattaatccttttgaaaagaactgagaagaaaaatgtataattttatcccatttttaatattttggtctagcaacttgtgatacatagatgacaattttgtgagtttttcaaatgtgtgtacagatttttgtaaatatgactcttttgtaattaactcatgtacagcctcatcctgtatagtttaatgatgaatgtgcaggggacctgtctcaggctcctatatggttcctgggccttatagccaggtttgtgtggcgctcccgacttttgtgactgactggtgtcttcccatttggactgtggcctggccagagccccttgcatatccccactgtcaggggcagccaggactgttcccatcctcctggaatgggggaaccttccttatcccctgcccacatcccctctccaataaagcacctgtgccctcagcaatggcctgccatgtgctgttgctgggatgtttgtattaaggtaagtgtgggtattggttttttgagcaagggggtggttgaagcatatggggaaattaatagtggtggcatctcaggggaagacattccttggctcctctgaggggatacagcctccagtgggagactggcattgttgtgtgagttcaggaggtgaggaaagactaggtaggaccgtgcactcatttgtcccttatgtgtggctccatccctggtgctcagccacacctgggcccaggagaggttgtgggaagcataatatctgttttcagatgagctatggcaaagtgcctgccaggttcatgaattcaggctgtggcggccggagcccctccacctccctgtggggcctggccttgagagcctctgcatacgtccgcgtcagcctagggggttccaaatccagcagagtggtaggattccctaagtccctgccaccacaccagaacacacctctgtgctactaggaggaccagacatatccactgctctgggacctgttggacaagagatggtcatctaccacccagccttggctcgctcaaagggtcaccattacacgggtttcaactggttccagcagggtggaccgccaggagccaagcttaacccccatcccctgggatcctgtggagacaggcacctggtgatcagggaagaaccacatacacggcc

SEQ ID NO: 280647 - DNA, 3332 bp, Homo sapiens
tgcaggtgaggtgaagtgaggtcgagggtggtgttgggccggtgctgctgccgctgccgccggggaggaggtggaaagcggggctgtggcgggccggcgggggcggcctgtcagccgctgctttgtctccttagctcgggtcccttctgcgctgccgcagggaggccgcccgggccaggcgagccgaaccaatgctggacctggaggtagtgcccgaacgctctctggggaacgagcaatgggaattcacgctgggaatgcctctggctcaggcagtagccattcttcagaagcactgtcgcatcatcaaaaacgtccaggttctctacagtgaacagtctcctctaagccatgacctcattcttaacctgactcaggacgggatcaaactaatgtttgatgctttcaatcagagacttaaggtgatcgaagtatgtgatttgactaaagtaaagttaaaatattgtggcgtgcattttaattctcaggccatagctcctaccattgaacagattgaccagtcttttggcgcaacccatcctggagtgtacaactccgctgagcagctcttccatctcaacttcagaggactgtctttctcttttcagttagactcatggactgaggctccaaagtatgagcccaattttgcccatggcctggcttctctccagataccccatggagcaactgtaaaacgaatgtacatctacagtggcaacagcctgcaggataccaaggctcccatgatgcctctgagctgtttcctgggcaatgtctatgctgagagtgtagatgttcttcgagatggaactggacctgcaggtttacgacttcgcctacttgctgcaggttgtggacctggcctattagcagatgccaagatgcgggtatttgaacgttcagtgtattttggtgattcctgccaagatgttcttagcatgcttggctctccacacaaagtcttctataaatcagaagacaagatgaaaattcattctccttcccctcataaacaagttccatcgaagtgtaatgactacttttttaactacttcactcttggagtggacatcctctttgatgcgaatacacacaaagtgaagaagtttgttctacacaccaattaccctgggcattataatttcaacatttatcatcgctgtgagttcaagatcccactagccataaagaaagaaaacgcagatggtcagacagaaacatgcacgacctacagcaagtgggacaacatccaggagctcctgggccaccctgtggagaagcctgttgtcctgcacaggtcttcctccccaaacaacaccaacccatttggttccacattctgctttggtcttcagcgaatgatctttgaggtcatgcagaacaaccacattgcctcggtgaccctgtatggcccccccagatattcttctgtccatctttggcctgctggtgccagcaggggacacagactgcaaagagaagcacaaagtttgagccttgattcctggacccaggagctctcaactaacaaggaggcaggagaggtcaacccttgtcccatgcacattgggaagacttggggctctttctgtgactgaggacacaggcacccaggataaggacaaggtcctgcctttggctccacattgccacatgacccttaaggcaagcaggtagcgtgtccatagtacttggttgcgacatttgcactacatccactttagttacttgatgagctggctgtggccagggtggcccacctgcccttccctgttcctttcttgcacgcgctccctgcctgggcacaccaaactggttgaaacacagctttctaccatccaggtacatgcccaggcctggttctcacccctgttggagtcagctttcaagattgcctgtgcccctgctctgccccatcctggctggcagggctgcatgtttccatcctgtttgcctcttttatttaatgccaaagttttagccaaagacatcttcctacttttgttgtgtttcagcattctgttctgcactgtgggctggctctctgccccaaccctgggcactggcccctggctgggccatttcatggctcaaagcctctgggggctcaaggaaggctgggctgctcagtcccttcatgggtcttgctaatggaaagtagcatatatgtgctttaaaaatattaatccttttgaaaagaactgagaagaaaaatgtataattttatcccatttttaatattttggtctagcaacttgtgatacatagatgacaattttgtgagtttttcaaatgtgtgtacagatttttgtaaatatgactcttttgtaattaactcatgtacagcctcatcctgtatagtttaatgatgaatgtgcaggggacctgtctcaggctcctatatggttcctgggccttatagccaggtttgtgtggcgctcccgacttttgtgactgactggtgtcttcccatttggactgtggcctggccagagccccttgcatatccccactgtcaggggcagccaggactgttcccatcctcctggaatgggggaaccttccttatcccctgcccacatcccctctccaataaagcacctgtgccctcagcaatggcctgccatgtgctgttgctgggatgtttgtattaaggtaagtgtgggtattggttttttgagcaagggggtggttgaagcatatggggaaattaatagtggtggcatctcaggggaagacattccttggctcctctgaggggatacagcctccagtgggagactggcattgttgtgtgagttcaggaggtgaggaaagactaggtaggaccgtgcactcatttgtcccttatgtgtggctccatccctggtgctcagccacacctgggcccaggagaggttgtgggaagcataatatctgttttcagatgagctatggcaaagtgcctgccaggttcatgaattcaggctgtggcggccggagcccctccacctccctgtggggcctggccttgagagcctctgcatacgtccgcgtcagcctagggggttccaaatccagcagagtggtaggattccctaagtccctgccaccacaccagaacacacctctgtgctactaggaggaccagacatatccactgctctgggacctgttggacaagagatggtcatctaccacccagccttggctcgctcaaagggtcaccattacacgggtttcaactggttccagcagggtggaccgccaggagccaagcttaacccccatcccctgggatcctgtggagacaggcacctggtgatcagggaagaaccacatacacggcc

SEQ ID NO: 280648 - DNA, 3986 bp, Homo sapiens
tttagtagagtcagagttttaccatgttagctaggctggtttcaaatgcctgacctcaagtgatcctcccaccttggcctccgaaagtgctgggattgcaggcataagccaccacgcccggcccatgcatgatttttgtgatatccaccaccacagataagcaaaagagtccttgcattcaaagagttggacacctgtgcaccgtccaagtattctcttagtgcttgctgcttaacattattgtagctcttactgcttattgaactcttatttactcatgtatctgtagaccttagtagcccccaaacatccccaggctttactgcagggaccagtgcctagtgaagtggtagatgtcaatagatggatagccaaaataaccacataggtgtcttgctttatttcaggaatgcctctggctcaggcagtagccattcttcagaagcactgtcgcatcatcaaaaacgtccaggttctctacagtgaacagtctcctctaagccatgacctcattcttaacctgactcaggacgggatcaaactaatgtttgatgctttcaatcagagacttaaggtgatcgaagtatgtgatttgactaaagtaaagttaaaatattgtggcgtgcattttaattctcaggccatagctcctaccattgaacagattgaccagtcttttggcgcaacccatcctggaggtaagccaagtccatctgattcctctggtcatcagtggcagttcatagcaataaacctgcccggtagtgccatcccaccccacttcctggagtcaggctcccataggattgtggggttggtacttgggtgtgaaggaaacatcctcccccttgttttcaacctagtaggccagtttagaaacaagccacagggaaggtgttgtcagtcattactccctgccaggctggtttatgttagccatttcagatgccagtcaaccatgttattttcttctcccccacccccaacagtgtacaactccgctgagcagctcttccatctcaacttcagaggactgtctttctcttttcagttagactcatggactgaggctccaaagtatgagcccaattttgcccatggcctggcttctctccagataccccatggagcaactgtaaaacgaatgtacatctacagtggcaacagcctgcaggataccaaggctcccatgatgcctctgagctgtttcctgggcaatgtctatgctgagagtgtagatgttcttcgagatggaactggacctgcaggtttacgacttcgcctacttgctgcaggttgtggacctggcctattagcagatgccaagatgcgggtatttgaacgttcagtgtattttggtgattcctgccaagatgttcttagcatgcttggctctccacacaaagtcttctataaatcagaagacaagatgaaaattcattctccttcccctcataaacaagttccatcgaagtgtaatgactacttttttaactacttcactcttggagtggacatcctctttgatgcgaatacacacaaagtgaagaagtttgttctacacaccaattaccctgggcattataatttcaacatttatcatcgctgtgagttcaagatcccactagccataaagaaagaaaacgcagatggtcagacagaaacatgcacgacctacagcaagtgggacaacatccaggagctcctgggccaccctgtggagaagcctgttgtcctgcacaggtcttcctccccaaacaacaccaacccatttggttccacattctgctttggtcttcagcgaatgatctttgaggtcatgcagaacaaccacattgcctcggtgaccctgtatggcccccccaggcctggtagccacctgagaacagcggaactcccctagggacaccaccacccatgcccctctgtcccgtggaactgtgcatcacatcctgctcagtgggcctctgtaccaccctgtgggttttcttggacacctggccagtgctgaagggctgttgtgatgttctgaggttgggctcaggctgggtgctctgccatgggctgagtggcccagatattcttctgtccatctttggcctgctggtgccagcaggggacacagactgcaaagagaagcacaaagtttgagccttgattcctggacccaggagctctcaactaacaaggaggcaggagaggtcaacccttgtcccatgcacattgggaagacttggggctctttctgtgactgaggacacaggcacccaggataaggacaaggtcctgcctttggctccacattgccacatgacccttaaggcaagcaggtagcgtgtccatagtacttggttgcgacatttgcactacatccactttagttacttgatgagctggctgtggccagggtggcccacctgcccttccctgttcctttcttgcacgcgctccctgcctgggcacaccaaactggttgaaacacagctttctaccatccaggtacatgcccaggcctggttctcacccctgttggagtcagctttcaagattgcctgtgcccctgctctgccccatcctggctggcagggctgcatgtttccatcctgtttgcctcttttatttaatgccaaagttttagccaaagacatcttcctacttttgttgtgtttcagcattctgttctgcactgtgggctggctctctgccccaaccctgggcactggcccctggctgggccatttcatggctcaaagcctctgggggctcaaggaaggctgggctgctcagtcccttcatgggtcttgctaatggaaagtagcatatatgtgctttaaaaatattaatccttttgaaaagaactgagaagaaaaatgtataattttatcccatttttaatattttggtctagcaacttgtgatacatagatgacaattttgtgagtttttcaaatgtgtgtacagatttttgtaaatatgactcttttgtaattaactcatgtacagcctcatcctgtatagtttaatgatgaatgtgcaggggacctgtctcaggctcctatatggttcctgggccttatagccaggtttgtgtggcgctcccgacttttgtgactgactggtgtcttcccatttggactgtggcctggccagagccccttgcatatccccactgtcaggggcagccaggactgttcccatcctcctggaatgggggaaccttccttatcccctgcccacatcccctctccaataaagcacctgtgccctcagcaatggcctgccatgtgctgttgctgggatgtttgtattaaggtaagtgtgggtattggttttttgagcaagggggtggttgaagcatatggggaaattaatagtggtggcatctcaggggaagacattccttggctcctctgaggggatacagcctccagtgggagactggcattgttgtgtgagttcaggaggtgaggaaagactaggtaggaccgtgcactcatttgtcccttatgtgtggctccatccctggtgctcagccacacctgggcccaggagaggttgtgggaagcataatatctgttttcagatgagctatggcaaagtgcctgccaggttcatgaattcaggctgtggcggccggagcccctccacctccctgtggggcctggccttgagagcctctgcatacgtccgcgtcagcctagggggttccaaatccagcagagtggtaggattccctaagtccctgccaccacaccagaacacacctctgtgctactaggaggaccagacatatccactgctctgggacctgttggacaagagatggtcatctaccacccagccttggctcgctcaaagggtcaccattacacgggtttcaactggttccagcagggtggaccgccaggagccaagcttaacccccatcccctgggatcctgtggagacaggcacctggtgatcagggaagaaccacatacacggcc

SEQ ID NO: 280649 - DNA, 3533 bp, Homo sapiens
ctttcagtaagtctccttaactggcttccctttccctttttgagggtgtgaagaggacctgattcctggggcaggctcaggcagttttgctgatagaggagtagacaagcaaatgtgtggtaccactggcccctgcaggttctagttgtcttttagttttactggggccttcatacctcagggtctggtggcttctcttctctacccttttcttaagagtcactggtgtcataaagccccagaggatcaactctgtatatcagcctcatgagaactgaccttctcctgacctcattaatgctcttatttaaaagttctctaattaagctttgtattttgatataattagagactcacctgcctgtgtcttaaaaataactctcccagctactatctcacatgatctgtgggcccatcttgtgaagcctagtattaaaaaatatttttgtttttcagtggcgtgcattttaattctcaggccatagctcctaccattgaacagattgaccagtcttttggcgcaacccatcctggagtgtacaactccgctgagcagctcttccatctcaacttcagaggactgtctttctcttttcagttagactcatggactgaggctccaaagtatgagcccaattttgcccatggcctggcttctctccagataccccatggagcaactgtaaaacgaatgtacatctacagtggcaacagcctgcaggataccaaggctcccatgatgcctctgagctgtttcctgggcaatgtctatgctgagagtgtagatgttcttcgagatggaactggacctgcaggtttacgacttcgcctacttgctgcaggttgtggacctggcctattagcagatgccaagatgcgggtatttgaacgttcagtgtattttggtgattcctgccaagatgttcttagcatgcttggctctccacacaaagtcttctataaatcagaagacaagatgaaaattcattctccttcccctcataaacaagttccatcgaagtgtaatgactacttttttaactacttcactcttggagtggacatcctctttgatgcgaatacacacaaagtgaagaagtttgttctacacaccaattaccctgggcattataatttcaacatttatcatcgctgtgagttcaagatcccactagccataaagaaagaaaacgcagatggtcagacagaaacatgcacgacctacagcaagtgggacaacatccaggagctcctgggccaccctgtggagaagcctgttgtcctgcacaggtcttcctccccaaacaacaccaacccatttggttccacattctgctttggtcttcagcgaatgatctttgaggtcatgcagaacaaccacattgcctcggtgaccctgtatggcccccccaggcctggtagccacctgagaacagcggaactcccctagggacaccaccacccatgcccctctgtcccgtggaactgtgcatcacatcctgctcagtgggcctctgtaccaccctgtgggttttcttggacacctggccagtgctgaagggctgttgtgatgttctgaggttgggctcaggctgggtgctctgccatgggctgagtggcccagatattcttctgtccatctttggcctgctggtgccagcaggggacacagactgcaaagagaagcacaaagtttgagccttgattcctggacccaggagctctcaactaacaaggaggcaggagaggtcaacccttgtcccatgcacattgggaagacttggggctctttctgtgactgaggacacaggcacccaggataaggacaaggtcctgcctttggctccacattgccacatgacccttaaggcaagcaggtagcgtgtccatagtacttggttgcgacatttgcactacatccactttagttacttgatgagctggctgtggccagggtggcccacctgcccttccctgttcctttcttgcacgcgctccctgcctgggcacaccaaactggttgaaacacagctttctaccatccaggtacatgcccaggcctggttctcacccctgttggagtcagctttcaagattgcctgtgcccctgctctgccccatcctggctggcagggctgcatgtttccatcctgtttgcctcttttatttaatgccaaagttttagccaaagacatcttcctacttttgttgtgtttcagcattctgttctgcactgtgggctggctctctgccccaaccctgggcactggcccctggctgggccatttcatggctcaaagcctctgggggctcaaggaaggctgggctgctcagtcccttcatgggtcttgctaatggaaagtagcatatatgtgctttaaaaatattaatccttttgaaaagaactgagaagaaaaatgtataattttatcccatttttaatattttggtctagcaacttgtgatacatagatgacaattttgtgagtttttcaaatgtgtgtacagatttttgtaaatatgactcttttgtaattaactcatgtacagcctcatcctgtatagtttaatgatgaatgtgcaggggacctgtctcaggctcctatatggttcctgggccttatagccaggtttgtgtggcgctcccgacttttgtgactgactggtgtcttcccatttggactgtggcctggccagagccccttgcatatccccactgtcaggggcagccaggactgttcccatcctcctggaatgggggaaccttccttatcccctgcccacatcccctctccaataaagcacctgtgccctcagcaatggcctgccatgtgctgttgctgggatgtttgtattaaggtaagtgtgggtattggttttttgagcaagggggtggttgaagcatatggggaaattaatagtggtggcatctcaggggaagacattccttggctcctctgaggggatacagcctccagtgggagactggcattgttgtgtgagttcaggaggtgaggaaagactaggtaggaccgtgcactcatttgtcccttatgtgtggctccatccctggtgctcagccacacctgggcccaggagaggttgtgggaagcataatatctgttttcagatgagctatggcaaagtgcctgccaggttcatgaattcaggctgtggcggccggagcccctccacctccctgtggggcctggccttgagagcctctgcatacgtccgcgtcagcctagggggttccaaatccagcagagtggtaggattccctaagtccctgccaccacaccagaacacacctctgtgctactaggaggaccagacatatccactgctctgggacctgttggacaagagatggtcatctaccacccagccttggctcgctcaaagggtcaccattacacgggtttcaactggttccagcagggtggaccgccaggagccaagcttaacccccatcccctgggatcctgtggagacaggcacctggtgatcagggaagaaccacatacacggcc

SEQ ID NO: 280650 - DNA, 4075 bp, Homo sapiens
tttagtagagtcagagttttaccatgttagctaggctggtttcaaatgcctgacctcaagtgatcctcccaccttggcctccgaaagtgctgggattgcaggcataagccaccacgcccggcccatgcatgatttttgtgatatccaccaccacagataagcaaaagagtccttgcattcaaagagttggacacctgtgcaccgtccaagtattctcttagtgcttgctgcttaacattattgtagctcttactgcttattgaactcttatttactcatgtatctgtagaccttagtagcccccaaacatccccaggctttactgcagggaccagtgcctagtgaagtggtagatgtcaatagatggatagccaaaataaccacataggtgtcttgctttatttcaggaatgcctctggctcaggcagtagccattcttcagaagcactgtcgcatcatcaaaaacgtccaggttctctacagtgaacagtctcctctaagccatgacctcattcttaacctgactcaggacgggatcaaactaatgtttgatgctttcaatcagagacttaaggtgatcgaagtatgtgatttgactaaagtaaagttaaaatattgtggcgtgcattttaattctcaggccatagctcctaccattgaacagattgaccagtcttttggcgcaacccatcctggaggtaagccaagtccatctgattcctctggtcatcagtggcagttcatagcaataaacctgcccggtagtgccatcccaccccacttcctggagtcaggctcccataggattgtggggttggtacttgggtgtgaaggaaacatcctcccccttgttttcaacctagtaggccagtttagaaacaagccacagggaaggtgttgtcagtcattactccctgccaggctggtttatgttagccatttcagatgccagtcaaccatgttattttcttctcccccacccccaacagtgtacaactccgctgagcagctcttccatctcaacttcagaggactgtctttctcttttcagttagactcatggactgaggctccaaagtatgagcccaattttgcccatggcctggcttctctccagataccccatggagcaactgtaaaacgaatgtacatctacagtggcaacagcctgcaggataccaagtaagtataaggagcatgagtttcttgctaaggcctgggctgcctgggagaaagaaccaagcctctgctcattctgtgtctgtccccagggctcccatgatgcctctgagctgtttcctgggcaatgtctatgctgagagtgtagatgttcttcgagatggaactggacctgcaggtttacgacttcgcctacttgctgcaggttgtggacctggcctattagcagatgccaagatgcgggtatttgaacgttcagtgtattttggtgattcctgccaagatgttcttagcatgcttggctctccacacaaagtcttctataaatcagaagacaagatgaaaattcattctccttcccctcataaacaagttccatcgaagtgtaatgactacttttttaactacttcactcttggagtggacatcctctttgatgcgaatacacacaaagtgaagaagtttgttctacacaccaattaccctgggcattataatttcaacatttatcatcgctgtgagttcaagatcccactagccataaagaaagaaaacgcagatggtcagacagaaacatgcacgacctacagcaagtgggacaacatccaggagctcctgggccaccctgtggagaagcctgttgtcctgcacaggtcttcctccccaaacaacaccaacccatttggttccacattctgctttggtcttcagcgaatgatctttgaggtcatgcagaacaaccacattgcctcggtgaccctgtatggcccccccaggcctggtagccacctgagaacagcggaactcccctagggacaccaccacccatgcccctctgtcccgtggaactgtgcatcacatcctgctcagtgggcctctgtaccaccctgtgggttttcttggacacctggccagtgctgaagggctgttgtgatgttctgaggttgggctcaggctgggtgctctgccatgggctgagtggcccagatattcttctgtccatctttggcctgctggtgccagcaggggacacagactgcaaagagaagcacaaagtttgagccttgattcctggacccaggagctctcaactaacaaggaggcaggagaggtcaacccttgtcccatgcacattgggaagacttggggctctttctgtgactgaggacacaggcacccaggataaggacaaggtcctgcctttggctccacattgccacatgacccttaaggcaagcaggtagcgtgtccatagtacttggttgcgacatttgcactacatccactttagttacttgatgagctggctgtggccagggtggcccacctgcccttccctgttcctttcttgcacgcgctccctgcctgggcacaccaaactggttgaaacacagctttctaccatccaggtacatgcccaggcctggttctcacccctgttggagtcagctttcaagattgcctgtgcccctgctctgccccatcctggctggcagggctgcatgtttccatcctgtttgcctcttttatttaatgccaaagttttagccaaagacatcttcctacttttgttgtgtttcagcattctgttctgcactgtgggctggctctctgccccaaccctgggcactggcccctggctgggccatttcatggctcaaagcctctgggggctcaaggaaggctgggctgctcagtcccttcatgggtcttgctaatggaaagtagcatatatgtgctttaaaaatattaatccttttgaaaagaactgagaagaaaaatgtataattttatcccatttttaatattttggtctagcaacttgtgatacatagatgacaattttgtgagtttttcaaatgtgtgtacagatttttgtaaatatgactcttttgtaattaactcatgtacagcctcatcctgtatagtttaatgatgaatgtgcaggggacctgtctcaggctcctatatggttcctgggccttatagccaggtttgtgtggcgctcccgacttttgtgactgactggtgtcttcccatttggactgtggcctggccagagccccttgcatatccccactgtcaggggcagccaggactgttcccatcctcctggaatgggggaaccttccttatcccctgcccacatcccctctccaataaagcacctgtgccctcagcaatggcctgccatgtgctgttgctgggatgtttgtattaaggtaagtgtgggtattggttttttgagcaagggggtggttgaagcatatggggaaattaatagtggtggcatctcaggggaagacattccttggctcctctgaggggatacagcctccagtgggagactggcattgttgtgtgagttcaggaggtgaggaaagactaggtaggaccgtgcactcatttgtcccttatgtgtggctccatccctggtgctcagccacacctgggcccaggagaggttgtgggaagcataatatctgttttcagatgagctatggcaaagtgcctgccaggttcatgaattcaggctgtggcggccggagcccctccacctccctgtggggcctggccttgagagcctctgcatacgtccgcgtcagcctagggggttccaaatccagcagagtggtaggattccctaagtccctgccaccacaccagaacacacctctgtgctactaggaggaccagacatatccactgctctgggacctgttggacaagagatggtcatctaccacccagccttggctcgctcaaagggtcaccattacacgggtttcaactggttccagcagggtggaccgccaggagccaagcttaacccccatcccctgggatcctgtggagacaggcacctggtgatcagggaagaaccacatacacggcc

SEQ ID NO: 280651 - DNA, 2817 bp, Homo sapiens
tgcaggtgaggtgaagtgaggtcgagggtggtgttgggccggtgctgctgccgctgccgccggggaggaggtggaaagcggggctgtggcgggccggcgggggcggcctgtcagccgctgctttgtctccttagctcgggtcccttctgcgctgccgcagggaggccgcccgggccaggcgagccgaaccaatgctggacctggaggtagtgcccgaacgctctctggggaacgagcaatgggaattcacgctgggaatgcctctggctcaggcagtagccattcttcagaagcactgtcgcatcatcaaaaacgtccaggttctctacagtgaacagtctcctctaagccatgacctcattcttaacctgactcaggacgggatcaaactaatgtttgatgctttcaatcagagacttaaggtgatcgaagtatgtgatttgactaaagtaaagttaaaatattgtggcgtgcattttaattctcaggccatagctcctaccattgaacagattgaccagtcttttggcgcaacccatcctggagtgtacaactccgctgagcagctcttccatctcaacttcagaggactgtctttctcttttcagttagactcatggactgaggctccaaagtatgagcccaattttgcccatggcctggcttctctccagataccccatggagcaactgtaaaacgaatgtacatctacagtggcaacagcctgcaggataccaaggctcccatgatgcctctgagctgtttcctgggcaatgtctatgctgagagtgtagatgttcttcgagatggaactggacctgcaggtttacgacttcgcctacttgctgcaggttgtggacctggcctattagcagatgccaagatgcgggtatttgaacgttcagtgtattttggtgattcctgccaagatgttcttagcatgcttggctctccacacaaagtcttctataaatcagaagacaagatgaaaattcattctccttcccctcataaacaagttccatcgaagtgtaatgactacttttttaactacttcactcttggagtggacatcctctttgatgcgaatacacacaaagtgaagaagtttgttctacacaccaattaccctgggcattataatttcaacatttatcatcgctgtgagttcaagatcccactagccataaagaaagaaaacgcagatggtcagacagaaacatgcacgacctacagcaagtgggacaacatccaggagctcctgggccaccctgtggagaagcctgttgtcctgcacaggtcttcctccccaaacaacaccaacccatttggttccacattctgctttggtcttcagcgaatgatctttgaggtcatgcagaacaaccacattgcctcggtgaccctgtatggcccccccaggcctggtagccacctgagaacagcggaactcccctagggacaccaccacccatgcccctctgtcccgtggaactgtgcatcacatcctgctcagtgggcctctgtaccaccctgtgggttttcttggacacctggccagtgctgaagggctgttgtgatgttctgaggttgggctcaggctgggtgcttgctcagtcccttcatgggtcttgctaatggaaagtagcatatatgtgctttaaaaatattaatccttttgaaaagaactgagaagaaaaatgtataattttatcccatttttaatattttggtctagcaacttgtgatacatagatgacaattttgtgagtttttcaaatgtgtgtacagatttttgtaaatatgactcttttgtaattaactcatgtacagcctcatcctgtatagtttaatgatgaatgtgcaggggacctgtctcaggctcctatatggttcctgggccttatagccaggtttgtgtggcgctcccgacttttgtgactgactggtgtcttcccatttggactgtggcctggccagagccccttgcatatccccactgtcaggggcagccaggactgttcccatcctcctggaatgggggaaccttccttatcccctgcccacatcccctctccaataaagcacctgtgccctcagcaatggcctgccatgtgctgttgctgggatgtttgtattaaggtaagtgtgggtattggttttttgagcaagggggtggttgaagcatatggggaaattaatagtggtggcatctcaggggaagacattccttggctcctctgaggggatacagcctccagtgggagactggcattgttgtgtgagttcaggaggtgaggaaagactaggtaggaccgtgcactcatttgtcccttatgtgtggctccatccctggtgctcagccacacctgggcccaggagaggttgtgggaagcataatatctgttttcagatgagctatggcaaagtgcctgccaggttcatgaattcaggctgtggcggccggagcccctccacctccctgtggggcctggccttgagagcctctgcatacgtccgcgtcagcctagggggttccaaatccagcagagtggtaggattccctaagtccctgccaccacaccagaacacacctctgtgctactaggaggaccagacatatccactgctctgggacctgttggacaagagatggtcatctaccacccagccttggctcgctcaaagggtcaccattacacgggtttcaactggttccagcagggtggaccgccaggagccaagcttaacccccatcccctgggatcctgtggagacaggcacctggtgatcagggaagaaccacatacacggcc

SEQ ID NO: 280652 - DNA, 3498 bp, Homo sapiens
ccaccacgtctggccagaaactgcactgtttttgttcacttttgtttcttcaacatctagcacaatgtcctagcccatggtaggcaataaagtagtgaatgaataagtgaatgaagtatccagagcttcatgtcacatgtgggggattgaataagtccctggcattattttgaatagcgatctcttgtacagtcttaagccctggtgacctgatgtttctgattgcatgcagtcttgccccttgccagacctaataatgtagcatgcagccagtagcttctctggggcccccagagagggtctctggtcctaaccataacctgacaacctctctgtcttgttttttgcaggttgtggacctggcctattagcagatgccaagatgcgggtatttgaacgttcagtgtattttggtgattcctgccaagatgttcttagcatgcttggctctccacacaaagtcttctataaatcagaagacaagatgaaaattcattctccttcccctcataaacaagttccatcgaagtgtaatgactacttttttaactacttcactcttggagtggacatcctctttgatgcgaatacacacaaagtgaagaagtttgttctacacaccaattaccctgggcattataatttcaacatgtgagtacacctgtctgtacctcccctctgtgaagtgagttttgggctgaaaaccccaggaaagagcttttggctttgggtgttcactaatttatctacacctgaattcttgctgtttcatgggaagtgaatttcctgagtgcttgctgtgttcctggcacagggtccaatgccttacatctctctgtttgaacccattttacaaatagggaaataagttcagaaagcttgatgtcttatccaaggtaataggctctccagaacccagggccaagatcttttctgttcgacttccgtgcctaaatctggcctcccccagtgaacactgtcaggcactcagagccagggctttgggcaggtgtgtttggttctgtttctcctggggtgtggggttggaatatgggagtggccaggccttctaggaggcccagcctttacccatttgccttctctctagttatcatcgctgtgagttcaagatcccactagccataaagaaagaaaacgcagatggtcagacagaaacatgcacgacctacagcaagtgggacaacatccaggagctcctgggccaccctgtggagaagcctgttgtcctgcacaggtcttcctccccaaacaacaccaacccatttggttccacattctgctttggtcttcagcgaatgatctttgaggtcatgcagaacaaccacattgcctcggtgaccctgtatggcccccccaggcctggtagccacctgagaacagcggaactcccctagggacaccaccacccatgcccctctgtcccgtggaactgtgcatcacatcctgctcagtgggcctctgtaccaccctgtgggttttcttggacacctggccagtgctgaagggctgttgtgatgttctgaggttgggctcaggctgggtgctctgccatgggctgagtggcccagatattcttctgtccatctttggcctgctggtgccagcaggggacacagactgcaaagagaagcacaaagtttgagccttgattcctggacccaggagctctcaactaacaaggaggcaggagaggtcaacccttgtcccatgcacattgggaagacttggggctctttctgtgactgaggacacaggcacccaggataaggacaaggtcctgcctttggctccacattgccacatgacccttaaggcaagcaggtagcgtgtccatagtacttggttgcgacatttgcactacatccactttagttacttgatgagctggctgtggccagggtggcccacctgcccttccctgttcctttcttgcacgcgctccctgcctgggcacaccaaactggttgaaacacagctttctaccatccaggtacatgcccaggcctggttctcacccctgttggagtcagctttcaagattgcctgtgcccctgctctgccccatcctggctggcagggctgcatgtttccatcctgtttgcctcttttatttaatgccaaagttttagccaaagacatcttcctacttttgttgtgtttcagcattctgttctgcactgtgggctggctctctgccccaaccctgggcactggcccctggctgggccatttcatggctcaaagcctctgggggctcaaggaaggctgggctgctcagtcccttcatgggtcttgctaatggaaagtagcatatatgtgctttaaaaatattaatccttttgaaaagaactgagaagaaaaatgtataattttatcccatttttaatattttggtctagcaacttgtgatacatagatgacaattttgtgagtttttcaaatgtgtgtacagatttttgtaaatatgactcttttgtaattaactcatgtacagcctcatcctgtatagtttaatgatgaatgtgcaggggacctgtctcaggctcctatatggttcctgggccttatagccaggtttgtgtggcgctcccgacttttgtgactgactggtgtcttcccatttggactgtggcctggccagagccccttgcatatccccactgtcaggggcagccaggactgttcccatcctcctggaatgggggaaccttccttatcccctgcccacatcccctctccaataaagcacctgtgccctcagcaatggcctgccatgtgctgttgctgggatgtttgtattaaggtaagtgtgggtattggttttttgagcaagggggtggttgaagcatatggggaaattaatagtggtggcatctcaggggaagacattccttggctcctctgaggggatacagcctccagtgggagactggcattgttgtgtgagttcaggaggtgaggaaagactaggtaggaccgtgcactcatttgtcccttatgtgtggctccatccctggtgctcagccacacctgggcccaggagaggttgtgggaagcataatatctgttttcagatgagctatggcaaagtgcctgccaggttcatgaattcaggctgtggcggccggagcccctccacctccctgtggggcctggccttgagagcctctgcatacgtccgcgtcagcctagggggttccaaatccagcagagtggtaggattccctaagtccctgccaccacaccagaacacacctctgtgctactaggaggaccagacatatccactgctctgggacctgttggacaagagatggtcatctaccacccagccttggctcgctcaaagggtcaccattacacgggtttcaactggttccagcagggtggaccgccaggagccaagcttaacccccatcccctgggatcctgtggagacaggcacctggtgatcagggaagaaccacatacacggcc

SEQ ID NO: 280653 - DNA, 3237 bp, Homo sapiens
tttagtagagtcagagttttaccatgttagctaggctggtttcaaatgcctgacctcaagtgatcctcccaccttggcctccgaaagtgctgggattgcaggcataagccaccacgcccggcccatgcatgatttttgtgatatccaccaccacagataagcaaaagagtccttgcattcaaagagttggacacctgtgcaccgtccaagtattctcttagtgcttgctgcttaacattattgtagctcttactgcttattgaactcttatttactcatgtatctgtagaccttagtagcccccaaacatccccaggctttactgcagggaccagtgcctagtgaagtggtagatgtcaatagatggatagccaaaataaccacataggtgtcttgctttatttcaggaatgcctctggctcaggcagtagccattcttcagaagcactgtcgcatcatcaaaaacgtccaggttctctacagtgaacagtctcctctaagccatgacctcattcttaacctgactcaggacgggatcaaactaatgtttgatgctttcaatcagagacttaaggtgatcgaagtatgtgatttgactaaagtaaagttaaaatattgtggcgtgcattttaattctcaggccatagctcctaccattgaacagattgaccagtcttttggcgcaacccatcctggaggtaagccaagtccatctgattcctctggtcatcagtggcagttcatagcaataaacctgcccggtagtgccatcccaccccacttcctggagtcaggctcccataggattgtggggttggtacttgggtgtgaaggaaacatcctcccccttgttttcaacctagtaggccagtttagaaacaagccacagggaaggtgttgtcagtcattactccctgccaggctggtttatgttagccatttcagatgccagtcaaccatgttattttcttctcccccacccccaacagtgtacaactccgctgagcagctcttccatctcaacttcagaggactgtctttctcttttcagttagactcatggactgaggctccaaagtatgagcccaattttgcccatggcctggcttctctccagataccccatggagcaactgtaaaacgaatgtacatctacagtggcaacagcctgcaggataccaagtaagtataaggagcatgagtttcttgctaaggcctgggctgcctgggagaaagaaccaagcctctgctcattctgtgtctgtccccagggctcccatgatgcctctgagctgtttcctgggcaatgtctatgctgagagtgtagatgttcttcgagatggaactggacctgcaggtttacgacttcgcctacttgctgcaggtcagtgactggctttgaggttggtacattccgcattatacccatgttgagacagtctaaaatcccacgtgcttagggtgtgtctcagtccattcaggctgctataataaaataccataaactgagtggctgctaaacaacaaaaatttatttcttgcagttctggaggctgggaagtccaagatcaaggcactggcagattcagtatctggatgcgcctgcagtctagttcatagaagaaacttctccccgtatcctcatatggtgcaaggggctagttaactccctggagtctgttttttaacggcactgatctcaatcctgaggtctctgcttccataatgtaatcacctcccaaagccctgaccttctaataccatcaccttggtggttaggatttcaacatatgaattttaggggaacaaaagcattcagtccattgccacatagttggtagaagacaaatgatgcagatgtttatggttaaagcttttgtttagttttgtcaagggactggacatagtcttataattagcaaatcttaataagcaacagcactgcttctctcagcatgcacataggcctgctgtgtgcttatatagctttgtgacagttcccaagtgtttcctggagatgcatcctgtgggttgcagtgctactgctctccccttttttgtttttttctttttcttttttttgagacagagtcttactctgttgctgaggctggagtgcagtggcacgatctcagcttactgcaccccctgcctcccaggttcaagtgattctcctgcctcagcctcccaagtagctgggattacaggcacgcattagcacacccggctaatttttgtatttttagtagagacagggtttcaccatgttgttcaggctggtctggaactcctgacctcatgatccgcccacctcggcctcccaaagtgctgggattacaggcgtgagccaccgcacctggccagctctccccttttttctacctttttttgttttgttttgttttgttttgtaagagatggcctcattctgtcatccaggctgtagtgcagtggtgcaatcatagctcactgcagcctcaaaactcctgggctcaagtgatctcacctaagcctcccaagtagctaggaccacaggcatgtgctaccatgcccagttaatttttgtctatgtggagatgggtcttgctgtgttacccagaatgatcttgaactcctgggctcaatcgatcctccctccttggctttccaaagtgctggtattacaggtgcaagccgctacacccagcttttctccctatattatccaggccggtgtgcattggaatactgtggccttgaactcctgggctcaagcaatcctgccttaacctcctgactaggctacaggcacgcaccaccatgcctggctctcctttttctaccctttatgccaagttctcaacgtaggcaagcagacgggacttgttgaattgtggtttggccacaccttggccagagttttgccaaccatgaacaacaacaacaaaaagaaatagttggccgggtgcagtggctcatgcctgtaatcccagcaccttgggaggccaaagcgggtggattacctgaggtcaggagttcaagaccagcctgaccaatatgatgaaaccccatctctgctaaaaatacaaaaattagctgggcgtggtaaagcacgcctgtactcccagctactcaggaggctgagacaggagaatcgcttgaactcaggaggcggaggttgcagtgagctgagatagcgccattgcactggagcctgggcaacaagagcgaaactccttctcacagaaaaaaaaaaaa

SEQ ID NO: 280654 - DNA, 1021 bp, Homo sapiens
gaattacgaatgtcgagctccggtaaccaaacgtgggacctcatcctgtatagtttaatgatgaatgtgcaggggacctgtctcaggctcctatatggttcctgggccttatagccaggtttgtgtggcgctcccgacttttgtgactgactggtgtcttcccatttggactgtggcctggccagagccccttgcatatccccactgtcaggggcagccaggactgttcccatcctcctggaatgggggaaccttccttatcccctgcccacatcccctctccaataaagcacctgtgccctcagcaatggcctgccatgtgctgttgctgggatgtttgtattaaggtaagtgtgggtattggttttttgagcaagggggtggttgaagcatatggggaaattaatagtggtggcatctcaggggaagacattccttggctcctctgaggggatacagcctccagtgggagactggcattgttgtgtgagttcaggaggtgaggaaagactaggtaggaccgtgcactcatttgtcccttatgtgtggctccatccctggtgctcagccacacctgggcccaggagaggttgtgggaagcataatatctgttttcagatgagctatggcaaagtgcctgccaggttcatgaattcaggctgtggcggccggagcccctccacctccctgtggggcctggccttgagagcctctgcatacgtccgcgtcagcctagggggttccaaatccagcagagtggtaggattccctaagtccctgccaccacaccagaacacacctctgtgctactaggaggaccagacatatccactgctctgggacctgttggacaagagatggtcatctaccacccagccttggctcgctcaaagggtcaccattacacgggtttcaactggttccagcagggtggaccgccaggagccaagcttaacccccatcccctgggatcctgtggagacaggcacctggtgatcagggaagaaccacatacacggcc

SEQ ID NO: 280655 - DNA, 496 bp, Homo sapiens
cctgccttggcctcccaaagtcctgagtctgcatcctcggattctcttggctctgctgcttaccatctgggcaccacgctaggtgacttactgcacctcctggggccttggtttcctcatctgtaaagaggaacctgccttgaaagtttgtaaagcacctttattcagtaaatctttattgagtacctactgtgtgccaggcactactctaggagttcgggatacagcagtgaagaacacagacggacaaccctgccctcacggagcttatattcagagggaagaaagccacttagcaggacaaagagctaaaatggatagtacagtgtgttgagaggtaacacacatgacagaaaagataaggtatggggccaggcacggtggctcacacctgtaatgccagcactttgggaggccgaggtgggcggatcacctgaggtcaggagtttgagaccaggctggccaacatggtgaaaccccgtctctactaaaaata

SEQ ID NO: 280656 - DNA, 295 bp, Homo sapiens
gggaccagtgcctagtgaagtggtagatgtcaatagatggatagccaaaataaccacataggtgtcttgctttatttcaggaatgcctctggctcaggcagtagccattcttcagaagcactgtcgcatcatcaaaaacgtccaggttctctacagtgaacaggtgagtggtggctgatttgtttattgaaatagcatccctcggtagtgagtcacttccagagctgatgctttgggataggctgactggcaaggatagctgtgttcgaatgggagaatctctagcaccagccag

SEQ ID NO: 280657 - DNA, 3543 bp, Homo sapiens
tgcaggtgaggtgaagtgaggtcgagggtggtgttgggccggtgctgctgccgctgccgccggggaggaggtggaaagcggggctgtggcgggccggcgggggcggcctgtcagccgctgctttgtctccttagctcgggtcccttctgcgctgccgcagggaggccgcccgggccaggcgagccgaaccaatgctggacctggaggtagtgcccgaacgctctctggggaacgagcaatgggaattcacgctgggaatgcctctggctcaggcagtagccattcttcagaagcactgtcgcatcatcaaaaacgtccaggttctctacagtgaacagtctcctctaagccatgacctcattcttaacctgactcaggacgggatcaaactaatgtttgatgctttcaatcagagacttaaggtgatcgaagtatgtgatttgactaaagtaaagttaaaatattgtggcgtgcattttaattctcaggccatagctcctaccattgaacagattgaccagtcttttggcgcaacccatcctggagtgtacaactccgctgagcagctcttccatctcaacttcagaggactgtctttctcttttcagttagactcatggactgaggctccaaagtatgagcccaattttgcccatggcctggcttctctccagataccccatggagcaactgtaaaacgaatgtacatctacagtggcaacagcctgcaggataccaaggctcccatgatgcctctgagctgtttcctgggcaatgtctatgctgagagtgtagatgttcttcgagatggaactggacctgcaggtttacgacttcgcctacttgctgcaggttgtggacctggcctattagcagatgccaagatgcgggtatttgaacgttcagtgtattttggtgattcctgccaagatgttcttagcatgcttggctctccacacaaagtcttctataaatcagaagacaagatgaaaattcattctccttcccctcataaacaagttccatcgaagtgtaatgactacttttttaactacttcactcttggagtggacatcctctttgatgcgaatacacacaaagtgaagaagtttgttctacacaccaattaccctgggcattataatttcaacatttatcatcgctgtgagttcaagatcccactagccataaagaaagaaaacgcagatggtcagacagaaacatgcacgacctacagcaagtgggacaacatccaggagctcctgggccaccctgtggagaagcctgttgtcctgcacaggtcttcctccccaaacaacaccaacccatttggttccacattctgctttggtcttcagcgaatgatctttgaggtcatgcagaacaaccacattgcctcggtgaccctgtatggcccccccaggcctggtagccacctgagaacagcggaactcccctagggacaccaccacccatgcccctctgtcccgtggaactgtgcatcacatcctgctcagtgggcctctgtaccaccctgtgggttttcttggacacctggccagtgctgaagggctgttgtgatgttctgaggttgggctcaggctgggtgctctgccatgggctgagtggcccagatattcttctgtccatctttggcctgctggtgccagcaggggacacagactgcaaagagaagcacaaagtttgagccttgattcctggacccaggagctctcaactaacaaggaggcaggagaggtcaacccttgtcccatgcacattgggaagacttggggctctttctgtgactgaggacacaggcacccaggataaggacaaggtcctgcctttggctccacattgccacatgacccttaaggcaagcaggtagcgtgtccatagtacttggttgcgacatttgcactacatccactttagttacttgatgagctggctgtggccagggtggcccacctgcccttccctgttcctttcttgcacgcgctccctgcctgggcacaccaaactggttgaaacacagctttctaccatccaggtacatgcccaggcctggttctcacccctgttggagtcagctttcaagattgcctgtgcccctgctctgccccatcctggctggcagggctgcatgtttccatcctgtttgcctcttttatttaatgccaaagttttagccaaagacatcttcctacttttgttgtgtttcagcattctgttctgcactgtgggctggctctctgccccaaccctgggcactggcccctggctgggccatttcatggctcaaagcctctgggggctcaaggaaggctgggctgctcagtcccttcatgggtcttgctaatggaaagtagcatatatgtgctttaaaaatattaatccttttgaaaagaactgagaagaaaaatgtataattttatcccatttttaatattttggtctagcaacttgtgatacatagatgacaattttgtgagtttttcaaatgtgtgtacagatttttgtaaatatgactcttttgtaattaactcatgtacagcctcatcctgtatagtttaatgatgaatgtgcaggggacctgtctcaggctcctatatggttcctgggccttatagccaggtttgtgtggcgctcccgacttttgtgactgactggtgtcttcccatttggactgtggcctggccagagccccttgcatatccccactgtcaggggcagccaggactgttcccatcctcctggaatgggggaaccttccttatcccctgcccacatcccctctccaataaagcacctgtgccctcagcaatggcctgccatgtgctgttgctgggatgtttgtattaaggtaagtgtgggtattggttttttgagcaagggggtggttgaagcatatggggaaattaatagtggtggcatctcaggggaagacattccttggctcctctgaggggatacagcctccagtgggagactggcattgttgtgtgagttcaggaggtgaggaaagactaggtaggaccgtgcactcatttgtcccttatgtgtggctccatccctggtgctcagccacacctgggcccaggagaggttgtgggaagcataatatctgttttcagatgagctatggcaaagtgcctgccaggttcatgaattcaggctgtggcggccggagcccctccacctccctgtggggcctggccttgagagcctctgcatacgtccgcgtcagcctagggggttccaaatccagcagagtggtaggattccctaagtccctgccaccacaccagaacacacctctgtgctactaggaggaccagacatatccactgctctgggacctgttggacaagagatggtcatctaccacccagccttggctcgctcaaagggtcaccattacacgggtttcaactggttccagcagggtggaccgccaggagccaagcttaacccccatcccctgggatcctgtggagacaggcacctggtgatcagggaagaaccacatacacggcc

SEQ ID NO: 280658 - DNA, 2858 bp, Homo sapiens
tgcaggtgaggtgaagtgaggtcgagggtggtgttgggccggtgctgctgccgctgccgccggggaggaggtggaaagcggggctgtggcgggccggcgggggcggcctgtcagccgctgctttgtctccttagctcgggtcccttctgcgctgccgcagggaggccgcccgggccaggcgagccgaaccaatgctggacctggaggtagtgcccgaacgctctctggggaacgagcaatgggaattcacgctgggaatgcctctggctcaggcagtagccattcttcagaagcactgtcgcatcatcaaaaacgtccaggttctctacagtgaacagtctcctctaagccatgacctcattcttaacctgactcaggacgggatcaaactaatgtttgatgctttcaatcagagacttaaggtgatcgaagtatgtgatttgactaaagtaaagttaaaatattgtggcgtgcattttaattctcaggccatagctcctaccattgaacagattgaccagtcttttggcgcaacccatcctggagtgtacaactccgctgagcagctcttccatctcaacttcagaggactgtctttctcttttcagttagactcatggactgaggctccaaagtatgagcccaattttgcccatggcctggcttctctccagataccccatggagcaactgtaaaacgaatgtacatctacagtggcaacagcctgcaggataccaaggctcccatgatgcctctgagctgtttcctgggcaatgtctatgctgagagtgtagatgttcttcgagatggaactggacctgcaggtttacgacttcgcctacttgctgcaggttgtggacctggcctattagcagatgccaagatgcgggtatttgaacgttcagtgtattttggtgattcctgccaagatgttcttagcatgcttggctctccacacaaagtcttctataaatcagaagacaagatgaaaattcattctccttcccctcataaacaagttccatcgaagtgtaatgactacttttttaactacttcactcttggagtggacatcctctttgatgcgaatacacacaaagtgaagaagtttgttctacacaccaattaccctgggcattataatttcaacatttatcatcgctgtgagttcaagatcccactagccataaagaaagaaaacgcagatggtcagacagaaacatgcacgacctacagcaagtgggacaacatccaggagctcctgggccaccctgtggagaagcctgttgtcctgcacaggtcttcctccccaaacaacaccaacccatttggttccacattctgctttggtcttcagcgaatgatctttgaggtcatgcagaacaaccacattgcctcggtgaccctgtatggcccccccaggcctggtagccacctgagaacagcggaactcccctagggacaccaccacccatgcccctctgtcccgtggaactgtgcatcacatcctgctcagtgggcctctgtaccaccctgtgggttttcttggacacctggccagtgctgaagggctgttgtgatgttctgaggttgggctcaggctgggtgctctgccatgggctgagtggcccagatattcttctgtccatctttggcctgctggtgccagcaggggacacagactgcaaagagaagcacaaagtttgagccttgattcctggacccaggagctctcaactaacaaggaggcaggagaggtcaacccttgtcccatgcacattgggaagacttggggctctttctgtgactgaggacacaggcacccaggataaggacaaggtcctgcctttggctccacattgccacatgacccttaaggcaagcaggtagcgtgtccatagtacttggttgcgacatttgcactacatccactttagttacttgatgagctggctgtggccagggtggcccacctgcccttccctgttcctttcttgcacgcgctccctgcctgggcacaccaaactggttgaaacacagctttctaccatccaggtacatgcccaggcctggttctcacccctgttggagtcagctttcaagattgcctgtgcccctgctctgccccatcctggctggcagggctgcatgtttccatcctgtttgcctcttttatttaatgccaaagttttagccaaagacatcttcctacttttgttgtgtttcagcattctgttctgcactgtgggctggctctctgccccaaccctgggcactggcccctggctgggccatttcatggctcaaagcctctgggggctcaaggaaggctgggctgctcagtcccttcatgggtcttgctaatggaaagtagcatatatgtgctttaaaaatattaatccttttgaaaagaactgagaagaaaaatgtataattttatcccatttttaatattttggtctagcaacttgtgatacatagatgacaattttgtgagtttttcaaatgtgtgtacagatttttgtaaatatgactcttttgtaattaactcatgtacagcctcatcctgtatagtttaatgatgaatgtgcaggggacctgtctcaggctcctatatggttcctgggccttatagccaggtttgtgtggcgctcccgacttttgtgactgactggtgtcttcccatttggactgtggcctggccagagccccttgcatatccccactgtcaggggcagccaggactgttcccatcctcctggaatgggggaaccttccttatcccctgcccacatcccctctccaataaagcacctggcaggccattgctgagggcacaggtgctttattggagagc

SEQ ID NO: 280659 - DNA, 1111 bp, Homo sapiens
tgcaggtgaggtgaagtgaggtcgagggtggtgttgggccggtgctgctgccgctgccgccggggaggaggtggaaagcggggctgtggcgggccggcgggggcggcctgtcagccgctgctttgtctccttagctcgggtcccttctgcgctgccgcagggaggccgcccgggccaggcgagccgaaccaatgctggacctggaggtagtgcccgaacgctctctggggaacgagcaatgggaattcacgctgggaatgcctctggctcaggcagtagccattcttcagaagcactgtcgcatcatcaaaaacgtccaggttctctacagtgaacagtctcctctaagccatgacctcattcttaacctgactcaggacgggatcaaactaatgtttgatgctttcaatcagagacttaaggtgatcgaagtatgtgatttgactaaagtaaagttaaaatattgtggcgtgcattttaattctcaggccatagctcctaccattgaacagattgaccagtcttttggcgcaacccatcctggagtgtacaactccgctgagcagctcttccatctcaacttcagaggactgtctttctcttttcagttagactcatggactgaggctccaaagtatgagcccaattttgcccatggcctggcttctctccagataccccatggagcaactgtaaaacgaatgtacatctacagtggcaacagcctgcaggataccaaggctcccatgatgcctctgagctgtttcctgggcaatgtctatgctgagagtgtagatgttcttcgagatggaactggacctgcaggtttacgacttcgcctacttgctgcaggttgtggacctggcctattagcagatgccaagatgcgggtatttgaacgttcagtgtattttggtgattcctgccaagatgttcttagcatgcttggctctccacacaaagtcttctataaatcagaagacaagatgaaaattcattctccttcccctcataaacaagttccatcgaagtgtaatgactacttttttaactacttcactcttggagtggcactactctaggagttcgggatacagcagtgaagaacaca

SEQ ID NO: 280660 - DNA, 1642 bp, Homo sapiens
tgcaggtgaggtgaagtgaggtcgagggtggtgttgggccggtgctgctgccgctgccgccggggaggaggtggaaagcggggctgtggcgggccggcgggggcggcctgtcagccgctgctttgtctccttagctcgggtcccttctgcgctgccgcagggaggccgcccgggccaggcgagccgaaccaatgctggacctggaggtagtgcccgaacgctctctggggaacgagcaatgggaattcacgctgggaatgcctctggctcaggcagtagccattcttcagaagcactgtcgcatcatcaaaaacgtccaggttctctacagtgaacagtctcctctaagccatgacctcattcttaacctgactcaggacgggatcaaactaatgtttgatgctttcaatcagagacttaaggtgatcgaagtatgtgatttgactaaagtaaagttaaaatattgtggcgtgcattttaattctcaggccatagctcctaccattgaacagattgaccagtcttttggcgcaacccatcctggagtgtacaactccgctgagcagctcttccatctcaacttcagaggactgtctttctcttttcagttagactcatggactgaggctccaaagtatgagcccaattttgcccatggcctggcttctctccagataccccatggagcaactgtaaaacgaatgtacatctacagtggcaacagcctgcaggataccaaggctcccatgatgcctctgagctgtttcctgggcaatgtctatgctgagagtgtagatgttcttcgagatggaactggacctgcaggtttacgacttcgcctacttgctgcaggtcagtgactggctttgaggttggtacattccgcattatacccatgttgagacagtctaaaatcccacgtgcttagggtgtgtctcagtccattcaggctgctataataaaataccataaactgagtggctgctaaacaacaaaaatttatttcttgcagttctggaggctgggaagtccaagatcaaggcactggcagattcagtatctggatgcgcctgcagtctagttcatagaagaaacttctccccgtatcctcatatggtgcaaggggctagttaactccctggagtctgttttttaacggcactgatctcaatcctgaggtctctgcttccataatgtaatcacctcccaaagccctgaccttctaataccatcaccttggtggttaggatttcaacatatgaattttaggggaacaaaagcattcagtccattgccacatagttggtagaagacaaatgatgcagatgtttatggttaaagcttttgtttagttttgtcaagggactggacatagtcttataattagcaaatcttaataagcaacagcactgcttctctcagcatgcacataggcctgctgtgtgcttatatagctttgtgacagttcccaagtgtttcctggagatgcatcctgtgggttgcagtgctactgctctccccttttttgtttttttctttttcttttttttgagacagagtcttactctgttgctgagatagcgccattgcactggagcctgggcaacaagagcgaaactccttctcacagaaaaaaaaaaaa

SEQ ID NO: 280661 - DNA, 865 bp, Homo sapiens
gcgcagtgttctagaggatccctatccccgaaaataactgccaagtgcaagagggacaatcttcagaataaataatattctgaaggactgacaaaacagagatatagacaaagggaaacaccggtgtttccctttcttgcagtgtcttgccacccagtgaatatatggcatctttcccgggcacagacaccagggtgtgctggagccggtcccgaggcaaaggagcacaccactcccagtcaacggtggcattgttgcacttccacatgcgccgtgggatggaccctcccaccacatacaagtctccaccatgcttgcaggccgcagtgatctggtggcacaaactgttttggccacttacactgatggagtcatcttctgcacagtgcaaggacacagccaacgagtgggtacgagatgactctttcccaatcaggtaaatgtgcacattctccccaatttcctattggcaaaattaaaattatatgacagctgttaaattctaggctaaggctcagctaagacacatatccttaagatcctggccctcacacttgttcctagctttatcatactactctctaattactgtatggcatccaactctcctctagtcactttctttgaggcaatttatgccgggcggagaatctgttgtattcatccttgtagcttttaaaaaactctcataagctagtgcttcagacaaagggtgattaagattgttaacttgatgacagtagttctcaaggaactttgaaagctcatagattggtggtactggggttacaaagacatccttctccccagctcatatcaacttcaagccagagataacttattcaaaaataaataaataaataca

SEQ ID NO: 280662 - DNA, 2741 bp, Homo sapiens
cctccgaggccgccgggccctcctccagagtcccgccagtcccccagagtccaggccagtccccgccgtcacccggtgcgaacccgcgagaggcctagtgcagctggcagccccgccccggcacccgcctgctcttctcgcgggtccggaccgcgagcgcgggggccgacgggtcgccgctgcgccgggccgggatggcggccaccgcgctgctggaggccggcctggcgcgggtgctcttctacccgacgctgctctacaccctgttccgcgggaaggtgccgggtcgggcgcaccgggactggtaccaccgcatcgaccccaccgtgctgctgggcgcgctgccgttgcggagcttgacgcgccaggtgagccgggccggggagcccgggcccctgccccgtccccgccgctccgtccctgtcgggccgctggggtctccaccgtctttgctgagccacctctttgcctcggcagctggtacaggacgagaacgtgcgcggggtgatcaccatgaacgaggagtacgagacgaggttcctgtgcaactcttcacaggagtggaagagactaggagtcgagcagctgcggctcagcacagtagacatgactgggatccccaccttggacaacctccagaagggagtccaatttgctctcaagtaccagtcgctgggccagtgtgtttacgtgcattgtaaggctgggcgctccaggagtgccactatggtggcagcatacctgattcaggtgcacaaatggagtccagaggaggctgtaagagccatcgccaagatccggtcatacatccacatcaggcctggccagctggatgttcttaaagagttccacaagcagattactgcacgggcaacaaaggatgggacttttgtcatttcaaagacatgatgtatggggattagaaagaactcaagacactcctgcttgatacagaacaaaaagagcttaacaggaccaacagggcttaagcccagacttgacgtaacagaaatgtgccaataggtaataggtaatttttctttctctgacttgttttgttttcttgaaataacactgttgtgtggctagaaaggaaaagatttagtgtggcttgtattcatgggatacaggacagggatggggctatcatcttttcttgaatagggctaaagaagtattttaacaaaaatctattatgtacctaatattgtgcctaataatatttagcaccacaactcaaaaaacatttagcacttgaaaaaaggagactcacctctggctctttgccactgtcagaatctgaatctcactggccctgtggagtagggatcctatctggagaagtgggagcatgggctgcagtcaggactgctgcagactgagccatgtgatggtacgtaatgagttcccctgagggaatgaaacaccctcaccccttcaaagtcacccctttggaattcaacacagacacacatatcccttcaaaaacttttatttgtatcaacagttcctagctcttgacttagcttagagcttttaaaagagcagacaccttatatatttgagattgaaaaagtttctgctattaatcagaaataatcatttctattttctggcttaccccttggaataagccaaaaataaaaccaaagttacatttcctgacagatggctaagaaaacaatagaaggaacatcctgaattctagagttgactcttgctggtgaagtacaccttcagcttagtccattctcctaagtaaagcctgaaggaaaactcttaacacctaattctttgtggaaaaatgatcaactagccatttcacaggctatagaacaaaagtacaattgggcatctttccttatgtcctgggatcaggggtgcttacatttaacattgatcaggtaaagaggagaggctgtgcctaaggtctgagaaaaggcttgctctaagcaagctgtggtgaggcacaggatgactagggaatggcagagaacaggctggcctactgtcagttcaagcaaccagctgagcagcagcagtctaaaaagccccaaacagaacacctccatggattcagggaagggctgaggcactgcctttctagtatgtgccaaaaaaaacataactctgaattggggcccaggggactttgagtttgtatggggagggaaaaggagtgagcagttctcctcccctccccacagccttaggccaacacaaactgcaaattggtaagcagcaccttaatacctcttgtgacagttacggctgaagtggcagggtcaagcttgtaggtgttggcatccccctttttatatcggtcccggaagacatagatgctcccgttacagctggcaatcttccagagggatggggcagagctccaggcctcaggaaggcaaagccgggtgaagctgtctagcaagggattgtagcacaccagggagtccccttcagccacgatgaacaccagatctttatgcacagctgcgtgcatgcggcctgcaaagggcagcacatagggcttcacatggcatttgtctgtctctgtgtcaaagcactggatgagtcgggaaggtttggtaaagaagtccagatcattctcctccccccctagtaagtagatgatcccgttgaggttggcaccagcagcccctgacacagccacctctagctgagttgtctctgtccacacattatcacctacgcgataataaatgactgcgttggagagggta

SEQ ID NO: 280663 - DNA, 2632 bp, Homo sapiens
cctccgaggccgccgggccctcctccagagtcccgccagtcccccagagtccaggccagtccccgccgtcacccggtgcgaacccgcgagaggcctagtgcagctggcagccccgccccggcacccgcctgctcttctcgcgggtccggaccgcgagcgcgggggccgacgggtcgccgctgcgccgggccgggatggcggccaccgcgctgctggaggccggcctggcgcgggtgctcttctacccgacgctgctctacaccctgttccgcgggaaggtgccgggtcgggcgcaccgggactggtaccaccgcatcgaccccaccgtgctgctgggcgcgctgccgttgcggagcttgacgcgccagctggtacaggacgagaacgtgcgcggggtgatcaccatgaacgaggagtacgagacgaggttcctgtgcaactcttcacaggagtggaagagactaggagtcgagcagctgcggctcagcacagtagacatgactgggatccccaccttggacaacctccagaagggagtccaatttgctctcaagtaccagtcgctgggccagtgtgtttacgtgcattgtaaggctgggcgctccaggagtgccactatggtggcagcatacctgattcaggtgcacaaatggagtccagaggaggctgtaagagccatcgccaagatccggtcatacatccacatcaggcctggccagctggatgttcttaaagagttccacaagcagattactgcacgggcaacaaaggatgggacttttgtcatttcaaagacatgatgtatggggattagaaagaactcaagacactcctgcttgatacagaacaaaaagagcttaacaggaccaacagggcttaagcccagacttgacgtaacagaaatgtgccaataggtaataggtaatttttctttctctgacttgttttgttttcttgaaataacactgttgtgtggctagaaaggaaaagatttagtgtggcttgtattcatgggatacaggacagggatggggctatcatcttttcttgaatagggctaaagaagtattttaacaaaaatctattatgtacctaatattgtgcctaataatatttagcaccacaactcaaaaaacatttagcacttgaaaaaaggagactcacctctggctctttgccactgtcagaatctgaatctcactggccctgtggagtagggatcctatctggagaagtgggagcatgggctgcagtcaggactgctgcagactgagccatgtgatggtacgtaatgagttcccctgagggaatgaaacaccctcaccccttcaaagtcacccctttggaattcaacacagacacacatatcccttcaaaaacttttatttgtatcaacagttcctagctcttgacttagcttagagcttttaaaagagcagacaccttatatatttgagattgaaaaagtttctgctattaatcagaaataatcatttctattttctggcttaccccttggaataagccaaaaataaaaccaaagttacatttcctgacagatggctaagaaaacaatagaaggaacatcctgaattctagagttgactcttgctggtgaagtacaccttcagcttagtccattctcctaagtaaagcctgaaggaaaactcttaacacctaattctttgtggaaaaatgatcaactagccatttcacaggctatagaacaaaagtacaattgggcatctttccttatgtcctgggatcaggggtgcttacatttaacattgatcaggtaaagaggagaggctgtgcctaaggtctgagaaaaggcttgctctaagcaagctgtggtgaggcacaggatgactagggaatggcagagaacaggctggcctactgtcagttcaagcaaccagctgagcagcagcagtctaaaaagccccaaacagaacacctccatggattcagggaagggctgaggcactgcctttctagtatgtgccaaaaaaaacataactctgaattggggcccaggggactttgagtttgtatggggagggaaaaggagtgagcagttctcctcccctccccacagccttaggccaacacaaactgcaaattggtaagcagcaccttaatacctcttgtgacagttacggctgaagtggcagggtcaagcttgtaggtgttggcatccccctttttatatcggtcccggaagacatagatgctcccgttacagctggcaatcttccagagggatggggcagagctccaggcctcaggaaggcaaagccgggtgaagctgtctagcaagggattgtagcacaccagggagtccccttcagccacgatgaacaccagatctttatgcacagctgcgtgcatgcggcctgcaaagggcagcacatagggcttcacatggcatttgtctgtctctgtgtcaaagcactggatgagtcgggaaggtttggtaaagaagtccagatcattctcctccccccctagtaagtagatgatcccgttgaggttggcaccagcagcccctgacacagccacctctagctgagttgtctctgtccacacattatcacctacgcgataataaatgactgcgttggagagggta

SEQ ID NO: 280664 - DNA, 3363 bp, Homo sapiens
cctccgaggccgccgggccctcctccagagtcccgccagtcccccagagtccaggccagtccccgccgtcacccggtgcgaacccgcgagaggcctagtgcagctggcagccccgccccggcacccgcctgctcttctcgcgggtccggaccgcgagcgcgggggccgacgggtcgccgctgcgccgggccgggatggcggccaccgcgctgctggaggccggcctggcgcgggtgctcttctacccgacgctgctctacaccctgttccgcgggaaggtgccgggtcgggcgcaccgggactggtaccaccgcatcgaccccaccgtgctgctgggcgcgctgccgttgcggagcttgacgcgccagctggtacaggacgagaacgtgcgcggggtgatcaccatgaacgaggagtacgagacgaggttcctgtgcaactcttcacaggagtggaagagactaggagtcgagcagctgcggctcagcacagtagacatgactgggatccccaccttggacaacctccagaagggagtccaatttgctctcaagtaccagtcgctgggccagtgtgtttacgtgcattgtaaggctgggcgctccaggagtgccactatggtggcagcatacctgattcaggtgcacaaatggagtccagaggaggctgtaagagccatcgccaagatccggtcatacatccacatcaggcctggccagctggatgttcttaaagagttccacaagcagattactgcacgggcaacaaaggatgggacttttgtcatttcaaagacatgatgtatggggattagaaagaactcaagacactcctgcttgatacagaacaaaaagagcttaacaggaccaacagggcttaagcccagacttgacgtaacagaaatgtgccaataggtaataggtaatttttctttctctgacttgttttgttttcttgaaataacactgttgtgtggctagaaaggaaaagatttagtgtggcttgtattcatgggatacaggacagggatggggctatcatcttttcttgaatagggctaaagaagtattttaacaaaaatctattatgtacctaatattgtgcctaataatatttagcaccacaactcaaaaaacatttagcacttgaaaaaaggagactcacctctggctctttgccactgtcagaatctgaatctcactggccctgtggagtagggatcctatctggagaagtgggagcatgggctgcagtcaggactgctgcagactgagccatgtgatggtacgtaatgagttcccctgagggaatgaaacaccctcaccccttcaaagtcacccctttggaattcaacacagacacacatatcccttcaaaaacttttatttgtatcaacagttcctagctcttgacttagcttagagcttttaaaagagcagacaccttatatatttgagattgaaaaagtttctgctattaatcagaaataatcatttctattttctggcttaccccttggaataagccaaaaataaaaccaaagttacatttcctgacagatggctaagaaaacaatagaaggaacatcctgaattctagagttgactcttgctggtgaagtacaccttcagcttagtccattctcctaagtaaagcctgaaggaaaactcttaacacctaattctttgtggaaaaatgatcaactagccatttcacaggctatagaacaaaagtacaattgggcatctttccttatgtcctgggatcaggggtgcttacatttaacattgatcaggtaaagaggagaggctgtgcctaaggtctgagaaaaggcttgctctaagcaagctgtggtgaggcacaggatgactagggaatggcagagaacaggctggcctactgtcagttcaagcaaccagctgagcagcagcagtctaaaaagccccaaacagaacacctccatggattcagggaagggctgaggcactgcctttctagtatgtgccaaaaaaaacataactctgaattggggcccaggggactttgagtttgtatggggagggaaaaggagtgagcagttctcctcccctccccacagccttaggccaacacaaactgcaaattggtaagcagcaccttaatacctcttgtgacagttacggctgaagtggcagggtcaagcttgtaggtgttggcatccccctttttatatcggtcccggaagacatagatgctcccgttacagctggcaatcttccagagggatggggcagagctccaggcctcaggaaggcaaagccgggtgaagctgtctagcaagggattgtagcacaccagggagtccccttcagccacgatgaacaccagatctttatgcacagctgcgtgcatgcggcctgcaaagggcagcacatagggcttcacatggcatttgtctgtctctgtgtcaaagcactggatgagtcgggaaggtttggtaaagaagtccagatcattctcctccccccctagtaagtagatgatcccgttgaggttggcaccagcagcccctgacacagccacctctagctgagttgtctctgtccacacattatcacctacgcgataataaatgactgcgttggagagggtatcttgcagtgtcttgccacccagtgaatatatggcatctttcccgggcacagacaccagggtgtgctggagccggtcccgaggcaaaggagcacaccactcccagtcaacggtggcattgttgcacttccacatgcgccgtgggatggaccctcccaccacatacaagtctccaccatgcttgcaggccgcagtgatctggtggcacaaactgttttggccacttacactgatggagtcatcttctgcacagtgcaaggacacagccaacgagtgggtacgagatgactctttcccaatcaggtaaatgtgcacattctccccaatttcctattggcaaaattaaaattatatgacagctgttaaattctaggctaaggctcagctaagacacatatccttaagatcctggccctcacacttgttcctagctttatcatactactctctaattactgtatggcatccaactctcctctagtcactttctttgaggcaatttatgccgggcggagaatctgttgtattcatccttgtagcttttaaaaaactctcataagctagtgcttcagacaaagggtgattaagattgttaacttgatgacagtagttctcaaggaactttgaaagctcatagattggtggtactggggttacaaagacatccttctccccagctcatatcaacttcaagccagagataacttattcaaaaataaataaataaataca

SEQ ID NO: 280665 - DNA, 2440 bp, Homo sapiens
cctccgaggccgccgggccctcctccagagtcccgccagtcccccagagtccaggccagtccccgccgtcacccggtgcgaacccgcgagaggcctagtgcagctggcagccccgccccggcacccgcctgctcttctcgcgggtccggaccgcgagcgcgggggccgacgggtcgccgctgcgccgggccgggatggcggccaccgcgctgctggaggccggcctggcgcgggtgctcttctacccgacgctgctctacaccctgttccgcgggaaggtgccgggtcgggcgcaccgggactggtaccaccgcatcgaccccaccgtgctgctgggcgcgctgccgttgcggagcttgacgcgccagctggtacaggacgagaacgtgcgcggggtgatcaccatgaacgaggagtacgagacgaggttcctgtgcaactcttcacaggtgcacaaatggagtccagaggaggctgtaagagccatcgccaagatccggtcatacatccacatcaggcctggccagctggatgttcttaaagagttccacaagcagattactgcacgggcaacaaaggatgggacttttgtcatttcaaagacatgatgtatggggattagaaagaactcaagacactcctgcttgatacagaacaaaaagagcttaacaggaccaacagggcttaagcccagacttgacgtaacagaaatgtgccaataggtaataggtaatttttctttctctgacttgttttgttttcttgaaataacactgttgtgtggctagaaaggaaaagatttagtgtggcttgtattcatgggatacaggacagggatggggctatcatcttttcttgaatagggctaaagaagtattttaacaaaaatctattatgtacctaatattgtgcctaataatatttagcaccacaactcaaaaaacatttagcacttgaaaaaaggagactcacctctggctctttgccactgtcagaatctgaatctcactggccctgtggagtagggatcctatctggagaagtgggagcatgggctgcagtcaggactgctgcagactgagccatgtgatggtacgtaatgagttcccctgagggaatgaaacaccctcaccccttcaaagtcacccctttggaattcaacacagacacacatatcccttcaaaaacttttatttgtatcaacagttcctagctcttgacttagcttagagcttttaaaagagcagacaccttatatatttgagattgaaaaagtttctgctattaatcagaaataatcatttctattttctggcttaccccttggaataagccaaaaataaaaccaaagttacatttcctgacagatggctaagaaaacaatagaaggaacatcctgaattctagagttgactcttgctggtgaagtacaccttcagcttagtccattctcctaagtaaagcctgaaggaaaactcttaacacctaattctttgtggaaaaatgatcaactagccatttcacaggctatagaacaaaagtacaattgggcatctttccttatgtcctgggatcaggggtgcttacatttaacattgatcaggtaaagaggagaggctgtgcctaaggtctgagaaaaggcttgctctaagcaagctgtggtgaggcacaggatgactagggaatggcagagaacaggctggcctactgtcagttcaagcaaccagctgagcagcagcagtctaaaaagccccaaacagaacacctccatggattcagggaagggctgaggcactgcctttctagtatgtgccaaaaaaaacataactctgaattggggcccaggggactttgagtttgtatggggagggaaaaggagtgagcagttctcctcccctccccacagccttaggccaacacaaactgcaaattggtaagcagcaccttaatacctcttgtgacagttacggctgaagtggcagggtcaagcttgtaggtgttggcatccccctttttatatcggtcccggaagacatagatgctcccgttacagctggcaatcttccagagggatggggcagagctccaggcctcaggaaggcaaagccgggtgaagctgtctagcaagggattgtagcacaccagggagtccccttcagccacgatgaacaccagatctttatgcacagctgcgtgcatgcggcctgcaaagggcagcacatagggcttcacatggcatttgtctgtctctgtgtcaaagcactggatgagtcgggaaggtttggtaaagaagtccagatcattctcctccccccctagtaagtagatgatcccgttgaggttggcaccagcagcccctgacacagccacctctagctgagttgtctctgtccacacattatcacctacgcgataataaatgactgcgttggagagggta

SEQ ID NO: 280666 - DNA, 2149 bp, Homo sapiens
tcccatttataatacaagcagcatgatttttaatgcctgcaaaatagagtttccaaagaaatgaaatctcagagtcctttagcacctgctcatgggtcaagggcaccttgacacctgcttctttctttctctgctgatttcccaaccctgtacttcaggtgcacaaatggagtccagaggaggctgtaagagccatcgccaagatccggtcatacatccacatcaggcctggccagctggatgttcttaaagagttccacaagcagattactgcacgggcaacaaaggatgggacttttgtcatttcaaagacatgatgtatggggattagaaagaactcaagacactcctgcttgatacagaacaaaaagagcttaacaggaccaacagggcttaagcccagacttgacgtaacagaaatgtgccaataggtaataggtaatttttctttctctgacttgttttgttttcttgaaataacactgttgtgtggctagaaaggaaaagatttagtgtggcttgtattcatgggatacaggacagggatggggctatcatcttttcttgaatagggctaaagaagtattttaacaaaaatctattatgtacctaatattgtgcctaataatatttagcaccacaactcaaaaaacatttagcacttgaaaaaaggagactcacctctggctctttgccactgtcagaatctgaatctcactggccctgtggagtagggatcctatctggagaagtgggagcatgggctgcagtcaggactgctgcagactgagccatgtgatggtacgtaatgagttcccctgagggaatgaaacaccctcaccccttcaaagtcacccctttggaattcaacacagacacacatatcccttcaaaaacttttatttgtatcaacagttcctagctcttgacttagcttagagcttttaaaagagcagacaccttatatatttgagattgaaaaagtttctgctattaatcagaaataatcatttctattttctggcttaccccttggaataagccaaaaataaaaccaaagttacatttcctgacagatggctaagaaaacaatagaaggaacatcctgaattctagagttgactcttgctggtgaagtacaccttcagcttagtccattctcctaagtaaagcctgaaggaaaactcttaacacctaattctttgtggaaaaatgatcaactagccatttcacaggctatagaacaaaagtacaattgggcatctttccttatgtcctgggatcaggggtgcttacatttaacattgatcaggtaaagaggagaggctgtgcctaaggtctgagaaaaggcttgctctaagcaagctgtggtgaggcacaggatgactagggaatggcagagaacaggctggcctactgtcagttcaagcaaccagctgagcagcagcagtctaaaaagccccaaacagaacacctccatggattcagggaagggctgaggcactgcctttctagtatgtgccaaaaaaaacataactctgaattggggcccaggggactttgagtttgtatggggagggaaaaggagtgagcagttctcctcccctccccacagccttaggccaacacaaactgcaaattggtaagcagcaccttaatacctcttgtgacagttacggctgaagtggcagggtcaagcttgtaggtgttggcatccccctttttatatcggtcccggaagacatagatgctcccgttacagctggcaatcttccagagggatggggcagagctccaggcctcaggaaggcaaagccgggtgaagctgtctagcaagggattgtagcacaccagggagtccccttcagccacgatgaacaccagatctttatgcacagctgcgtgcatgcggcctgcaaagggcagcacatagggcttcacatggcatttgtctgtctctgtgtcaaagcactggatgagtcgggaaggtttggtaaagaagtccagatcattctcctccccccctagtaagtagatgatcccgttgaggttggcaccagcagcccctgacacagccacctctagctgagttgtctctgtccacacattatcacctacgcgataataaatgactgcgttggagagggta

SEQ ID NO: 280667 - DNA, 1868 bp, Homo sapiens
tcgaattcaagcttctaacgatgtacggggacatgatgtatggggattagaaagaactcaagacactcctgcttgatacagaacaaaaagagcttaacaggaccaacagggcttaagcccagacttgacgtaacagaaatgtgccaataggtaataggtaatttttctttctctgacttgttttgttttcttgaaataacactgttgtgtggctagaaaggaaaagatttagtgtggcttgtattcatgggatacaggacagggatggggctatcatcttttcttgaatagggctaaagaagtattttaacaaaaatctattatgtacctaatattgtgcctaataatatttagcaccacaactcaaaaaacatttagcacttgaaaaaaggagactcacctctggctctttgccactgtcagaatctgaatctcactggccctgtggagtagggatcctatctggagaagtgggagcatgggctgcagtcaggactgctgcagactgagccatgtgatggtacgtaatgagttcccctgagggaatgaaacaccctcaccccttcaaagtcacccctttggaattcaacacagacacacatatcccttcaaaaacttttatttgtatcaacagttcctagctcttgacttagcttagagcttttaaaagagcagacaccttatatatttgagattgaaaaagtttctgctattaatcagaaataatcatttctattttctggcttaccccttggaataagccaaaaataaaaccaaagttacatttcctgacagatggctaagaaaacaatagaaggaacatcctgaattctagagttgactcttgctggtgaagtacaccttcagcttagtccattctcctaagtaaagcctgaaggaaaactcttaacacctaattctttgtggaaaaatgatcaactagccatttcacaggctatagaacaaaagtacaattgggcatctttccttatgtcctgggatcaggggtgcttacatttaacattgatcaggtaaagaggagaggctgtgcctaaggtctgagaaaaggcttgctctaagcaagctgtggtgaggcacaggatgactagggaatggcagagaacaggctggcctactgtcagttcaagcaaccagctgagcagcagcagtctaaaaagccccaaacagaacacctccatggattcagggaagggctgaggcactgcctttctagtatgtgccaaaaaaaacataactctgaattggggcccaggggactttgagtttgtatggggagggaaaaggagtgagcagttctcctcccctccccacagccttaggccaacacaaactgcaaattggtaagcagcaccttaatacctcttgtgacagttacggctgaagtggcagggtcaagcttgtaggtgttggcatccccctttttatatcggtcccggaagacatagatgctcccgttacagctggcaatcttccagagggatggggcagagctccaggcctcaggaaggcaaagccgggtgaagctgtctagcaagggattgtagcacaccagggagtccccttcagccacgatgaacaccagatctttatgcacagctgcgtgcatgcggcctgcaaagggcagcacatagggcttcacatggcatttgtctgtctctgtgtcaaagcactggatgagtcgggaaggtttggtaaagaagtccagatcattctcctccccccctagtaagtagatgatcccgttgaggttggcaccagcagcccctgacacagccacctctagctgagttgtctctgtccacacattatcacctacgcgataataaatgactgcgttggagagggta

SEQ ID NO: 280668 - DNA, 2536 bp, Homo sapiens
cctccgaggccgccgggccctcctccagagtcccgccagtcccccagagtccaggccagtccccgccgtcacccggtgcgaacccgcgagaggcctagtgcagctggcagccccgccccggcacccgcctgctcttctcgcgggtccggaccgcgagcgcgggggccgacgggtcgccgctgcgccgggccgggatggcggccaccgcgctgctggaggccggcctggcgcgggtgctcttctacccgacgctgctctacaccctgttccgcgggaaggtgccgggtcgggcgcaccgggactggtaccaccgcatcgaccccaccgtgctgctgggcgcgctgccgttgcggagcttgacgcgccagctggtacaggacgagaacgtgcgcggggtgatcaccatgaacgaggagtacgagacgaggttcctgtgcaactcttcacaggagtggaagagactaggagtcgagcagctgcggctcagcacagtagacatgactgggatccccaccttggacaacctccagaagggagtccaatttgctctcaagtaccagtcgctgggccagtgtgtttacgtgcattgtaaggctgggcgctccaggagtgccactatggtggcagcatacctgattcaggtgcacaaatggagtccagaggaggctgtaagagccatcgccaagatccggtcatacatccacatcaggcctggccagctggatgttcttaaagagttccacaagcagattactgcacgggcaacaaaggatgggacttttgtcatttcaaagacatgatgtatggggattagaaagaactcaagacactcctgcttgatacagaacaaaaagagcttaacaggaccaacagggcttaagcccagacttgacgtaacagaaatgtgccaataggtaataggtaatttttctttctctgacttgttttgttttcttgaaataacactgttgtgtggctagaaaggaaaagatttagtgtggcttgtattcatgggatacaggacagggatggggctatcatcttttcttgaatagggctaaagaagtattttaacaaaaatctattatgtacctaatattgtgcctaataatatttagcaccacaactcaaaaaacatttagcacttgaaaaaaggagactcacctctggctctttgccactgtcagaatctgaatctcactggccctgtggagtagggatcctatctggagaagtgggagcatgggctgcagtcaggactgctgcagactgagccatgtgatggtacgtaatgagttcccctgagggaatgaaacaccctcaccccttcaaagtcacccctttggaattcaacacagacacacatatcccttcaaaaacttttatttgtatcaacagttcctagctcttgacttagcttagagcttttaaaagagcagacaccttatatatttgagattgaaaaagtttctgctattaatcagaaataatcatttctattttctggcttaccccttggaataagccaaaaataaaaccaaagttacatttcctgacagatggctaagaaaacaatagaaggaacatcctgaattctagagttgactcttgctggtgaagtacaccttcagcttagtccattctcctaagtaaagcctgaaggaaaactcttaacacctaattctttgtggaaaaatgatcaactagccatttcacaggctatagaacaaaagtacaattgggcatctttccttatgtcctgggatcaggggtgcttacatttaacattgatcaggtaaagaggagaggctgtgcctaaggtctgagaaaaggcttgctctaagcaagctgtggtgaggcacaggatgactagggaatggcagagaacaggctggcctactgtcagttcaagcaaccagctgagcagcagcagtctaaaaagccccaaacagaacacctccatggattcagggaagggctgaggcactgcctttctagtatgtgccaaaaaaaacataactctgaattggtaagcagcaccttaatacctcttgtgacagttacggctgaagtggcagggtcaagcttgtaggtgttggcatccccctttttatatcggtcccggaagacatagatgctcccgttacagctggcaatcttccagagggatggggcagagctccaggcctcaggaaggcaaagccgggtgaagctgtctagcaagggattgtagcacaccagggagtccccttcagccacgatgaacaccagatctttatgcacagctgcgtgcatgcggcctgcaaagggcagcacatagggcttcacatggcatttgtctgtctctgtgtcaaagcactggatgagtcgggaaggtttggtaaagaagtccagatcattctcctccccccctagtaagtagatgatcccgttgaggttggcaccagcagcccctgacacagccacctctagctgagttgtctctgtccacacattatcacctacgcgataataaatgactgcgttggagagggta

SEQ ID NO: 280669 - DNA, 3013 bp, Homo sapiens
cctccgaggccgccgggccctcctccagagtcccgccagtcccccagagtccaggccagtccccgccgtcacccggtgcgaacccgcgagaggcctagtgcagctggcagccccgccccggcacccgcctgctcttctcgcgggtccggaccgcgagcgcgggggccgacgggtcgccgctgcgccgggccgggatggcggccaccgcgctgctggaggccggcctggcgcgggtgctcttctacccgacgctgctctacaccctgttccgcgggaaggtgccgggtcgggcgcaccgggactggtaccaccgcatcgaccccaccgtgctgctgggcgcgctgccgttgcggagcttgacgcgccagctggtacaggacgagaacgtgcgcggggtgatcaccatgaacgaggagtacgagacgaggttcctgtgcaactcttcacaggagtggaagagactaggagtcgagcagctgcggctcagcacagtagacatgactgggatccccaccttggacaacctccagaagggagtccaatttgctctcaagtaccagtcgctgggccagtgtgtttacgtgcattgtaaggctgggcgctccaggagtgccactatggtggcagcatacctgattcaggtgcacaaatggagtccagaggaggctgtaagagccatcgccaagatccggtcatacatccacatcaggcctggccagctggatgttcttaaagagttccacaagcagattactgcacgggcaacaaaggatgggacttttgtcatttcaaagacatgatgtatggggattagaaagaactcaagacactcctgcttgatacagaacaaaaagagcttaacaggaccaacagggcttaagcccagacttgacgtaacagaaatgtgccaataggtaataggtaatttttctttctctgacttgttttgttttcttgaaataacactgttgtgtggctagaaaggaaaagatttagtgtggcttgtattcatgggatacaggacagggatggggctatcatcttttcttgaatagggctaaagaagtattttaacaaaaatctattatgtacctaatattgtgcctaataatatttagcaccacaactcaaaaaacatttagcacttgaaaaaaggagactcacctctggctctttgccactgtcagaatctgaatctcactggccctgtggagtagggatcctatctggagaagtgggagcatgggctgcagtcaggactgctgcagactgagccatgtgatggtacgtaatgagttcccctgagggaatgaaacaccctcaccccttcaaagtcacccctttggaattcaacacagacacacatatcccttcaaaaacttttatttgtatcaacagttcctagctcttgacttagcttagagcttttaaaagagcagacaccttatatatttgagattgaaaaagtttctgctattaatcagaaataatcatttctattttctggcttaccccttggaataagccaaaaataaaaccaaagttacatttcctgacagatggctaagaaaacaatagaaggaacatcctgaattctagagttgactcttgctggtgaagtacaccttcagcttagtccattctcctaagtaaagcctgaaggaaaactcttaacacctaattctttgtggaaaaatgatcaactagccatttcacaggctatagaacaaaagtacaattgggcatctttccttatgtcctgggatcaggggtgcttacatttaacattgatcaggtaaagaggagaggctgtgcctaaggtctgagaaaaggcttgctctaagcaagctgtggtgaggcacaggatgactagggaatggcagagaacaggctggcctactgtcagttcaagcaaccagctgagcagcagcagtctaaaaagccccaaacagaacacctccatggattcagggaagggctgaggcactgcctttctagtatgtgccaaaaaaaacataactctgaattggggcccaggggactttgagtttgtatggggagggaaaaggagtgagcagttctcctcccctccccacagccttaggccaacacaaactgcaaattggtaagcagcaccttaatacctcttgtgacagttacggctgaagtggcagggtcaagcttgtaggtgttggcatccccctttttatatcggtcccggaagacatagatgctcccgttacagctggcaatcttccagagggatggggcagagctccaggcctcaggaaggcaaagccgggtgaagctgtctagcaagggattgtagcacaccagggagtccccttcagccacgatgaacaccagatctttatgcacagctgcgtgcatgcggcctgcaaagggcagcacatagggcttcacatggcatttgtctgtctctgtgtcaaagcactggatgagtcgggaaggtttggtaaagaagtccagatcattctcctccccccctagtaagtagatgatcccgttgaggttggcaccagcagcccctgacacagccacctctagctgagttgtctctgtccacacattatcacctacgcgataataaatgactgcgttggagagggtatcttgcagtgtcttgccacccagtgaatatatggcatctttcccgggcacagacaccagggtgtgctggagccggtcccgaggcaaaggagcacaccactcccagtcaacggtggcattgttgcacttccacatgcgccgtgggatggaccctcccaccacatacaagtctccaccatgcttgcaggccgcagtgatctggtggcacaaactgttttggccacttacactgatggagtcatcttctgcacagtgcaaggacacagccaacgagtgggtacgagatgactctttcccaatcaggtaaatgtgcacattctccccaatttccttcaagcttgtcctgagtgactctgcaaaagcctctctttcctctttatta

SEQ ID NO: 280670 - DNA, 2549 bp, Homo sapiens
cctccgaggccgccgggccctcctccagagtcccgccagtcccccagagtccaggccagtccccgccgtcacccggtgcgaacccgcgagaggcctagtgcagctggcagccccgccccggcacccgcctgctcttctcgcgggtccggaccgcgagcgcgggggccgacgggtcgccgctgcgccgggccgggatggcggccaccgcgctgctggaggccggcctggcgcgggtgctcttctacccgacgctgctctacaccctgttccgcgggaaggtgccgggtcgggcgcaccgggactggtaccaccgcatcgaccccaccgtgctgctgggcgcgctgccgttgcggagcttgacgcgccaggtgagccgggccggggagcccgggcccctgccccgtccccgccgctccgtccctgtcgggccgctggggtctccaccgtctttgctgagccacctctttgcctcggcagctggtacaggacgagaacgtgcgcggggtgatcaccatgaacgaggagtacgagacgaggttcctgtgcaactcttcacaggtgcacaaatggagtccagaggaggctgtaagagccatcgccaagatccggtcatacatccacatcaggcctggccagctggatgttcttaaagagttccacaagcagattactgcacgggcaacaaaggatgggacttttgtcatttcaaagacatgatgtatggggattagaaagaactcaagacactcctgcttgatacagaacaaaaagagcttaacaggaccaacagggcttaagcccagacttgacgtaacagaaatgtgccaataggtaataggtaatttttctttctctgacttgttttgttttcttgaaataacactgttgtgtggctagaaaggaaaagatttagtgtggcttgtattcatgggatacaggacagggatggggctatcatcttttcttgaatagggctaaagaagtattttaacaaaaatctattatgtacctaatattgtgcctaataatatttagcaccacaactcaaaaaacatttagcacttgaaaaaaggagactcacctctggctctttgccactgtcagaatctgaatctcactggccctgtggagtagggatcctatctggagaagtgggagcatgggctgcagtcaggactgctgcagactgagccatgtgatggtacgtaatgagttcccctgagggaatgaaacaccctcaccccttcaaagtcacccctttggaattcaacacagacacacatatcccttcaaaaacttttatttgtatcaacagttcctagctcttgacttagcttagagcttttaaaagagcagacaccttatatatttgagattgaaaaagtttctgctattaatcagaaataatcatttctattttctggcttaccccttggaataagccaaaaataaaaccaaagttacatttcctgacagatggctaagaaaacaatagaaggaacatcctgaattctagagttgactcttgctggtgaagtacaccttcagcttagtccattctcctaagtaaagcctgaaggaaaactcttaacacctaattctttgtggaaaaatgatcaactagccatttcacaggctatagaacaaaagtacaattgggcatctttccttatgtcctgggatcaggggtgcttacatttaacattgatcaggtaaagaggagaggctgtgcctaaggtctgagaaaaggcttgctctaagcaagctgtggtgaggcacaggatgactagggaatggcagagaacaggctggcctactgtcagttcaagcaaccagctgagcagcagcagtctaaaaagccccaaacagaacacctccatggattcagggaagggctgaggcactgcctttctagtatgtgccaaaaaaaacataactctgaattggggcccaggggactttgagtttgtatggggagggaaaaggagtgagcagttctcctcccctccccacagccttaggccaacacaaactgcaaattggtaagcagcaccttaatacctcttgtgacagttacggctgaagtggcagggtcaagcttgtaggtgttggcatccccctttttatatcggtcccggaagacatagatgctcccgttacagctggcaatcttccagagggatggggcagagctccaggcctcaggaaggcaaagccgggtgaagctgtctagcaagggattgtagcacaccagggagtccccttcagccacgatgaacaccagatctttatgcacagctgcgtgcatgcggcctgcaaagggcagcacatagggcttcacatggcatttgtctgtctctgtgtcaaagcactggatgagtcgggaaggtttggtaaagaagtccagatcattctcctccccccctagtaagtagatgatcccgttgaggttggcaccagcagcccctgacacagccacctctagctgagttgtctctgtccacacattatcacctacgcgataataaatgactgcgttggagagggta

SEQ ID NO: 280671 - DNA, 950 bp, Homo sapiens
  misc_feature (49)..(49): n is a, c, g, or t
catactatattttcctacctgcaacaaacccccacattcaccccccacncctactagaaaaactgaaataaaagaggatcttaacctaggacacccagcagccagtgaaggaaccatgatctgaacgcaagtctttcaggctcaaaaacatgggctcaggacactgcactacacactgcctccaaaatctccaatttatgccagctactaataaagtatagatggggtctggaaaataatctccctgcatcaatgtcaagctgcttgtgtgcactaaattgctgactcccaactaaaaggctgagtcaatgcgatctcgctcccacttctggcagattgaggaaattctgcatggccctcaggtttactagaagagactgagaggctgtccgagggtcttcttccttacgcagaatctcagacaacaatccctgattaaatgggggaaaaaaacagaccaagtcacatttgcaggtatatgtgtgtggtttctgtcttccacccctctcctcctttgtttggtttaaccagctcgctgtgatgtcaagaacctcacactaattccttagggttctccgatatgaagtcaatgtgcttgccttccgggggatatgcattattttaggactgttctattctgacactttatcatcactgtaataatcatcagtgtacagacatgccagctagcaaggtaggcacttgggaagaattgtgaaactgcaattaccaccaggtgcctcctacaagtatttcaggaactgttagaactctctctgcttgaaactgggaacacttggcagtcctgcttagctttacaaatctgccaagtttggtaaatttagtttcgacatttaaacagcatggtagatttacatcaatttaaaaaaaaaactggctgaatttctgtatgaccggccactgttttcaatagagatatttcttatgca

SEQ ID NO: 280672 - DNA, 353 bp, Homo sapiens
atatgatgccaatttctactgttaggaacgcgataacagagtgcagtgggggagaaaataccgtcctcaagatctgagaaactggagaggaaaagtcacaggacaaccaacttctctatgacatagcccagcatctgaggaaagtcctgcaatagtggaggtggagcagagggtatgagctgggaagcaaatggagcaggagctggaggctgccccatccactccaagccagagaacaagcagaggctgccacaggagatcctgggcaagtaatcagccacagcatctagattagcatgaaggaaacactggccaaattaaaagatgaaacttccaaaaggtaaaaaaaagtg

SEQ ID NO: 280673 - DNA, 427 bp, Homo sapiens
cttccatagggagcgagaatgggcatgaaaagacctggagctcacttctggagccatcagttgtctgtcatatgacccagggtccctctgtctcagttaacccttctgaacaatgggataaaaccatctaccttttctcacagagctacacactgtaaggtgctatgcaaatagatgaaagtattatgcctacttccaacagaaacaatcagacgctaaaggaacagaagagtcacttgctctatccatgcatgatactgagcacctctcatgggaacatttactcttcagagtaatcccgggattatctccatttactgacatggcagctgaggcatagaggtgagcagtcgctgtgcccccaggacctgcagctaggcagcagtggggccaggactcagctgtgctactgacgccagggccaaat

SEQ ID NO: 280674 - DNA, 689 bp, Homo sapiens
cttccatagggagcgagaatgggcatgaaaagacctggagctcacttctggagccatcagttgtctgtcatatgacccagggtccctctgtctcagttaacccttctgaacaatgggataaaaccatctaccttttctcacagagctacacactgtaaggtgctatgcaaatagatgaaagtattatgcctacttccaacagaaacaatcagacgctaaaggaacagaagagtcacttgctctatccatgcatgatactgagcacctctcatgggaacatttactcttcagagtaatcccgggattatctccatttactgacatggcagctgaggcatagaggttcccaggtggtgccgatggtgttggtctacggaaaatctgagtagcaagcccttcagaggactcccagggcttcctgtctacaagaaccactggggctgagggagtggtcatcactctggattttgcagatgcaagatggagatccaggtgttaagtgtttcacccaagaccattcagcgttaagtgtttcacccaagacaattcagcaaattagtagcacaacccaagacaaccttgtggctaaatgcttagcccatttgggctcacctgttctagatcagaaaggaagccagcaggcctggagtctgcctgtgggaagaatcaaacttttcttttctggcctt

SEQ ID NO: 280675 - DNA, 665 bp, Homo sapiens
  misc_feature (631)..(631): n is a, c, g, or t
  misc_feature (637)..(637): n is a, c, g, or t
agtcccatcaagcagagaagtagacagcttcaggggaggcaggggtgagcagagctgccaagagcaaaaagaaaccattcatatcaccttagataccacggctcttcctactccaggtgcttcctggagaggtatagatgcaaaactataggagtctttagaagaagcaaccagccggactgtcttgaaacgcgatcagaaaaagccaagaatagagatggggttgttcaggaaaaatctgtgaggaccctcttttctgaatgtgtgaatcaatgtgacatacgtagaagacccacaagatttttgagaatgttctaccatcagaaacacttccaactgggcctaaaagggacagagacagaaaaaaatgaaagaagattgtgagactgccagaattctacagtgtatgcaatggtatgaggaactgttccacattaaaggagactaagaagacataacaactcgatgcaatgtgtgattctggactggatcttgcattggaggagaaaatgctataaaaggtatcactgagacagttaacatcattggaacatggatggttgattagatggaagtattacattaatgatacatttcctgaatttggtaactttgctattgttacctacangaatantctgctctaggaaacagtaatgagataa

SEQ ID NO: 280676 - DNA, 942 bp, Homo sapiens
tttgtccatttcacaatgtgaggatacagcaagaagtgtcatcttggaagcagagagcaaacactcatcagacattaaatctgacagcaccttgatcctggacttcccagcctctagaaattgtatgcaatggtatgaggaactgttccacattaaaggagactaagaagacataacaactcgatgcaatgtgtgattctggactggatcttgcattggaggagaaaatgctataaaagtgtcttgctctttcacccaggctggagtgcagtggcgccatctcagctcactgcaacctccgcctcccggattcaagcgattatcctgcctcagtctcctgagtagctgagattacagacacgtgccaccatgtccagcatatatatatatatttttgtagagatggggtttcaccatgttggccaagctggtctcctgaccttgtgatctgcccaccttggcctttttttctctatgtttctctgactcaacctttgacacttagaaggtagcacacttccaacatatccttccgtcttccaagatatagtccatacaactttccatagttcgaatgtttatcccccaaacctcatgttgaaatttgatccccaatgttggaagtggggcccgatgggaggaatttgggtcatggaggtggatccctcatgaatgacttgatgtcctccttgtggtaatgagtgagttcttgctccattagttcctgagaaagctggttgtttaaaaacaaaaacaaaaacctgtaagctcccttccctctctctttcttgtcatttggtctctgcacatgccagctccccttctccttctgccataaatggaattaacctaaagccctcaccagaagcagacgctggcactgtgcttcctgtgcagtctgcagaaccgtaaaccaaataaatctcctttcgttataaatta

SEQ ID NO: 280677 - DNA, 3549 bp, Homo sapiens
cactgggagacagtccacttaaatgcagctccagggttgcgaggcacccaccagcatcattccccgtgcgaggtggcaaatgcaacatgctctccagtttggggtgtctacttctctgtggaagtattacactagccctgggaaatgcacagaaattgccaaaaggtaaaaggccaaacctcaaagtccacatcaataccacaagtgactccatcctcttgaagttcttgcgtccaagtccaaatgtaaagcttgaaggtcttctcctgggatatggcagcaatgtatcaccaaaccagtacttccctcttcccgctgaagggaaattcacagaagctatagttgatgcagagccgaaatatctgatagttgtgcgacctgctccacctccaagtcaaaagaagtcatgttcaggtaaaactcgttctcgcaaacctctgcagctggtggttggcactctgacaccgagctcagtcttcctgtcctggggtttcctcatcaacccacaccatgactggacattgccaagtcactgtcccaatgacagattttatacaattcgctatcgagaaaaggataaagaaaagaagtggatttttcaaatctgtccagccactgaaacaattgtggaaaacctaaagcccaacacagtttatgaatttggagtgaaagacaatgtggaaggtggaatttggagtaagattttcaatcacaagactgttgttggaagtaaaaaagtaaatgggaaaatccaaagtacctatgaccaagaccacacagtgccagcatatgtcccaaggaaactaatcccaataacaatcatcaagcaagtgattcagaatgttactcacaaggattcagctaaatccccagaaaaagctccactgggaggagtgatactagtccaccttattattccaggtcttaatgaaactactgtaaaacttcctgcatccctaatgtttgagatttcagatgcactcaagacacaattagctaagaatgaaaccttggcattacctgccgaatctaaaacaccagaggttgaaaaaatctcagcacgacccacaacagtgactcctgaaacagttccaagaagcactaaacccactacgtctagtgcattagatgtttcagaaacaacactgggtaattctaagaacttttttttttctaaaaaaacaaaagtaacaacgaaataactcccaggactcacagaaaagaaacctggtgccttaacttctctctccctccccactttctccttttccttccttcctggcagtggttaaccttcctctttcttggacagattccactgaagagttaaccacatggctgatcctggtgactgaacttctgggcaaatctggatgctaattgctaactaaatgccctttttaaccagtctctgggttatacagacagaataccagccttttaactcccaaatcttgggggagaatgaaggaaacctggaagtcttgactctgtgctttctgcttagagtggctttgggaagtcttgtgcatactaaatttgggaagaatccccaaaagtgtcatgcttttaaacaagaatttcatggcacccatgtttgttgtttcttagcccaagagaatctaacttgctttgttgttctctttcccctgaagaaaaggagcagcatgtgttttgttctgtaatttgatgttgatcttctcagccacaccactgccctttgaatgtacaccttcatattttaacagctatgtaacttttccagggaaggttatttccattaaaggtattggctgctctgtgtgcaagagtctgttacaaagcttgctgtgcatgatcatggttaagccacaacatcaaaacccaagtccaggagttgctaactgcactcttttttattgtagttctcagcaaaaggaccccggaaacattgcaaactattctaatacctcagtttgaattgccactgagcactctaggtaaaaaataataaatactgcagctttattattaccttggatattgtatgcatgcttcaaagaagtcttttgaattaattacgctaatttatacccaatcccttaaaggtgacacagtcttcaagtttaggatcccaaagaggctctccctatgacaaattgtttggttgggttgtttttcttttaagtggtcatattttaatattatgtttgattcttttaattcagaatcaatatgtcactgaacaaattgatcatttctgtattttttgtaaatgtgtttactctattgtctctcttaacagagaagatatatttatgatatttctgcagactgcttcttataattcttagaattcttctgagtgaagtatgagaaaaatgagggcagggtgcagcggctcatgcctgtaagcccaacactttgggaggctgaggcaggtggattgcctgaggtcagtagttcaagaccaccctggccaacctggtgaaaccccgtctctattaaaaatacaaaaattagactggcatggtggcatgcgcctgtaatcccagctacccaggaggctgagacaggagaatcgcttgaacccaggaggtggaggttgcagtgagccaagatcgtgccacgcactgcaacctgggtgacagagcgagactccatctcaaaaaaaaaaaagaggttgggggaggagcttacatataaagccacgtagttaccaaaactctatttttaaaagctttcagatggacattttctagttcagatgtgtttgcttggtttaaatttaaatgaaatatatttaagaacacacataaacatagctgaagaaatcagcaaactggtttaataagggtggaaagaagagtccaaatacagtagcttaaatttagtcacttaactataaaaaactgaaaaagaaactttcttatattcaacattgaaacatagatgtaagaaatactactaatggtctcttaacatgatttgcctttttgtgtttgcttttgtttttgcaagcttaaaattttaaaaatctttcctgttactttcacctcaggtcgtaactttctttatgtgtttcattacagctccaaaaagccttccagaatttcctgaggcaaaaacacccttcccttttgagaaacctaggggcacattgggtaataagagtaccttaaatttaatattaaggctgtgggtggtgattgcttaattctgcaggacacatttactgcatcttatttctggaaacctcatgaactgatagttaggcaaacaaatggttgatttgatttttttttaataaatctatttggattttctgcaaattcggtaaaacccatcagtcttaattccacataatccacttagctttttgtccttaaaaatgctgacagtctgacaccaaactctggtctctctctgaccactaatcaaatgttctctggatggatacatactgatttcttactgatatataatgactttttattgtattggtatactgcaggcttctggtagccacttaaccataccagcaacctatttctgtctcgttctcctgtt

SEQ ID NO: 280678 - DNA, 2981 bp, Homo sapiens
ccatttaatgtatagtttatttctaggttttccttctgtgtttttagacactgaaatgcctaaatattgatttgtttattattttgtttctttatttttccagctcccggtaaaacacaatttatttctctgaaacctaaaatccctctcagcccagaagtgacacacaccaaacctgctcccaagcagacaccacgtgctcctcctaagccaaaaacatcaccacgcccaagaatcccacaaacacaaccagttcctaaggtgccccagcgtgttactgcaaaaccaaaaacgtcaccaagtccagaagtgtcatacaccacacctgctcctctagagacacgaggcatcccttttatacccatgatttccccaagtcctagtcaagaggaactacagaccactctggaagaaacagaccaatccacccaagaacctttcacaactaagattccacgaacaactgaactagcaaagacaactcaggcgccacacagattttatactactgtgaggcccagaacatctgacaagccacacatcagacctgttctgaataggacaactacaagacctactaggcccaaacccagtgggatgcccagtgggaatggagtgggaacaggggtcaagcaagcacccaggccatcaggtgctgatagaaatgtatcagtggactctacccaccccactaaaaagccagggactcgccgcccacccttgccacccagacctacacacccacgaagaaaacctttaccaccaaataatgtcactggaaagccaggaagtgcaggaatcatttcatcaggcccaataactacaccacccctgaggtcaacacccaggcctactggaactcccttggagagaatagagacagatataaagcaaccaacagttcctgcctctggagaagaactggaaaatataactgactttagctcaagcccaacaagagaaactgatcctcttgggaagccaagattcaaaggacctcatgtgcgatacatccaaaagcctgacaacagtccctgctccattactgactctgtcaaacggttccccaaagaggaggccacagaggggaatgccaccagcccaccacagaacccacccaccaacctcactgtggtcaccgtggaagggtgcccctcatttgtcatcttggactgggaaaagccactaaatgacactgtcactgaatatgaagttatatccagagaaaatgggtcattcagtgggaagaacaagtccattcaaatgacaaatcagacattttccacagtagaaaatctgaaaccaaacacgagttatgaattccaggtgaaacccaaaaacccacttggtgaaggcccggtcagcaacacagtggcattcagtactgaatcagcggacccaagagtgagtgagccagtttctgcaggaagagatgccatctggactgaaagaccctttaattcagactcttactcagagtgtaagggcaaacaatatgtcaaaaggacatggtataaaaaatttgtaggagtgcagctgtgcaactctctcagatacaagatttacttgagcgactccctcacaggaaaattttataacataggtgatcagaggggccatggagaagatcactgccagtttgtggattcatttttagatggacgcactgggcagcaactcacttctgaccagttaccaatcaaagaaggttatttcagagcagttcgccaggaacctgtccaatttggagaaataggtggtcacacccaaatcaattatgttcagtggtatgaatgtgggactacaattcctggaaaatggtagatgctgcacaaagttaccttctgtttcatcattgcaaacaaaaatcattgaaaatactatgccgcattcatttaaagctattttgtttactatgtataaaagtctacaatctaattaatagcaatactagatgtttattattagaaaagattgctgagagtatttatcaggttttacaaagtcattttaagaaagcaagatactgatgttaacagaataacatttttggggaagctggctccctattcatggtattttaagagatcatttgtatattatttatcacactgttgtaatgatgttttgagatacttttataacaaaattaacatcaaaaaggtatatactttttaaaaaaaatttacttttattgatgtgtactcttcctattgatgagttaattccataaatctctacttagtttaacttattggatcaaattatcttcagcatgtatatctggggaaaaaaggtccgaattttcacatttatatttaaacttcaattttttatatttaaacttcaattttttagcaacagctgaatagctttgcggaggagtttaatagttacacattcatgctaatatacatttcctttaaacatccacaaattcttaaaaagattgaatcagtaaatttcatttcagctaaaaatggagtctaatatattgtttcaaaagatacatttttacccaccataaatgttacaatatctgaatatgctttgtcaaactatccctttatgcaatcgtcttcatattgtttttatgattctaatcaagctgtatgtagagactgaatgtgaagtcaagtctgagcacaaaaagataatgcacgatgagattgcctaccattttataggatatttactatgtatttatacgttaagacctctatgaatgaatgtatcagagaatgtctttgtaactgtttaattcaatctgtaataaaaatctaactaactaactcatttatttctattaaaaaggtattgtcctttaggcggggaatgggaatccttgctgcactgttgcagtcattctgaaaggacctttccctgtacttacctttcaacatgcttcaatcttatcaacgctacattttgtatttttcaaacaagtataaattctgcaataaagagatgtagtttttttt

SEQ ID NO: 280679 - DNA, 3028 bp, Homo sapiens
cactgggagacagtccacttaaatgcagctccagggttgcgaggcacccaccagcatcattccccgtgcgaggtggcaaatgcaacatgctctccagtttggggtgtctacttctctgtggaagtattacactagccctgggaaatgcacagaaattgccaaaaggtaaaaggccaaacctcaaagtccacatcaataccacaagtgactccatcctcttgaagttcttgcgtccaagtccaaatgtaaagcttgaaggtcttctcctgggatatggcagcaatgtatcaccaaaccagtacttccctcttcccgctgaagggaaattcacagaagctatagttgatgcagagccgaaatatctgatagttgtgcgacctgctccacctccaagtcaaaagaagtcatgttcaggtaaaactcgttctcgcaaacctctgcagctggtggttggcactctgacaccgagctcagtcttcctgtcctggggtttcctcatcaacccacaccatgactggacattgccaagtcactgtcccaatgacagattttatacaattcgctatcgagaaaaggataaagaaaagaagtggatttttcaaatctgtccagccactgaaacaattgtggaaaacctaaagcccaacacagtttatgaatttggagtgaaagacaatgtggaaggtggaatttggagtaagattttcaatcacaagactgttgttggaagtaaaaaagtaaatgggaaaatccaaagtacctatgaccaagaccacacagtgccagcatatgtcccaaggaaactaatcccaataacaatcatcaagcaagtgattcagaatgttactcacaaggattcagctaaatccccagaaaaagctccactgggaggagtgatactagtccaccttattattccaggtcttaatgaaactactgtaaaacttcctgcatccctaatgtttgagatttcagatgcactcaagacacaattagctaagaatgaaaccttggcattacctgccgaatctaaaacaccagaggttgaaaaaatctcagcacgacccacaacagtgactcctgaaacagttccaagaagcactaaacccactacgtctagtgcattagatgtttcagaaacaacactgggtaattctaagaacttttttttttctaaaaaaacaaaagtaacaacgaaataactcccaggactcacagaaaagaaacctggtgccttaacttctctctccctccccactttctccttttccttccttcctggcagtggttaaccttcctctttcttggacagattccactgaagagttaaccacatggctgatcctggtgactgaacttctgggcaaatctggatgctaattgctaactaaatgccctttttaaccagtctctgggttatacagacagaataccagccttttaactcccaaatcttgggggagaatgaaggaaacctggaagtcttgactctgtgctttctgcttagagtggctttgggaagtcttgtgcatactaaatttgggaagaatccccaaaagtgtcatgcttttaaacaagaatttcatggcacccatgtttgttgtttcttagcccaagagaatctaacttgctttgttgttctctttcccctgaagaaaaggagcagcatgtgttttgttctgtaatttgatgttgatcttctcagccacaccactgccctttgaatgtacaccttcatattttaacagctatgtaacttttccagggaaggttatttccattaaaggtattggctgctctgtgtgcaagagtctgttacaaagcttgctgtgcatgatcatggttaagccacaacatcaaaacccaagtccaggagttgctaactgcactcttttttattgtagttctcagcaaaaggaccccggaaacattgcaaactattctaatacctcagtttgaattgccactgagcactctagcttcaagtgaaaagccatggattgtgcctacagctaaaatatctgaagattccaaagttctgcagcctcaaactgcaacttatgatgttttctcaagccctacaacatcagatgagcctgagatatcagattcctacacagcaacaagtgatcgtattctggattctatcccacctaaaacttctagaactcttgaacagccaagggcaacactggctccaagtgaaacaccatttgttcctcaaaaactggaaatctttaccagtccagaaatgcagcctacgacacctgctccccagcaaactacatctatcccttctacacctaaacgacgcccccggcccaaaccgccaagaaccaaacctgaaagaaccacaagtgccggaacaattacacctaaaatttctaaaagccctgaacctacatggacaacaccggctcccggtaaaacacaatttatttctctgaaacctaaaatccctctcagcccagaagtgacacacaccaaacctgttcccaccacagacattgagcctgtaactgtgagaactgaggctacagtgacaacattagctccaaaaacatcgcaacgaacaagaacacgtcgtccacgtcccaaacataaaaccacgccacgcccagagacactgcagaccaaactagactttggacctattactcctgggacatcttcagctccaacaacaacaacaaaaagaacccgtcgtccacatcccaaacctaaaaccacgccccatccagaagtacctcaaactaaactggttcctgccacaatcctcgaaccagttcttagaactgaggcttcagggacaacagcagctcccaaagtgcctcaacgaactcatcgtccacatcccaaacctaaaaccacactgagtcccgaagagcttcagactgaactggttcctgctacaatctttgaaccagtttctcctataaaagaggctccagggacaacattcgttcctgttacagacctcgagcctgttacttttagaactgagatccctgcaacaaccttagctacc

SEQ ID NO: 280680 - DNA, 4130 bp, Homo sapiens
agcggggggtacggctggctgcacttttatgcagagccgaaatatctgatagttgtgcgacctgctccacctccaagtcaaaagaagtcatgttcaggtaaaactcgttctcgcaaacctctgcagctggtggttggcactctgacaccgagctcagtcttcctgtcctggggtttcctcatcaacccacaccatgactggacattgccaagtcactgtcccaatgacagattttatacaattcgctatcgagaaaaggataaagaaaagaagtggatttttcaaatctgtccagccactgaaacaattgtggaaaacctaaagcccaacacagtttatgaatttggagtgaaagacaatgtggaaggtggaatttggagtaagattttcaatcacaagactgttgttggaagtaaaaaagtaaatgggaaaatccaaagtacctatgaccaagaccacacagtgccagcatatgtcccaaggaaactaatcccaataacaatcatcaagcaagtgattcagaatgttactcacaaggattcagctaaatccccagaaaaagctccactgggaggagtgatactagtccaccttattattccaggtcttaatgaaactactgtaaaacttcctgcatccctaatgtttgagatttcagatgcactcaagacacaattagctaagaatgaaaccttggcattacctgccgaatctaaaacaccagaggttgaaaaaatctcagcacgacccacaacagtgactcctgaaacagttccaagaagcactaaacccactacgtctagtgcattagatgtttcagaaacaacactggttctcagcaaaaggaccccggaaacattgcaaactattctaatacctcagtttgaattgccactgagcactctagcttcaagtgaaaagccatggattgtgcctacagctaaaatatctgaagattccaaagttctgcagcctcaaactgcaacttatgatgttttctcaagccctacaacatcagatgagcctgagatatcagattcctacacagcaacaagtgatcgtattctggattctatcccacctaaaacttctagaactcttgaacagccaagggcaacactggctccaagtgaaacaccatttgttcctcaaaaactggaaatctttaccagtccagaaatgcagcctacgacacctgctccccagcaaactacatctatcccttctacacctaaacgacgcccccggcccaaaccgccaagaaccaaacctgaaagaaccacaagtgccggaacaattacacctaaaatttctaaaagccctgaacctacatggacaacaccggctcccggtaaaacacaatttatttctctgaaacctaaaatccctctcagcccagaagtgacacacaccaaacctgctcccaagcagacaccacgtgctcctcctaagccaaaaacatcaccacgcccaagaatcccacaaacacaaccagttcctaaggtgccccagcgtgttactgcaaaaccaaaaacgtcaccaagtccagaagtgtcatacaccacacctgctccaaaagatgtgctccttcctcataaaccataccctgaggtctctcagagcgaacctgctcctctagagacacgaggcatcccttttatacccatgatttccccaagtcctagtcaagaggaactacagaccactctggcgccacacagattttatactactgtgaggcccagaacatctgacaagccacacatcagacctggggtcaagcaagcacccaggccatcaggtgctgatagaaatgtatcagtggactctacccaccccactaaaaagccagggactcgccgcccacccttgccacccagacctacacacccacgaagaaaacctttaccaccaaataatgtcactggaaagccaggaagtgcaggaatcatttcatcaggcccaataactacaccacccctgaggtcaacacccaggcctactggaactcccttggagagaatagagacagatataaagcaaccaacagttcctgcctctggagaagaactggaaaatataactgactttagctcaagcccaacaagagaaactgatcctcttgggaagccaagattcaaaggacctcatgtgcgatacatccaaaagcctgacaacagtccctgctccattactgactctgtcaaacggttccccaaagaggaggccacagaggggaatgccaccagcccaccacagaacccacccaccaacctcactgtggtcaccgtggaagggtgcccctcatttgtcatcttggactgggaaaagccactaaatgacactgtcactgaatatgaagttatatccagagaaaatgggtcattcagtgggaagaacaagtccattcaaatgacaaatcagacattttccacagtagaaaatctgaaaccaaacacgagttatgaattccaggtgaaacccaaaaacccacttggtgaaggcccggtcagcaacacagtggcattcagtactgaatcagcggacccaagagtgagtgagccagtttctgcaggaagagatgccatctggactgaaagaccctttaattcagactcttactcagagtgtaagggcaaacaatatgtcaaaaggacatggtataaaaaatttgtaggagtgcagctgtgcaactctctcagatacaagatttacttgagcgactccctcacaggaaaattttataacataggtgatcagaggggccatggagaagatcactgccagtttgtggattcatttttagatggacgcactgggcagcaactcacttctgaccagttaccaatcaaagaaggttatttcagagcagttcgccaggaacctgtccaatttggagaaataggtggtcacacccaaatcaattatgttcagtggtatgaatgtgggactacaattcctggaaaatggtagatgctgcacaaagttaccttctgtttcatcattgcaaacaaaaatcattgaaaatactatgccgcattcatttaaagctattttgtttactatgtataaaagtctacaatctaattaatagcaatactagatgtttattattagaaaagattgctgagagtatttatcaggttttacaaagtcattttaagaaagcaagatactgatgttaacagaataacatttttggggaagctggctccctattcatggtattttaagagatcatttgtatattatttatcacactgttgtaatgatgttttgagatacttttataacaaaattaacatcaaaaaggtatatactttttaaaaaaaatttacttttattgatgtgtactcttcctattgatgagttaattccataaatctctacttagtttaacttattggatcaaattatcttcagcatgtatatctggggaaaaaaggtccgaattttcacatttatatttaaacttcaattttttatatttaaacttcaattttttagcaacagctgaatagctttgcggaggagtttaatagttacacattcatgctaatatacatttcctttaaacatccacaaattcttaaaaagattgaatcagtaaatttcatttcagctaaaaatggagtctaatatattgtttcaaaagatacatttttacccaccataaatgttacaatatctgaatatgctttgtcaaactatccctttatgcaatcgtcttcatattgtttttatgattctaatcaagctgtatgtagagactgaatgtgaagtcaagtctgagcacaaaaagataatgcacgatgagattgcctaccattttataggatatttactatgtatttatacgttaagacctctatgaatgaatgtatcagagaatgtctttgtaactgtttaattcaatctgtaataaaaatctaactaactaactcatttatttctattaaaaaggtattgtcctttaggcggggaatgggaatccttgctgcactgttgcagtcattctgaaaggacctttccctgtacttacctttcaacatgcttcaatcttatcaacgctacattttgtatttttcaaacaagtataaattctgcaataaagagatgtagtttttttt

SEQ ID NO: 280681 - DNA, 4604 bp, Homo sapiens
  misc_feature (228)..(228): n is a, c, g, or t
  misc_feature (235)..(235): n is a, c, g, or t
taggtaatttgcaaagaacagaagtttatttttcacggttctggaagctgggaagtccatgatcaaagtgctggcatctggtgagggccttcttgctgcatccttccttgcagatttgtagatagatgcaaaagattccacgtgtaaagtattgttaatactattacttcttgttgtatggtagaattctaattagaagacattttccctgcccaatctcttgccagntgagctntatgattctttccttggattcctggtggcaggacagggagagtcatttgaacagaaagcccatgctatgtgatcccttttcgactccgtaaaaggccaaacctcaaagtccacatcaataccacaagtgactccatcctcttgaagttcttgcgtccaagtccaaatgtaaagcttgaaggtcttctcctgggatatggcagcaatgtatcaccaaaccagtacttccctcttcccgctgaagggaaattcacagaagctatagttgatgcagagccgaaatatctgatagttgtgcgacctgctccacctccaagtcaaaagaagtcatgttcaggtaaaactcgttctcgcaaacctctgcagctggtggttggcactctgacaccgagctcagtcttcctgtcctggggtttcctcatcaacccacaccatgactggacattgccaagtcactgtcccaatgacagattttatacaattcgctatcgagaaaaggataaagaaaagaagtggatttttcaaatctgtccagccactgaaacaattgtggaaaacctaaagcccaacacagtttatgaatttggagtgaaagacaatgtggaaggtggaatttggagtaagattttcaatcacaagactgttgttggaagtaaaaaagtaaatgggaaaatccaaagtacctatgaccaagaccacacagtgccagcatatgtcccaaggaaactaatcccaataacaatcatcaagcaagtgattcagaatgttactcacaaggattcagctaaatccccagaaaaagctccactgggaggagtgatactagtccaccttattattccaggtcttaatgaaactactgtaaaacttcctgcatccctaatgtttgagatttcagatgcactcaagacacaattagctaagaatgaaaccttggcattacctgccgaatctaaaacaccagaggttgaaaaaatctcagcacgacccacaacagtgactcctgaaacagttccaagaagcactaaacccactacgtctagtgcattagatgtttcagaaacaacactggttctcagcaaaaggaccccggaaacattgcaaactattctaatacctcagtttgaattgccactgagcactctagcttcaagtgaaaagccatggattgtgcctacagctaaaatatctgaagattccaaagttctgcagcctcaaactgcaacttatgatgttttctcaagccctacaacatcagatgagcctgagatatcagattcctacacagcaacaagtgatcgtattctggattctatcccacctaaaacttctagaactcttgaacagccaagggcaacactggctccaagtgaaacaccatttgttcctcaaaaactggaaatctttaccagtccagaaatgcagcctacgacacctgctccccagcaaactacatctatcccttctacacctaaacgacgcccccggcccaaaccgccaagaaccaaacctgaaagaaccacaagtgccggaacaattacacctaaaatttctaaaagccctgaacctacatggacaacaccggctcccggtaaaacacaatttatttctctgaaacctaaaatccctctcagcccagaagtgacacacaccaaacctgctcccaagcagacaccacgtgctcctcctaagccaaaaacatcaccacgcccaagaatcccacaaacacaaccagttcctaaggtgccccagcgtgttactgcaaaaccaaaaacgtcaccaagtccagaagtgtcatacaccacacctgctccaaaagatgtgctccttcctcataaaccataccctgaggtctctcagagcgaacctgctcctctagagacacgaggcatcccttttatacccatgatttccccaagtcctagtcaagaggaactacagaccactctggcgccacacagattttatactactgtgaggcccagaacatctgacaagccacacatcagacctggggtcaagcaagcacccaggccatcaggtgctgatagaaatgtatcagtggactctacccaccccactaaaaagccagggactcgccgcccacccttgccacccagacctacacacccacgaagaaaacctttaccaccaaataatgtcactggaaagccaggaagtgcaggaatcatttcatcaggcccaataactacaccacccctgaggtcaacacccaggcctactggaactcccttggagagaatagagacagatataaagcaaccaacagttcctgcctctggagaagaactggaaaatataactgactttagctcaagcccaacaagagaaactgatcctcttgggaagccaagattcaaaggacctcatgtgcgatacatccaaaagcctgacaacagtccctgctccattactgactctgtcaaacggttccccaaagaggaggccacagaggggaatgccaccagcccaccacagaacccacccaccaacctcactgtggtcaccgtggaagggtgcccctcatttgtcatcttggactgggaaaagccactaaatgacactgtcactgaatatgaagttatatccagagaaaatgggtcattcagtgggaagaacaagtccattcaaatgacaaatcagacattttccacagtagaaaatctgaaaccaaacacgagttatgaattccaggtgaaacccaaaaacccacttggtgaaggcccggtcagcaacacagtggcattcagtactgaatcagcggacccaagagtgagtgagccagtttctgcaggaagagatgccatctggactgaaagaccctttaattcagactcttactcagagtgtaagggcaaacaatatgtcaaaaggacatggtataaaaaatttgtaggagtgcagctgtgcaactctctcagatacaagatttacttgagcgactccctcacaggaaaattttataacataggtgatcagaggggccatggagaagatcactgccagtttgtggattcatttttagatggacgcactgggcagcaactcacttctgaccagttaccaatcaaagaaggttatttcagagcagttcgccaggaacctgtccaatttggagaaataggtggtcacacccaaatcaattatgttcagtggtatgaatgtgggactacaattcctggaaaatggtagatgctgcacaaagttaccttctgtttcatcattgcaaacaaaaatcattgaaaatactatgccgcattcatttaaagctattttgtttactatgtataaaagtctacaatctaattaatagcaatactagatgtttattattagaaaagattgctgagagtatttatcaggttttacaaagtcattttaagaaagcaagatactgatgttaacagaataacatttttggggaagctggctccctattcatggtattttaagagatcatttgtatattatttatcacactgttgtaatgatgttttgagatacttttataacaaaattaacatcaaaaaggtatatactttttaaaaaaaatttacttttattgatgtgtactcttcctattgatgagttaattccataaatctctacttagtttaacttattggatcaaattatcttcagcatgtatatctggggaaaaaaggtccgaattttcacatttatatttaaacttcaattttttatatttaaacttcaattttttagcaacagctgaatagctttgcggaggagtttaatagttacacattcatgctaatatacatttcctttaaacatccacaaattcttaaaaagattgaatcagtaaatttcatttcagctaaaaatggagtctaatatattgtttcaaaagatacatttttacccaccataaatgttacaatatctgaatatgctttgtcaaactatccctttatgcaatcgtcttcatattgtttttatgattctaatcaagctgtatgtagagactgaatgtgaagtcaagtctgagcacaaaaagataatgcacgatgagattgcctaccattttataggatatttactatgtatttatacgttaagacctctatgaatgaatgtatcagagaatgtctttgtaactgtttaattcaatctgtaataaaaatctaactaactaactcatttatttctattaaaaaggtattgtcctttaggcggggaatgggaatccttgctgcactgttgcagtcattctgaaaggacctttccctgtacttacctttcaacatgcttcaatcttatcaacgctacattttgtatttttcaaacaagtataaattctgcaataaagagatgtagtttttttt

SEQ ID NO: 280682 - DNA, 818 bp, Homo sapiens
atccccggaagaggaacctcactcagactctactgccatcacagtcaacaataggacctgaaacaccaggaaccaaaccttcaacaacattagcaccacgaaagaccaaaagaccaggtcgtcgcccccgcccccgtccccgccctaaaaccacacctagtccagaagtgcccaagtccaaacccgctctggaacctgccacgatacaaccggagcccttggtgcccacaactgtctctgagcctgttccatttgaaactgaagctccctcaatgaccatagttcccaccacagacattgagcctgtaactgtgagaactgaggctacagtgacaacattagctccaaaaacatcgcaacgaacaagaacacgtcgtccacgtcccaaacataaaaccacgccacgcccagagacactgcagaccaaactagactttggacctattactcctgggacatcttcagctccaacaacaacaacaaaaagaacccgtcgtccacatcccaaacctaaaaccacgccccatccagaagtacctcaaactaaactggttcctgccacaatcctcgaaccagttcttagaactgaggcttcagggacaacagcagctcccaaagtgcctcaacgaactcatcgtccacatcccaaacctaaaaccacactgagtcccgaagagcttcagactgaactggttcctgctacaatctttgaaccagtttctcctataaaagaggctccagggacaacattcgttcctgttacagacctcgagcctgttacttttagaactgagatccctgcaacaaccttagctacc

SEQ ID NO: 280683 - DNA, 527 bp, Homo sapiens
gtatagtttataaactgtatctcattttttaaaagttgcctgtcctgacataattagtgaatttaaagccttctgcatatattgttgatttgtggatattttaaatgctaagtgaaaaatttatctgtttaaatcttaggccaaattttaatttttatcccaaatggctttataaaagcaacctttctcatgttcctgttgaacatatgccttcaatatttttgagtgactatcttctctaagctgtacaaagttttgagattttccatctcaaaatggaagaacagacagatctcttggacagtttattaatctgtgacaaaaaaattattcaagacctcatttaactacataaataatgatagaagtttgcaaaacagatggaaacatgtccacagtaaatcaaagggtttaaatgtccttctaagatggatgtaatatttatcatcagtttgtaaatccacccttcttgtattaacttgctaattttctttcttcagcaccacgaaagaccaaaagaccaggtc

SEQ ID NO: 280684 - DNA, 4447 bp, Homo sapiens
cactgggagacagtccacttaaatgcagctccagggttgcgaggcacccaccagcatcattccccgtgcgaggtggcaaatgcaacatgctctccagtttggggtgtctacttctctgtggaagtattacactagccctgggaaatgcacagaaattgccaaaaggtaaaaggccaaacctcaaagtccacatcaataccacaagtgactccatcctcttgaagttcttgcgtccaagtccaaatgtaaagcttgaaggtcttctcctgggatatggcagcaatgtatcaccaaaccagtacttccctcttcccgctgaagggaaattcacagaagctatagttgatgcagagccgaaatatctgatagttgtgcgacctgctccacctccaagtcaaaagaagtcatgttcaggtaaaactcgttctcgcaaacctctgcagctggtggttggcactctgacaccgagctcagtcttcctgtcctggggtttcctcatcaacccacaccatgactggacattgccaagtcactgtcccaatgacagattttatacaattcgctatcgagaaaaggataaagaaaagaagtggatttttcaaatctgtccagccactgaaacaattgtggaaaacctaaagcccaacacagtttatgaatttggagtgaaagacaatgtggaaggtggaatttggagtaagattttcaatcacaagactgttgttggaagtaaaaaagtaaatgggaaaatccaaagtacctatgaccaagaccacacagtgccagcatatgtcccaaggaaactaatcccaataacaatcatcaagcaagtgattcagaatgttactcacaaggattcagctaaatccccagaaaaagctccactgggaggagtgatactagtccaccttattattccaggtcttaatgaaactactgtaaaacttcctgcatccctaatgtttgagatttcagatgcactcaagacacaattagctaagaatgaaaccttggcattacctgccgaatctaaaacaccagaggttgaaaaaatctcagcacgacccacaacagtgactcctgaaacagttccaagaagcactaaacccactacgtctagtgcattagatgtttcagaaacaacactggttctcagcaaaaggaccccggaaacattgcaaactattctaatacctcagtttgaattgccactgagcactctagcttcaagtgaaaagccatggattgtgcctacagctaaaatatctgaagattccaaagttctgcagcctcaaactgcaacttatgatgttttctcaagccctacaacatcagatgagcctgagatatcagattcctacacagcaacaagtgatcgtattctggattctatcccacctaaaacttctagaactcttgaacagccaagggcaacactggctccaagtgaaacaccatttgttcctcaaaaactggaaatctttaccagtccagaaatgcagcctacgacacctgctccccagcaaactacatctatcccttctacacctaaacgacgcccccggcccaaaccgccaagaaccaaacctgaaagaaccacaagtgccggaacaattacacctaaaatttctaaaagccctgaacctacatggacaacaccggctcccggtaaaacacaatttatttctctgaaacctaaaatccctctcagcccagaagtgacacacaccaaacctgctcccaagcagacaccacgtgctcctcctaagccaaaaacatcaccacgcccaagaatcccacaaacacaaccagttcctaaggtgccccagcgtgttactgcaaaaccaaaaacgtcaccaagtccagaagtgtcatacaccacacctgctccaaaagatgtgctccttcctcataaaccataccctgaggtctctcagagcgaacctgctcctctagagacacgaggcatcccttttatacccatgatttccccaagtcctagtcaagaggaactacagaccactctggcgccacacagattttatactactgtgaggcccagaacatctgacaagccacacatcagacctggggtcaagcaagcacccaggccatcaggtgctgatagaaatgtatcagtggactctacccaccccactaaaaagccagggactcgccgcccacccttgccacccagacctacacacccacgaagaaaacctttaccaccaaataatgtcactggaaagccaggaagtgcaggaatcatttcatcaggcccaataactacaccacccctgaggtcaacacccaggcctactggaactcccttggagagaatagagacagatataaagcaaccaacagttcctgcctctggagaagaactggaaaatataactgactttagctcaagcccaacaagagaaactgatcctcttgggaagccaagattcaaaggacctcatgtgcgatacatccaaaagcctgacaacagtccctgctccattactgactctgtcaaacggttccccaaagaggaggccacagaggggaatgccaccagcccaccacagaacccacccaccaacctcactgtggtcaccgtggaagggtgcccctcatttgtcatcttggactgggaaaagccactaaatgacactgtcactgaatatgaagttatatccagagaaaatgggtcattcagtgggaagaacaagtccattcaaatgacaaatcagacattttccacagtagaaaatctgaaaccaaacacgagttatgaattccaggtgaaacccaaaaacccacttggtgaaggcccggtcagcaacacagtggcattcagtactgaatcagcggacccaagagtgagtgagccagtttctgcaggaagagatgccatctggactgaaagaccctttaattcagactcttactcagagtgtaagggcaaacaatatgtcaaaaggacatggtataaaaaatttgtaggagtgcagctgtgcaactctctcagatacaagatttacttgagcgactccctcacaggaaaattttataacataggtgatcagaggggccatggagaagatcactgccagtttgtggattcatttttagatggacgcactgggcagcaactcacttctgaccagttaccaatcaaagaaggttatttcagagcagttcgccaggaacctgtccaatttggagaaataggtggtcacacccaaatcaattatgttcagtggtatgaatgtgggactacaattcctggaaaatggtagatgctgcacaaagttaccttctgtttcatcattgcaaacaaaaatcattgaaaatactatgccgcattcatttaaagctattttgtttactatgtataaaagtctacaatctaattaatagcaatactagatgtttattattagaaaagattgctgagagtatttatcaggttttacaaagtcattttaagaaagcaagatactgatgttaacagaataacatttttggggaagctggctccctattcatggtattttaagagatcatttgtatattatttatcacactgttgtaatgatgttttgagatacttttataacaaaattaacatcaaaaaggtatatactttttaaaaaaaatttacttttattgatgtgtactcttcctattgatgagttaattccataaatctctacttagtttaacttattggatcaaattatcttcagcatgtatatctggggaaaaaaggtccgaattttcacatttatatttaaacttcaattttttatatttaaacttcaattttttagcaacagctgaatagctttgcggaggagtttaatagttacacattcatgctaatatacatttcctttaaacatccacaaattcttaaaaagattgaatcagtaaatttcatttcagctaaaaatggagtctaatatattgtttcaaaagatacatttttacccaccataaatgttacaatatctgaatatgctttgtcaaactatccctttatgcaatcgtcttcatattgtttttatgattctaatcaagctgtatgtagagactgaatgtgaagtcaagtctgagcacaaaaagataatgcacgatgagattgcctaccattttataggatatttactatgtatttatacgttaagacctctatgaatgaatgtatcagagaatgtctttgtaactgtttaattcaatctgtaataaaaatctaactaactaactcatttatttctattaaaaaggtattgtcctttaggcggggaatgggaatccttgctgcactgttgcagtcattctgaaaggacctttccctgtacttacctttcaacatgcttcaatcttatcaacgctacattttgtatttttcaaacaagtataaattctgcaataaagagatgtagtttttttt

SEQ ID NO: 280685 - DNA, 2847 bp, Homo sapiens
cactgggagacagtccacttaaatgcagctccagggttgcgaggcacccaccagcatcattccccgtgcgaggtggcaaatgcaacatgctctccagtttggggtgtctacttctctgtggaagtattacactagccctgggaaatgcacagaaattgccaaaaggtaaaaggccaaacctcaaagtccacatcaataccacaagtgactccatcctcttgaagttcttgcgtccaagtccaaatgtaaagcttgaaggtcttctcctgggatatggcagcaatgtatcaccaaaccagtacttccctcttcccgctgaagggaaattcacagaagctatagttgatgcagagccgaaatatctgatagttgtgcgacctgctccacctccaagtcaaaagaagtcatgttcaggtaaaactcgttctcgcaaacctctgcagctggtggttggcactctgacaccgagctcagtcttcctgtcctggggtttcctcatcaacccacaccatgactggacattgccaagtcactgtcccaatgacagattttatacaattcgctatcgagaaaaggataaagaaaagaagtggatttttcaaatctgtccagccactgaaacaattgtggaaaacctaaagcccaacacagtttatgaatttggagtgaaagacaatgtggaaggtggaatttggagtaagattttcaatcacaagactgttgttggaagtaaaaaagtaaatgggaaaatccaaagtacctatgaccaagaccacacagtgccagcatatgtcccaaggaaactaatcccaataacaatcatcaagcaagtgattcagaatgttactcacaaggattcagctaaatccccagaaaaagctccactgggaggagtgatactagtccaccttattattccaggtcttaatgaaactactgtaaaacttcctgcatccctaatgtttgagatttcagatgcactcaagacacaattagctaagaatgaaaccttggcattacctgccgaatctaaaacaccagaggttgaaaaaatctcagcacgacccacaacagtgactcctgaaacagttccaagaagcactaaacccactacgtctagtgcattagatgtttcagaaacaacactgggtaattctaagaacttttttttttctaaaaaaacaaaagtaacaacgaaataactcccaggactcacagaaaagaaacctggtgccttaacttctctctccctccccactttctccttttccttccttcctggcagtggttaaccttcctctttcttggacagattccactgaagagttaaccacatggctgatcctggtgactgaacttctgggcaaatctggatgctaattgctaactaaatgccctttttaaccagtctctgggttatacagacagaataccagccttttaactcccaaatcttgggggagaatgaaggaaacctggaagtcttgactctgtgctttctgcttagagtggctttgggaagtcttgtgcatactaaatttgggaagaatccccaaaagtgtcatgcttttaaacaagaatttcatggcacccatgtttgttgtttcttagcccaagagaatctaacttgctttgttgttctctttcccctgaagaaaaggagcagcatgtgttttgttctgtaatttgatgttgatcttctcagccacaccactgccctttgaatgtacaccttcatattttaacagctatgtaacttttccagggaaggttatttccattaaaggtattggctgctctgtgtgcaagagtctgttacaaagcttgctgtgcatgatcatggttaagccacaacatcaaaacccaagtccaggagttgctaactgcactcttttttattgtagttctcagcaaaaggaccccggaaacattgcaaactattctaatacctcagtttgaattgccactgagcactctagcttcaagtgaaaagccatggattgtgcctacagctaaaatatctgaagattccaaagttctgcagcctcaaactgcaacttatgatgttttctcaagccctacaacatcagatgagcctgagatatcagattcctacacagcaacaagtgatcgtattctggattctatcccacctaaaacttctagaactcttgaacagccaagggcaacactggctccaagtgaaacaccatttgttcctcaaaaactggaaatctttaccagtccagaaatgcagcctacgacacctgctccccagcaaactacatctatcccttctacacctaaacgacgcccccggcccaaaccgccaagaaccaaacctgaaagaaccacaagtgccggaacaattacacctaaaatttctaaaagccctgaacctacatggacaacaccggctcccggtaaaacacaatttatttctctgaaacctaaaatccctctcagcccagaagtgacacacaccaaacctgttcccaccacagacattgagcctgtaactgtgagaactgaggctacagtgacaacattagctccaaaaacatcgcaacgaacaagaacacgtcgtccacgtcccaaacataaaaccacgccacgcccagagacactgcagaccaaactagactttggacctattactcctgggacatcttcaacccggaaacagacaagcaacccaaactgaaccccctcaaaagccaaaaaatgggagacaatttcacatggactttggaaaatatttttttcctttgcattcatctctcaaacttagtttttatctttgaccaaccgaacatgaccaaaaaccaaaagtgcattcaaccttac

SEQ ID NO: 280686 - DNA, 728 bp, Homo sapiens
ctttagcctcaaaaccatctgagagacctaaaaccacacacagaccagatgcacctcaaattcagcctggttcaaaaccaccaaaacaattacttcctaaaccccaaaccacagcagaaccagacatgccaccaactaaatccgtctctgagcctgttccatttgaaactgaagctccctcaatgaccatagttcccaccacagacattgagcctgtaactgtgagaactgaggctacagtgacaacattagctccaaaaacatcgcaacgaacaagaacacgtcgtccacgtcccaaacataaaaccacgccacgcccagagacactgcagaccaaactagactttggacctattactcctgggacatcttcagctccaacaacaacaacaaaaagaacccgtcgtccacatcccaaacctaaaaccacgccccatccagaagtacctcaaactaaactggttcctgccacaatcctcgaaccagttcttagaactgaggcttcagggacaacagcagctcccaaagtgcctcaacgaactcatcgtccacatcccaaacctaaaaccacactgagtcccgaagagcttcagactgaactggttcctgctacaatctttgaaccagtttctcctataaaagaggctccagggacaacattcgttcctgttacagacctcgagcctgttacttttagaactgagatccctgcaacaaccttagctacc

SEQ ID NO: 280687 - DNA, 941 bp, Homo sapiens
  misc_feature (933)..(933): n is a, c, g, or t
  misc_feature (937)..(940): n is a, c, g, or t
ggggcgcacagatgaaaacaccctgcggacaccgtaactataaacccgactcctcccgaggagcgacggtccgagcggacgctagcgggcccagcagacacgagcagagcgggccaggcctctctaacgtccgggccaaacccgtccttcaccccaaaaccagttcatctcctcggaactcacccaggccagtgaggccttaactctgaaaggcaaaaagactctcaggcgctcacagccggcgtcacaaaaggaacggcgcaccgctgacgtcatttacgctctccgcctcgggccaggcggggtttcgggactagggtttctgccgtgtaatacctcctcgaggcagaaaaattctactttccatctgcttggctgcggaggaccttggggtgggctcagcgtgggggctgcaggcagaaatgggtccagaaggcaaggtcgaggttagagccaagcctgtgggcagggctacgggcagggggcggggaggaatgtgggtccaggcccagaggaaaaggttgaagttatagccaggcctgtgggcgaggccgcagcagggcggccataggggaaggagccaatgtgttatgcatgtagaaaatagatggcctggagcaactgaagaaccacaaaagaagtgaaacagccagttcctgccttaactgatgacgttccaccattgtgatttgttgctgccccaccccaactgatctcttgaccttgtgacattcttcttctggacgagtctcaggagttccccaccgagcaccttgtgacccccggccctgccagcaaaagataaccacctttaactttccactacctacccaaatcctataaaactgccccacccctatctccctttgctgacccctttctcgcactcagcccacttgcacccaagtgaataaacagccttgttgctaacanaaannnna

SEQ ID NO: 280688 - DNA, 1348 bp, Homo sapiens
  misc_feature (1340)..(1340): n is a, c, g, or t
  misc_feature (1344)..(1347): n is a, c, g, or t
ggggcgcacagatgaaaacaccctgcggacaccgtaactataaacccgactcctcccgaggagcgacggtccgagcggacgctagcgggcccagcagacacgagcagagcgggccaggcctctctaacgtccgggccaaacccgtccttcaccccaaaaccagttcatctcctcggaactcacccaggccagtgaggccttaactctgaaaggcaaaaagactctcaggcgctcacagccggcgtcacaaaaggaacggcgcaccgctgacgtcatttacgctctccgcctcgggccaggcggggtttcgggactagggtttctgccgtgtaatacctcctcgaggcagaaaaattctactttccatctgcttggctgcggaggaccttggggtgggctcagcgtgggggctgcaggcagaaatgggtccagaaggcaaggtcgaggttagagccaagcctgtgggcagggctacgggcagggggcggggaggaatgtgggtccaggcccagaggaaaaggttgaagttatagccaggcctgtgggcgaggccgcagcagggcggccataggggaaggagccaatgtgttatgcatgtagaaaataggtaactacgtcttttgctctgttactatttcaacatttgatgtaaaaaacattttctatgcagctaaaggaattgtttttaaaaataatttctaggttttctgccttgctttaaaacatcttttctttttttttgagacaaaatctcactctgtcaccaaggctggagttcagtggagccatctcagctcactgcaacctccacctcccaggttcaagcgattctcctgcctcatcctcccaagtagctggaattacaggtgcatgctgccacaccctgctaatttttgtatttttagtagaggcagggttttgccatgctggccaggctggtcttgaactacttgtcaggcctctgagcccaagttaaatcatcataaaccctgtcacctgcacgtatacatccagatggcctggagcaactgaagaaccacaaaagaagtgaaacagccagttcctgccttaactgatgacgttccaccattgtgatttgttgctgccccaccccaactgatctcttgaccttgtgacattcttcttctggacgagtctcaggagttccccaccgagcaccttgtgacccccggccctgccagcaaaagataaccacctttaactttccactacctacccaaatcctataaaactgccccacccctatctccctttgctgacccctttctcgcactcagcccacttgcacccaagtgaataaacagccttgttgctaacanaaannnna

SEQ ID NO: 280689 - DNA, 1211 bp, Homo sapiens
  misc_feature (1203)..(1203): n is a, c, g, or t
  misc_feature (1207)..(1210): n is a, c, g, or t
ggggcgcacagatgaaaacaccctgcggacaccgtaactataaacccgactcctcccgaggagcgacggtccgagcggacgctagcgggcccagcagacacgagcagagcgggccaggcctctctaacgtccgggccaaacccgtccttcaccccaaaaccagttcatctcctcggaactcacccaggccagtgaggccttaactctgaaaggcaaaaagactctcaggcgctcacagccggcgtcacaaaaggaacggcgcaccgctgacgtcatttacgctctccgcctcgggccaggcggggtttcgggactagggtttctgccgtgtaatacctcctcgaggcagaaaaattctactttccatctgcttggctgcggaggaccttggggtgggctcagcgtgggggctgcaggcagaaatgggtccagaaggcaaggtcgaggttagagccaagcctgtgggcagggctacgggcagggggcggggaggaatgtgggtccaggcccagaggaaaaggttgaagttatagccaggcctgtgggcgaggccgcagcagggcggccataggggaaggagccaatgtgttatgcatgtagaaaatagacaaaatctcactctgtcaccaaggctggagttcagtggagccatctcagctcactgcaacctccacctcccaggttcaagcgattctcctgcctcatcctcccaagtagctggaattacaggtgcatgctgccacaccctgctaatttttgtatttttagtagaggcagggttttgccatgctggccaggctggtcttgaactacttgtcaggcctctgagcccaagttaaatcatcataaaccctgtcacctgcacgtatacatccagatggcctggagcaactgaagaaccacaaaagaagtgaaacagccagttcctgccttaactgatgacgttccaccattgtgatttgttgctgccccaccccaactgatctcttgaccttgtgacattcttcttctggacgagtctcaggagttccccaccgagcaccttgtgacccccggccctgccagcaaaagataaccacctttaactttccactacctacccaaatcctataaaactgccccacccctatctccctttgctgacccctttctcgcactcagcccacttgcacccaagtgaataaacagccttgttgctaacanaaannnna

SEQ ID NO: 280690 - DNA, 369 bp, Homo sapiens
tctttagacttcctcttagaagaggactgacacctgagtacatcctgcgaagacaaacgacggaagtattctctagggaaaagttcattttcatcctcttcctcctcttcttcatcgatctcaaacacggagtcttgctatgtcacgcaggttggactacagtggctatttacagcggcccctccgagatggctggctatttgcaggaagactatcatgaggaaggacttgtttgctcaaacgtgtagaactgactggagccataacttctggtttcttttcactttctactgaataagaatcttgttctttgttctcatgagacacagactttcccacctgattttagaaaataaaacaatgctggtt

SEQ ID NO: 280691 - DNA, 636 bp, Homo sapiens
ccccccacaatattgggtcccctcaaaagggccaaaaaaccggaggggggtcccatcctttgggttcccccacccctgagcaacctgcatggcagagaacaaaataaatattggctaaattctagagattccatcattaagttctgcccaccatgtcccaaggattcctgctcacctgtacttgtgagcgcaactgatccatcttctgctgctgcttctccacaatctgaaaggcaaagttatcaaggaaggctgcgagcacaaggctgacgcctaccctccgttacagcctggacaccctcagtcaccttttggagcgaatcgtatcgcttctgccaggactccatttccacttctggaccttctccactggtctcctccacagactgtttatcttgcaggctgaaagacagtggcctcttcaagaactctgaagttagacacaagtggctttgattcttggttctgctatttattgcacattttgaggcaagacacttagtccaagcagtagctggggataatacttgggtctgctgtaatatatggggtgccacacaaaagctgctcagtgtatgttaattctcttccctaagggccagaatctatacaatgtgacaccaattctctacctgc

SEQ ID NO: 280692 - DNA, 2756 bp, Homo sapiens
ggcggccgcaatagtacgctcgcgcggcggtggcgggtggtggtccttggaccacgcggtgggcggacagcggcacggcctcccctcccctccggacgcaggccgaagtacgtgagaggagacttccggccactgcgttgtagtcggcccggctgcaaagcgtttttctgcaggctgttttcccaggttccctcggcctgtacctcgcgcactcctcttgctccaggtccttcagtctccgctcgtctcaccgtaggctgtgacgacatgagcaacaaagaaggatcaggagggttcaggaaaaggaagcatgacaatttcccacataaccaaagaagagaagggaaggatgttaattcatcttcacccgtgatgttggcctttaaatcatttcagcaggaacttgatgcaaggcatgacaaatatgagagacttgtgaaacttagtcgggatataactgttgaaagtaaaaggacaatttttctcctccataggattacaagtgctcctgatatggaagatatattgactgaatcagaaattaaattggatggtgtcagacaaaagatattccaggtagcccaagagctatcaggggaagatatgcatcagttccatcgagccattactacaggactacaggaatatgtggaagctgtctcttttcaacacttcatcaaaacacgatcattaattagtatggatgaaattaataaacaattgatatttacgactgaagacaatgggaaagaaaataaaactccctcctctgatgcacaggataagcagtttggtacttggagactgagagtcacacctgtcgattaccttctgggagtggctgacttaactggagaattgatgcggatgtgtattaacagtgtggggaatggggacattgataccccctttgaagtgagccagtttttacgtcaggtttatgatgggttttcattcattggcaacactggaccttacgaggtttctaagaagctgtataccttgaaacaaagtttggccaaagtggagaatgcttgttatgccttgaaagtcagagggtcagaaattccaaaacatatgttggcagatgtgttttcagttaaaacagaaatgatagatcaagaagagggcatttcttagaatctaacgttactcagttactaattcttttgagaactcctaagagaccaatttgtaagacttatttagtatttcatttaactttattgtggcttttacatagaaacatattcagttgtacttgttttaaattgtatacaagctgtacataaaattagccaaatgaatcatttcttatatcttattcatgaaagtttgcatacagatgtttgcatatatgcctttttgaatttttgctggttaacctttatcatttatctttgtaatgtgaacatgcttcagagtgtaccttttgccataacctattttaatttactttttctgaagtttggagtgataatttttagtggaagcaatttgtaatttaagttggtagttatattatatatagaaaagattttttagttaaacttctggacatgagcgtcctgtttaaatttcttgttaatatcgtgccaagcctcaaaaataggcttattccatggaacaagaattaaaaatgaataagctatcaatatataatttaagtacaagtttaggctgggcgtggtggctcacgcctgtaatcccagcactttgggaggccgaggtaggcagatcacgaggtcaagagatcaagaccagcctgaccaacgtggcgaaacctcgtctctactagaaatacaaaaattagctggatatggtggtatgtgcctgtaatcccagctacttgggaggctgaggcaggagactcgcttgaacctgggaggcagaggttgcagtgagccgagattgcgccactgcactccagcctgggtaacagagcaagactccatctcaaaaaaagaaagaaagaaaaaagaaagtacaagtttataaagtattatagtgaaaaattcgcattctggctgattttaagccatttaaaatttatataaaacaaccttccataaaaatttgacaggtgcccagatgttgctttctccatttattttttgtttttttttaatcacagtaggtctgatagagaattggagctaaattataatatttttgttggtaaagttgagttatatacttgtacatacaatggaaatgcttttagtagtgattatttagcaatttttgtttttgttatattaggcatgtttggaggctttcctattctagcatttaaatttaaattttattaaaattaaataatttaaatctagcatttaaatttaaataatttaagtctagcatttacttttaaataattataatgaagttttgaaatactaagttaatccagacctttagttgtcccatggtgttaataaagttgccaaagaagatgtattatgaacaattcagcaataagacaattgtcaacacagttgagaataacaatggtaatcgttagtaatatttagaattggaatttgcctactgaaatagttatagatgattacttgtgatgtgaaactgaattgagcatgacaaccagacatttccagttggttttgtaagttttgagaatctagatactgggttttattttttgaaagattagctctgtttgtaagggctgattccttgaaaatgtaattttccagaaaaacacctaaagaaaataaaacatggacatgcctagt

SEQ ID NO: 280693 - DNA, 580 bp, Homo sapiens
gcggccgcctactactactaaattcgcggccgcgtcgactgcttttagtagtgattatttagcaatttttgtttttgttatattaggcatgtttggaggctttcctattctagcatttaaatttaaattttattaaaattaaataatttaaatctagcatttaaatttaaataatttaagtctagcatttacttttaaataattataatgaagttttgaaatactaagttaatccagacctttagttgtcccatggtgttaataaagttgccaaagaagatgtattatgaacaattcagcaataagacaattgtcaacacagttgagaataacaatggtaatcgttagtaatatttagaattggaatttgcctactgaaatagttatagatgattacttgtgatgtgaaactgaattgagcatgacaaccagacatttccagttggttttgtaagttttgagaatctagatactgggttttattttttgaaagattagctctgtttgtaagggctgattccttgaaaatgtaattttccagaaaaacacctaaagaaaataaaacatggacatgcctagt

SEQ ID NO: 280694 - DNA, 2832 bp, Homo sapiens
ggcggccgcaatagtacgctcgcgcggcggtggcgggtggtggtccttggaccacgcggtgggcggacagcggcacggcctcccctcccctccggacgcaggccgaagtacgtgagaggagacttccggccactgcgttgtagtcggcccggctgcaaagcgtttttctgcaggctgttttcccaggttccctcggcctgtacctcgcgcactcctcttgctccaggtccttcagtctccgctcgtctcaccgtaggctgtgacgacatgagcaacaaagaaggatcaggagggttcaggaaaaggaagcatgacaatttcccacataaccaaagaagagaagggaaggatgttaattcatcttcacccgtgatgttggcctttaaatcatttcagcaggaacttgatgcaaggcatgacaaatatgagagacttgtgaaacttagtcgggatataactgttgaaagtaaaaggacaatttttctcctccataggattacaagtgctcctgatatggaagatatattgactgaatcagaaattaaattggatggtgtcagacaaaagatattccaggtagcccaagagctatcaggggaagatatgcatcagttccatcgagccattactacaggactacaggaatatgtggaagctgtctcttttcaacacttcatcaaaacacgatcattaattagtatggatgaaattaataaacaattgatatttacgactgaagacaatgggaaagaaaataaaactccctcctctgatgcacaggataagcagtttggtacttggagactgagagtcacacctgtcgattaccttctgggagtggctgacttaactggagaattgatgcggatgtgtattaacagtgtggggaatggggacattgataccccctttgaagtgagccagtttttacgtcaggtttatgatgggttttcattcattggcaacactggaccttacgaggtttctaagaagctgtataccttgaaacaaagtttggccaaagtggagaatgcttgttatgccttgaaagtcagagggtcagaaattccaaaacatatgttggcagatgtgttttcagttaaaacagaaatgatagatcaagaagagggcatttcttagaatctaacgttactcagttactaattcttttgagaactcctaagagaccaatttgtaagacttatttagtatttcatttaactttattgtggcttttacatagaaacatattcagttgtacttgttttaaattgtatacaagctgtacataaaattagccaaatgaatcatttcttatatcttattcatgaaagtttgcatacagatgtttgcatatatgcctttttgaatttttgctggttaacctttatcatttatctttgtaatgtgaacatgcttcagagtgtaccttttgccataacctattttaatttactttttctgaagtttggagtgataatttttagtggaagcaatttgtaatttaagttggtagttatattatatatagaaaagattttttagttaaacttctggacatgagcgtcctgtttaaatttcttgttaatatcgtgccaagcctcaaaaataggcttattccatggaacaagaattaaaaatgaataagctatcaatatataatttaagtacaagtttaggctgggcgtggtggctcacgcctgtaatcccagcactttgggaggccgaggtaggcagatcacgaggtcaagagatcaagaccagcctgaccaacgtggcgaaacctcgtctctactagaaatacaaaaattagctggatatggtggtatgtgcctgtaatcccagctacttgggaggctgaggcaggagactcgcttgaacctgggaggcagaggttgcagtgagccgagattgcgccactgcactccagcctgggtaacagagcaagactccatctcaaaaaaagaaagaaagaaaaaagaaagtacaagtttataaagtattatagtgaaaaattcgcattctggctgattttaagccatttaaaatttatataaaacaaccttccataaaaatttgacaggtgcccagatgttgctttctccatttattttttgtttttttttaatcacagtaggtctgatagagaattggagctaaattataatatttttgttggtaaagttgagttatatacttgtacatacaatggaaatgcttttagtagtgattatttagcaatttttgtttttgttatattaggcatgtttggaggctttcctattctagcatttaaatttaaattttattaaaattaaataatttaaatctagcatttaaatttaaataatttaagtctagcatttacttttaaataattataatgaagttttgaaatactaagttaatccagacctttagttgtcccatggtgttaataaagttgccaaagaagatgtattatgaacaattcagcaataagacaattgtcaacacagttgagaataacaatggtaatcgttagtaatatttagaattggaatttgcctactgaaatagttatagatgattacttgtgatgtgaaactgaattgagcatgacaaccagacatttccagttggttttgtaagttttgagaatctagatactgggttttattttttgaaagattagctctgtttgtaagggctgattccttgaaaatgtaattttccagaaaaacacctaaagaaaataaaacatggacatgcctagttaaaaaaaaagacaagaaaaaaacacgaaaacacaaaacttttggggcgagtttgggcctcggagaaaagttttaa

SEQ ID NO: 280695 - DNA, 2695 bp, Homo sapiens
ggcggccgcaatagtacgctcgcgcggcggtggcgggtggtggtccttggaccacgcggtgggcggacagcggcacggcctcccctcccctccggacgcaggccgaagtacgtgagaggagacttccggccactgcgttgtagtcggcccggctgcaaagcgtttttctgcaggctgttttcccaggttccctcggcctgtacctcgcgcactcctcttgctccaggtccttcagtctccgctcgtctcaccgtaggctgtgacgacatgagcaacaaagaaggatcaggagggttcaggaaaaggaagcatgacaatttcccacataaccaaagaagagaagggaaggatgttaattcatcttcacccgtgatgttggcctttaaatcatttcagcaggaacttgatgcaaggcatgacaaatatgagagacttgtgaaacttagtcgggatataactgttgaaagtaaaaggacaatttttctcctccataggattacaagtgctcctgatatggaagatatattgactgaatcagaaattaaattggatggtgtcagacaaaagatattccaggtagcccaagagctatcaggggaagatatgcatcagttccatcgagccattactacaggactacaggaatatgtggaagctgtctcttttcaacacttcatcaaaacacgatcattaattagtatggatgaaattaataaacaattgatatttacgactgaagacaatgggaaagaaaataaaactccctcctctgatgcacaggataagcagtttggtacttggagactgagagtcacacctgtcgattaccttctgggagtggctgacttaactggagaattgatgcggatgtgtattaacagtgtggggaatggggacattgataccccctttgaagtgagccagtttttacgtcaggtttatgatgggttttcattcattggcaacactggaccttacgaggtttctaagaagctgtataccttgaaacaaagtttggccaaagtggagaatgcttgttatgccttgaaagtcagagggtcagaaattccaaaacatatgttggcagatgtgttttcagttaaaacagaaatgatagatcaagaagagggcatttcttagaatctaacgttactcagttactaattcttttgagaactcctaagagaccaatttgtaagacttatttagtatttcatttaactttattgtggcttttacatagaaacatattcagttgtacttgttttaaattgtatacaagctgtacataaaattagccaaatgaatcattttgctggttaacctttatcatttatctttgtaatgtgaacatgcttcagagtgtaccttttgccataacctattttaatttactttttctgaagtttggagtgataatttttagtggaagcaatttgtaatttaagttggtagttatattatatatagaaaagattttttagttaaacttctggacatgagcgtcctgtttaaatttcttgttaatatcgtgccaagcctcaaaaataggcttattccatggaacaagaattaaaaatgaataagctatcaatatataatttaagtacaagtttaggctgggcgtggtggctcacgcctgtaatcccagcactttgggaggccgaggtaggcagatcacgaggtcaagagatcaagaccagcctgaccaacgtggcgaaacctcgtctctactagaaatacaaaaattagctggatatggtggtatgtgcctgtaatcccagctacttgggaggctgaggcaggagactcgcttgaacctgggaggcagaggttgcagtgagccgagattgcgccactgcactccagcctgggtaacagagcaagactccatctcaaaaaaagaaagaaagaaaaaagaaagtacaagtttataaagtattatagtgaaaaattcgcattctggctgattttaagccatttaaaatttatataaaacaaccttccataaaaatttgacaggtgcccagatgttgctttctccatttattttttgtttttttttaatcacagtaggtctgatagagaattggagctaaattataatatttttgttggtaaagttgagttatatacttgtacatacaatggaaatgcttttagtagtgattatttagcaatttttgtttttgttatattaggcatgtttggaggctttcctattctagcatttaaatttaaattttattaaaattaaataatttaaatctagcatttaaatttaaataatttaagtctagcatttacttttaaataattataatgaagttttgaaatactaagttaatccagacctttagttgtcccatggtgttaataaagttgccaaagaagatgtattatgaacaattcagcaataagacaattgtcaacacagttgagaataacaatggtaatcgttagtaatatttagaattggaatttgcctactgaaatagttatagatgattacttgtgatgtgaaactgaattgagcatgacaaccagacatttccagttggttttgtaagttttgagaatctagatactgggttttattttttgaaagattagctctgtttgtaagggctgattccttgaaaatgtaattttccagaaaaacacctaaagaaaataaaacatggacatgcctagt

SEQ ID NO: 280696 - DNA, 2626 bp, Homo sapiens
aagcactggtatcaacgcagagtgcccattatgccgggggcaggctgttttcccaggttccctcggcctgtacctcgcgcactcctcttgctccaggtccttcagtctccgctcgtctcaccgtaggctgtgacgacatgagcaacaaagaaggatcaggagggttcaggaaaaggaagcatgacaatttcccacataaccaaagaagagaagggaaggatgttaattcatcttcacccgtgatgttggcctttaaatcatttcagcaggaacttgatgcaaggcatgacaaatatgagagacttgtgaaacttagtcgggatataactgttgaaagtaaaaggacaatttttctcctccataggattacaagtgctcctgatatggaagatatattgactgaatcagaaattaaattggatggtgtcagacaaaagatattccaggtagcccaagagctatcaggggaagatatgcatcagttccatcgagccattactacaggactacaggaatatgtggaagctgtctcttttcaacacttcatcaaaacacgatcattaattagtatggatgaaattaataaacaattgatatttacgactgaagacaatgggaaagaaaataaaactccctcctctgatgcacaggataagcagtttggtacttggagactgagagtcacacctgtcgattaccttctgggagtggctgacttaactggagaattgatgcggatgtgtattaacagtgtggggaatggggacattgataccccctttgaagtgagccagtttttacgtcaggtttatgatgggttttcattcattggcaacactggaccttacgaggtttctaagaagctgtataccttgaaacaaagtttggccaaagtggagaatgcttgttatgccttgaaagtcagagggtcagaaattccaaaacatatgttggcagatgtgttttcagttaaaacagaaatgatagatcaagaagagggcatttcttagaatctaacgttactcagttactaattcttttgagaactcctaagagaccaatttgtaagacttatttagtatttcatttaactttattgtggcttttacatagaaacatattcagttgtacttgttttaaattgtatacaagctgtacataaaattagccaaatgaatcatttcttatatcttattcatgaaagtttgcatacagatgtttgcatatatgcctttttgaatttttgctggttaacctttatcatttatctttgtaatgtgaacatgcttcagagtgtaccttttgccataacctattttaatttactttttctgaagtttggagtgataatttttagtggaagcaatttgtaatttaagttggtagttatattatatatagaaaagattttttagttaaacttctggacatgagcgtcctgtttaaatttcttgttaatatcgtgccaagcctcaaaaataggcttattccatggaacaagaattaaaaatgaataagctatcaatatataatttaagtacaagtttaggctgggcgtggtggctcacgcctgtaatcccagcactttgggaggccgaggtaggcagatcacgaggtcaagagatcaagaccagcctgaccaacgtggcgaaacctcgtctctactagaaatacaaaaattagctggatatggtggtatgtgcctgtaatcccagctacttgggaggctgaggcaggagactcgcttgaacctgggaggcagaggttgcagtgagccgagattgcgccactgcactccagcctgggtaacagagcaagactccatctcaaaaaaagaaagaaagaaaaaagaaagtacaagtttataaagtattatagtgaaaaattcgcattctggctgattttaagccatttaaaatttatataaaacaaccttccataaaaatttgacaggtgcccagatgttgctttctccatttattttttgtttttttttaatcacagtaggtctgatagagaattggagctaaattataatatttttgttggtaaagttgagttatatacttgtacatacaatggaaatgcttttagtagtgattatttagcaatttttgtttttgttatattaggcatgtttggaggctttcctattctagcatttaaatttaaattttattaaaattaaataatttaaatctagcatttaaatttaaataatttaagtctagcatttacttttaaataattataatgaagttttgaaatactaagttaatccagacctttagttgtcccatggtgttaataaagttgccaaagaagatgtattatgaacaattcagcaataagacaattgtcaacacagttgagaataacaatggtaatcgttagtaatatttagaattggaatttgcctactgaaatagttatagatgattacttgtgatgtgaaactgaattgagcatgacaaccagacatttccagttggttttgtaagttttgagaatctagatactgggttttattttttgaaagattagctctgtttgtaagggctgattccttgaaaatgtaattttccagaaaaacacctaaagaaaataaaacatggacatgcctagt

SEQ ID NO: 280697 - DNA, 2376 bp, Homo sapiens
ccgggctgcaggctcgtgccgaattcggcacgagttcatcttcacccgtgatgttggcctttaaatcatttcagcaggaacttgatgcaaggcatgacaaatatgagagacttgtgaaacttagtcgggatataactgttgaaagtaaaaggacaatttttctcctccataggattacaagtgctcctgatatggaagatatattgactgaatcagaaattaaattggatggtgtcagacaaaagatattccaggactacaggaatatgtggaagctgtctcttttcaacacttcatcaaaacacgatcattaattagtatggatgaaattaataaacaattgatatttacgactgaagacaatgggaaagaaaataaaactccctcctctgatgcacaggataagcagtttggtacttggagactgagagtcacacctgtcgattaccttctgggagtggctgacttaactggagaattgatgcggatgtgtattaacagtgtggggaatggggacattgataccccctttgaagtgagccagtttttacgtcaggtttatgatgggttttcattcattggcaacactggaccttacgaggtttctaagaagctgtataccttgaaacaaagtttggccaaagtggagaatgcttgttatgccttgaaagtcagagggtcagaaattccaaaacatatgttggcagatgtgttttcagttaaaacagaaatgatagatcaagaagagggcatttcttagaatctaacgttactcagttactaattcttttgagaactcctaagagaccaatttgtaagacttatttagtatttcatttaactttattgtggcttttacatagaaacatattcagttgtacttgttttaaattgtatacaagctgtacataaaattagccaaatgaatcatttcttatatcttattcatgaaagtttgcatacagatgtttgcatatatgcctttttgaatttttgctggttaacctttatcatttatctttgtaatgtgaacatgcttcagagtgtaccttttgccataacctattttaatttactttttctgaagtttggagtgataatttttagtggaagcaatttgtaatttaagttggtagttatattatatatagaaaagattttttagttaaacttctggacatgagcgtcctgtttaaatttcttgttaatatcgtgccaagcctcaaaaataggcttattccatggaacaagaattaaaaatgaataagctatcaatatataatttaagtacaagtttaggctgggcgtggtggctcacgcctgtaatcccagcactttgggaggccgaggtaggcagatcacgaggtcaagagatcaagaccagcctgaccaacgtggcgaaacctcgtctctactagaaatacaaaaattagctggatatggtggtatgtgcctgtaatcccagctacttgggaggctgaggcaggagactcgcttgaacctgggaggcagaggttgcagtgagccgagattgcgccactgcactccagcctgggtaacagagcaagactccatctcaaaaaaagaaagaaagaaaaaagaaagtacaagtttataaagtattatagtgaaaaattcgcattctggctgattttaagccatttaaaatttatataaaacaaccttccataaaaatttgacaggtgcccagatgttgctttctccatttattttttgtttttttttaatcacagtaggtctgatagagaattggagctaaattataatatttttgttggtaaagttgagttatatacttgtacatacaatggaaatgcttttagtagtgattatttagcaatttttgtttttgttatattaggcatgtttggaggctttcctattctagcatttaaatttaaattttattaaaattaaataatttaaatctagcatttaaatttaaataatttaagtctagcatttacttttaaataattataatgaagttttgaaatactaagttaatccagacctttagttgtcccatggtgttaataaagttgccaaagaagatgtattatgaacaattcagcaataagacaattgtcaacacagttgagaataacaatggtaatcgttagtaatatttagaattggaatttgcctactgaaatagttatagatgattacttgtgatgtgaaactgaattgagcatgacaaccagacatttccagttggttttgtaagttttgagaatctagatactgggttttattttttgaaagattagctctgtttgtaagggctgattccttgaaaatgtaattttccagaaaaacacctaaagaaaataaaacatggacatgcctagt

SEQ ID NO: 280698 - DNA, 2024 bp, Homo sapiens
atctagaggatcccggtcattttctacaccccctcctctgatgcacaggataagcagtttggtacttggagactgagagtcacacctgtcgattaccttctgggagtggctgacttaactggagaattgatgcggatgtgtattaacagtgtggggaatggggacattgataccccctttgaagtgagccagtttttacgtcaggtttatgatgggttttcattcattggcaacactggaccttacgaggtttctaagaagctgtataccttgaaacaaagtttggccaaagtggagaatgcttgttatgccttgaaagtcagagggtcagaaattccaaaacatatgttggcagatgtgttttcagttaaaacagaaatgatagatcaagaagagggcatttcttagaatctaacgttactcagttactaattcttttgagaactcctaagagaccaatttgtaagacttatttagtatttcatttaactttattgtggcttttacatagaaacatattcagttgtacttgttttaaattgtatacaagctgtacataaaattagccaaatgaatcatttcttatatcttattcatgaaagtttgcatacagatgtttgcatatatgcctttttgaatttttgctggttaacctttatcatttatctttgtaatgtgaacatgcttcagagtgtaccttttgccataacctattttaatttactttttctgaagtttggagtgataatttttagtggaagcaatttgtaatttaagttggtagttatattatatatagaaaagattttttagttaaacttctggacatgagcgtcctgtttaaatttcttgttaatatcgtgccaagcctcaaaaataggcttattccatggaacaagaattaaaaatgaataagctatcaatatataatttaagtacaagtttaggctgggcgtggtggctcacgcctgtaatcccagcactttgggaggccgaggtaggcagatcacgaggtcaagagatcaagaccagcctgaccaacgtggcgaaacctcgtctctactagaaatacaaaaattagctggatatggtggtatgtgcctgtaatcccagctacttgggaggctgaggcaggagactcgcttgaacctgggaggcagaggttgcagtgagccgagattgcgccactgcactccagcctgggtaacagagcaagactccatctcaaaaaaagaaagaaagaaaaaagaaagtacaagtttataaagtattatagtgaaaaattcgcattctggctgattttaagccatttaaaatttatataaaacaaccttccataaaaatttgacaggtgcccagatgttgctttctccatttattttttgtttttttttaatcacagtaggtctgatagagaattggagctaaattataatatttttgttggtaaagttgagttatatacttgtacatacaatggaaatgcttttagtagtgattatttagcaatttttgtttttgttatattaggcatgtttggaggctttcctattctagcatttaaatttaaattttattaaaattaaataatttaaatctagcatttaaatttaaataatttaagtctagcatttacttttaaataattataatgaagttttgaaatactaagttaatccagacctttagttgtcccatggtgttaataaagttgccaaagaagatgtattatgaacaattcagcaataagacaattgtcaacacagttgagaataacaatggtaatcgttagtaatatttagaattggaatttgcctactgaaatagttatagatgattacttgtgatgtgaaactgaattgagcatgacaaccagacatttccagttggttttgtaagttttgagaatctagatactgggttttattttttgaaagattagctctgtttgtaagggctgattccttgaaaatgtaattttccagaaaaacacctaaagaaaataaaacatggacatgcctagt

SEQ ID NO: 280699 - DNA, 1030 bp, Homo sapiens
  misc_feature (876)..(876): n is a, c, g, or t
  misc_feature (949)..(949): n is a, c, g, or t
ggcggccgcaatagtacgctcgcgcggcggtggcgggtggtggtccttggaccacgcggtgggcggacagcggcacggcctcccctcccctccggacgcaggccgaagtacgtgagaggagacttccggccactgcgttgtagtcggcccggctgcaaagcgtttttctgcaggctgttttcccaggttccctcggcctgtacctcgcgcactcctcttgctccaggtccttcagtctccgctcgtctcaccgtaggctgtgacgacatgagcaacaaagaaggatcaggagggttcaggaaaaggaagcatgacaatttcccacataaccaaagaagagaagggaaggatgttaattcatcttcacccgtgatgttggcctttaaatcatttcagcaggaacttgatgcaaggcatgacaaatatgagagacttgtgaaacttagtcgggatataactgttgaaagtaaaaggacaatttttctcctccataggattacaagtgctcctgatatggaagatatattgactgaatcagaaattaaattggatggtgtcagacaaaagatattccaggtagcccaagagctatcaggggaagatatgcatcagttccatcgagccattactacaggactacaggaatatgtggaagctgtctcttttcaacacttcatcaaaacacgatcattaattagtatggatgaaattaataaacaattgatatttacgactgaagacaatgggaaagaaaataaaactccctcctctgatgcacaggataagcagtttggtatctatgactccgtgaaggtctacttcagacttcctcgccctcctccacccgagatgccagagtctctgaagaagaagctngggttaactcagtagttagatcaaagcaaatgtggactgaatctgcttgttgatcagtgttgaagaaagtgcnaaaggaacttttatatatttgacagtgtaggaaattgcctattcctgatataattactgtagtactaatgctagggcagag

SEQ ID NO: 280700 - DNA, 786 bp, Homo sapiens
ggcggccgcaatagtacgctcgcgcggcggtggcgggtggtggtccttggaccacgcggtgggcggacagcggcacggcctcccctcccctccggacgcaggccgaagtacgtgagaggagacttccggccactgcgttgtagtcggcccggctgcaaagcgtttttctgcaggctgttttcccaggttccctcggcctgtacctcgcgcactcctcttgctccaggtccttcagtctccgctcgtctcaccgtaggctgtgacgacatgagcaacaaagaaggatcaggagggttcaggaaaaggaagcatgacaatttcccacataaccaaagaagagaagggaaggatgttaattcatcttcacccgtgatgttggcctttaaatcatttcagcaggaacttgatgcaaggcatgacaaatatgagagacttgtgaaacttagtcgggatataactgttgaaagtaaaaggacaatttttctcctccataggattacaagtgctcctgatatggaagatatattgactgaatcagaaattaaattggatggtgtcagacaaaagatattccaggtagcccaagagctatcaggggaagatatgcatcagttccatcgagccattactacaggactacaggaatatgtggaagctgtctcttttcaacacttcatcaaaacacgatcattaattagtatggatgaaattaataaacaattgatatttacgactgaagacaatgggaaagaaaataaaactactgtgagaatttaaaatttattt

SEQ ID NO: 280701 - DNA, 377 bp, Homo sapiens
gcggccgcctactactactaaattcgcggccgcgtcgacacagttgagaataacaatggtaatcgttagtaatatttagaattggaatttgcctactgaaatagttatagatgattacttgtgatgtgaaactgaattgagcatgacaaccagacatttccagttggttttgtaagttttgagaatctagatactgggttttattttttgaaagattagctctgtttgtaagggctgattccttgaaaatgtaattttccagaaaaacacctaaagaaaataaaacatggacatgcctagttaaaaaaaaagacaagaaaaaaacacgaaaacacaaaacttttggggcgagtttgggcctcggagaaaagttttaa

SEQ ID NO: 280702 - DNA, 479 bp, Homo sapiens
cggacagcggcacggcctcccctcccctccggacgcaggccgaagtacgtgagaggagacttccggccactgcgttgtagtcggcccggctgcaaagcgtttttctgcaggctgttttcccaggttccctcggcctgtacctcgcgcactcctcttgctccaggtccttcagtctccgctcgtctcaccgtaggctgtgacgacatgagcaacaaagaaggtggcgtccttaacaacacggggcgttatttatccggagggggaggttctccagtctttctatgcagttttccccttttcacccttgaaggatgccttcgtcccttgtagactcgggggcggcccctctgtttctctccccggccagatcggccctgtttacacctccttttttcttaaatttttgaggtgtgattttatcctagttcagtaattgctgtaatgccagatcatagcaccagttggtggaaacttggatg

SEQ ID NO: 280703 - DNA, 472 bp, Homo sapiens
ccatggtgttaataaagttgccaaagaagatgtattatgaacaattcagcaataagacaattgtcaacacagttgagaataacaatggtaatcgttagtaatatttagaattggaatttgcctactgaaatagttatagatgattacttgtgatgtgaaactgaattgagcatgacaaccagacatttccagttggttttgtaagttttgagaatctagatactgggttttattttttgaaagattagctctgtttgtaagggctgattccttgaaaatgtaattttccagaaaaacacctaaagaaaataaaacatggacatgcctagtaaattctgtttttttgtttgttcgtgttagtgatggtgggttttttggttttgcaactcacctgtagtcaactcactacaggtgagttggtgccattgctactgatatatctccacagttcatgtcatactaatactgtggg

SEQ ID NO: 280704 - DNA, 900 bp, Homo sapiens
  misc_feature (746)..(746): n is a, c, g, or t
  misc_feature (819)..(819): n is a, c, g, or t
aagcactggtatcaacgcagagtgcccattatgccgggggcaggctgttttcccaggttccctcggcctgtacctcgcgcactcctcttgctccaggtccttcagtctccgctcgtctcaccgtaggctgtgacgacatgagcaacaaagaaggatcaggagggttcaggaaaaggaagcatgacaatttcccacataaccaaagaagagaagggaaggatgttaattcatcttcacccgtgatgttggcctttaaatcatttcagcaggaacttgatgcaaggcatgacaaatatgagagacttgtgaaacttagtcgggatataactgttgaaagtaaaaggacaatttttctcctccataggattacaagtgctcctgatatggaagatatattgactgaatcagaaattaaattggatggtgtcagacaaaagatattccaggtagcccaagagctatcaggggaagatatgcatcagttccatcgagccattactacaggactacaggaatatgtggaagctgtctcttttcaacacttcatcaaaacacgatcattaattagtatggatgaaattaataaacaattgatatttacgactgaagacaatgggaaagaaaataaaactccctcctctgatgcacaggataagcagtttggtatctatgactccgtgaaggtctacttcagacttcctcgccctcctccacccgagatgccagagtctctgaagaagaagctngggttaactcagtagttagatcaaagcaaatgtggactgaatctgcttgttgatcagtgttgaagaaagtgcnaaaggaacttttatatatttgacagtgtaggaaattgcctattcctgatataattactgtagtactaatgctagggcagag

SEQ ID NO: 280705 - DNA, 2702 bp, Homo sapiens
ggcggccgcaatagtacgctcgcgcggcggtggcgggtggtggtccttggaccacgcggtgggcggacagcggcacggcctcccctcccctccggacgcaggccgaagtacgtgagaggagacttccggccactgcgttgtagtcggcccggctgcaaagcgtttttctgcaggctgttttcccaggttccctcggcctgtacctcgcgcactcctcttgctccaggtccttcagtctccgctcgtctcaccgtaggctgtgacgacatgagcaacaaagaaggatcaggagggttcaggaaaaggaagcatgacaatttcccacataaccaaagaagagaagggaaggatgttaattcatcttcacccgtgatgttggcctttaaatcatttcagcaggaacttgatgcaaggcatgacaaatatgagagacttgtgaaacttagtcgggatataactgttgaaagtaaaaggacaatttttctcctccataggattacaagtgctcctgatatggaagatatattgactgaatcagaaattaaattggatggtgtcagacaaaagatattccaggtagcccaagagctatcaggggaagatatgcatcagttccatcgagccattactacaggactacaggaatatgtggaagctgtctcttttcaacacttcatcaaaacacgatcattaattagtatggatgaaattaataaacaattgatatttacgactgaagacaatgggaaagaaaataaaactccctcctctgatgcacaggataagcagtttggtacttggagactgagagtcacacctgtcgattaccttctgggagtggctgacttaactggagaattgatgcggatgtgtattaacagtgtggggaatggggacattgataccccctttgaagtgagccagtttttacgtcaggtttatgatgggttttcattcattggcaacactggaccttacgaggtttctaagaagctgtataccttgaaacaaagtttggccaaagtggagaatgcttgttatgccttgaaagtcagagggtcagaaattccaaaacatatgttggcagatgtgttttcagttaaaacagaaatgatagatcaagaagagggcatttcttagaatctaacgttactcagttactaattcttttgagaactcctaagagaccaatttgtaagacttatttagtatttcatttaactttattgtggcttttacatagaaacatattcagttgtacttgttttaaattgtatacaagctgtacataaaattagccaaatgaatcatttcttatatcttattcatgaaagtttgcatacagatgtttgcatatatgcctttttgaatttttgctggttaacctttatcatttatctttgtaatgtgaacatgcttcagagtgtaccttttgccataacctattttaatttactttttctgaagtttggagtgataatttttagtggaagcaatttgtaatttaagttggtagttatattatatatagaaaagattttttagttaaacttctggacatgagcgtcctgtttaaatttcttgttaatatcgtgccaagcctcaaaaataggcttattccatggaacaagaattaaaaatgaataagctatcaatatataatttaagtacaagtttaggctgggcgtggtggctcacgcctgtaatcccagcactttgggaggccgaggtaggcagatcacgaggtcaagagatcaagaccagcctgaccaacgtggcgaaacctcgtctctactagaaatacaaaaattagctggatatggtggtatgtgcctgtaatcccagctacttgggaggctgaggcaggagactcgcttgaacctgggaggcagaggttgcagtgagccgagattgcgccactgcactccagcctgggtaacagagcaagactccatctcaaaaaaagaaagaaagaaaaaagaaagtacaagtttataaagtattatagtgaaaaattcgcattctggctgattttaagccatttaaaatttatataaaacaaccttccataaaaatttgacaggtgcccagatgttgctttctccatttattttttgtttttttttaatcacagtaggtctgatagagaattggagctaaattataatatttttgttggtaaagttgagttatatacttgtacatacaatggaaatgcttttagtagtgattatttagcaatttttgtttttgttatattaggcatgtttggaggctttcctattctagcatttaaatttaaattttattttacttttaaataattataatgaagttttgaaatactaagttaatccagacctttagttgtcccatggtgttaataaagttgccaaagaagatgtattatgaacaattcagcaataagacaattgtcaacacagttgagaataacaatggtaatcgttagtaatatttagaattggaatttgcctactgaaatagttatagatgattacttgtgatgtgaaactgaattgagcatgacaaccagacatttccagttggttttgtaagttttgagaatctagatactgggttttattttttgaaagattagctctgtttgtaagggctgattccttgaaaatgtaattttccagaaaaacacctaaagaaaataaaacatggacatgcctagt

SEQ ID NO: 280706 - DNA, 2707 bp, Homo sapiens
ggcggccgcaatagtacgctcgcgcggcggtggcgggtggtggtccttggaccacgcggtgggcggacagcggcacggcctcccctcccctccggacgcaggccgaagtacgtgagaggagacttccggccactgcgttgtagtcggcccggctgcaaagcgtttttctgcaggctgttttcccaggttccctcggcctgtacctcgcgcactcctcttgctccaggtccttcagtctccgctcgtctcaccgtaggctgtgacgacatgagcaacaaagaaggatcaggagggttcaggaaaaggaagcatgacaatttcccacataaccaaagaagagaagggaaggatgttaattcatcttcacccgtgatgttggcctttaaatcatttcagcaggaacttgatgcaaggcatgacaaatatgagagacttgtgaaacttagtcgggatataactgttgaaagtaaaaggacaatttttctcctccataggattacaagtgctcctgatatggaagatatattgactgaatcagaaattaaattggatggtgtcagacaaaagatattccaggtagcccaagagctatcaggggaagatatgcatcagttccatcgagccattactacaggactacaggaatatgtggaagctgtctcttttcaacacttcatcaaaacacgatcattaattagtatggatgaaattaataaacaattgatatttacgactgaagacaatgggaaagaaaataaaacttcacacctgtcgattaccttctgggagtggctgacttaactggagaattgatgcggatgtgtattaacagtgtggggaatggggacattgataccccctttgaagtgagccagtttttacgtcaggtttatgatgggttttcattcattggcaacactggaccttacgaggtttctaagaagctgtataccttgaaacaaagtttggccaaagtggagaatgcttgttatgccttgaaagtcagagggtcagaaattccaaaacatatgttggcagatgtgttttcagttaaaacagaaatgatagatcaagaagagggcatttcttagaatctaacgttactcagttactaattcttttgagaactcctaagagaccaatttgtaagacttatttagtatttcatttaactttattgtggcttttacatagaaacatattcagttgtacttgttttaaattgtatacaagctgtacataaaattagccaaatgaatcatttcttatatcttattcatgaaagtttgcatacagatgtttgcatatatgcctttttgaatttttgctggttaacctttatcatttatctttgtaatgtgaacatgcttcagagtgtaccttttgccataacctattttaatttactttttctgaagtttggagtgataatttttagtggaagcaatttgtaatttaagttggtagttatattatatatagaaaagattttttagttaaacttctggacatgagcgtcctgtttaaatttcttgttaatatcgtgccaagcctcaaaaataggcttattccatggaacaagaattaaaaatgaataagctatcaatatataatttaagtacaagtttaggctgggcgtggtggctcacgcctgtaatcccagcactttgggaggccgaggtaggcagatcacgaggtcaagagatcaagaccagcctgaccaacgtggcgaaacctcgtctctactagaaatacaaaaattagctggatatggtggtatgtgcctgtaatcccagctacttgggaggctgaggcaggagactcgcttgaacctgggaggcagaggttgcagtgagccgagattgcgccactgcactccagcctgggtaacagagcaagactccatctcaaaaaaagaaagaaagaaaaaagaaagtacaagtttataaagtattatagtgaaaaattcgcattctggctgattttaagccatttaaaatttatataaaacaaccttccataaaaatttgacaggtgcccagatgttgctttctccatttattttttgtttttttttaatcacagtaggtctgatagagaattggagctaaattataatatttttgttggtaaagttgagttatatacttgtacatacaatggaaatgcttttagtagtgattatttagcaatttttgtttttgttatattaggcatgtttggaggctttcctattctagcatttaaatttaaattttattaaaattaaataatttaaatctagcatttaaatttaaataatttaagtctagcatttacttttaaataattataatgaagttttgaaatactaagttaatccagacctttagttgtcccatggtgttaataaagttgccaaagaagatgtattatgaacaattcagcaataagacaattgtcaacacagttgagaataacaatggtaatcgttagtaatatttagaattggaatttgcctactgaaatagttatagatgattacttgtgatgtgaaactgaattgagcatgacaaccagacatttccagttggttttgtaagttttgagaatctagatactgggttttattttttgaaagattagctctgtttgtaagggctgattccttgaaaatgtaattttccagaaaaacacctaaagaaaataaaacatggacatgcctagt

SEQ ID NO: 280707 - DNA, 2019 bp, Homo sapiens
ttttgtttttttaccagccctcctcccctcctctgatgcacaggataagcagtttggtacttggagactgagagtcacacctgtcgattaccttctgggagtggctgacttaactggagaattgatgcggatgtgtattaacagtgtggggaatggggacattgataccccctttgaagtgagccagtttttacgtcaggtttatgatgggttttcattcattggcaacactggaccttacgaggtttctaagaagctgtataccttgaaacaaagtttggccaaagtggagaatgcttgttatgccttgaaagtcagagggtcagaaattccaaaacatatgttggcagatgtgttttcagttaaaacagaaatgatagatcaagaagagggcatttcttagaatctaacgttactcagttactaattcttttgagaactcctaagagaccaatttgtaagacttatttagtatttcatttaactttattgtggcttttacatagaaacatattcagttgtacttgttttaaattgtatacaagctgtacataaaattagccaaatgaatcatttcttatatcttattcatgaaagtttgcatacagatgtttgcatatatgcctttttgaatttttgctggttaacctttatcatttatctttgtaatgtgaacatgcttcagagtgtaccttttgccataacctattttaatttactttttctgaagtttggagtgataatttttagtggaagcaatttgtaatttaagttggtagttatattatatatagaaaagattttttagttaaacttctggacatgagcgtcctgtttaaatttcttgttaatatcgtgccaagcctcaaaaataggcttattccatggaacaagaattaaaaatgaataagctatcaatatataatttaagtacaagtttaggctgggcgtggtggctcacgcctgtaatcccagcactttgggaggccgaggtaggcagatcacgaggtcaagagatcaagaccagcctgaccaacgtggcgaaacctcgtctctactagaaatacaaaaattagctggatatggtggtatgtgcctgtaatcccagctacttgggaggctgaggcaggagactcgcttgaacctgggaggcagaggttgcagtgagccgagattgcgccactgcactccagcctgggtaacagagcaagactccatctcaaaaaaagaaagaaagaaaaaagaaagtacaagtttataaagtattatagtgaaaaattcgcattctggctgattttaagccatttaaaatttatataaaacaaccttccataaaaatttgacaggtgcccagatgttgctttctccatttattttttgtttttttttaatcacagtaggtctgatagagaattggagctaaattataatatttttgttggtaaagttgagttatatacttgtacatacaatggaaatgcttttagtagtgattatttagcaatttttgtttttgttatattaggcatgtttggaggctttcctattctagcatttaaatttaaattttattaaaattaaataatttaaatctagcatttaaatttaaataatttaagtctagcatttacttttaaataattataatgaagttttgaaatactaagttaatccagacctttagttgtcccatggtgttaataaagttgccaaagaagatgtattatgaacaattcagcaataagacaattgtcaacacagttgagaataacaatggtaatcgttagtaatatttagaattggaatttgcctactgaaatagttatagatgattacttgtgatgtgaaactgaattgagcatgacaaccagacatttccagttggttttgtaagttttgagaatctagatactgggttttattttttgaaagattagctctgtttgtaagggctgattccttgaaaatgtaattttccagaaaaacacctaaagaaaataaaacatggacatgcctagt

SEQ ID NO: 280708 - DNA, 871 bp, Homo sapiens
ggcggccgcaatagtacgctcgcgcggcggtggcgggtggtggtccttggaccacgcggtgggcggacagcggcacggcctcccctcccctccggacgcaggccgaagtacgtgagaggagacttccggccactgcgttgtagtcggcccggctgcaaagcgtttttctgcaggctgttttcccaggttccctcggcctgtacctcgcgcactcctcttgctccaggtccttcagtctccgctcgtctcaccgtaggctgtgacgacatgagcaacaaagaaggatcaggagggttcaggaaaaggaagcatgacaatttcccacataaccaaagaagagaagggaaggatgttaattcatcttcacccgtgatgttggcctttaaatcatttcagcaggaacttgatgcaaggcatgacaaatatgagagacttgtgaaacttagtcgggatataactgttgaaagtaaaaggacaatttttctcctccataggattacaagtgctcctgatatggaagatatattgactgaatcagaaattaaattggatggtgtcagacaaaagatattccaggtagcccaagagctatcaggggaagatatgcatcagttccatcgagccattactacaggtaagtctaggtttgtttcagggtaatatatattttaaatggtgtgctacatgattaacatgtgagttgcatgaattttaagtgacacctgatgaaataataatactggcttttaaagaactgcaactttgtagtaatatagaagtaatccaaaggcaagttggctttatgttttttttaacagtgtagtgatggtcattgattgattttaataaagtatttgagaacacagattta

SEQ ID NO: 280709 - DNA, 538 bp, Homo sapiens
cagtactaggtgtagatactatggagaagctgaccatcttgttcagaaatttggaagaagagaacctcagctcaggacataaagtttcacacaatgaaatcctgctcagttttattttacaaaccaagtgttggactcacatcacgaccagcttcaccaggagcaccgttgactccaggactacccacagcaccaggaggaccacgggccccaggagggccggcaatgccaagaggaccaggttcaccctaaacaggcagagaagataaaatgacattccccttattcgatggaatgctaaccttgcccctccaaaacaaccctactcaggagattctagtttgaaggaagaaggtaaattgaatgtgaatgggtcacacaatggtaagaagtatcattagtatcatctctgccctccttctccacatgtagatggccagctttatgtaatcacgggatgttgctctgtaaaaagtgagcctcgtgtcattcagtatcccaaatgaaatgaattcaaaaagttgatatattttatgga

SEQ ID NO: 280710 - DNA, 575 bp, Homo sapiens
cagtactaggtgtagatactatggagaagctgaccatcttgttcagaaatttggaagaagagaacctcagctcaggacataaagtttcacacaatgaaatcctgctcagttttattttacaaaccaagtgttggactcacatcacgaccagcttcaccaggagcaccgttgactccaggactacccacagcaccaggaggaccacgggccccaggagggccggcaatgccaagaggaccaggttcaccctaaacaggcagagaagataaaatgacattccccttattcgatggaatgctaaccttgcccctccaaaacaaccctactcaggagattctagtttgaaggaagaagaaagaagcaactcctgtcttcctttatgaggctgtaaccaaccaaataatggaggagagactatggcaaatttctatgaggaaaaacaatgtcatgccactggtaccctggcatattggaatcagactatgtagacacaggttagtgaggtagaagggacaatgaggagtgtaagaagagggagacatctgggaggacagtaatacggtgaagcgcgttaa

SEQ ID NO: 280711 - DNA, 698 bp, Homo sapiens
tcaagactttttgtagaaactctgcaggtcagaagatttttgtatggaatgatcttctccaatcaattatttgaatctaagaggaagagaagatcatcagtggcaaatggcagtcacaggaaagcaacacccacagccggtttcacacgtgtggagagcaccctgagcctcctcctcctggtttcccgtgctctgcaagttcagagaaacttctctcacaaccaactatagaaacaatcttggaacgtacagtcttagaaatggctttttaattgcagcatatcagagtgaaaaaggacccagagatgttggaatcagacaatcctggtttcaaatcggtttcattgttcatcctcatgtgatgtttggcaagaaataaaacatttctgcgttcagtttccttgtctgtgatattacataacatattgcaaatatgctgagtgttgagaaaataatgaacaacatgcaaggagtagctgggatatggtagcagctcagtagataatgatgatgatcaatattcaccattgacaagtagctgtgaaatccacaaatggtggacataaaaggttaaccagtgaagtgctgggacaacgtagctgaagaaatattggaatgttcctgctcagattggcctcagcctgaaaactgtttacttcctgcccaaatctggggcctgtctcctcttccagcattcc

SEQ ID NO: 280712 - DNA, 766 bp, Homo sapiens
tgggttggcagccgcttgagccactgcgaggaaagcaaagtctgggccatggagatgagcctagtcctgctgttcctgatccgcactgccctttttgcaccccagggagctgctgctggaggtgtgtgatgaagtatttagtggtctagtatcatgggtcttgcaacttactttagaatgactcagtcaaaaatcttaatctggacccttttcataagatggtgccaagaacgaagaaggaagctcctgcccctcctaaagccgaagccaaagcgaaggctttgcaaggccaagaaggcagtgttgaaagatgtccacagccacaaaaaaaacaagatccacatgtcacccaccttccggcggcccaagacactgtgactccggaggcagcccaaatatccttggaagagcacccccaggagaaataagcttgaccaccatgttatcatcaagtttccgctgaccactgagtaggctgtgaagaagatagaaaacaacagcctacttgtgttcactgtggatgttaaagccaacaagcaccagatcaaacaggctgtgaagaagtttgtgacattgatgtggccaaagtcaacactctgattcagtctgatggagagaggaaggcatatgttcgactggctcctgactacgatgctttggttgttgccaccaaaattgggatcacctaaactgagtcaagctggctagttccaaatatatgtatatcttttcaccattaaaagaatcttaatctctcaaaaaactc

SEQ ID NO: 280713 - DNA, 503 bp, Homo sapiens
gccccagctgacctgatgaatatcaacatccaatgccctgtaatgaagtcatgtgtgcacatatcatcacttctgcatgcagtctcatgggaagatggggcccaagacactgtgactccggaggcagcccaaatatccttggaagagcacccccaggagaaataagcttgaccaccatgttatcatcaagtttccgctgaccactgagtaggctgtgaagaagatagaaaacaacagcctacttgtgttcactgtggatgttaaagccaacaagcaccagatcaaacaggctgtgaagaagtttgtgacattgatgtggccaaagtcaacactctgattcagtctgatggagagaggaaggcatatgttcgactggctcctgactacgatgctttggttgttgccaccaaaattgggatcacctaaactgagtcaagctggctagttccaaatatatgtatatcttttcaccattaaaagaatcttaatctctcaaaaaactc

SEQ ID NO: 280714 - DNA, 583 bp, Homo sapiens
tgggttggcagccgcttgagccactgcgaggaaagcaaagtctgggccatggagatgagcctagtcctgctgttcctgatccgcactgccctttttgcaccccagggagctgctgctgctgggatttcagtctctggtgtcaactcctgggtctactggctccactgagggcagctacactctgcagccagatggccagaattcaactccctgcccaggtctcaccagcactttcccacttggtgcctcagtttcctcatctatgaaatggggaaactaacagcatttatttcttgtggttgggtggatgaaaagcgttagtatatatgaggggtttgcagctgtgccacattatttttgttatcatttgattatattttaatatattacatatgcggtcattgtattattattataaatgagatttatgagtgagtgtcctggttacggctccttctggggagcccaggaccagctttcctggcaccttgaggtcccctcaccctgtcacactctcatgcattacctcatatctactatgtcttcataattttatactatagaaatttaccctttaagtaga

SEQ ID NO: 280715 - DNA, 361 bp, Homo sapiens
tgggttggcagccgcttgagccactgcgaggaaagcaaagtctgggccatggagatgagcctagtcctgctgttcctgatccgcactgccctttttgcaccccagggagctgctgctgagacatggtctccctctgttatccacggtgaagtgcagtggcatgatcatggttccctgcaacctcaaactcctggcctctagaggtccccctgcctcagtgtctggagtacctgggactacaggatgctgactcctgcgtccatctcaacctgggcatcgtgccaccaccttcaagaagaagaaaaactaagtagtgctttgcaaaggggcagcagcatttctcaaatttttttttttgtca

SEQ ID NO: 280716 - DNA, 707 bp, Homo sapiens
tgggttggcagccgcttgagccactgcgaggaaagcaaagtctgggccatggagatgagcctagtcctgctgttcctgatccgcactgccctttttgcaccccagggagctgctgctgagccccacagtctttgttacaacctcacggtgctgtcccaggatggatctgtgcagtcagggtttctcgctgagggacatctggatggtcagctcttcctgctctgtgacaggcagaaaggcagggcagggccccggggacagtgggcagaagcagtcctgggagctgagacctgggacacagagactgaagacttgacagagaatgggcaggagctcaggaggaccctggctcatatcaagggccagaaaggaggcagactacatgcaaaagctatggtgatatctgaaattctggaggtatcagaaaaacagtgaatgagatgcacagtggggccttagaaggcaatgtcaccatgatgtgctggcctccatcttctatccctggaatatctctctgacctggcatcaggatgaggcatctttgagccaggatgcccagcagtctaggggtgtcctgcccaatgggaatgggacctaccagacctgcatggccaccaggattccccgaggagaggagcagaggttcacctgctacatgggacacagagggaatcacagcactcaccctgtgccctctggtgagcctg

SEQ ID NO: 280717 - DNA, 368 bp, Homo sapiens
acactggctttaaacaacacccatttattgtatttatttatttatttttagagacatggtctccctctgttatccacggtgaagtgcagtggcatgatcatggttccctgcaacctcaaactcctggcctctagaggtccccctgcctcagtgtctggagtacctgggactacaggcaagtaccaccgtgctcaggtaaattaaaaaaaaaaaaaattcctttttgtagagaggaaggtctcctcaaattgcccaggctagtctcactcctggctgcaagtaatcctcctgtgtcattcccacaaaccttaggattacaggcatgagctaccatggttgaccaaacaacacttatttatttatttaca

SEQ ID NO: 280718 - DNA, 119 bp, Homo sapiens
tgagacctgggacacagagactgaagacttgacagagaatgggcaggagctcaggaggaccctggctcatatcaagggccagaaaggaggtgagagtgggcagtgggcaagagtaatgg

SEQ ID NO: 280719 - DNA, 3058 bp, Homo sapiens
gggcgctcgcattccccgcgcggagccgaagcagccgcaacgagccgggagctgagccgcgctgcgctgcggtgcgaagagccgggcggcggccagagccctccccgcgctgccagtgggacgcggagccaggatccccggctttgccccggggctggggtgcaacagactcttaacttggtcctcgcgccccgccaaccgcccccgggcaggaaacgcccagaaccaccaccgcgccgcgctccacaaaagccccgggagttccaagacgggagggatcgggcgcgctccagaggcaggagggtcccccacaccctcaggctcatgcccagctcccccatcgggcagcccccagccccatgaggaccctcaggccggggcgagagcccggcacagcccggaccgaaattttgccgctgccttagagcgttagacaggctaggtgtggagccgccctccgcagcccaccccggcccaggatgtggctgggccgccgggccctgtgcgctctggtccttctgctcgcctgcgcctcgctggggctcctgtacgcgagcacccgggacgcgcccggcctccggctacctcttgcgccgtgggcgcccccgcaaagcccccgcaggcccgagctgccagatcttgctcctgagccccgctacgcacacatcccggtcaggatcaaggagcaagtagtggggctgctggcttggaacaactgcagttgtgagtccagtggggggggcctccccctccccttccagaaacaagtccgagctattgacctcaccaaggcctttgaccctgcagagctgagggctgcctctgccacaagagagcaggagttccaggcctttctgtcgaggagccagtccccagctgaccagctgctcatagcccctgccaactccccgctccagtaccccctacagggtgtggaagttcagcccctcaggagcatcttggtgccagggctgagccttcaggcagcttctggtcaggaggtataccaggtgaacctgactgcctccctaggcacctgggacgtggcaggggaagtgactggagttactctcactggagagggtcaggcagatctcacccttgtcagcccagggctggaccaactcaacaggcaactacaactggtcacttacagcagccgaagctaccagaccaacacagcagacacagtccggttctccaccgagggacatgaggctgctttcactatccgcataagacacccgcccaaccctcggctgtacccacctgggtctctaccccagggagcccagtacaacatcagcgctctagtcacgattgccaccaagaccttcctccgttatgatcggctacgggctctcatcaccagtatccgccgcttctacccaacggttaccgtggtcatcgctgacgacagcgacaagccagagcgcgttagtggcccctacgtggaacactatctcatgcccttcggcaagggctggttcgcaggccggaacctggccgtgtctcaagtaaccaccaagtacgtgctgtgggtggacgacgacttcgtcttcacggcgcggacgcggctggagaggcttgtggacgtgctggagcggacgccgctggacctggtggggggcgcggtgcgcgagatctccggctttgccaccacttatcggcagctgctgagcgtggagcccggcgccccaggcctcgggaactgcctccggcaaaggcgcggcttccaccacgagctcgtcggcttcccaggctgcgtggtcaccgacggcgtggttaacttcttcctggcgcggactgacaaggtgcgcgaggtcggtttcgacccccgcctcagccgcgtggctcatctggaattcttcttggatgggcttggttcccttcgggttggctcctgctccgacgtcgtggtggatcatgcatccaaactgaagctgccttggacatcaagggatgccggagcagagacttacgcccggtaccgttacccaggatcactggacgagagccagatggccaaacaccggctgctcttcttcaaacaccggctgcagtgcatgacctcccagtgatggcccgctggggatttctgactgtcaggctgggcctgcctccttgtccctgccaggaatttccaacaaaccccaccaccctgtgagcactctactggctgtccctgagcctctagttcctcactcttccttttcagaacctgatgcccagtaggggttgtcctggtgacacccctcctttttccagtgcccagaggcctggtggagccataacctctcccacagccagtgccaagtcctccccctgcccattctcatggggcaggaaatggggggatcactttccaagtgccaaagagcccagagggactctaagaacctaaggtggaaacactgtcctctcatcttgggaccgagggggtggggaagttccccaacacataatcccaagactgtgcccctcatctgcatcttcagatccagtactctgtgtacctgctccagccccacccccacagagagaacttgtggctctggggctggggtgagggctggtggttggtgaaagccattcttagttgtgtctctgcaatgctgtgggcacaaaagaaggggcaccagagtccctgtgcaaacacctagactcacttcatggattccaaagctctcagcttcattttattagttacgttaggtaagggggttcaagggtcatggtcctcatcacacacatgtcatcagggccctcctgcactccacatgatgaggtcagacccacacggtgcaaatctttgggtcagtgagctcctggagaagagaggagacatgtcaggaatagattaggcacccctcttccttaatgaaatgtggcagtcctctcaggggtaccccacctacttagggatctgagttcttcagttcctcacccatagctcagcccgggctccctgatttggtcttcaatctactattcattccgtccccacccttttcttcttgatcttcctcagaccctttcccaaacccctctccctggg

SEQ ID NO: 280720 - DNA, 1687 bp, Homo sapiens
gggcgctcgcattccccgcgcggagccgaagcagccgcaacgagccgggagctgagccgcgctgcgctgcggtgcgaagagccgggcggcggccagagccctccccgcgctgccagtgggacgcggagccaggatccccggctttgccccggggctggggtgcaacagactcttaacttggtcctcgcgccccgccaaccgcccccgggcaggaaacgcccagaaccaccaccgcgccgcgctccacaaaagccccgggagttccaagacgggagggatcgggcgcgctccagaggcaggagggtcccccacaccctcaggctcatgcccagctcccccatcgggcagcccccagccccatgaggaccctcaggccggggcgagagcccggcacagcccggaccgaaattttgccgctgccttagagcgttagacaggatgtggctgggccgccgggccctgtgcgctctggtccttctgctcgcctgcgcctcgctggggctcctgtacgcgagcacccgggacgcgcccggcctccggctacctcttgcgccgtgggcgcccccgcaaagcccccgcaggcccgagctgccagatcttgctcctgagccccgctacgcacacatcccggtcaggatcaaggagcaagtagtggggctgctggcttggaacaactgcagttgtgagtccagtggggggggcctccccctccccttccagaaacaagtccgagctattgacctcaccaaggcctttgaccctgcagagctgagggctgcctctgccacaagagagcaggagttccaggcctttctgtcgaggagccagtccccagctgaccagctgctcatagcccctgccaactccccgctccagtaccccctacagggtgtggaagttcagcccctcaggagcatcttggtgccagggctgagccttcaggcagcttctggtcaggaggtataccaggtgaacctgactgcctccctaggcacctgggacgtggcaggggaagtgactggagttactctcactggagagggtcaggcagatctcacccttgtcagcccagggctggaccaactcaacaggcaactacaactggtcacttacagcagccgaagctaccagaccaacacagcagacacagtccggttctccaccgagggacatgaggctgctttcactatccgcataagacacccgcccaaccctcggctgtacccacctgggtctctaccccagggagcccagtacaacatcagcgctctagtcacgattgccaccaagaccttcctccgttatgatcggctacgggctctcatcaccagtatccgccgcttctacccaacggttaccgtggtcatcgctgacgacagcgacaagccagagcgcgttagtggcccctacgtggaacactatctcatgcccttcggcaaggtgtgcagctagcaggctgaacggcaggccagaggactcccgcagggggtgtgccctcaatctgcagcctccagggtagtgattcgaggaccacctgcctcagaatcatggggtgcctgttaagcatgaggattcctggaatgtaagcttcgtgggagcaggaaattctctctgaattcttagaatggtgcttagtgcctaatggcattcaataaaatagctgatgaatgaataaataaatgcacac

SEQ ID NO: 280721 - DNA, 3017 bp, Homo sapiens
gggcgctcgcattccccgcgcggagccgaagcagccgcaacgagccgggagctgagccgcgctgcgctgcggtgcgaagagccgggcggcggccagagccctccccgcgctgccagtgggacgcggagccaggatccccggctttgccccggggctggggtgcaacagactcttaacttggtcctcgcgccccgccaaccgcccccgggcaggaaacgcccagaaccaccaccgcgccgcgctccacaaaagccccgggagttccaagacgggagggatcgggcgcgctccagaggcaggagggtcccccacaccctcaggctcatgcccagctcccccatcgggcagcccccagccccatgaggaccctcaggccggggcgagagcccggcacagcccggaccgaaattttgccgctgccttagagcgttagacaggatgtggctgggccgccgggccctgtgcgctctggtccttctgctcgcctgcgcctcgctggggctcctgtacgcgagcacccgggacgcgcccggcctccggctacctcttgcgccgtgggcgcccccgcaaagcccccgcaggcccgagctgccagatcttgctcctgagccccgctacgcacacatcccggtcaggatcaaggagcaagtagtggggctgctggcttggaacaactgcagttgtgagtccagtggggggggcctccccctccccttccagaaacaagtccgagctattgacctcaccaaggcctttgaccctgcagagctgagggctgcctctgccacaagagagcaggagttccaggcctttctgtcgaggagccagtccccagctgaccagctgctcatagcccctgccaactccccgctccagtaccccctacagggtgtggaagttcagcccctcaggagcatcttggtgccagggctgagccttcaggcagcttctggtcaggaggtataccaggtgaacctgactgcctccctaggcacctgggacgtggcaggggaagtgactggagttactctcactggagagggtcaggcagatctcacccttgtcagcccagggctggaccaactcaacaggcaactacaactggtcacttacagcagccgaagctaccagaccaacacagcagacacagtccggttctccaccgagggacatgaggctgctttcactatccgcataagacacccgcccaaccctcggctgtacccacctgggtctctaccccagggagcccagtacaacatcagcgctctagtcacgattgccaccaagaccttcctccgttatgatcggctacgggctctcatcaccagtatccgccgcttctacccaacggttaccgtggtcatcgctgacgacagcgacaagccagagcgcgttagtggcccctacgtggaacactatctcatgcccttcggcaagggctggttcgcaggccggaacctggccgtgtctcaagtaaccaccaagtacgtgctgtgggtggacgacgacttcgtcttcacggcgcggacgcggctggagaggcttgtggacgtgctggagcggacgccgctggacctggtggggggcgcggtgcgcgagatctccggctttgccaccacttatcggcagctgctgagcgtggagcccggcgccccaggcctcgggaactgcctccggcaaaggcgcggcttccaccacgagctcgtcggcttcccaggctgcgtggtcaccgacggcgtggttaacttcttcctggcgcggactgacaaggtgcgcgaggtcggtttcgacccccgcctcagccgcgtggctcatctggaattcttcttggatgggcttggttcccttcgggttggctcctgctccgacgtcgtggtggatcatgcatccaaactgaagctgccttggacatcaagggatgccggagcagagacttacgcccggtaccgttacccaggatcactggacgagagccagatggccaaacaccggctgctcttcttcaaacaccggctgcagtgcatgacctcccagtgatggcccgctggggatttctgactgtcaggctgggcctgcctccttgtccctgccaggaatttccaacaaaccccaccaccctgtgagcactctactggctgtccctgagcctctagttcctcactcttccttttcagaacctgatgcccagtaggggttgtcctggtgacacccctcctttttccagtgcccagaggcctggtggagccataacctctcccacagccagtgccaagtcctccccctgcccattctcatggggcaggaaatggggggatcactttccaagtgccaaagagcccagagggactctaagaacctaaggtggaaacactgtcctctcatcttgggaccgagggggtggggaagttccccaacacataatcccaagactgtgcccctcatctgcatcttcagatccagtactctgtgtacctgctccagccccacccccacagagagaacttgtggctctggggctggggtgagggctggtggttggtgaaagccattcttagttgtgtctctgcaatgctgtgggcacaaaagaaggggcaccagagtccctgtgcaaacacctagactcacttcatggattccaaagctctcagcttcattttattagttacgttaggtaagggggttcaagggtcatggtcctcatcacacacatgtcatcagggccctcctgcactccacatgatgaggtcagacccacacggtgcaaatctttgggtcagtgagctcctggagaagagaggagacatgtcaggaatagattaggcacccctcttccttaatgaaatgtggcagtcctctcaggggtaccccacctacttagggatctgagttcttcagttcctcacccatagctcagcccgggctccctgatttggtcttcaatctactattcattccgtccccacccttttcttcttgatcttcctcagaccctttcccaaacccctctccctggg

SEQ ID NO: 280722 - DNA, 1982 bp, Homo sapiens
gggcgctcgcattccccgcgcggagccgaagcagccgcaacgagccgggagctgagccgcgctgcgctgcggtgcgaagagccgggcggcggccagagccctccccgcgctgccagtgggacgcggagccaggatccccggctttgccccggggctggggtgcaacagactcttaacttggtcctcgcgccccgccaaccgcccccgggcaggaaacgcccagaaccaccaccgcgccgcgctccacaaaagccccgggagttccaagacgggagggatcgggcgcgctccagaggcaggagggtcccccacaccctcaggctcatgcccagctcccccatcgggcagcccccagccccatgaggaccctcaggccggggcgagagcccggcacagcccggaccgaaattttgccgctgccttagagcgttagacaggatgtggctgggccgccgggccctgtgcgctctggtccttctgctcgcctgcgcctcgctggggctcctgtacgcgagcacccgggacgcgcccggcctccggctacctcttgcgccgtgggcgcccccgcaaagcccccgcaggcccgagctgccagatcttgctcctgagccccgctacgcacacatcccggtcaggatcaaggagcaagtagtggggctgctggcttggaacaactgcagttgtgagtccagtggggggggcctccccctccccttccagaaacaagtccgagctattgacctcaccaaggcctttgaccctgcagagctgagggctgcctctgccacaagagagcaggagttccaggcctttctgtcgaggagccagtccccagctgaccagctgctcatagcccctgccaactccccgctccagtaccccctacagggtgtggaagttcagcccctcaggagcatcttggtgccagggctgagccttcaggcagcttctggtcaggaggtataccaggtgaacctgactgcctccctaggcacctgggacgtggcaggggaagtgactggagttactctcactggagagggtcaggcagatctcacccttgtcagcccagggctggaccaactcaacaggcaactacaactggtcacttacagcagccgaagctaccagaccaacacagcagacacaggtgcaaggcctgggtggagagacgggcaggctgggcaaacagagaagaaccagaaaggctggagtgggcaaatggcagagggcatgggaggcatctgggctatggccagagctgtccagccacacaatgggtgcttcaactggaccagcagggccagagggagaacagggggcctttgttcatctggggctggagcaggccagagggaaaacccgagccttgggtgtgtctcccctttaggccaactgtggcggggccccaggaagagacttgtctaaggagttagaagactatattcccaacccaccccttactagagggcaaaggtctttactttcctgagatcccatttctcttccagcaaaagaggcctaaaagccctctttgcttctccccaaagctggtttgttgcactaagtttgcttccaccttagggcctttgcactttctattttctcagcctggaatgctcttccccagatttttgcagactggcttcttcttgtcatttagatctcagttcaaatgcctcctcttcactatcacattacttgtttgtcttattttccactcaatacttaccagtatctgaattttttaatttacttagcctggcaccagactgactaggttgctatcagttttgttgcttaatagttgtgtaaatgtggcaagttacttttctgtgtctcagcttttttttctgttgtaggaatctacttaatagggctatcatggggataaaatgagtgcatatatttaaggtaattttttaacgggtctggcacatagtaagtgctcaataaagattagcttttacttaaaattttct

SEQ ID NO: 280723 - DNA, 716 bp, Homo sapiens
gtgctttcctgaaacaaacccccttcttgcctgggtaccagactgcctttgtaggctaacaaattagctgcaagactagaaattacagtttaggcagctagaggcttccccaattgctcctagggataacacactgtaaagcctaagatttgtgtgatttttttttttcagaccctgcactgatggatccgctggtgccacccagatcaataaactggctcatctgatcttgtggcccccatccaggaaccaactcagagcaagaagacagcttcaactccctatgccttcatctctgatacgacctgtcaacacgccccactccctggccccctacctgccaaattatccttaaaaaaactcccatccctaaattttccgggagaatgatttgagtagttaactctggtctctcgttctggctctgcatgaattaaactctttctctattgcaattcctgtctagataaatcggctctatctggacagcaggcaaaatgagcctgttgggtagtcacaatatattgataaaaggattaatcccaaagcaatgttctgattatgtcacctaattatggtcacatcatctgacgtttgaggaaactgattttcgggcaggatccccaggagttggagaccaatctgggcagtaaagtgagacccctctctacagaaacaaaaaaaaggtcctacatgggagcatcacttgagcccac

SEQ ID NO: 280724 - DNA, 712 bp, Homo sapiens
aggtaaagggggcccatgggtctatcagataacctgaacccgagacctctcaatctggaggaacagcttgaagaagtcatctagaagctataaagtcacagaagcttcttatcctattgaaagcaagacttcctatccaatggcaatacaaacttttacgcagtaagaccctgcactgatggatccgctggtgccacccagatcaataaactggctcatctgatcttgtggcccccatccaggaaccaactcagagcaagaagacagcttcaactccctatgccttcatctctgatacgacctgtcaacacgccccactccctggccccctacctgccaaattatccttaaaaaaactcccatccctaaattttccgggagaatgatttgagtagttaactctggtctctcgttctggctctgcatgaattaaactctttctctattgcaattcctgtctagataaatcggctctatctggacagcaggcaaaatgagcctgttgggtagtcacaatatattgataaaaggattaatcccaaagcaatgttctgattatgtcacctaattatggtcacatcatctgacgtttgaggaaactgattttcgggcaggatccccaggagttggagaccaatctgggcagtaaagtgagacccctctctacagaaacaaaaaaaaggtcctacatgggagcatcacttgagcccac

SEQ ID NO: 280725 - DNA, 529 bp, Homo sapiens
gcaccaaggatggagatgctccaggggctgctgctgttgctgctgctgagcatgggcggggcatgggcatccagggagccgcttcggccatggtgccaccccatcaatgccatcctggctgtcgagaaggagggctgcccagtgtgcatcaccgtcaacaccaccatctgtgccggctactgccccaccatgatgcgcgtgctgcaggcggtcctgccgcccctgcctcaggtggtgtgcacctaccgtgatgtgcgcttcgagtccatccggctccctggctgcccgcgtggtgtggaccccgtggtctccttccctgtggctctcagctgtcgctgtggaccctgccgccgcagcacctctgactgtgggggtcccaaagaccaccccttgacctgtgaccacccccaactctcaggcctcctcttcctctaaagaccctccccgcagccttccaagtccatcccgactcctggagccctgacaccccgatcctcccacaataaaggcttctcaatccgcaaaaaga

SEQ ID NO: 280726 - DNA, 388 bp, Homo sapiens
gcaccaaggatggagatgctccaggggctgctgctgttgctgctgctgagcatgggcggggcatgggcatccagggagccgcttcggccatggtgccaccccatcaatgccatcctggctgtcgagaaggagggctgcccagtgtgcatcaccgtcaacaccaccatctgtgccggctactgccccaccatgatgcgcgtgctgcaggcggtcctgccgcccctgcctcaggtggtgtgcacctaccgtgatgtgcgcttcgagtccatccggctccctggctgcccgcgtggtgtggacccattagattgcttccgatgatgctctcagctgagaatagaaaacactcctgccgtagcggctatctctgaaggtggacaagagaggg

SEQ ID NO: 280727 - DNA, 1851 bp, Homo sapiens
  misc_feature (393)..(393): n is a, c, g, or t
  misc_feature (1036)..(1036): n is a, c, g, or t
acttatagcacctttattcataattgctaaaacttggaagcagccaagatgtctttcagtaggtgaatggataaagtgtggtacatccagacaatgcaatatttttcagcactaaaacaaaatgagctactaaaccatgaaaaggcatggaaggacccaaaacttattttagaattatagaaagccccatatcttattcaataaaagttattcctatttttaaaaacccatacagtatacatttggaaaatctgaatatcaattatatgttaaacaatgatagtgttgtataaatgttaaattttctgaatgttataattagatttttgcagtgtaggagccagtccttgttcttatgaggataaacactgaaatattgagagacaaaatgcnatgatgtcaccaacttattggtgtagcaaagaggcttggcaataacatcatccccccaaatatatatagaaattggcaaagtaactaatggtgattctaagtatttgtattattctaacttttctttaggtataatttttttcaaaggagttgcggaggttaccgtagatgttgtaggctatttgtccatgtcaaattagctaccgatccactagaatgattataagcaaaaagaccgacaataccaagtgttggtgaggatgtggggaaattggaaccctcttacaatgtaaaatgtaaacaggttggtagttcctcaaaatgcagagtagagttaaccataatacccagcaatttcatttctggttctataacccaaagaaatgagaagatatgtccacacacaaaaacttgaatgtgaatgttcatagcagtgttattcataattgctagcagctagcaaatgtccatctactggtaaatgcatagacaaaatatgacgtatccatatgatggagtattattcagcagtaaaatgtaataaacaacttaaacatggcacagcatagatgaatctcaaacaccttattgctaagtgaaaagacaaaagattaagttgtagaattccatttatgtttggtgntaggtaaggtaaatctgttgaaacagagccgtgtttgcccggggccagcaggtggggagtgattgccagtgtgcacaaaggagctgtttaaggtgatgaaaatgttctactttaaagtgatgattgtacaactctgtaaatttactaaaaaaatcaccgaactgtgtatgtacatacattgagtgtgtttcatggtattgtaagcaaaatcttagtaattaaaaggctcttggtttagctctgggtaagatttgaagcagtattaagactccttctgcttttcggggtcctcttaggggcttacggtgagacatatcctgccattgaagatgacgtcctccctccaccatcacagttgccctctgcacgggagcgcaggaggaacaaatggaaaggactagacattgtatgtatgagacttttctcccccttttcaacttagaagaatgagaggtctgggttctgacctgtgctaaatctgtgtggcccaataaagagcacttgcttgaaattcagacatgggtctgaatctaggctctgccttgactggatgaccttgggtagctattgaattctgctgctttggcttcttccagataataatagtattttcttgtctcctggggtggctgtaagtagctcctcatcccaaccttccttcttctcctgcagaatatatggatttcagagaggcacaagaaggaactgatgtcatttattgaaaagcttcataataacctaattctgtgatataggcatcaccttcatttcggtcaaatgacttgccaaggtcacatgggcaagaaggctgagat

SEQ ID NO: 280728 - DNA, 1032 bp, Homo sapiens
ttttgtagcgagggggtcttgctttataggccaggctggtattgaactcctgatttcaagcagtcctcctgtctgcctcccaaagtgctgggattacaagtgtgagccacagcacctgtcctagagtaattttttaataatatgatgtggtgaaaaagaccaaatttcttttacagtgaattagatgtgaactcacctatttttcctgtgaagcacatattatgatttgtcatttatctataggaaaaaggaaaggaatcccatggatatatttgatatggctagacatcggttgcaagctcctgtcagaagacagtcccctaagggcttagacgctgccacttttcagaatgttcatgattttaatgagctgaaagatagaggtgagtagattgctgctcttttaaagatgtagcagaagtgttctacccatatttaaatatctataaagatctttgtaccctttttctaaagtggaattttatctatggtatgtattttagttaaaatgaaatgaaacttatgtattctctaggtcttcagttaaccagtctggtagatgaagctttagtttgactaactgctttcttttggagagcatacagtgttaaagtctggaatggatgagatcgcatagactagtacgaagaatggaacttggcatttaatggaggatggacagacaaagatgagctcatgaaaaatactgaggagaagccagagagactggaggagaagcaggagaatgtaggatcctgaaacctgaggggaaggagtatcaaggagacaggatcatgtaaggtgaataccggaaaatgtcagttggatgaggtcattggtgacctcagctagagctttttaagtggaatgattgccgattaactttggaatgaggattgactaggaggcaagatgttggagacaataggcataagacttttagaagacccttggctgggaaagggaagggaaggagagggatcaggagctggaagagtccttagaatgtgaacgtgaggagctatgcaggag

SEQ ID NO: 280729 - DNA, 371 bp, Homo sapiens
ttctgttgctatcaccgtcttcgtaggaattgtgtgtgttaaggctttccagtattttctgagcattggaatgtagtcagtcctacctctacccatcctctgcttttagggagaacagtgtggaaacttgtgcctcttcttagtataaatttgttgtttttgtacacaaaactaataaaaatagtcattgaaacatgtttcttttagcccagagatgacactagtgatttcttgaaaaactcattattggaatctgatagtgcttttattggtgagtatatttattttattaaggctatattgtttaaatattaaacctttctccacacttaaaaaccagtactgtattccttgttgtacaaggtagtaaa

SEQ ID NO: 280730 - DNA, 3745 bp, Homo sapiens
gatgcacacggaacaaacgagggaatatgcctcctatggaacatgatggggatgttatagaacagtcaaacataagaatttcatctgctgaaaataaaagtgctccagacaatgaaacatccaaatctgctaatcaagatacctgtagtccttttgcagggatgctctttggaggtgaagatcgagaacttattcagagaaggaaagagaaatacagactagaactgttggaacaaatggctgagcaacagaggaacaagagacgagaaaaagatttagaactcagggttgcagcgtctggagcacaagaccctgagaaatcgcctgatagactaaagcagtttagtgtggcaccaagacactttgaagagatgataccacctgaaagacccagaatagctttccagacacctctccctcctttatctgccccatctgtcccacccatcccatcagttcatcctgttccttctcaaaatgaagatttgcgcagtggactcagcagcgcccttggtgaaatggtgtctcccaggattgcacctctgcctccacctcccctactaccacctttggctactaactatcgaactccttatgatgatgcatactatttttatgggtccaggaatactttcgatcccagtcttgcttattatggttcaggaatgatgggcgtacagcctgcagcttatgttagtgctcctgtcacccaccaactagcacaacctgttgtgaatacggttggacagaatgaactgaagattacaagtgatcaagtgataaattcaggattgatttttgaagataaaccgaaaccttccaaacagtcacttcagtcttaccaagaggctttgcagcagcagattcgggaaagagaagaaagaaggaagaaagaacgtgaagaaaaagaagaatatgaagctaaattagaagctgaaatgagaacatataatccctggggaaaaggtggaggtggtgctcctctcagggatgcaaaaggaaatctgataactgatttgaataggatgcacagacaaaatatagatgcctaccataacccagatgcaagaacatatgaagataaaagggctgttgtatctctagacccaaatttagccacttcaaatgctgagaacctagaagatgctgcaaataaaagctcaggtcatatgcaaacacagagctctccttttgctcggggaaatgtatttggtgagcctccaactgaacttcagattaaacagcaagaattatacaagaattttcttcgtttccagattgaggaaaagaaacaaagagaggaagcagagcgagagagactgagaattgcagaagaaaaagaagaaagacggcttgcagaacagagggcacgaattcagcaggagtatgaagaggaacaggaaaagaaaagagagaaagaggaggagcaaaggctaaaaaatgaagagcatattcggttagctgaagaaagacaaaaagaagcagaaagaaagaagaaagaagaagaagaaaaatataacctgcaacttcagcactactgtgaaagagacaatttgattggggaagaaacaaagcacatgagacagccttctcctatagttcctgctcttcagaacaaaattgcaagcaaactccaaagacctccttcagttgacagcatcatacgttcctttattcatgaaagttccatgtccagggcacagtcacccccggtacctgccaggaaaaatcagctccgtgcagaagaggagaaaaaaaatgtaattatggaattatcagaaatgagaaaacagcttcgtagtgaagagaggcgtctacaagagcgattgctacacatggacagtgatgatgaaattcctatcaggaaaaaggaaaggaatcccatggatatatttgatatggctagacatcggttgcaagctcctgtcagaagacagtcccctaagggcttagacgctgccacttttcagaatgttcatgattttaatgagctgaaagatagagattcagaaacacgagttgatctgaaatttatgtacctggatcctccaagagatcatcacaccttagagattcagcagcaagccctgctaagagagcagcagaagaggctgaacagaataaaaatgcaggaaggtgccaaagttgacttagatgccatcccaagtgctaaagtacgagagcaaagaatgcccagagatgacactagtgatttcttgaaaaactcattattggaatctgatagtgcttttattggggcttacggtgagacatatcctgccattgaagatgacgtcctccctccaccatcacagttgccctctgcacgggagcgcaggaggaacaaatggaaaggactagacattgatagcagtcgtcctaatgtagcaccagatggtctctctctaaaatctatatccagtgtaaatgttgatgagcttagagtgagaaatgaggaacgaatgcgaagactgaatgaatttcacaataaacctattaatacagatgatgagagttcactggttgaccctgatgacatcatgaaacacataggggatgacggatcaaactctgtagcaactgagccctggctccgccctggcacttcagaaacgctgaaacgtttcatggcagagcagctgaaccaggagcagcagcagattcctggaaaaccaggcactttcacttggcagggcctgtcgactgcacatggttaaaataaacctgtactggacccagtagtgccttttaaggtgaaaggaatggtaaatctgtacctttaatatgtcctacttttggcccctacctgaaagttactttttttccatcatctgtatataaaattatttttatcatgatgtatattatgtacataaataaaaggccatgattattgatttatataatagaattgtatagattatttttgcacagttttgtcataaattagggtggtaatgaactggattgaactactatatgtgcattatattgaattctgcttgtcattaagataaggtgaataagtgtcttaaacgtcctgtaaaaccggactcccctttgttacatgcacattttccattgttacctcgatgcaaaagaattcatttagtaggtacatctattgtagctgtgattattccagtttctgtgtgatgcaatcaaatgtcctattaattaattattatttcatgtcatttgtagctactgatacagcagaaatgaagggaactgtaattacttgtatttttgtaagccatacgttaaatgtttgttacatcatctttctgcttctatttttatgccaatgaaggcatttgtcttgttactaattacatgatgtaactacttcttgatataaataaatttttattttaattactaaaatctttttaactactatggagctttctagactagttttctagaggttgaatagaggtggggacacccgggagtcaaggacagagagactggagtcttcttcttccaccatggaaccttggataagtgagtccatgtgagttttctaatcactcagtaagtgatacttctaaaaaaggaaagagtcattcaaataattgtgacattctgactcagattagaatctcagaaccatgacagctgagaacatccccaggcactgcttctctctctaataatacttcctctgatgtaattaacggttggtagacaatatcagacaaatttgccacaattaaattactgatattttgaaaattgg

SEQ ID NO: 280731 - DNA, 3542 bp, Homo sapiens
tatgaaagtgattttgatagaagactttcgagagtgtatacaaatgacagtgctccagacaatgaaacatccaaatctgctaatcaagatacctgtagtccttttgcagggatgctctttggaggtgaagatcgagaacttattcagagaaggaaagagaaatacagactagaactgttggaacaaatggctgagcaacagaggaacaagagacgagaaaaagatttagaactcagggttgcagcgtctggagcacaagaccctgagaaatcgcctgatagactaaagcagtttagtgtggcaccaagacactttgaagagatgataccacctgaaagacccagaatagctttccagacacctctccctcctttatctgccccatctgtcccacccatcccatcagttcatcctgttccttctcaaaatgaagatttgcgcagtggactcagcagcgcccttggtgaaatggtgtctcccaggattgcacctctgcctccacctcccctactaccacctttggctactaactatcgaactccttatgatgatgcatactatttttatgggtccaggaatactttcgatcccagtcttgcttattatggttcaggaatgatgggcgtacagcctgcagcttatgttagtgctcctgtcacccaccaactagcacaacctgttgtgaatacggttggacagaatgaactgaagattacaagtgatcaagtgataaattcaggattgatttttgaagataaaccgaaaccttccaaacagtcacttcagtcttaccaagaggctttgcagcagcagattcgggaaagagaagaaagaaggaagaaagaacgtgaagaaaaagaagaatatgaagctaaattagaagctgaaatgagaacatataatccctggggaaaaggtggaggtggtgctcctctcagggatgcaaaaggaaatctgataagtcatatgcaaacacagagctctccttttgctcggggaaatgtatttggtgagcctccaactgaacttcagattaaacagcaagaattatacaagaattttcttcgtttccagattgaggaaaagaaacaaagagaggaagcagagcgagagagactgagaattgcagaagaaaaagaagaaagacggcttgcagaacagagggcacgaattcagcaggagtatgaagaggaacaggaaaagaaaagagagaaagaggaggagcaaaggctaaaaaatgaagagcatattcggttagctgaagaaagacaaaaagaagcagaaagaaagaagaaagaagaagaagaaaaatataacctgcaacttcagcactactgtgaaagagacaatttgattggggaagaaacaaagcacatgagacagccttctcctatagttcctgctcttcagaacaaaattgcaagcaaactccaaagacctccttcagttgacagcatcatacgttcctttattcatgaaagttccatgtccagggcacagtcacccccggtacctgccaggaaaaatcagctccgtgcagaagaggagaaaaaaaatgtaattatggaattatcagaaatgagaaaacagcttcgtagtgaagagaggcgtctacaagagcgattgctacacatggacagtgatgatgaaattcctatcaggaaaaaggaaaggaatcccatggatatatttgatatggctagacatcggttgcaagctcctgtcagaagacagtcccctaagggcttagacgctgccacttttcagaatgttcatgattttaatgagctgaaagatagagattcagaaacacgagttgatctgaaatttatgtacctggatcctccaagagatcatcacaccttagagattcagcagcaagccctgctaagagagcagcagaagaggctgaacagaataaaaatgcaggaaggtgccaaagttgacttagatgccatcccaagtgctaaagtacgagagcaaagaatgcccagagatgacactagtgatttcttgaaaaactcattattggaatctgatagtgcttttattggggcttacggtgagacatatcctgccattgaagatgacgtcctccctccaccatcacagttgccctctgcacgggagcgcaggaggaacaaatggaaaggactagacattgatagcagtcgtcctaatgtagcaccagatggtctctctctaaaatctatatccagtgtaaatgttgatgagcttagagtgagaaatgaggaacgaatgcgaagactgaatgaatttcacaataaacctattaatacagatgatgagagttcactggttgaccctgatgacatcatgaaacacataggggatgacggatcaaactctgtagcaactgagccctggctccgccctggcacttcagaaacgctgaaacgtttcatggcagagcagctgaaccaggagcagcagcagattcctggaaaaccaggcactttcacttggcagggcctgtcgactgcacatggttaaaataaacctgtactggacccagtagtgccttttaaggtgaaaggaatggtaaatctgtacctttaatatgtcctacttttggcccctacctgaaagttactttttttccatcatctgtatataaaattatttttatcatgatgtatattatgtacataaataaaaggccatgattattgatttatataatagaattgtatagattatttttgcacagttttgtcataaattagggtggtaatgaactggattgaactactatatgtgcattatattgaattctgcttgtcattaagataaggtgaataagtgtcttaaacgtcctgtaaaaccggactcccctttgttacatgcacattttccattgttacctcgatgcaaaagaattcatttagtaggtacatctattgtagctgtgattattccagtttctgtgtgatgcaatcaaatgtcctattaattaattattatttcatgtcatttgtagctactgatacagcagaaatgaagggaactgtaattacttgtatttttgtaagccatacgttaaatgtttgttacatcatctttctgcttctatttttatgccaatgaaggcatttgtcttgttactaattacatgatgtaactacttcttgatataaataaatttttattttaattactaaaatctttttaactactatggagctttctagactagttttctagaggttgaatagaggtggggacacccgggagtcaaggacagagagactggagtcttcttcttccaccatggaaccttggataagtgagtccatgtgagttttctaatcactcagtaagtgatacttctaaaaaaggaaagagtcattcaaataattgtgacattctgactcagattagaatctcagaaccatgacagctgagaacatccccaggcactgcttctctctctaataatacttcctctgatgtaattaacggttggtagacaatatcagacaaatttgccacaattaaattactgatattttgaaaattgg

SEQ ID NO: 280732 - DNA, 3721 bp, Homo sapiens
tatgaaagtgattttgatagaagactttcgagagtgtatacaaatgacagtgctccagacaatgaaacatccaaatctgctaatcaagatacctgtagtccttttgcagggatgctctttggaggtgaagatcgagaacttattcagagaaggaaagagaaatacagactagaactgttggaacaaatggctgagcaacagaggaacaagagacgagaaaaagatttagaactcagggttgcagcgtctggagcacaagaccctgagaaatcgcctgatagactaaagcagtttagtgtggcaccaagacactttgaagagatgataccacctgaaagacccagaatagctttccagacacctctccctcctttatctgccccatctgtcccacccatcccatcagttcatcctgttccttctcaaaatgaagatttgcgcagtggactcagcagcgcccttggtgaaatggtgtctcccaggattgcacctctgcctccacctcccctactaccacctttggctactaactatcgaactccttatgatgatgcatactatttttatgggtccaggaatactttcgatcccagtcttgcttattatggttcaggaatgatgggcgtacagcctgcagcttatgttagtgctcctgtcacccaccaactagcacaacctgttgtgaatacggttggacagaatgaactgaagattacaagtgatcaagtgataaattcaggattgatttttgaagataaaccgaaaccttccaaacagtcacttcagtcttaccaagaggctttgcagcagcagattcgggaaagagaagaaagaaggaagaaagaacgtgaagaaaaagaagaatatgaagctaaattagaagctgaaatgagaacatataatccctggggaaaaggtggaggtggtgctcctctcagggatgcaaaaggaaatctgataactgatttgaataggatgcacagacaaaatatagatgcctaccataacccagatgcaagaacatatgaagataaaagggctgttgtatctctagacccaaatttagccacttcaaatgctgagaacctagaagatgctgcaaataaaagctcaggtcatatgcaaacacagagctctccttttgctcggggaaatgtatttggtgagcctccaactgaacttcagattaaacagcaagaattatacaagaattttcttcgtttccagattgaggaaaagaaacaaagagaggaagcagagcgagagagactgagaattgcagaagaaaaagaagaaagacggcttgcagaacagagggcacgaattcagcaggagtatgaagaggaacaggaaaagaaaagagagaaagaggaggagcaaaggctaaaaaatgaagagcatattcggttagctgaagaaagacaaaaagaagcagaaagaaagaagaaagaagaagaagaaaaatataacctgcaacttcagcactactgtgaaagagacaatttgattggggaagaaacaaagcacatgagacagccttctcctatagttcctgctcttcagaacaaaattgcaagcaaactccaaagacctccttcagttgacagcatcatacgttcctttattcatgaaagttccatgtccagggcacagtcacccccggtacctgccaggaaaaatcagctccgtgcagaagaggagaaaaaaaatgtaattatggaattatcagaaatgagaaaacagcttcgtagtgaagagaggcgtctacaagagcgattgctacacatggacagtgatgatgaaattcctatcaggaaaaaggaaaggaatcccatggatatatttgatatggctagacatcggttgcaagctcctgtcagaagacagtcccctaagggcttagacgctgccacttttcagaatgttcatgattttaatgagctgaaagatagagattcagaaacacgagttgatctgaaatttatgtacctggatcctccaagagatcatcacaccttagagattcagcagcaagccctgctaagagagcagcagaagaggctgaacagaataaaaatgcaggaaggtgccaaagttgacttagatgccatcccaagtgctaaagtacgagagcaaagaatgcccagagatgacactagtgatttcttgaaaaactcattattggaatctgatagtgcttttattggggcttacggtgagacatatcctgccattgaagatgacgtcctccctccaccatcacagttgccctctgcacgggagcgcaggaggaacaaatggaaaggactagacattgatagcagtcgtcctaatgtagcaccagatggtctctctctaaaatctatatccagtgtaaatgttgatgagcttagagtgagaaatgaggaacgaatgcgaagactgaatgaatttcacaataaacctattaatacagatgatgagagttcactggttgaccctgatgacatcatgaaacacataggggatgacggatcaaactctgtagcaactgagccctggctccgccctggcacttcagaaacgctgaaacgtttcatggcagagcagctgaaccaggagcagcagcagattcctggaaaaccaggcactttcacttggcagggcctgtcgactgcacatggttaaaataaacctgtactggacccagtagtgccttttaaggtgaaaggaatggtaaatctgtacctttaatatgtcctacttttggcccctacctgaaagttactttttttccatcatctgtatataaaattatttttatcatgatgtatattatgtacataaataaaaggccttttatttatgtacataatatacatcatgattattgatttatataatagaattgtatagattatttttgcacagttttgtcataaattagggtggtaatgaactggattgaactactatatgtgcattatattgaattctgcttgtcattaagataaggtgaataagtgtcttaaacgtcctgtaaaaccggactcccctttgttacatgcacattttccattgttacctcgatgcaaaagaattcatttagtaggtacatctattgtagctgtgattattccagtttctgtgtgatgcaatcaaatgtcctattaattaattattatttcatgtcatttgtagctactgatacagcagaaatgaagggaactgtaattacttgtatttttgtaagccatacgttaaatgtttgttacatcatctttctgcttctatttttatgccaatgaaggcatttgtcttgttactaattacatgatgtaactacttcttgatataaataaatttttattttaattactaaaatctttttaactactatggagctttctagactagttttctagaggttgaatagaggtggggacacccgggagtcaaggacagagagactggagtcttcttcttccaccatggaaccttggataagtgagtccatgtgagttttctaatcactcagtaagtgatacttctaaaaaaggaaagagtcattcaaataattgtgacattctgactcagattagaatctcagaaccatgacagctgagaacatccccaggcactgcttctctctctaataatacttcctctgatgtaattaacggttggtagacaatatcagacaaatttgccacaattaaattactgatattttgaaaattgg

SEQ ID NO: 280733 - DNA, 2603 bp, Homo sapiens
tatgaaagtgattttgatagaagactttcgagagtgtatacaaatgacagtgctccagacaatgaaacatccaaatctgctaatcaagatacctgtagtccttttgcagggatgctctttggaggtgaagatcgagaacttattcagagaaggaaagagaaatacagactagaactgttggaacaaatggctgagcaacagaggaacaagagacgagaaaaagatttagaactcagggttgcagcgtctggagcacaagaccctgagaaatcgcctgatagactaaagcagtttagtgtggcaccaagacactttgaagagatgataccacctgaaagacccagaatagctttccagacacctctccctcctttatctgccccatctgtcccacccatcccatcagttcatcctgttccttctcaaaatgaagatttgcgcagtggactcagcagcgcccttggtgaaatggtgtctcccaggattgcacctctgcctccacctcccctactaccacctttggctactaactatcgaactccttatgatgatgcatactatttttatgggtccaggaatactttcgatcccagtcttgcttattatggttcaggaatgatgggcgtacagcctgcagcttatgttagtgctcctgtcacccaccaactagcacaacctgttgtgaatacggttggacagaatgaactgaagattacaagtgatcaagtgataaattcaggattgatttttgaagataaaccgaaaccttccaaacagtcacttcagtcttaccaagaggctttgcagcagcagattcgggaaagagaagaaagaaggaagaaagaacgtgaagaaaaagaagaatatgaagctaaattagaagctgaaatgagaacatataatccctggggaaaaggtggaggtggtgctcctctcagggatgcaaaaggaaatctgataactgatttgaataggatgcacagacaaaatatagatgcctaccataacccagatgcaagaacatatgaagataaaagggctgttgtatctctagacccaaatttagccacttcaaatgctgagaacctagaagatgctgcaaataaaagctcaggtcatatgcaaacacagagctctccttttgctcggggaaatgtatttggtgagcctccaactgaacttcagattaaacagcaagaattatacaagaattttcttcgtttccagattgaggaaaagaaacaaagagaggaagcagagcgagagagactgagaattgcagaagaaaaagaagaaagacggcttgcagaacagagggcacgaattcagcaggagtatgaagaggaacaggaaaagaaaagagagaaagaggaggagcaaaggctaaaaaatgaagagcatattcggttagctgaagaaagacaaaaagaagcagaaagaaagaagaaagaagaagaagaaaaatataacctgcaacttcagcactactgtgaaagagacaatttgattggggaagaaacaaagcacatgagacagccttctcctatagttcctgctcttcagaacaaaattgcaagcaaactccaaagacctccttcagttgacagcatcatacgttcctttattcatgaaagttccatgtccagggcacagtcacccccggtacctgccaggaaaaatcagctccgtgcagaagaggagaaaaaaaatgtaattatggaattatcagaaatgagaaaacagcttcgtagtgaagagaggcgtctacaagagcgattgctacacatggacagtgatgatgaaattcctatcaggaaaaaggaaaggaatcccatggatatatttgatatggctagacatcggttgcaagctcctgtcagaagacagtcccctaagggcttagacgctgccacttttcagaatgttcatgattttaatgagctgaaagatagaggtgagtagattgctgctcttttaaagatgtagcagaagtgttctacccatatttaaatatctataaagatctttgtaccctttttctaaagtggaattttatctatggtatgtattttagttaaaatgaaatgaaacttatgtattctctaggtcttcagttaaccagtctggtagatgaagctttagtttgactaactgctttcttttggagagcatacagtgttaaagtctggaatggatgagatcgcatagactagtacgaagaatggaacttggcatttaatggaggatggacagacaaagatgagctcatgaaaaatactgaggagaagccagagagactggaggagaagcaggagaatgtaggatcctgaaacctgaggggaaggagtatcaaggagacaggatcatgtaaggtgaataccggaaaatgtcagttggatgaggtcattggtgacctcagctagagctttttaagtggaatgattgccgattaactttggaatgaggattgactaggaggcaagatgttggagacaataggcataagacttttagaagacccttggctgggaaagggaagggaaggagagggatcaggagctggaagagtccttagaatgtgaacgtgaggagctatgcaggag

SEQ ID NO: 280734 - DNA, 607 bp, Homo sapiens
tttataatgcatttatagtaaaacttcattataacactttgttccttttaatgttgccaacatcaaatgtaaaaacaccaaactgttataagaaggtccactgtatgtggcacatgctttataagctaatgtgtttttaaggatgcacacggaacaaacgagggaatatgcctcctatggaacatgatggggatgttatagaacagtcaaacataagaatttcatctgctgaaaataaaaggtacagtatgtaatataaattctctgctttagtcattacattgtgaaacagaatgtgcctaaaactggctaactgaaaaagtagaaagatacagtaaattaacagccttccttcttagtgagaagtgaattaaaggaaaagaaaggtggggaggtagtactaaatgaaaatcgatagtactttacagcattcttttaaagaacaagttttggttataaagtgtgccaaggtgttctgaagaagtccctatcattacaaagtatgtaaatttgtttgaaataataaaagaaataagtataatttaatggactaaaaatcaacttaaaatatcttagagtcatggtgatgcaacttgactggaaataa

SEQ ID NO: 280735 - DNA, 296 bp, Homo sapiens
tgactttctgaagttctgttttctaactacaggatagcagtcgtcctaatgtagcaccagatggtctctctctaaaatctatatccagtgtaaatgttgatgagcttagagtgagaaatgaggaacgaatgcgaagactgaatgaatttcacaataaacctattaatacaggtaaatgaccaagtgtaatggcctatagtagaatcctgtatgaacttttaaactttcttactcaaggctttcactaacgtctgagggatagatggaatgagtttgaagacctttgagttgtatgg

SEQ ID NO: 280736 - DNA, 3695 bp, Homo sapiens
tatgaaagtgattttgatagaagactttcgagagtgtatacaaatgacagtgctccagacaatgaaacatccaaatctgctaatcaagatacctgtagtccttttgcagggatgctctttggaggtgaagatcgagaacttattcagagaaggaaagagaaatacagactagaactgttggaacaaatggctgagcaacagaggaacaagagacgagaaaaagatttagaactcagggttgcagcgtctggagcacaagaccctgagaaatcgcctgatagactaaagcagtttagtgtggcaccaagacactttgaagagatgataccacctgaaagacccagaatagctttccagacacctctccctcctttatctgccccatctgtcccacccatcccatcagttcatcctgttccttctcaaaatgaagatttgcgcagtggactcagcagcgcccttggtgaaatggtgtctcccaggattgcacctctgcctccacctcccctactaccacctttggctactaactatcgaactccttatgatgatgcatactatttttatgggtccaggaatactttcgatcccagtcttgcttattatggttcaggaatgatgggcgtacagcctgcagcttatgttagtgctcctgtcacccaccaactagcacaacctgttgtgaatacggttggacagaatgaactgaagattacaagtgatcaagtgataaattcaggattgatttttgaagataaaccgaaaccttccaaacagtcacttcagtcttaccaagaggctttgcagcagcagattcgggaaagagaagaaagaaggaagaaagaacgtgaagaaaaagaagaatatgaagctaaattagaagctgaaatgagaacatataatccctggggaaaaggtggaggtggtgctcctctcagggatgcaaaaggaaatctgataactgatttgaataggatgcacagacaaaatatagatgcctaccataacccagatgcaagaacatatgaagataaaagggctgttgtatctctagacccaaatttagccacttcaaatgctgagaacctagaagatgctgcaaataaaagctcaggtcatatgcaaacacagagctctccttttgctcggggaaatgtatttggtgagcctccaactgaacttcagattaaacagcaagaattatacaagaattttcttcgtttccagattgaggaaaagaaacaaagagaggaagcagagcgagagagactgagaattgcagaagaaaaagaagaaagacggcttgcagaacagagggcacgaattcagcaggagtatgaagaggaacaggaaaagaaaagagagaaagaggaggagcaaaggctaaaaaatgaagagcatattcggttagctgaagaaagacaaaaagaagcagaaagaaagaagaaagaagaagaagaaaaatataacctgcaacttcagcactactgtgaaagagacaatttgattggggaagaaacaaagcacatgagacagccttctcctatagttcctgctcttcagaacaaaattgcaagcaaactccaaagacctccttcagttgacagcatcatacgttcctttattcatgaaagttccatgtccagggcacagtcacccccggtacctgccaggaaaaatcagctccgtgcagaagaggagaaaaaaaatgtaattatggaattatcagaaatgagaaaacagcttcgtagtgaagagaggcgtctacaagagcgattgctacacatggacagtgatgatgaaattcctatcaggaaaaaggaaaggaatcccatggatatatttgatatggctagacatcggttgcaagctcctgtcagaagacagtcccctaagggcttagacgctgccacttttcagaatgttcatgattttaatgagctgaaagatagagattcagaaacacgagttgatctgaaatttatgtacctggatcctccaagagatcatcacaccttagagattcagcagcaagccctgctaagagagcagcagaagaggctgaacagaataaaaatgcaggaaggtgccaaagttgacttagatgccatcccaagtgctaaagtacgagagcaaagaatgcccagagatgacactagtgatttcttgaaaaactcattattggaatctgatagtgcttttattggggcttacggtgagacatatcctgccattgaagatgacgtcctccctccaccatcacagttgccctctgcacgggagcgcaggaggaacaaatggaaaggactagacattgatagcagtcgtcctaatgtagcaccagatggtctctctctaaaatctatatccagtgtaaatgttgatgagcttagagtgagaaatgaggaacgaatgcgaagactgaatgaatttcacaataaacctattaatacagatgatgagagttcactggttgaccctgatgacatcatgaaacacataggggatgacggatcaaactctgtagcaactgagccctggctccgccctggcacttcagaaacgctgaaacgtttcatggcagagcagctgaaccaggagcagcagcagattcctggaaaaccaggcactttcacttggcagggcctgtcgactgcacatggttaaaataaacctgtactggacccagtagtgccttttaaggtgaaaggaatggtaaatctgtacctttaatatgtcctacttttggcccctacctgaaagttactttttttccatcatctgtatataaaattatttttatcatgatgtatattatgtacataaataaaaggccatgattattgatttatataatagaattgtatagattatttttgcacagttttgtcataaattagggtggtaatgaactggattgaactactatatgtgcattatattgaattctgcttgtcattaagataaggtgaataagtgtcttaaacgtcctgtaaaaccggactcccctttgttacatgcacattttccattgttacctcgatgcaaaagaattcatttagtaggtacatctattgtagctgtgattattccagtttctgtgtgatgcaatcaaatgtcctattaattaattattatttcatgtcatttgtagctactgatacagcagaaatgaagggaactgtaattacttgtatttttgtaagccatacgttaaatgtttgttacatcatctttctgcttctatttttatgccaatgaaggcatttgtcttgttactaattacatgatgtaactacttcttgatataaataaatttttattttaattactaaaatctttttaactactatggagctttctagactagttttctagaggttgaatagaggtggggacacccgggagtcaaggacagagagactggagtcttcttcttccaccatggaaccttggataagtgagtccatgtgagttttctaatcactcagtaagtgatacttctaaaaaaggaaagagtcattcaaataattgtgacattctgactcagattagaatctcagaaccatgacagctgagaacatccccaggcactgcttctctctctaataatacttcctctgatgtaattaacggttggtagacaatatcagacaaatttgccacaattaaattactgatattttgaaaattgg

SEQ ID NO: 280737 - DNA, 2981 bp, Homo sapiens
tatgaaagtgattttgatagaagactttcgagagtgtatacaaatgacagtgctccagacaatgaaacatccaaatctgctaatcaagatacctgtagtccttttgcagggatgctctttggaggtgaagatcgagaacttattcagagaaggaaagagaaatacagactagaactgttggaacaaatggctgagcaacagaggaacaagagacgagaaaaagatttagaactcagggttgcagcgtctggagcacaagaccctgagaaatcgcctgatagactaaagcagtttagtgtggcaccaagacactttgaagagatgataccacctgaaagacccagaatagctttccagacacctctccctcctttatctgccccatctgtcccacccatcccatcagttcatcctgttccttctcaaaatgaagatttgcgcagtggactcagcagcgcccttggtgaaatggtgtctcccaggattgcacctctgcctccacctcccctactaccacctttggctactaactatcgaactccttatgatgatgcatactatttttatgggtccaggaatactttcgatcccagtcttgcttattatggttcaggaatgatgggcgtacagcctgcagcttatgttagtgctcctgtcacccaccaactagcacaacctgttgtgaatacggttggacagaatgaactgaagattacaagtgatcaagtgataaattcaggattgatttttgaagataaaccgaaaccttccaaacagtcacttcagtcttaccaagaggctttgcagcagcagattcgggaaagagaagaaagaaggaagaaagaacgtgaagaaaaagaagaatatgaagctaaattagaagctgaaatgagaacatataatccctggggaaaaggtggaggtggtgctcctctcagggatgcaaaaggaaatctgataactgatttgaataggatgcacagacaaaatatagatgcctaccataacccagatgcaagaacatatgaagataaaagggctgttgtatctctagacccaaatttagccacttcaaatgctgagaacctagaagatgctgcaaataaaagctcaggtcatatgcaaacacagagctctccttttgctcggggaaatgtatttggtgagcctccaactgaacttcagattaaacagcaagaattatacaagaattttcttcgtttccagattgaggaaaagaaacaaagagaggaagcagagcgagagagactgagaattgcagaagaaaaagaagaaagacggcttgcagaacagagggcacgaattcagcaggagtatgaagaggaacaggaaaagaaaagagagaaagaggaggagcaaaggctaaaaaatgaagagcatattcggttagctgaagaaagacaaaaagaagcagaaagaaagaagaaagaagaagaagaaaaatataacctgcaacttcagcactactgtgaaagagacaatttgattggggaagaaacaaagcacatgagacagccttctcctatagttcctgctcttcagaacaaaattgcaagcaaactccaaagacctccttcagttgacagcatcatacgttcctttattcatgaaagttccatgtccagggcacagtcacccccggtacctgccaggaaaaatcagctccgtgcagaagaggagaaaaaaaatgtaattatggaattatcagaaatgagaaaacagcttcgtagtgaagagaggcgtctacaagagcgattgctacacatggacagtgatgatgaaattcctatcaggaaaaaggaaaggaatcccatggatatatttgatatggctagacatcggttgcaagctcctgtcagaagacagtcccctaagggcttagacgctgccacttttcagaatgttcatgattttaatgagctgaaagatagagattcagaaacacgagttgatctgaaatttatgtacctggatcctccaagagatcatcacaccttagagattcagcagcaagccctgctaagagagcagcagaagaggctgaacagaataaaaatgcaggaaggtgccaaagttgacttagatgccatcccaagtgctaaagtacgagagcaaagaatgcccagagatgacactagtgatttcttgaaaaactcattattggaatctgatagtgcttttattggggcttacggtgagacatatcctgccattgaagatgacgtcctccctccaccatcacagttgccctctgcacgggagcgcaggaggaacaaatggaaaggactagacattgatagcagtcgtcctaatgtagcaccagatggtctctctctaaaatctatatccagtgtaaatgttgatgagcttagagtgagaaatgaggaacgaatgcgaagactgaatgaatttcacaataaacctattaatacagatgatgagagttcactggttgaccctgatgacatcatgaaacacataggggatgacggatcaaactctgtagcaactgagccctggctccgccctggcacttcagaaacgctgaaacgtttcatggcagagcagctgaaccaggagcagcagcagattcctggaaaaccaggcactttcactagatgctgcaaataaaagctcaggtcatatgcaaacacagagctctccttttgctcggggaaatgtatttggtgagcctccaactgaacttcagattaaacagcaagaattatacaagaattttcttcgtttccagattgaggaaaagaaacaaagagaggaagcagagcgagagagactgagaattgcagaagaaaaagaagaaagacggcttgcagaacagagggcacgaattcagcaggagtatgaagaggaacaggaaaagaaaagagagaaagaggaggagcaaaggctaaaaaatgaagagcatattcggttagctgaagaaagacaaaaagaagcag

SEQ ID NO: 280738 - DNA, 1753 bp, Homo sapiens
tatgaaagtgattttgatagaagactttcgagagtgtatacaaatgacagtgctccagacaatgaaacatccaaatctgctaatcaagatacctgtagtccttttgcagggatgctctttggaggtgaagatcgagaacttattcagagaaggaaagagaaatacagactagaactgttggaacaaatggctgagcaacagaggaacaagagacgagaaaaagatttagaactcagggttgcagcgtctggagcacaagaccctgagaaatcgcctgatagactaaagcagtttagtgtggcaccaagacactttgaagagatgataccacctgaaagacccagaatagctttccagacacctctccctcctttatctgccccatctgtcccacccatcccatcagttcatcctgttccttctcaaaatgaagatttgcgcagtggactcagcagcgcccttggtgaaatggtgtctcccaggattgcacctctgcctccacctcccctactaccacctttggctactaactatcgaactccttatgatgatgcatactatttttatgggtccaggaatactttcgatcccagtcttgcttattatggttcaggaatgatgggcgtacagcctgcagcttatgttagtgctcctgtcacccaccaactagcacaacctgttgtgaatacggttggacagaatgaactgaagattacaagtgatcaagtgataaattcaggattgatttttgaagataaaccgaaaccttccaaacagtcacttcagtcttaccaagaggctttgcagcagcagattcgggaaagagaagaaagaaggaagaaagaacgtgaagaaaaagaagaatatgaagctaaattagaagctgaaatgagaacatataatccctggggaaaaggtggaggtggtgctcctctcagggatgcaaaaggaaatctgataactgatttgaataggatgcacagacaaaatatagatgcctaccataacccagatgcaagaacatatgaagataaaagggctgttgtatctctagacccaaatttagccacttcaaatgctgagaacctagaagatgctgcaaataaaagctcaggtcatatgcaaacacagagctctccttttgctcggggaaatgtatttggtgagcctccaactgaacttcagattaaacagcaagaattatacaagaattttcttcgtttccagattgaggaaaagaaacaaagagaggaagcagagcgagagagactgagaattgcagaagaaaaagaagaaagacggcttgcagaacagagggcacgaattcagcaggagtatgaagaggaacaggaaaagaaaagagagaaagaggaggagcaaaggctaaaaaatgaagagcatattcggttagctgaagaaagacaaaaagaagcagaaagaaagaagaaagaagaagaagaaaaatataacctgcaacttcagcactactgtgaaagagacaatttgattggggaagaaacaaagcacatgagacagccttctcctatagttcctgctcttcagaacaaaattgcaagcaaactccaaagacctccttcagttgacagcatcatacgttcctttattcatgaaagttccgttgaagccgtcgacggcttcaacggaacttaacacgtgattcttctgcacacagtattgaagagcgactagattaaattctaatttacaaaattaccagttttcttcaagaact

SEQ ID NO: 280739 - DNA, 909 bp, Homo sapiens
gatgcacacggaacaaacgagggaatatgcctcctatggaacatgatggggatgttatagaacagtcaaacataagaatttcatctgctgaaaataaaagtgctccagacaatgaaacatccaaatctgctaatcaagatacctgtagtccttttgcagggatgctctttggaggtgaagatcgagaacttattcagagaaggaaagagaaatacagactagaactgttggaacaaatggctgagcaacagaggaacaagagacgagaaaaagatttagaactcagggttgcagcgtctggagcacaagaccctgagaaatcgcctgatagactaaagcagtttagtgtggcaccaagacactttgaagagatgataccacctgaaagacccagaatagctttccagacacctctccctcctttatctgccccatctgtcccacccatcccatcagttcatcctgttccttctcaaaatgaagatttgcgcagtggactcagcagcgcccttggtgaaatggtgtctcccaggattgcacctctgcctccacctcccctactaccacctttggctactaactatcgaactccttatgatgatgcatactatttttatgggtccaggaatactttcgatcccagtcttgcttattatggttcaggaatgatgggcgtacagcctgcagcttatgttagtgctcctgtcacccaccaactagcacaacctgttgtgaatacggttggacagaatgaactgaagattacaagtgatcaagtgataaattcaggattgatttttgaagataaaccgaaaccttccaaacagtcacttcagtcttaccaagaggctttgcagcagcagattcgggaaagagaagaaagaggtagataaacaacagatctgcagg

SEQ ID NO: 280740 - DNA, 2846 bp, Homo sapiens
atagccacatccctgaatgtcacctgtccctgggtgagagccatgcctgacttgtctttctttcctcttcctcttccggcgcgggcgccatgaagctgctgcggcgggcgtggcggcggcgggcggcgctaggcctgggcacgctggcgctgtgcggggcggcgctgctctacctggcgcgctgcgcggccgagcccggggaccccagggcgatgtcgggccgcagcccgcctccccccgcgcccgcgcgcgccgccgccttcctggcagtgctggtggccagcgcgccccgcgccgccgagcgccgcagcgtgatccgcagcacgtggcttgcgcggcgcggggccccgggcgacgtgtgggcgcgctttgccgtgggcacggccggcctgggcgccgaggagcggcgcgccctggagcgggagcaggcgcggcacggggacctgctgctgctgcccgcgctgcgcgacgcctacgaaaacctcacggccaaggtgctggccatgctggcctggctggacgagcacgtggccttcgagttcgtgctcaaggcggacgacgactccttcgcgcggctggacgcgctgctggccgagctgcgcgcccgcgagcccgcgcgccgccgccgcctctactggggcttcttctcgggccgcggccgcgtcaagccgggggggcgctggcgcgaggccgcctggcaactctgcgactactacctgccctacgcgctgggcggcggctacgtgctctcggccgacctggtgcactacctgcgcctcagccgcgactacctgcgcgcctggcacagcgaggacgtgtctctgggcgcctggctggcgccggtggacgtccagcgggagcacgacccgcgcttcgacaccgaataccggtcccgcggctgcagcaaccagtacctggtgacgcacaagcagagcctggaggacatgctggagaagcacgcgacgctggcgcgcgagggccgcctgtgcaagcgcgaggtgcagctgcgcctgtcctacgtgtacgactggtccgcgccgccctcgcagtgctgccagagaagggagggcatcccctgagccgccgcggcccggccctccgggacacctgcttcacccggcggcgccttggggcaggtgccgagcgggcgcactacgcccgggccccaaggcccccgtcccgcagccacgcttgtggtcgctgcgtcccggtctgcgtttgggagacccctgggggttgccggggcagcgcgccgtgtccaggtggaggtgcccgttcctggacctcagcgagcctgagccgggcccggccgcacgctgacccccgtgctgtccccgaccggctcacggggctgggctccgatcttccgtgtctcttatcagtggcgtttctcacgtctgcgtctcagatctaacgtggtttcacatcaatccgctttcatgggattttggtctctgtccagtgacttcgtggtaaatgtaactcagtgtttgcttgcgacttatttataaatattgtaagtttgtgtcgatgagtgtaagttggcagtgcgcacgtctcggtttttttacatgatttaaggaaagacttttatgtcagaacttggtgcctgtaccgtcaaccccgctgctgcccgtgtttaaacgcaggagaactttaaaactggccatctatcttttcagtgtacaagtcactgaacccattgtttctttctgaagagactttcctttcaaggcttcccatgggtccgcgccacacagggccggtgctgctttatttcagactctgccccaggttccaggaatccgaaccccggagtgctgacgcggttccccaacttccgccttaagaaaacaggaccagccggcaccaggcccgtctctcacgtactttaacacatccttgaaagcccctcgtttaatgagaaaagcgaacactgcggtccttgccaaagtaaaatgaagctgccccaggacaaggggttaccatgagctccctggagtccgacgcgggttttctctctgggggacctgggtggtccccgctgtggtctttgttgtcccactttgggaccgggtccagtctggggtctagtctcgagcatcagggtcaggctcggggcagggctgggttaggctccgggtcagtcttgccatgggtttgggagcaggtttgggttacttgcgtttgaaggcagcagtggtctcaggaggaagaaacgggggcgggagagagtggtgatctgtggtcagtgggtcagtgacctgcacggtgattctcccacctccaaaaggtaggggtgggactggaggcgtccctaggtcaggccgttgagttcgagctccgatgggccaccttgaatccaggactgaccgcccgtgtgtgcacagtttgttcttggacgaggactcgtgaggatcgagggctggggaccccggtgtgagcaggatggggccctgccctcccgtgggagttgtggactcgagcccaggggctgcccgtcacagcggtgtcccaggtccctgccatccgattttacctgggatgtcttctctggagtttggaattgcttgaggaaccctgcgtgtgcttggagaggccagagggcttgctgagaaccccatggacagtggagagcgggattcgaaccaagggctggactcccacacctctggcctgcgtcgcccagttctttgtggctctgaagaattggccgctgtggaaaagagcaaatgtccgagacccccaacaggaagagtctaaaaatccagtttgcaaccacttctgacctacaaaaaaatggaaatttagtgtttttcagcctaagacattaaatttcatatcag

SEQ ID NO: 280741 - DNA, 2818 bp, Homo sapiens
gagccggcggcgcctgcgcactcgcgagtccggcctgggccgccggcccggcgcgggcgccatgaagctgctgcggcgggcgtggcggcggcgggcggcgctaggcctgggcacgctggcgctgtgcggggcggcgctgctctacctggcgcgctgcgcggccgagcccggggaccccagggcgatgtcgggccgcagcccgcctccccccgcgcccgcgcgcgccgccgccttcctggcagtgctggtggccagcgcgccccgcgccgccgagcgccgcagcgtgatccgcagcacgtggcttgcgcggcgcggggccccgggcgacgtgtgggcgcgctttgccgtgggcacggccggcctgggcgccgaggagcggcgcgccctggagcgggagcaggcgcggcacggggacctgctgctgctgcccgcgctgcgcgacgcctacgaaaacctcacggccaaggtgctggccatgctggcctggctggacgagcacgtggccttcgagttcgtgctcaaggcggacgacgactccttcgcgcggctggacgcgctgctggccgagctgcgcgcccgcgagcccgcgcgccgccgccgcctctactggggcttcttctcgggccgcggccgcgtcaagccgggggggcgctggcgcgaggccgcctggcaactctgcgactactacctgccctacgcgctgggcggcggctacgtgctctcggccgacctggtgcactacctgcgcctcagccgcgactacctgcgcgcctggcacagcgaggacgtgtctctgggcgcctggctggcgccggtggacgtccagcgggagcacgacccgcgcttcgacaccgaataccggtcccgcggctgcagcaaccagtacctggtgacgcacaagcagagcctggaggacatgctggagaagcacgcgacgctggcgcgcgagggccgcctgtgcaagcgcgaggtgcagctgcgcctgtcctacgtgtacgactggtccgcgccgccctcgcagtgctgccagagaagggagggcatcccctgagccgccgcggcccggccctccgggacacctgcttcacccggcggcgccttggggcaggtgccgagcgggcgcactacgcccgggccccaaggcccccgtcccgcagccacgcttgtggtcgctgcgtcccggtctgcgtttgggagacccctgggggttgccggggcagcgcgccgtgtccaggtggaggtgcccgttcctggacctcagcgagcctgagccgggcccggccgcacgctgacccccgtgctgtccccgaccggctcacggggctgggctccgatcttccgtgtctcttatcagtggcgtttctcacgtctgcgtctcagatctaacgtggtttcacatcaatccgctttcatgggattttggtctctgtccagtgacttcgtggtaaatgtaactcagtgtttgcttgcgacttatttataaatattgtaagtttgtgtcgatgagtgtaagttggcagtgcgcacgtctcggtttttttacatgatttaaggaaagacttttatgtcagaacttggtgcctgtaccgtcaaccccgctgctgcccgtgtttaaacgcaggagaactttaaaactggccatctatcttttcagtgtacaagtcactgaacccattgtttctttctgaagagactttcctttcaaggcttcccatgggtccgcgccacacagggccggtgctgctttatttcagactctgccccaggttccaggaatccgaaccccggagtgctgacgcggttccccaacttccgccttaagaaaacaggaccagccggcaccaggcccgtctctcacgtactttaacacatccttgaaagcccctcgtttaatgagaaaagcgaacactgcggtccttgccaaagtaaaatgaagctgccccaggacaaggggttaccatgagctccctggagtccgacgcgggttttctctctgggggacctgggtggtccccgctgtggtctttgttgtcccactttgggaccgggtccagtctggggtctagtctcgagcatcagggtcaggctcggggcagggctgggttaggctccgggtcagtcttgccatgggtttgggagcaggtttgggttacttgcgtttgaaggcagcagtggtctcaggaggaagaaacgggggcgggagagagtggtgatctgtggtcagtgggtcagtgacctgcacggtgattctcccacctccaaaaggtaggggtgggactggaggcgtccctaggtcaggccgttgagttcgagctccgatgggccaccttgaatccaggactgaccgcccgtgtgtgcacagtttgttcttggacgaggactcgtgaggatcgagggctggggaccccggtgtgagcaggatggggccctgccctcccgtgggagttgtggactcgagcccaggggctgcccgtcacagcggtgtcccaggtccctgccatccgattttacctgggatgtcttctctggagtttggaattgcttgaggaaccctgcgtgtgcttggagaggccagagggcttgctgagaaccccatggacagtggagagcgggattcgaaccaagggctggactcccacacctctggcctgcgtcgcccagttctttgtggctctgaagaattggccgctgtggaaaagagcaaatgtccgagacccccaacaggaagagtctaaaaatccagtttgcaaccacttctgacctacaaaaaaatggaaatttagtgtttttcagcctaagacattaaatttcatatcag

SEQ ID NO: 280742 - DNA, 2846 bp, Homo sapiens
atagccacatccctgaatgtcacctgtccctgggtgagagccatgcctgacttgtctttctttcctcttcctcttccggcgcgggcgccatgaagctgctgcggcgggcgtggcggcggcgggcggcgctaggcctgggcacgctggcgctgtgcggggcggcgctgctctacctggcgcgctgcgcggccgagcccggggaccccagggcgatgtcgggccgcagcccgcctccccccgcgcccgcgcgcgccgccgccttcctggcagtgctggtggccagcgcgccccgcgccgccgagcgccgcagcgtgatccgcagcacgtggcttgcgcggcgcggggccccgggcgacgtgtgggcgcgctttgccgtgggcacggccggcctgggcgccgaggagcggcgcgccctggagcgggagcaggcgcggcacggggacctgctgctgctgcccgcgctgcgcgacgcctacgaaaacctcacggccaaggtgctggccatgctggcctggctggacgagcacgtggccttcgagttcgtgctcaaggcggacgacgactccttcgcgcggctggacgcgctgctggccgagctgcgcgcccgcgagcccgcgcgccgccgccgcctctactggggcttcttctcgggccgcggccgcgtcaagccgggggggcgctggcgcgaggccgcctggcaactctgcgactactacctgccctacgcgctgggcggcggctacgtgctctcggccgacctggtgcactacctgcgcctcagccgcgactacctgcgcgcctggcacagcgaggacgtgtctctgggcgcctggctggcgccggtggacgtccagcgggagcacgacccgcgcttcgacaccgaataccggtcccgcggctgcagcaaccagtacctggtgacgcacaagcagagcctggaggacatgctggagaagcacgcgacgctggcgcgcgagggccgcctgtgcaagcgcgaggtgcagctgcgcctgtcctacgtgtacgactggtccgcgccgccctcgcagtgctgccagagaagggagggcatcccctgagccgccgcggcccggccctccgggacacctgcttcacccggcggcgccttggggcaggtgccgagcgggcgcactacgcccgggccccaaggcccccgtcccgcagccacgcttgtggtcgctgcgtcccggtctgcgtttgggagacccctgggggttgccggggcagcgcgccgtgtccaggtggaggtgcccgttcctggacctcagcgagcctgagccgggcccggccgcacgctgacccccgtgctgtccccgaccggctcacggggctgggctccgatcttccgtgtctcttatcagtggcgtttctcacgtctgcgtctcagatctaacgtggtttcacatcaatccgctttcatgggattttggtctctgtccagtgacttcgtggtaaatgtaactcagtgtttgcttgcgacttatttataaatattgtaagtttgtgtcgatgagtgtaagttggcagtgcgcacgtctcggtttttttacatgatttaaggaaagacttttatgtcagaacttggtgcctgtaccgtcaaccccgctgctgcccgtgtttaaacgcaggagaactttaaaactggccatctatcttttcagtgtacaagtcactgaacccattgtttctttctgaagagactttcctttcaaggcttcccatgggtccgcgccacacagggccggtgctgctttatttcagactctgccccaggttccaggaatccgaaccccggagtgctgacgcggttccccaacttccgccttaagaaaacaggaccagccggcaccaggcccgtctctcacgtactttaacacatccttgaaagcccctcgtttaatgagaaaagcgaacactgcggtccttgccaaagtaaaatgaagctgccccaggacaaggggttaccatgagctccctggagtccgacgcgggttttctctctgggggacctgggtggtccccgctgtggtctttgttgtcccactttgggaccgggtccagtctggggtctagtctcgagcatcagggtcaggctcggggcagggctgggttaggctccgggtcagtcttgccatgggtttgggagcaggtttgggttacttgcgtttgaaggcagcagtggtctcaggaggaagaaacgggggcgggagagagtggtgatctgtggtcagtgggtcagtgacctgcacggtgattctcccacctccaaaaggtaggggtgggactggaggcgtccctaggtcaggccgttgagttcgagctccgatgggccaccttgaatccaggactgaccgcccgtgtgtgcacagtttgttcttggacgaggactcgtgaggatcgagggctggggaccccggtgtgagcaggatggggccctgccctcccgtgggagttgtggactcgagcccaggggctgcccgtcacagcggtgtcccaggtccctgccatccgattttacctgggatgtcttctctggagtttggaattgcttgaggaaccctgcgtgtgcttggagaggccagagggcttgctgagaaccccatggacagtggagagcgggattcgaaccaagggctggactcccacacctctggcctgcgtcgcccagttctttctccctccaacgtttcccccctccaaaagtccccctttcccgccccccccgccggatctttcccctccccttcccccctcctcctcctcccgacctacaaaaaaatggaaatttagtgtttttcagcctaagacattaaatttcatatcag

SEQ ID NO: 280743 - DNA, 2802 bp, Homo sapiens
gagccggcggcgcctgcgcactcgcgagtccggcctgggccgccggcccggcgcgggcgccatgaagctgctgcggcgggcgtggcggcggcgggcggcgctaggcctgggcacgctggcgctgtgcggggcggcgctgctctacctggcgcgctgcgcggccgagcccggggaccccagggcgatgtcgggccgcagcccgcctccccccgcgcccgcgcgcgccgccgccttcctggcagtgctggtggccagcgcgccccgcgccgccgagcgccgcagcgtgatccgcagcacgtggcttgcgcggcgcggggccccgggcgacgtgtgggcgcgctttgccgtgggcacggccggcctgggcgccgaggagcggcgcgccctggagcgggagcaggcgcggcacggggacctgctgctgctgcccgcgctgcgcgacgcctacgaaaacctcacggccaaggtgctggccatgctggcctggctggacgagcacgtggccttcgagttcgtgctcaaggcggacgacgactccttcgcgcggctggacgcgctgctggccgagctgcgcgcccgcgagcccgcgcgccgccgccgcctctactggggcttcttctcgggccgcggccgcgtcaagccgggggggcgctggcgcgaggccgcctggcaactctgcgactactacctgccctacgcgctgggcggcggctacgtgctctcggccgacctggtgcactacctgcgcctcagccgcgactacctgcgcgcctggcacagcgaggacgtgtctctgggcgcctggctggcgccggtggacgtccagcgggagcacgacccgcgcttcgacaccgaataccggtcccgcggctgcagcaaccagtacctggtgacgcacaagcagagcctggaggacatgctggagcgcgcgagggccgcctgtgcaagcgcgaggtgcagctgcgcctgtcctacgtgtacgactggtccgcgccgccctcgcagtgctgccagagaagggagggcatcccctgagccgccgcggcccggccctccgggacacctgcttcacccggcggcgccttggggcaggtgccgagcgggcgcactacgcccgggccccaaggcccccgtcccgcagccacgcttgtggtcgctgcgtcccggtctgcgtttgggagacccctgggggttgccggggcagcgcgccgtgtccaggtggaggtgcccgttcctggacctcagcgagcctgagccgggcccggccgcacgctgacccccgtgctgtccccgaccggctcacggggctgggctccgatcttccgtgtctcttatcagtggcgtttctcacgtctgcgtctcagatctaacgtggtttcacatcaatccgctttcatgggattttggtctctgtccagtgacttcgtggtaaatgtaactcagtgtttgcttgcgacttatttataaatattgtaagtttgtgtcgatgagtgtaagttggcagtgcgcacgtctcggtttttttacatgatttaaggaaagacttttatgtcagaacttggtgcctgtaccgtcaaccccgctgctgcccgtgtttaaacgcaggagaactttaaaactggccatctatcttttcagtgtacaagtcactgaacccattgtttctttctgaagagactttcctttcaaggcttcccatgggtccgcgccacacagggccggtgctgctttatttcagactctgccccaggttccaggaatccgaaccccggagtgctgacgcggttccccaacttccgccttaagaaaacaggaccagccggcaccaggcccgtctctcacgtactttaacacatccttgaaagcccctcgtttaatgagaaaagcgaacactgcggtccttgccaaagtaaaatgaagctgccccaggacaaggggttaccatgagctccctggagtccgacgcgggttttctctctgggggacctgggtggtccccgctgtggtctttgttgtcccactttgggaccgggtccagtctggggtctagtctcgagcatcagggtcaggctcggggcagggctgggttaggctccgggtcagtcttgccatgggtttgggagcaggtttgggttacttgcgtttgaaggcagcagtggtctcaggaggaagaaacgggggcgggagagagtggtgatctgtggtcagtgggtcagtgacctgcacggtgattctcccacctccaaaaggtaggggtgggactggaggcgtccctaggtcaggccgttgagttcgagctccgatgggccaccttgaatccaggactgaccgcccgtgtgtgcacagtttgttcttggacgaggactcgtgaggatcgagggctggggaccccggtgtgagcaggatggggccctgccctcccgtgggagttgtggactcgagcccaggggctgcccgtcacagcggtgtcccaggtccctgccatccgattttacctgggatgtcttctctggagtttggaattgcttgaggaaccctgcgtgtgcttggagaggccagagggcttgctgagaaccccatggacagtggagagcgggattcgaaccaagggctggactcccacacctctggcctgcgtcgcccagttctttgtggctctgaagaattggccgctgtggaaaagagcaaatgtccgagacccccaacaggaagagtctaaaaatccagtttgcaaccacttctgacctacaaaaaaatggaaatttagtgtttttcagcctaagacattaaatttcatatcag

SEQ ID NO: 280744 - DNA, 755 bp, Homo sapiens
  misc_feature (32)..(33): n is a, c, g, or t
gaaactaacggctaggtacgaggcctgggtgnnggctgggttaggctccgggtcagtcttgccatgggtttgggagcaggtttgggttacttgcgtttgaaggcagcagtggtctcaggaggaagaaacgggggcgggagagagtggtgatctgtggtcagtgggtcagtgacctgcacggtgattctcccacctccaaaaggtaggggtgggactggaggcgtccctaggtcaggccgttgagttcgagctccgatgggccaccttgaatccaggactgaccgcccgtgtgtgcacagtttgttcttggacgaggactcgtgaggatcgagggctggggaccccggtgtgagcaggatggggccctgccctcccgtgggagttgtggactcgagcccaggggctgcccgtcacagcggtgtcccaggtccctgccatccgattttacctgggatgtcttctctggagtttggaattgcttgaggaaccctgcgtgtgcttggagaggccagagggcttgctgagaaccccatggacagtggagagcgggattcgaaccaagggctggactcccacacctctggcctgcgtcgcccagttctttgtggctctgaagaattggccgctgtggaaaagagcaaatgtccgagacccccaacaggaagagtctaaaaatccagtttgcaaccacttctgacctacaaaaaaatggaaatttagtgtttttcagcctaagacattaaatttcatatcag

SEQ ID NO: 280745 - DNA, 513 bp, Homo sapiens
ccgtgtgtgcacagtttgttcttggacgaggactcgtgaggatcgagggctggggaccccggtgctgctttatttcagactctgccccaggttccaggaatccgaaccccggagtgctgacgcggttccccaacttccgccttaagaaaacaggaccagccggcaccaggcccgtctctcacgtactttaacacatccgattttacctgggatgtcttctctggagtttggaattgcttgaggaaccctgcgtgtgcttggagaggccagagggcttgctgagaaccccatggacagtggagagcgggattcgaaccaagggctggactcccacacctctggcctgcgtcgcccagttctttgtggctctgaagaattggccgctgtggaaaagagcaaatgtccgagacccccaacaggaagagtctaaaaatccagtttgcaaccacttctgacctacaaaaaaatggaaatttagtgtttttcagcctaagacattaaatttcatatcag

SEQ ID NO: 280746 - DNA, 2817 bp, Homo sapiens
atagccacatccctgaatgtcacctgtccctgggtgagagccatgcctgacttgtctttctttcctcttcctcttccggcgcgggcgccatgaagctgctgcggcgggcgtggcggcggcgggcggcgctaggcctgggcacgctggcgctgtgcggggcggcgctgctctacctggcgcgctgcgcggccgagcccggggaccccagggcgatgtcgggccgcagcccgcctccccccgcgcccgcgcgcgccgccgccttcctggcagtgctggtggccagcgcgccccgcgccgccgagcgccgcagcgtgatccgcagcacgtggcttgcgcggcgcggggccccgggcgacgtgtgggcgcgctttgccgtgggcacggccggcctgggcgccgaggagcggcgcgccctggagcgggagcaggcgcggcacggggacctgctgctgctgcccgcgctgcgcgacgcctacgaaaacctcacggccaaggtgctggccatgctggcctggctggacgagcacgtggccttcgagttcgtgctcaaggcggacgacgactccttcgcgcggctggacgcgctgctggccgagctgcgcgcccgcgagcccgcgcgccgccgccgcctctactggggcttcttctcgggccgcggccgcgtcaagccgggggggcgctggcgcgaggccgcctggcaactctgcgactactacctgccctacgcgctgggcggcggctacgtgctctcggccgacctggtgcactacctgcgcctcagccgcgactacctgcgcgcctggcacagcgaggacgtgtctctgggcgcctggctggcgccggtggacgtccagcgggagcacgacccgcgcttcgacaccgaataccggtcccgcggctgcagcaaccagtacctggtgacgcacaagcagagcctggaggacatgctggagaagcacgcgacgctggcgcgcgagggccgcctgtgcaagcgcgaggtgcagctgcgcctgtcctacgtgtacgactggtccgcgccgccctcgcagtgctgccagagaagggagggcatcccctgagccgccgcggcccggccctccgggacacctgcttcacccggcggcgccttggggcaggtgccgagcgggcgcactacgcccgggccccaaggcccccgtcccgcagccacgcttgtggtcgctgcgtcccggtctgcgtttgggagacccctgggggttgccggggcagcgcgccgtgtccaggtggaggtgcccgttcctggacctcagcgagcctgagccgggcccggccgcacgctgacccccgtgctgtccccgaccggctcacggggctgggctccgatcttccgtgtctcttatcagtggcgtttctcacgtctgcgtctcagatctaacgtggtttcacatcaatccgctttcatgggattttggtctctgtccagtgacttcgtggtaaatgtaactcagtgtttgcttgcgacttatttataaatattgtaagtttgtgtcgatgagtgtaagttggcagtgcgcacgtctcggtttttttacatgatttaaggaaagacttttatgtcagaacttggtgcctgtaccgtcaaccccgctgctgcccgtgtttaaacgcaggagaactttaaaactggccatctatcttttcagtgtacaagtcactgaacccattgtttctttctgaagagactttcctttcaaggcttcccatgggtccgcgccacacagggccggtgctgctttatttcagactctgccccaggttccaggaatccgaaccccggagtgctgacgcggttccccaacttccgccttaagaaaacaggaccagccggcaccaggcccgtctctcacgtactttaacacatccttgaaagcccctcgtttaatgagaaaagcgaacactgcggtccttgccaaagtaaaatgaagctgccccaggacaaggggttaccatgagctccctggagtccgacgcgggttttctctctgggggacctgggtggtccccgctgtggtctttgttgtcccactttgggaccgggtccagtctggggtctagtctcgagcatcagggtcaggctcggggcagggctgggttaggctccgggtcagtcttgccatgggtttgggagcaggtttgggttacttgcgtttgaaggcagcagtggtctcaggaggaagaaacgggggcgggagagagtggtgatctgtggtcagtgggtcagtgacctgcacggtgattctcccacctccaaaaggtaggggtgggactggaggcgtccctaggtcaggccgttgagttcgagctccgatgggccaccttgaatccaggactgaccgcccgtgtgtgcacagtttgttcttggacgaggactcgtgaggatcgagggctggggaccccggtgtgagcaggatggggccctgccctcccgtgggagttgtggactcgagcccaggggctgcccgtcacagcggtgtcccaggtccctgccatccgattttacctgggatgtcttctctggagtttggaattgcttgaggaaccctgcgtgtgcttggagaggccagagggcttgctgagaaccccatggacagtggagagcgggattcgaaccaagggctggactcccacacctctggcctgcgtcgcccagttctttgtggctctgaagaattggccgctgtggaaaagagcaaatgtccgagacccccaacaggaagagtctaaaaatccagtttgcaaccacttctacgaccgagtatctgggggatcctcagataa

SEQ ID NO: 280747 - DNA, 2189 bp, Homo sapiens
gagccggcggcgcctgcgcactcgcgagtccggcctgggccgccggcccggcgcgggcgccatgaagctgctgcggcgggcgtggcggcggcgggcggcgctaggcctgggcacgctggcgctgtgcggggcggcgctgctctacctggcgcgctgcgcggccgagcccggggaccccagggcgatgtcgggccgcagcccgcctccccccgcgcccgcgcgcgccgccgccttcctggcagtgctggtggccagcgcgccccgcgccgccgagcgccgcagcgtgatccgcagcacgtggcttgcgcggcgcggggccccgggcgacgtgtgggcgcgctttgccgtgggcacggccggcctgggcgccgaggagcggcgcgccctggagcgggagcaggcgcggcacggggacctgctgctgctgcccgcgctgcgcgacgcctacgaaaacctcacggccaaggtgctggccatgctggcctggctggacgagcacgtggccttcgagttcgtgctcaaggcggacgacgactccttcgcgcggctggacgcgctgctggccgagctgcgcgcccgcgagcccgcgcgccgccgccgcctctactggggcttcttctcgggccgcggccgcgtcaagccgggggggcgctggcgcgaggccgcctggcaactctgcgactactacctgccctacgcgctgggcggcggctacgtgctctcggccgacctggtgcactacctgcgcctcagccgcgactacctgcgcgcctggcacagcgaggacgtgtctctgggcgcctggctggcgccggtggacgtccagcgggagcacgacccgcgcttcgacaccgaataccggtcccgcggctgcagcaaccagtacctggtgacgcacaagcagagcctggaggacatgctggagaagcacgcgacgctggcgcgcgagggccgcctgtgcaagcgcgaggtgcagctgcgcctgtcctacgtgtacgactggtccgcgccgccctcgcagtgctgccagagaagggagggcatcccctgagccgccgcggcccggccctccgggacacctgcttcacccggcggcgccttggggcaggtgccgagcgggcgcactacgcccgggccccaaggcccccgtcccgcagccacgcttgtggtcgctgcgtcccggtctgcgtttgggagacccctgggggttgccggggcagcgcgccgtgtccaggtggaggtgcccgttcctggacctcagcgagcctgagccgggcccggccgcacgctgacccccgtgctgtccccgaccggctcacggggctgggctccgatcttccgtgtctcttatcagtggcgtttctcacgtctgcgtctcagatctaacgtggtttcacatcaatccgctttcatgggattttggtctctgtccagtgacttcgtggtaaatgtaactcagtgtttgcttgcgacttatttataaatattgtaagtttgtgtcgatgagtgtaagttggcagtgcgcacgtctcggtttttttacatgatttaaggaaagacttttatgtcagaacttggtgcctgtaccgtcaaccccgctgctgcccgtgtttaaacgcaggagaactttaaaactggccatctatcttttcagtgtacaagtcactgaacccattgtttctttctgaagagactttcctttcaaggcttcccatgggtccgcgccacacagggccggtgctgctttatttcagactctgccccaggttccaggaatccgaaccccggagtgctgacgcggttccccaacttccgccttaagaaaacaggaccagccggcaccaggcccgtctctcacgtactttaacacatccgattttacctgggatgtcttctctggagtttggaattgcttgaggaaccctgcgtgtgcttggagaggccagagggcttgctgagaaccccatggacagtggagagcgggattcgaaccaagggctggactcccacacctctggcctgcgtcgcccagttctttgtggctctgaagaattggccgctgtggaaaagagcaaatgtccgagacccccaacaggaagagtctaaaaatccagtttgcaaccacttctgacctacaaaaaaatggaaatttagtgtttttcagcctaagacattaaatttcatatcag

SEQ ID NO: 280748 - DNA, 829 bp, Homo sapiens
ttctccaggtgagaaaattgaggcccaagaggttaaatgacttgctcagatcttggactgaatcctttaacccaggggtccccaaccccagggccagtaccggaccgtggcctgttaggaactgggccgcacaagagtaccaagatcaaacatcctgcctacatggggttgatatttggagcagtatacctgcagtctgcatgttggaagcccttgttcaccgggacatgaacatatattcacagaagacaacaatccctggtgggacagcttacattgggtgatgagtttccggtgctcatcgcgagagtcttccatggtgtaaagggtttgcttggtgatgctgttcaggtccacgttcctccagtcttccagcatttggaacgtgatgtctgcactgtggatcactgttcgagatgcctataatccaatccaatcaactcgttagctcatgggttgttaaaaccctttcactgtatttccttttatgccttgttaatgcatctgcttatggtattttgcaaactaccctgaaattccgggaaattcaatttcaggaaagcaccagaagactctgtaactcagaagacgcagacactgttttctcctatggttctttccacacatctctttttctctacaagaaactgcgagggtgggctaggccagaccaaaccctgctgtttccagtccctttggtcttgaccccatggaacaatgggatgaagcccagagatctgtcagctttctgatgtaagcctgtgggatgggagctctgtgctgaattatccttgtgtctccagtacctgagaagctgcaggctgggatt

SEQ ID NO: 280749 - DNA, 742 bp, Homo sapiens
gtactcaggggaaggattgctaacaggggaagagggaggtggcacttccacagatgtggcagattttgctggagaaaacgatggcactggtgaaggggttggtgcggcagcctctgtcaagatgatctcttctcggacttctgctgtggatagagatagggacaacaatccctggtgggacagcttacattgggtgatgagtttccggtgctcatcgcgagagtcttccatggtgtaaagggtttgcttggtgatgctgttcaggtccacgttcctccagtcttccagcatttggaacgtgatgtctgcactgtggatcactgttcgagatgcctataatccaatccaatcaactcgttagctcatgggttgttaaaaccctttcactgtatttccttttatgccttgttaatgcatctgcttatggtattttgcaaactaccctgaaattccgggaaattcaatttcaggaaagcaccagaagactctgtaactcagaagacgcagacactgttttctcctatggttctttccacacatctctttttctctacaagaaactgcgagggtgggctaggccagaccaaaccctgctgtttccagtccctttggtcttgaccccatggaacaatgggatgaagcccagagatctgtcagctttctgatgtaagcctgtgggatgggagctctgtgctgaattatccttgtgtctccagtacctgagaagctgcaggctgggatt

SEQ ID NO: 280750 - DNA, 637 bp, Homo sapiens
gtgcctgaatcagaaacagaaacttctagactgatgtggttcagtggtgcttacataggctattgtttactacatctgcaccaacctttcaggaagcatttggcttgtacatttagctctgtggcccactgaagagaatttcctgtgggcagtggggtgaggaaccctgccttaatctgcttctcagtcatctgtggaccacacctacaccagcgcttccttctgcgcatcctatggcacctgtctacttcctgttttgggaatccccacagaggctagcacagtgctgaacttgtaaaaattctggaggttagaagtccaagatcaaggtgccatcaggattgatttcttgtgaggcctttcttcctggcttgctgtgtcctcagatggctcttcatctgtgtatgtgcagagagaaaaagatttctctggtggccttctaaaaaaaaatcagtcttcagaggcaaagttggacatcccaaagatggcatagataaacatgaccaggaagagcaggaggccgatgttaaacaacgcaggaagggacatcatcaaagcaaagagcagcgtgcggatcccctttgctcctttgatcagacgtaggattcggccaatcctggcaagacggatcactcgg

SEQ ID NO: 280751 - DNA, 1725 bp, Homo sapiens
tctgaaatatggcattgccctcctcatcttacaggtggaaaaactgaagcttgagataagcaacctaaacagtatcacacagctaatgaggagtcaaatgcaggcctgcctgtccccaaagtccagattcttcctttcctagaatgtcagggctagggaagtgctgagaccctctggtctacccccaccccctaattttatgaaagacaaggataaagtcccagggaaacaatgtgttcaaggctacccagtgacgcatgaccccatacaggctctataaggatgttacactcggtcatctctacatgcctggtacctagcacaggatcctggtacattggaggtgcttgagtaactgtgaatacaggaacatagtcatttaatagcaaagctagagccctgtcccccaaggccagcttactgcctcccctccccctcacgcctggcatcccacctggatgtatgcatggttggtcggatgaaactcctccccaacaggattaggacactcgccctcacagcgataggcgttgtactgcttggggtagatgatccaggagccccatccgatcaggttgaagtccacctggaacttgaccttccgacacagttgacttctgtctggcaagtgatgtcgacggtgcctcttgccccactcccaggacagctgtccctcctgggcccgccaggagctctcggcttcccacagcaaggtggacccacccagctgcctctgctcctgcgagaggttggagtagagcataaggagcacattggtggcaggcggtgtggggggccgcggccagcactctccagctaccctggacatctgcttctccagggccccagggcgcttcagccacttggagagaggcctggtcacctccaaaaccatgctgcccaaggaaaaggtgacctgggacaaagtgacagtgaataggtccatctgaaaccgctctaagcagctgtctgaagcctgctctgtgtcgggctttggctggtggaaaatctcaatggcaagtgagccctcagtggggaggtccacagggctggacagctgcagccggagctcagcccatgccagatcctcttgttggctcaggaaggagaagtcaaaagcaaacgtccagttctgcccatccactgccacatctgggtaggagaaaaccaagaaggaaggagggtgagtgagggcctcccccagcctcagtcagtgtcacaaccaccatagctcttgctggaggccttaccttatatagaattaccttcgaattctcaccccaactctatgagttggtaagattttcgagtcccttttagagatgaggaaaactgaggctcagtgtggttaaaagatctgaccaaggtgtcattcttggaaggtggcagagccaagagtaaacctggatttgcccaactgccaagcccagactccgaattactgttcttccagtcccccttccaagataacttgcacagccagaggacagtcagtaaaaatgtgatgagttgcatctccccctcccctgtctcctcccatacatgaagtctggccagcatggagaaaccctgtctctactaaaaatacaaaattggctgggcgtggtggtttgcgcctgtaatcccagccactcgagaatcatttgaacccgggaggcagaggttgcagtgagccgggacagtgccattgcactccagcctgcacaacaagagtgaaactgtctc

SEQ ID NO: 280752 - DNA, 2225 bp, Homo sapiens
gtgagcgcctgagagtctttttgcctttcagagttaaggcctcactggcctgggaaaataattgctgccttttgcatccgcgttggctccgtccccaggatcttcccggttcagggacctggcgatttctgagtgttccggaatcccaataaccctgtttaaagaggaatggagattgccactgtccatttagattaatgaggtgtcctgaagtgatggtgacatcaatgaaaggagggttctgacacgttctcacctcgcgggatggcagctgctgatttgtcccatggacattatctttctggggacccagtttgccttcatgaagaaaagacaccagcaggaagaatagtggctgactgcctaacagattgttatcaggattcagtgacctttgacgatgtggctgtggacttcacccaggaggagtggactttactggactcaactcagagaagcctctacagtgacgtgatgctggagaactacaagaacctggccacagtaggaggtcagatcatcaaacccagtctaatctcttggttggaacaagaagagtcaaggacagttcagggaggagttctccaaggaaggaaaacacaatggaagggaactctgtgactgtgagcaatgtggagaagtcttcagtgaacactcatgccttaagacgcacgtgagaactcaaagtacagggaacactcatgactgtaatcagtatggaaaagatttccttaccctgtgtgagaaaacctctactggtgagaaactttctgagtttaatcagagtgaaaaaatcttcagcctgacaccaaatattgtataccagagaactagcacacaagaaaagtcatttgaatgtagtcactgtggaaaatccttcattaatgagtcataccttcaggcacatatgagaactcacaatggagaaaaactctacgaatggaggaattatgggccaggttttattgactctacaagcctttctgtgcttatagaaaccctcaatgcaaaaaagccctacaaatgtaaggaatgtggaaaaggctatagatacccagcctacctcagtattcacatgcgaacccacactggggagaaaccatatgaatgtaaggaatgtgggaaagccttcaattattccaactcatttcagatacatggaagaactcacactggagagaaaccctatgtatgtaaggaatgtgggaaagccttcactcagtactcgggccttagtatgcatgtacgatctcacagtggagacaagccctatgaatgtaaggaatgtgggaaatccttccttacatcctcacgccttattcaacatataagaactcacactggagagaagcctttgtatgtgttgaatgtgggaaagcctttgcagtttcctcaaatcttagtggacatttgagaactcacactgaagagaaggcctgtgagtgtaagatatgtgggaaagtatttgggtatccctcatgtcttaataatcacatgcgaacgcacagtgcccagaaaccatacacctgtaaggaatgtgggaaggcttttaactattccacccaccttaaaattcacatgcgaatccacactggagaaaaaccctatgagtgtaaacaatgtggaaaggccttcagtcattccagttcatttcaaatacatgaaaggactcacactggagagaaaccctatgaatgcaaggagtgtgggaaagccttcacgtgttccagttcctttagaattcatgaaaaaactcacacagaagagaaaccctataaatgtcagcaatgcgggaaagcttacagtcatccccgttcacttcgaagacatgaacaaattcactagtgagaaactgtccatgtaataaatgtgggaaagctctcatttgttccagttcactttaaagacatgaatgaactcactctggagagaagaagctgcatgaaaattacttaattcctgtaatcccagcattttgagaggctgaggtgggtggatcacttgaggtcaggagtttgagaccaccctggccaacatggtgaaaccttgtctctactgaaaatacaaaaaatttagccaggtgtggtgggcacctgtaatcccagctacttgggaggctgaggcaagtgaatcacttgaacccaggaagcagaggttgcagtgagcagagatcatgccactgcactccagcctgggcgatggagtgagactccatctcaaaaaaa

SEQ ID NO: 280753 - DNA, 1996 bp, Homo sapiens
gtgagcgcctgagagtctttttgcctttcagagttaaggcctcactggcctgggaaaataattgctgccttttgcatccgcgttggctccgtccccaggatcttcccggttcagggacctggcgatttctgagtgttccggaatcccaataaccctgtttaaagaggaatggagattgccactgtccatttagattaatgaggtgtcctgaagtgatggtgacatcaatgaaaggagggttctgacacgttctcacctcgcgggatggcagctgctgatttgtcccatggacattatctttctggggacccagtttgccttcatgaagaaaagacaccagcaggaagaatagtggctgactgcctaacagattgttatcaggattcagtgacctttgacgatgtggctgtggacttcacccaggaggagtggactttactggactcaactcagagaagcctctacagtgacgtgatgctggagaactacaagaacctggccacagtaggaggtcagatcatcaaacccagtctaatctcttggttggaacaagaagagtcaaggacagttcagggaggagttctccaaggatgggaaatgcgacttgaaacccagtggtctatacttcagcaggactttttgaggggtcagacatccattgggatacaattggaaggaaaacacaatggaagggaactctgtgactgtgagcaatgtggagaagtcttcagtgaacactcatgccttaagacgcacgtgagaactcaaagtacagggaacactcatgactgtaatcagtatggaaaagatttccttaccctgtgtgagaaaacctctactggtgagaaactttctgagtttaatcagagtgaaaaaatcttcagcctgacaccaaatattgtataccagagaactagcacacaagaaaagtcatttgaatgtagtcactgtggaaaatccttcattaatgagtcataccttcaggcacatatgagaactcacaatggagaaaaactctacgaatggaggaattatgggccaggttttattgactctacaagcctttctgtgcttatagaaaccctcaatgcaaaaaagccctacaaatgtaaggaatgtggaaaaggctatagatacccagcctacctcagtattcacatgcgaacccacactggggagaaaccatatgaatgtaaggaatgtgggaaagccttcaattattccaactcatttcagatacatggaagaactcacactggagagaaaccctatgtatgtaaggaatgtgggaaagccttcactcagtactcgggccttagtatgcatgtacgatctcacagtggagacaagccctatgaatgtaaggaatgtgggaaatccttccttacatcctcacgccttattcaacatataagaactcacactggagagaagcctttgtatgtgttgaatgtgggaaagcctttgcagtttcctcaaatcttagtggacatttgagaactcacactgaagagaaggcctgtgagtgtaagatatgtgggaaagtatttgggtatccctcatgtcttaataatcacatgcgaacgcacagtgcccagaaaccatacacctgtaaggaatgtgggaaggcttttaactattccacccaccttaaaattcacatgcgaatccacactggagaaaaaccctatgagtgtaaacaatgtggaaaggccttcagtcattccagttcatttcaaatacatgaaaggactcacactggagagaaaccctatgaatgcaaggagtgtgggaaagccttcacgtgttccagttcctttagaattcatgaaaaaactcacacagaagagaaaccctataaatgtcagcaatgcgggaaagcttacagtcatccccgttcacttcgaagacatgaacaaattcactagtgagttttcatgtccacccttatattatgtggctacgctctcatttacatccagcgcccgtttataac

SEQ ID NO: 280754 - DNA, 2308 bp, Homo sapiens
gtgagcgcctgagagtctttttgcctttcagagttaaggcctcactggcctgggaaaataattgctgccttttgcatccgcgttggctccgtccccaggatcttcccggttcagggacctggcgatttctgagtgttccggaatcccaataaccctgtttaaagaggaatggagattgccactgtccatttagattaatgaggtgtcctgaagtgatggtgacatcaatgaaaggagggttctgacacgttctcacctcgcgggatggcagctgctgatttgtcccatggacattatctttctggggacccagtttgccttcatgaagaaaagacaccagcaggaagaatagtggctgactgcctaacagattgttatcaggattcagtgacctttgacgatgtggctgtggacttcacccaggaggagtggactttactggactcaactcagagaagcctctacagtgacgtgatgctggagaactacaagaacctggccacagtaggaggtcagatcatcaaacccagtctaatctcttggttggaacaagaagagtcaaggacagttcagggaggagttctccaaggatgggaaatgcgacttgaaacccagtggtctatacttcagcaggactttttgaggggtcagacatccattgggatacaattggaaggaaaacacaatggaagggaactctgtgactgtgagcaatgtggagaagtcttcagtgaacactcatgccttaagacgcacgtgagaactcaaagtacagggaacactcatgactgtaatcagtatggaaaagatttccttaccctgtgtgagaaaacctctactggtgagaaactttctgagtttaatcagagtgaaaaaatcttcagcctgacaccaaatattgtataccagagaactagcacacaagaaaagtcatttgaatgtagtcactgtggaaaatccttcattaatgagtcataccttcaggcacatatgagaactcacaatggagaaaaactctacgaatggaggaattatgggccaggttttattgactctacaagcctttctgtgcttatagaaaccctcaatgcaaaaaagccctacaaatgtaaggaatgtggaaaaggctatagatacccagcctacctcagtattcacatgcgaacccacactggggagaaaccatatgaatgtaaggaatgtgggaaagccttcaattattccaactcatttcagatacatggaagaactcacactggagagaaaccctatgtatgtaaggaatgtgggaaagccttcactcagtactcgggccttagtatgcatgtacgatctcacagtggagacaagccctatgaatgtaaggaatgtgggaaatccttccttacatcctcacgccttattcaacatataagaactcacactggagagaagcctttgtatgtgttgaatgtgggaaagcctttgcagtttcctcaaatcttagtggacatttgagaactcacactgaagagaaggcctgtgagtgtaagatatgtgggaaagtatttgggtatccctcatgtcttaataatcacatgcgaacgcacagtgcccagaaaccatacacctgtaaggaatgtgggaaggcttttaactattccacccaccttaaaattcacatgcgaatccacactggagaaaaaccctatgagtgtaaacaatgtggaaaggccttcagtcattccagttcatttcaaatacatgaaaggactcacactggagagaaaccctatgaatgcaaggagtgtgggaaagccttcacgtgttccagttcctttagaattcatgaaaaaactcacacagaagagaaaccctataaatgtcagcaatgcgggaaagcttacagtcatccccgttcacttcgaagacatgaacaaattcactagtgagaaactgtccatgtaataaatgtgggaaagctctcatttgttccagttcactttaaagacatgaatgaactcactctggagagaagaagctgcatgaaaattacttaattcctgtaatcccagcattttgagaggctgaggtgggtggatcacttgaggtcaggagtttgagaccaccctggccaacatggtgaaaccttgtctctactgaaaatacaaaaaatttagccaggtgtggtgggcacctgtaatcccagctacttgggaggctgaggcaagtgaatcacttgaacccaggaagcagaggttgcagtgagcagagatcatgccactgcactccagcctgggcgatggagtgagactccatctcaaaaaaa

SEQ ID NO: 280755 - DNA, 1176 bp, Homo sapiens
gtgagcgcctgagagtctttttgcctttcagagttaaggcctcactggcctgggaaaataattgctgccttttgcatccgcgttggctccgtccccaggatcttcccggttcagggacctggcgatttctgagtgttccggaatcccaataaccctgtttaaagaggaatggagattgccactgtccatttagattaatgaggtgtcctgaagtgatggtgacatcaatgaaaggagggttctgacacgttctcacctcgcgggatggcagctgctgatttgtcccatggacattatctttctggggacccagtttgccttcatgaagaaaagacaccagcaggaagaatagtggctgactgcctaacagattgttatcaggattcagtgacctttgacgatgtggctgtggacttcacccaggaggagtggactttactggactcaactcagagaagcctctacagtgacgtgatgctggagaactacaagaacctggccacagtaggaggtcagatcatcaaacccagtctaatctcttggttggaacaagaagagtcaaggacagttcagggaggagttctccaaggatgggaaatgcgacttgaaacccagtggtctatacttcagcaggactttttgaggggtcagacatccattgggatacaattggaaggaaaacacaatggaagggaactctgtgactgtgagcaatgtggagaagtcttcagtgaacactcatgccttaagacgcacgtgagaactcaaagtacagggaacactcatgactgtaatcagtatggaaaagatttccttaccctgtgtgagaaaacctctactggtgagaaactttctgagtttaatcagagtgaaaaaatcttcagcctgacaccaaatattgtataccagagaactagcacacaagaaaagtcatttgaatgtagtcactgtggaaaatccttcattaatgagtcataccttcaggcacatatgagaactcacaatggagaaaaactctacgaatggaggaattatgggccaggttttattgactctacaagcctttctgtgcttatagaaaccctcaatgcaaaaaagccctacaaatgtaaggaataaatggccaggcacggtggctcatgcctctaatcccagcactttgggaggctgaggcag

SEQ ID NO: 280756 - DNA, 791 bp, Homo sapiens
atgcaaggacagaacagaaccctgggcctgcaggcaggtggctggtgggtatcccgcctcccacccccagcaaacactggcaaaccccactctccctgcatcagggtctgagtgcctggcaggggcggcagtggagatgatcaaggtagaacacctgaaggagaagctcattagccaggcccaggaagtgagccgactgcgatctgagctggggggcaccgacttggagaagcaccgggacctgctgatggtggagaatgagcgactgaggcaggagatgcggcgctgtgaggccgagctgcaagagctgcgcacaaagccagcaggtccctgcccaggttgtgagcacagccaggagagcgcccagctccgtgacaagctgtcccagctgcagctggagatggcggaaagcaaaggcatgctgtcagagctgaacctagaggtgcagcagaagaccgaccggctggctgaggtggagctgcgactcaaggactgcctggctgagaaggcacaggaggaggagcggctcagtcggcgcctgcgtgacagccacgagaccattgccagcctgcgggcccagtccccacctgtcaagtatgtcatcaagacagtggaggtggagtcgtccaagaccaagcaggccctcagcgagtcccaggcccggaaccagcacctgcaggagcaggtggctatgcagaggcaggtgctgaaggagatggaacagcagctgcagagctcacaccagctgaccgcgcggctccgggcgcaggtacccaggctgtgtgggggca

SEQ ID NO: 280757 - DNA, 771 bp, Homo sapiens
  misc_feature (538)..(538): n is a, c, g, or t
agcggattctattctggcatgtgccatgtgccagctgggcagctgtaggaagtcacttcctctctgagccttcacttcccagtctctaaactggggctcacaaatgtcgcattgcagtttgggggtggatcttttgtaagaatggacagaaaaaagatggtcaactgtaatgtgtggtgcatcgtgagctgtcactcccgtgtgccctggtctcctgctggcctcactgtggtttgactcagacttggactttcctggaattctgaactttgcctctctaagcaaagcccgccagggggtacactctgccttgttttccatggtgccgtgtttccagccctatccaccactggcttctgatcggctgctttttcacactgctgttcctgcaaggctgtgtggccccatggttaagggtgagggttctgcaagggtcagccagatgcgagttccggtcctaggtccaccacttactggtcaggtgacctcaaaagacatgctttgtgtctcctcctccttctgccaggattgtaagttncctgaggcctccccagccatgtggaactaactcttttcatcttctgctactgaaatttgggcctcattaaagagtaactcctcattcgccatctgtctccgtgggtttgactgctcatgtacttactgaacacctactgtgtaccaggcactgttccaggcactgggagtacagtgctgaacacaacagacaaaaatccctgccttcgcatatatcatctcgtttaatcctcg

SEQ ID NO: 280758 - DNA, 3023 bp, Homo sapiens
atgcaaggacagaacagaaccctgggcctgcaggcaggtggctggtgggtatcccgcctcccacccccagcaaacactggcaaaccccactctccctgcatcagggtctgagtgcctggcaggggcggcagtggagatgatcaaggtagaacacctgaaggagaagctcattagccaggcccaggaagtgagccgactgcgatctgagctggggggcaccgacttggagaagcaccgggacctgctgatggtggagaatgagcgactgaggcaggagatgcggcgctgtgaggccgagctgcaagagctgcgcacaaagccagcaggtccctgcccaggttgtgagcacagccaggagagcgcccagctccgtgacaagctgtcccagctgcagctggagatggcggaaagcaaaggcatgctgtcagagctgaacctagaggtgcagcagaagaccgaccggctggctgaggtggagctgcgactcaaggactgcctggctgagaaggcacaggaggaggagcggctcagtcggcgcctgcgtgacagccacgagaccattgccagcctgcgggcccagtccccacctgtcaagtatgtcatcaagacagtggaggtggagtcgtccaagaccaagcaggccctcagcgagtcccaggcccggaaccagcacctgcaggagcaggtggctatgcagaggcaggtgctgaaggagatggaacagcagctgcagagctcacaccagctgaccgcgcggctccgggcgcagattgccatgtacgagtcagagctggagcgggcccatgggcagatgctggaggagatgcagtccctggaagaggacaagaaccgggccattgaggaggcctttgccagagcccaggtggagatgaaggctgtgcacgagaatctagcaggcgtccggaccaacttgctgaccttgcagccggcactgcggaccctcaccaacgactacaatgggctcaagcggcaggtgcgcggcttcccactgctgctgcaggaggccctcaggagtgtcaaggccgagataggccaggccatcgaggaggtcaacagcaacaaccaggagctgctgcgcaagtaccgccgcgagctgcagctgcgtaagaagtgccacaatgagctcgtgcggctgaaagggaacatccgagtgattgctcgtgtccggccagtcaccaaagaggatggggaaggacctgaggccaccaatgctgtgactttcgatgccgacgacgactccatcatccacctgctgcacaagggcaagcctgtgtccttcgagctggacaaggtcttctccccacaggcctcgcagcaggacgtgttccaggaggtgcaggccctggtcacctcttgcattgatggcttcaatgtctgcatctttgcgtacggccagacgggcgccggcaagacgtacacgatggaggggaccgctgagaacccaggtatcaaccagcgggccctgcagctgctcttctccgaggtgcaggagaaggcgtctgactgggagtacaccatcaccgtcagcgctgcggagatctacaatgaggtcctcagggacctgctagggaaagagcctcaggaaaaactggagatccggctgtgcccagacggcagtgggcagctgtatgtaccagggctgactgagttccaagtgcagagcgtggacgacatcaacaaggtgtttgagtttggccacactaatcgcacgaccgagttcaccaacctgaacgagcacagctcccgctcgcacgcgctgctcatcgtgacggtgcgaggcgtggactgcagcacaggcctccgcaccacggggaagctgaacctggtggacttggctggctcggagcgcgtgggcaagtcgggggccgagggcagccgcctgcgggaggcgcagcacatcaacaagtcgctgtcggctctgggggacgtcattgctgccctgcgctcccgccaggccacgtgcccttccgcaactccaagctcacctacctgctgcaggattcgcttagtggtgacagcaagaccctcatggtggtacaggtgtcccccgtggagaagaacactagcgagacgctctattccctcaagtttgctgagagggtgcgctctgtggagctggggcctgggctacgcagggcagagcttgggtcctggtcaagccaggagcatctagagtgggagccggcttgtcagacgccacagccctcggcacgggcccactcagcccccagctctgggaccagtagccgccctggatccatccggaggaagctgcagccctcggcctgacggctggggctgcagagtctctagggaagtcgcggccactgcctgtgtgacggatgtgaccccgctgggcctgaagctgggccctcactggcctgtccctgctgcagcgccaggacccccggaggtagaggcgagagtggaggctcttcttctgccccgtctcccctcaaagatgagaaacatgttcagaaggaaacggtgtctctcggctgtggctctgagtgcaaattgcatgggcggaaaggcgggggtggctgctcttcctggcaggcctgggccatcagcgaactgggccccgtgaggagggcgggagtgtggaggagggtgggcctctcacccaggctttctcggcccctctcctcagcttgcagagctggccagccccctccttagggggtgggcgaggagcctctgggcagacccaagaaccatggggactggggtgggttggtggcaccaatggcagccctccccgcccctctccttcaaggagggttcccgcagctggggggtgtgcggaggcgcatggcctcccgccacggggccgtgctgtgtttatggctggcagaggcagccagcgggtgggggattctgctgctcgctcacctgcctggctcgctggtctctcgaattttcttccctctgaaatcctatttaagaacttttggaagcttagccatttttacttattaaaataaaagaagcctttttac

SEQ ID NO: 280759 - DNA, 2994 bp, Homo sapiens
atgcaaggacagaacagaaccctgggcctgcaggcaggtggctggtgggtatcccgcctcccacccccagcaaacactggcaaaccccactctccctgcatcagggtctgagtgcctggcaggggcggcagtggagatgatcaaggtagaacacctgaaggagaagctcattagccaggcccaggaagtgagccgactgcgatctgagctggggggcaccgacttggagaagcaccgggacctgctgatggtggagaatgagcgactgaggcaggagatgcggcgctgtgaggccgagctgcaagagctgcgcacaaagccagcaggtccctgcccaggttgtgagcacagccaggagagcgcccagctccgtgacaagctgtcccagctgcagctggagatggcggaaagcaaaggcatgctgtcagagctgaacctagaggtgcagcagaagaccgaccggctggctgaggtggagctgcgactcaaggactgcctggctgagaaggcacaggaggaggagcggctcagtcggcgcctgcgtgacagccacgagaccattgccagcctgcgggcccagtccccacctgtcaagtatgtcatcaagacagtggaggtggagtcgtccaagaccaagcaggccctcagcgagtcccaggcccggaaccagcacctgcaggagcaggtggctatgcagaggcaggtgctgaaggagatggaacagcagctgcagagctcacaccagctgaccgcgcggctccgggcgcagattgccatgtacgagtcagagctggagcgggcccatgggcagatgctggaggagatgcagtccctggaagaggacaagaaccgggccattgaggaggcctttgccagagcccaggtggagatgaaggctgtgcacgagaatctagcaggcgtccggaccaacttgctgaccttgcagccggcactgcggaccctcaccaacgactacaatgggctcaagcggcaggtgcgcggcttcccactgctgctgcaggaggccctcaggagtgtcaaggccgagataggccaggccatcgaggaggtcaacagcaacaaccaggagctgctgcgcaagtaccgccgcgagctgcagctgcgtaagaagtgccacaatgagctcgtgcggctgaaagggaacatccgagtgattgctcgtgtccggccagtcaccaaagaggatggggaaggacctgaggccaccaatgctgtgactttcgatgccgacgacgactccatcatccacctgctgcacaagggcaagcctgtgtccttcgagctggacaaggtcttctccccacaggcctcgcagcaggacgtgttccaggaggtgcaggccctggtcacctcttgcattgatggcttcaatgtctgcatctttgcgtacggccagacgggcgccggcaagacgtacacgatggaggggaccgctgagaacccaggtatcaaccagcgggccctgcagctgctcttctccgaggtgcaggagaaggcgtctgactgggagtacaccatcaccgtcagcgctgcggagatctacaatgaggtcctcagggacctgctagggaaagagcctcaggaaaaactggagatccggctgtgcccagacggcagtgggcagctgtatgtaccagggctgactgagttccaagtgcagagcgtggacgacatcaacaaggtgtttgagtttggccacactaatcgcacgaccgagttcaccaacctgaacgagcacagctcccgctcgcacgcgctgctcatcgtgacggtgcgaggcgtggactgcagcacaggcctccgcaccacggggaagctgaacctggtggacttggctggctcggagcgcgtgggcaagtcgggggccgagggcagccgcctgcgggaggcgcagcacatcaacaagtcgctgtcggctctgggggacgtcattgctgccctgcgctcccgccaggccacgtgcccttccgcaactccaagctcacctacctgctgcaggattcgcttagtggtgacagcaagaccctcatggtggtacaggtgtcccccgtggagaagaacactagcgagacgctctattccctcaagtttgctgagagggtgcgctctgtggagctggggcctgggctacgcagggcagagcttgggtcctggtcaagccaggagcatctagagtgggagccggcttgtcagacgccacagccctcggcacgggcccactcagcccccagctctgggaccagtagccgccctggatccatccggaggaagctgcagccctcggggaagtcgcggccactgcctgtgtgacggatgtgaccccgctgggcctgaagctgggccctcactggcctgtccctgctgcagcgccaggacccccggaggtagaggcgagagtggaggctcttcttctgccccgtctcccctcaaagatgagaaacatgttcagaaggaaacggtgtctctcggctgtggctctgagtgcaaattgcatgggcggaaaggcgggggtggctgctcttcctggcaggcctgggccatcagcgaactgggccccgtgaggagggcgggagtgtggaggagggtgggcctctcacccaggctttctcggcccctctcctcagcttgcagagctggccagccccctccttagggggtgggcgaggagcctctgggcagacccaagaaccatggggactggggtgggttggtggcaccaatggcagccctccccgcccctctccttcaaggagggttcccgcagctggggggtgtgcggaggcgcatggcctcccgccacggggccgtgctgtgtttatggctggcagaggcagccagcgggtgggggattctgctgctcgctcacctgcctggctcgctggtctctcgaattttcttccctctgaaatcctatttaagaacttttggaagcttagccatttttacttattaaaataaaagaagcctttttac

SEQ ID NO: 280760 - DNA, 3498 bp, Homo sapiens
aggctctaggtgccccagtagcagggccttctgcagcaaggccgggaactgctgcaccattggctgcctggtgccccgaggaggctgctgagccccaggccatggtcccctctcgcaggacgtggaacctgggagccacgccctcgctgcggggcctgtggagagtgggccgggccccggagcccgagccggggatggctcgccccgccccaggccccagccagcccggccgcccgccctttcccacacaccggcccggggaggttgagaactgggcgtggaaaagataccccagtctgcggtgacgaggactccagtgcccgaagtgcagctcgcccagccctagctcagtgccgagcccttagcgtggactgggctggccccggaagcccccacgggctctacctgaccctgcaggtgggcgtctctttggcagcaggaggtgctcgagcttgtcggggccaccaggtgcggcccccatggtgcttaggatggtggaggccatgtcccagctccaggacgagaagacccagctacaggaggagctggtggtcctacaggagaggctggccctccgcgacagtgaccagcaggccacgtccacccagctgcagaaccaggtagaacacctgaaggagaagctcattagccaggcccaggaagtgagccgactgcgatctgagctggggggcaccgacttggagaagcaccgggacctgctgatggtggagaatgagcgactgaggcaggagatgcggcgctgtgaggccgagctgcaagagctgcgcacaaagccagcaggtccctgcccaggttgtgagcacagccaggagagcgcccagctccgtgacaagctgtcccagctgcagctggagatggcggaaagcaaaggcatgctgtcagagctgaacctagaggtgcagcagaagaccgaccggctggctgaggtggagctgcgactcaaggactgcctggctgagaaggcacaggaggaggagcggctcagtcggcgcctgcgtgacagccacgagaccattgccagcctgcgggcccagtccccacctgtcaagtatgtcatcaagacagtggaggtggagtcgtccaagaccaagcaggccctcagcgagtcccaggcccggaaccagcacctgcaggagcaggtggctatgcagaggcaggtgctgaaggagatggaacagcagctgcagagctcacaccagctgaccgcgcggctccgggcgcagattgccatgtacgagtcagagctggagcgggcccatgggcagatgctggaggagatgcagtccctggaagaggacaagaaccgggccattgaggaggcctttgccagagcccaggtggagatgaaggctgtgcacgagaatctagcaggcgtccggaccaacttgctgaccttgcagccggcactgcggaccctcaccaacgactacaatgggctcaagcggcaggtgcgcggcttcccactgctgctgcaggaggccctcaggagtgtcaaggccgagataggccaggccatcgaggaggtcaacagcaacaaccaggagctgctgcgcaagtaccgccgcgagctgcagctgcgtaagaagtgccacaatgagctcgtgcggctgaaagggaacatccgagtgattgctcgtgtccggccagtcaccaaagaggatggggaaggacctgaggccaccaatgctgtgactttcgatgccgacgacgactccatcatccacctgctgcacaagggcaagcctgtgtccttcgagctggacaaggtcttctccccacaggcctcgcagcaggacgtgttccaggaggtgcaggccctggtcacctcttgcattgatggcttcaatgtctgcatctttgcgtacggccagacgggcgccggcaagacgtacacgatggaggggaccgctgagaacccaggtatcaaccagcgggccctgcagctgctcttctccgaggtgcaggagaaggcgtctgactgggagtacaccatcaccgtcagcgctgcggagatctacaatgaggtcctcagggacctgctagggaaagagcctcaggaaaaactggagatccggctgtgcccagacggcagtgggcagctgtatgtaccagggctgactgagttccaagtgcagagcgtggacgacatcaacaaggtgtttgagtttggccacactaatcgcacgaccgagttcaccaacctgaacgagcacagctcccgctcgcacgcgctgctcatcgtgacggtgcgaggcgtggactgcagcacaggcctccgcaccacggggaagctgaacctggtggacttggctggctcggagcgcgtgggcaagtcgggggccgagggcagccgcctgcgggaggcgcagcacatcaacaagtcgctgtcggctctgggggacgtcattgctgccctgcgctcccgccaggccacgtgcccttccgcaactccaagctcacctacctgctgcaggattcgcttagtggtgacagcaagaccctcatggtggtacaggtgtcccccgtggagaagaacactagcgagacgctctattccctcaagtttgctgagagggtgcgctctgtggagctggggcctgggctacgcagggcagagcttgggtcctggtcaagccaggagcatctagagtgggagccggcttgtcagacgccacagccctcggcacgggcccactcagcccccagctctgggaccagtagccgccctggatccatccggaggaagctgcagccctcggcctgacggctggggctgcagagtctctagggaagtcgcggccactgcctgtgtgacggatgtgaccccgctgggcctgaagctgggccctcactggcctgtccctgctgcagcgccaggacccccggaggtagaggcgagagtggaggctcttcttctgccccgtctcccctcaaagatgagaaacatgttcagaaggaaacggtgtctctcggctgtggctctgagtgcaaattgcatgggcggaaaggcgggggtggctgctcttcctggcaggcctgggccatcagcgaactgggccccgtgaggagggcgggagtgtggaggagggtgggcctctcacccaggctttctcggcccctctcctcagcttgcagagctggccagccccctccttagggggtgggcgaggagcctctgggcagacccaagaaccatggggactggggtgggttggtggcaccaatggcagccctccccgcccctctccttcaaggagggttcccgcagctggggggtgtgcggaggcgcatggcctcccgccacggggccgtgctgtgtttatggctggcagaggcagccagcgggtgggggattctgctgctcgctcacctgcctggctcgctggtctctcgaattttcttccctctgaaatcctatttaagaacttttggaagcttagccatttttacttattaaaataaaagaagcctttttac

SEQ ID NO: 280761 - DNA, 3377 bp, Homo sapiens
ggcccgagttaatcatttcctgtggaaagtgtgcgggaggggcgcgagcgggctggccgaggaggaggcggcggcgtggagctgcctcctgccggcgggccgggccgggccgagccccgggcgctgcggcgacgcctggatcctgcctccgccaggccgataccagagatgagactgaggtttctcaccggttcctaagcccagtcagagctgtcagggcgtggaaaagataccccagtctgcggtgacgaggactccagtgcccgaagtgcagctcgcccagccctagctcagtgccgagcccttagcgtggactgggctggccccggaagcccccacgggctctacctgaccctgcagcaggccctgcaggacaaggggtgcaagagccagagtcaggggacgaaagaagagaagctttggaagagacaggcgccggcccccaggcgggcccgggaggcccgggaagctggtggcaccatgaatgtagagaatacaggtagaacacctgaaggagaagctcattagccaggcccaggaagtgagccgactgcgatctgagctggggggcaccgacttggagaagcaccgggacctgctgatggtggagaatgagcgactgaggcaggagatgcggcgctgtgaggccgagctgcaagagctgcgcacaaagccagcaggtccctgcccaggttgtgagcacagccaggagagcgcccagctccgtgacaagctgtcccagctgcagctggagatggcggaaagcaaaggcatgctgtcagagctgaacctagaggtgcagcagaagaccgaccggctggctgaggtggagctgcgactcaaggactgcctggctgagaaggcacaggaggaggagcggctcagtcggcgcctgcgtgacagccacgagaccattgccagcctgcgggcccagtccccacctgtcaagtatgtcatcaagacagtggaggtggagtcgtccaagaccaagcaggccctcagcgagtcccaggcccggaaccagcacctgcaggagcaggtggctatgcagaggcaggtgctgaaggagatggaacagcagctgcagagctcacaccagctgaccgcgcggctccgggcgcagattgccatgtacgagtcagagctggagcgggcccatgggcagatgctggaggagatgcagtccctggaagaggacaagaaccgggccattgaggaggcctttgccagagcccaggtggagatgaaggctgtgcacgagaatctagcaggcgtccggaccaacttgctgaccttgcagccggcactgcggaccctcaccaacgactacaatgggctcaagcggcaggtgcgcggcttcccactgctgctgcaggaggccctcaggagtgtcaaggccgagataggccaggccatcgaggaggtcaacagcaacaaccaggagctgctgcgcaagtaccgccgcgagctgcagctgcgtaagaagtgccacaatgagctcgtgcggctgaaagggaacatccgagtgattgctcgtgtccggccagtcaccaaagaggatggggaaggacctgaggccaccaatgctgtgactttcgatgccgacgacgactccatcatccacctgctgcacaagggcaagcctgtgtccttcgagctggacaaggtcttctccccacaggcctcgcagcaggacgtgttccaggaggtgcaggccctggtcacctcttgcattgatggcttcaatgtctgcatctttgcgtacggccagacgggcgccggcaagacgtacacgatggaggggaccgctgagaacccaggtatcaaccagcgggccctgcagctgctcttctccgaggtgcaggagaaggcgtctgactgggagtacaccatcaccgtcagcgctgcggagatctacaatgaggtcctcagggacctgctagggaaagagcctcaggaaaaactggagatccggctgtgcccagacggcagtgggcagctgtatgtaccagggctgactgagttccaagtgcagagcgtggacgacatcaacaaggtgtttgagtttggccacactaatcgcacgaccgagttcaccaacctgaacgagcacagctcccgctcgcacgcgctgctcatcgtgacggtgcgaggcgtggactgcagcacaggcctccgcaccacggggaagctgaacctggtggacttggctggctcggagcgcgtgggcaagtcgggggccgagggcagccgcctgcgggaggcgcagcacatcaacaagtcgctgtcggctctgggggacgtcattgctgccctgcgctcccgccaggccacgtgcccttccgcaactccaagctcacctacctgctgcaggattcgcttagtggtgacagcaagaccctcatggtggtacaggtgtcccccgtggagaagaacactagcgagacgctctattccctcaagtttgctgagagggtgcgctctgtggagctggggcctgggctacgcagggcagagcttgggtcctggtcaagccaggagcatctagagtgggagccggcttgtcagacgccacagccctcggcacgggcccactcagcccccagctctgggaccagtagccgccctggatccatccggaggaagctgcagccctcggcctgacggctggggctgcagagtctctagggaagtcgcggccactgcctgtgtgacggatgtgaccccgctgggcctgaagctgggccctcactggcctgtccctgctgcagcgccaggacccccggaggtagaggcgagagtggaggctcttcttctgccccgtctcccctcaaagatgagaaacatgttcagaaggaaacggtgtctctcggctgtggctctgagtgcaaattgcatgggcggaaaggcgggggtggctgctcttcctggcaggcctgggccatcagcgaactgggccccgtgaggagggcgggagtgtggaggagggtgggcctctcacccaggctttctcggcccctctcctcagcttgcagagctggccagccccctccttagggggtgggcgaggagcctctgggcagacccaagaaccatggggactggggtgggttggtggcaccaatggcagccctccccgcccctctccttcaaggagggttcccgcagctggggggtgtgcggaggcgcatggcctcccgccacggggccgtgctgtgtttatggctggcagaggcagccagcgggtgggggattctgctgctcgctcacctgcctggctcgctggtctctcgaattttcttccctctgaaatcctatttaagaacttttggaagcttagccatttttacttattaaaataaaagaagcctttttac

SEQ ID NO: 280762 - DNA, 3636 bp, Homo sapiens
aggctctaggtgccccagtagcagggccttctgcagcaaggccgggaactgctgcaccattggctgcctggtgccccgaggaggctgctgagccccaggccatggtcccctctcgcaggacgtggaacctgggagccacgccctcgctgcggggcctgtggagagtgggccgggccccggagcccgagccggggatggctcgccccgccccaggccccagccagcccggccgcccgccctttcccacacaccggcccggggaggttgagaactgggcgtggaaaagataccccagtctgcggtgacgaggactccagtgcccgaagtgcagctcgcccagccctagctcagtgccgagcccttagcgtggactgggctggccccggaagcccccacgggctctacctgaccctgcagagacagggtttcaccatgctggccatgctgctctcgaagtcctaacctcaggtgatccaaccgcctcagcctctcaaagtgctgggattacaggtgtgagccactgcgcccagcaggaatattcctaaatataagagggtgggcgtctctttggcagcaggaggtgctcgagcttgtcggggccaccaggtgcggcccccatggtgcttaggatggtggaggccatgtcccagctccaggacgagaagacccagctacaggaggagctggtggtcctacaggagaggctggccctccgcgacagtgaccagcaggccacgtccacccagctgcagaaccaggtagaacacctgaaggagaagctcattagccaggcccaggaagtgagccgactgcgatctgagctggggggcaccgacttggagaagcaccgggacctgctgatggtggagaatgagcgactgaggcaggagatgcggcgctgtgaggccgagctgcaagagctgcgcacaaagccagcaggtccctgcccaggttgtgagcacagccaggagagcgcccagctccgtgacaagctgtcccagctgcagctggagatggcggaaagcaaaggcatgctgtcagagctgaacctagaggtgcagcagaagaccgaccggctggctgaggtggagctgcgactcaaggactgcctggctgagaaggcacaggaggaggagcggctcagtcggcgcctgcgtgacagccacgagaccattgccagcctgcgggcccagtccccacctgtcaagtatgtcatcaagacagtggaggtggagtcgtccaagaccaagcaggccctcagcgagtcccaggcccggaaccagcacctgcaggagcaggtggctatgcagaggcaggtgctgaaggagatggaacagcagctgcagagctcacaccagctgaccgcgcggctccgggcgcagattgccatgtacgagtcagagctggagcgggcccatgggcagatgctggaggagatgcagtccctggaagaggacaagaaccgggccattgaggaggcctttgccagagcccaggtggagatgaaggctgtgcacgagaatctagcaggcgtccggaccaacttgctgaccttgcagccggcactgcggaccctcaccaacgactacaatgggctcaagcggcaggtgcgcggcttcccactgctgctgcaggaggccctcaggagtgtcaaggccgagataggccaggccatcgaggaggtcaacagcaacaaccaggagctgctgcgcaagtaccgccgcgagctgcagctgcgtaagaagtgccacaatgagctcgtgcggctgaaagggaacatccgagtgattgctcgtgtccggccagtcaccaaagaggatggggaaggacctgaggccaccaatgctgtgactttcgatgccgacgacgactccatcatccacctgctgcacaagggcaagcctgtgtccttcgagctggacaaggtcttctccccacaggcctcgcagcaggacgtgttccaggaggtgcaggccctggtcacctcttgcattgatggcttcaatgtctgcatctttgcgtacggccagacgggcgccggcaagacgtacacgatggaggggaccgctgagaacccaggtatcaaccagcgggccctgcagctgctcttctccgaggtgcaggagaaggcgtctgactgggagtacaccatcaccgtcagcgctgcggagatctacaatgaggtcctcagggacctgctagggaaagagcctcaggaaaaactggagatccggctgtgcccagacggcagtgggcagctgtatgtaccagggctgactgagttccaagtgcagagcgtggacgacatcaacaaggtgtttgagtttggccacactaatcgcacgaccgagttcaccaacctgaacgagcacagctcccgctcgcacgcgctgctcatcgtgacggtgcgaggcgtggactgcagcacaggcctccgcaccacggggaagctgaacctggtggacttggctggctcggagcgcgtgggcaagtcgggggccgagggcagccgcctgcgggaggcgcagcacatcaacaagtcgctgtcggctctgggggacgtcattgctgccctgcgctcccgccaggccacgtgcccttccgcaactccaagctcacctacctgctgcaggattcgcttagtggtgacagcaagaccctcatggtggtacaggtgtcccccgtggagaagaacactagcgagacgctctattccctcaagtttgctgagagggtgcgctctgtggagctggggcctgggctacgcagggcagagcttgggtcctggtcaagccaggagcatctagagtgggagccggcttgtcagacgccacagccctcggcacgggcccactcagcccccagctctgggaccagtagccgccctggatccatccggaggaagctgcagccctcggcctgacggctggggctgcagagtctctagggaagtcgcggccactgcctgtgtgacggatgtgaccccgctgggcctgaagctgggccctcactggcctgtccctgctgcagcgccaggacccccggaggtagaggcgagagtggaggctcttcttctgccccgtctcccctcaaagatgagaaacatgttcagaaggaaacggtgtctctcggctgtggctctgagtgcaaattgcatgggcggaaaggcgggggtggctgctcttcctggcaggcctgggccatcagcgaactgggccccgtgaggagggcgggagtgtggaggagggtgggcctctcacccaggctttctcggcccctctcctcagcttgcagagctggccagccccctccttagggggtgggcgaggagcctctgggcagacccaagaaccatggggactggggtgggttggtggcaccaatggcagccctccccgcccctctccttcaaggagggttcccgcagctggggggtgtgcggaggcgcatggcctcccgccacggggccgtgctgtgtttatggctggcagaggcagccagcgggtgggggattctgctgctcgctcacctgcctggctcgctggtctctcgaattttcttccctctgaaatcctatttaagaacttttggaagcttagccatttttacttattaaaataaaagaagcctttttac

SEQ ID NO: 280763 - DNA, 2609 bp, Homo sapiens
ctctagaggacccccgcacgttcgggaggtgcagcagaagaccgaccggctggctgaggtggagctgcgactcaaggactgcctggctgagaaggcacaggaggaggagcggctcagtcggcgcctgcgtgacagccacgagaccattgccagcctgcgggcccagtccccacctgtcaagtatgtcatcaagacagtggaggtggagtcgtccaagaccaagcaggccctcagcgagtcccaggcccggaaccagcacctgcaggagcaggtggctatgcagaggcaggtgctgaaggagatggaacagcagctgcagagctcacaccagctgaccgcgcggctccgggcgcagattgccatgtacgagtcagagctggagcgggcccatgggcagatgctggaggagatgcagtccctggaagaggacaagaaccgggccattgaggaggcctttgccagagcccaggtggagatgaaggctgtgcacgagaatctagcaggcgtccggaccaacttgctgaccttgcagccggcactgcggaccctcaccaacgactacaatgggctcaagcggcaggtgcgcggcttcccactgctgctgcaggaggccctcaggagtgtcaaggccgagataggccaggccatcgaggaggtcaacagcaacaaccaggagctgctgcgcaagtaccgccgcgagctgcagctgcgtaagaagtgccacaatgagctcgtgcggctgaaagggaacatccgagtgattgctcgtgtccggccagtcaccaaagaggatggggaaggacctgaggccaccaatgctgtgactttcgatgccgacgacgactccatcatccacctgctgcacaagggcaagcctgtgtccttcgagctggacaaggtcttctccccacaggcctcgcagcaggacgtgttccaggaggtgcaggccctggtcacctcttgcattgatggcttcaatgtctgcatctttgcgtacggccagacgggcgccggcaagacgtacacgatggaggggaccgctgagaacccaggtatcaaccagcgggccctgcagctgctcttctccgaggtgcaggagaaggcgtctgactgggagtacaccatcaccgtcagcgctgcggagatctacaatgaggtcctcagggacctgctagggaaagagcctcaggaaaaactggagatccggctgtgcccagacggcagtgggcagctgtatgtaccagggctgactgagttccaagtgcagagcgtggacgacatcaacaaggtgtttgagtttggccacactaatcgcacgaccgagttcaccaacctgaacgagcacagctcccgctcgcacgcgctgctcatcgtgacggtgcgaggcgtggactgcagcacaggcctccgcaccacggggaagctgaacctggtggacttggctggctcggagcgcgtgggcaagtcgggggccgagggcagccgcctgcgggaggcgcagcacatcaacaagtcgctgtcggctctgggggacgtcattgctgccctgcgctcccgccaggccacgtgcccttccgcaactccaagctcacctacctgctgcaggattcgcttagtggtgacagcaagaccctcatggtggtacaggtgtcccccgtggagaagaacactagcgagacgctctattccctcaagtttgctgagagggtgcgctctgtggagctggggcctgggctacgcagggcagagcttgggtcctggtcaagccaggagcatctagagtgggagccggcttgtcagacgccacagccctcggcacgggcccactcagcccccagctctgggaccagtagccgccctggatccatccggaggaagctgcagccctcggcctgacggctggggctgcagagtctctagggaagtcgcggccactgcctgtgtgacggatgtgaccccgctgggcctgaagctgggccctcactggcctgtccctgctgcagcgccaggacccccggaggtagaggcgagagtggaggctcttcttctgccccgtctcccctcaaagatgagaaacatgttcagaaggaaacggtgtctctcggctgtggctctgagtgcaaattgcatgggcggaaaggcgggggtggctgctcttcctggcaggcctgggccatcagcgaactgggccccgtgaggagggcgggagtgtggaggagggtgggcctctcacccaggctttctcggcccctctcctcagcttgcagagctggccagccccctccttagggggtgggcgaggagcctctgggcagacccaagaaccatggggactggggtgggttggtggcaccaatggcagccctccccgcccctctccttcaaggagggttcccgcagctggggggtgtgcggaggcgcatggcctcccgccacggggccgtgctgtgtttatggctggcagaggcagccagcgggtgggggattctgctgctcgctcacctgcctggctcgctggtctctcgaattttcttccctctgaaatcctatttaagaacttttggaagcttagccatttttacttattaaaataaaagaagcctttttac

SEQ ID NO: 280764 - DNA, 1828 bp, Homo sapiens
agcggattgtgagctgagtgactgcagtaacacgtgatgtggtgttgctgaaggacagcatggttggggaggtggctggacttgtagctggtggtcccagcggccctggaagcccccccaccagcctccctcccaccaccctcccaggtgttccaggaggtgcaggccctggtcacctcttgcattgatggcttcaatgtctgcatctttgcgtacggccagacgggcgccggcaagacgtacacgatggaggggaccgctgagaacccaggtatcaaccagcgggccctgcagctgctcttctccgaggtgcaggagaaggcgtctgactgggagtacaccatcaccgtcagcgctgcggagatctacaatgaggtcctcagggacctgctagggaaagagcctcaggaaaaactggagatccggctgtgcccagacggcagtgggcagctgtatgtaccagggctgactgagttccaagtgcagagcgtggacgacatcaacaaggtgtttgagtttggccacactaatcgcacgaccgagttcaccaacctgaacgagcacagctcccgctcgcacgcgctgctcatcgtgacggtgcgaggcgtggactgcagcacaggcctccgcaccacggggaagctgaacctggtggacttggctggctcggagcgcgtgggcaagtcgggggccgagggcagccgcctgcgggaggcgcagcacatcaacaagtcgctgtcggctctgggggacgtcattgctgccctgcgctcccgccaggccacgtgcccttccgcaactccaagctcacctacctgctgcaggattcgcttagtggtgacagcaagaccctcatggtggtacaggtgtcccccgtggagaagaacactagcgagacgctctattccctcaagtttgctgagagggtgcgctctgtggagctggggcctgggctacgcagggcagagcttgggtcctggtcaagccaggagcatctagagtgggagccggcttgtcagacgccacagccctcggcacgggcccactcagcccccagctctgggaccagtagccgccctggatccatccggaggaagctgcagccctcggcctgacggctggggctgcagagtctctagggaagtcgcggccactgcctgtgtgacggatgtgaccccgctgggcctgaagctgggccctcactggcctgtccctgctgcagcgccaggacccccggaggtagaggcgagagtggaggctcttcttctgccccgtctcccctcaaagatgagaaacatgttcagaaggaaacggtgtctctcggctgtggctctgagtgcaaattgcatgggcggaaaggcgggggtggctgctcttcctggcaggcctgggccatcagcgaactgggccccgtgaggagggcgggagtgtggaggagggtgggcctctcacccaggctttctcggcccctctcctcagcttgcagagctggccagccccctccttagggggtgggcgaggagcctctgggcagacccaagaaccatggggactggggtgggttggtggcaccaatggcagccctccccgcccctctccttcaaggagggttcccgcagctggggggtgtgcggaggcgcatggcctcccgccacggggccgtgctgtgtttatggctggcagaggcagccagcgggtgggggattctgctgctcgctcacctgcctggctcgctggtctctcgaattttcttccctctgaaatcctatttaagaacttttggaagcttagccatttttacttattaaaataaaagaagcctttttac

SEQ ID NO: 280765 - DNA, 1124 bp, Homo sapiens
  misc_feature (922)..(922): n is a, c, g, or t
  misc_feature (929)..(929): n is a, c, g, or t
atgcaaggacagaacagaaccctgggcctgcaggcaggtggctggtgggtatcccgcctcccacccccagcaaacactggcaaaccccactctccctgcatcagggtctgagtgcctggcaggggcggcagtggagatgatcaaggtagaacacctgaaggagaagctcattagccaggcccaggaagtgagccgactgcgatctgagctggggggcaccgacttggagaagcaccgggacctgctgatggtggagaatgagcgactgaggcaggagatgcggcgctgtgaggccgagctgcaagagctgcgcacaaagccagcaggtccctgcccaggttgtgagcacagccaggagagcgcccagctccgtgacaagctgtcccagctgcagctggagatggcggaaagcaaaggcatgctgtcagagctgaacctagaggtgcagcagaagaccgaccggctggctgaggtggagctgcgactcaaggactgcctggctgagaaggcacaggaggaggagcggctcagtcggcgcctgcgtgacagccacgagaccattgccagcctgcgggcccagtccccacctgtcaagtatgtcatcaagacagtggaggtggagtcgtccaagaccaagcaggccctcagcgagtcccaggcccggaaccagcacctgcaggagcaggtggctatgcagaggcaggtgctgaaggagatggaacagcagctgcagagctcacaccagctgaccgcgcggctccgggcgcagattgccatgtacgagtcagagctggagcgggcccatgggcagatgctggaggagatgcagtccctggaagaggacaagaaccgggccattgaggaggcctttgccagagcccaggtggagatgaaggctgtgcacgagaatctagcagggtcnggacaanctgctgcccttgcagccgggaacgcagagcctcaacaaggatacaatgggcacaagggagatggacaggatccaatgagctagcaagaagacctagaaagtacagggcgcgatagcgaagacatgagaggaaaaggagcacagagataagagcaagtcaacacgaggacagaagagagccagagcgcgcgagacg

SEQ ID NO: 280766 - DNA, 1092 bp, Homo sapiens
aggctctaggtgccccagtagcagggccttctgcagcaaggccgggaactgctgcaccattggctgcctggtgccccgaggaggctgctgagccccaggccatggtcccctctcgcaggacgtggaacctgggagccacgccctcgctgcggggcctgtggagagtgggccgggccccggagcccgagccggggatggctcgccccgccccaggccccagccagcccggccgcccgccctttcccacacaccggcccggggaggttgagaactgggcgtggaaaagataccccagtctgcggtgacgaggactccagtgcccgaagtgcagctcgcccagccctagctcagtgccgagcccttagcgtggactgggctggccccggaagcccccacgggctctacctgaccctgcagagacagggtttcaccatgctggccatgctgctctcgaagtcctaacctcaggtgatccaaccgcctcagcctctcaaagtgctgggattacaggtgtgagccactgcgcccagcaggaatattcctaaatataagaggtgtgtctgccacccgcccttctcaagtggagctctgggtcgagagagggagggggtgaattttgggctaaggagcctgctgatgtcacttttcttgtcttttcaattatctgtattggctttttgattgtcaaagtaaaaaaatgtgaagattacaggaatcatgtcctgataatagctacctcatatcaagccctcactatgtgccaggcaccttctggggacttggctgcagttgtctgttactcttcacacaagctcaatgaggcggtcctgttattaccatttttattttaagaatgaggagaatgcagcttcaagaaggtaagcaacttgccgaccgtcacacagcttagccgaggaagagccaggcttcacacacgggccttgccgcctctagactacgtgtttattttttagactgagcacttttaaaagagtggcttattttttttgttttgaatttaaaggtcacaaagacacacagaaattgtttgctatctctcttccaagataacctctgttgatatgaaaaaaa

SEQ ID NO: 280767 - DNA, 986 bp, Homo sapiens
agcggattctattctggcatgtgccatgtgccagctgggcagctgtaggaagtcacttcctctctgagccttcacttcccagtctctaaactggggctcacaaatgtcgcattgcagtttgggggtggatcttttgtaagaatggacagaaaaaagatggtcaactgtaatgtgtggtgcatcgtgagctgtcactcccgtgtgccctggtctcctgctggcctcactgtggtttgactcagacttggactttcctggaattctgaactttgcctctctaagcaaagcccgccagggggtacactctgccttgttttccatggtgccgtgtttccagccctatccaccactggcttctgatcggctgctttttcacactgctgttcctgcaaggctgtgtggccccatggttaagggtgagggttctgcaagggtcagccagatgcgagttccggtcctaggtccaccacttactggtcaggtgacctcaagtaagttgcctaaccaaggcttaacctcttaggagctcagtttttcttcctgtaaaatggggataataatagtacctacctcaggggaataggggatgaggggctccattatcactgttgggacctgggcttgtgggagctcaggagtcttctcagacctcctcattgctgtgccaggtggaggaggtgtttgtatttactgagagcaattgggccaatggcccatagtccttgagcacccagctgacccaggccacagaggctgctcatcttggtctggtgaccacaggaggctgtggctgttgggatgaccctccccagtgttgttaacaacagtcccaggccatgtcctgctggccttgagttcccctgtcctcttgtgaatgtccctagagccatggcctcaaggttcctgaagttcccaataatgtgacatgctgcccagacctcactacattccagcctgggcaacagagcaagaccctgtctcaaaaa

SEQ ID NO: 280768 - DNA, 287 bp, Homo sapiens
ggcagagctccaccccagtcaactggtctgttcaagaagaaatgtactaagtgaattcatactatagtgtgaatgacggataacagctttgtgggcccccttcccctagggggctgtgcttaaaagtcaggggactcctaggtcaactagtctgcctgggacaccagtggaccagaatggagactggtcttgacatggcctggacccatttccccatccccaaccaatccagggaacatccgagtgattgctcgtgtccggccagtcaccaaagaggatggggaagg

SEQ ID NO: 280769 - DNA, 494 bp, Homo sapiens
tccctgcatcagggtctgagtgcctggcaggggcggcagtggagatgatcaaggttagtgcgcccagccccatgctgaggcagcagcctttctggggagggagggggcgtggaaggagacttcaaccttttgaagaggaagtcagttcacttatgtcagggtagggagagtaggaattacgtattctttgagactgaaaaattactggccgggcgcaggggctcacaacggtaatcccagcactttgggaggctgaggcgggaagactgcttgaggccaggaattcaaggccagcttgggcaaaatggcaagacccttctatacattaaaaaaaaaaaaaaaattagccgggcgtgatggtatgtgcttgtagtcccagctactcgggaggctgagatgggaggatggcttgagtccaggaggtctaggctgcagtgagcctagatcgaggcactgcactccagcctgggtgacagagtgagaccctgtctcaa

SEQ ID NO: 280770 - DNA, 755 bp, Homo sapiens
ggcccgagttaatcatttcctgtggaaagtgtgcgggaggggcgcgagcgggctggccgaggaggaggcggcggcgtggagctgcctcctgccggcgggccgggccgggccgagccccgggcgctgcggcgacgcctggatcctgcctccgccaggccggctgcctggtgccccgaggaggctgctgagccccaggccatggtcccctctcgcaggacgtggaacctgggagccacgccctcgctgcggggcctgtggagagtgggccgggccccggagcccgagccggggatggctcgccccgccccaggccccagccagcccggccgcccgccctttcccacacaccggcccggggaggttgagaactgggcgtggaaaagataccccagtctgcggtgacgaggactccagtgcccgaagtgcagctcgcccagccctagctcagtgccgagcccttagcgtggactgggctggccccggaagcccccacgggctctacctgaccctgcagagacagggtttcaccatgctggccatgctgctctcgaagtcctaacctcaggtgatccaaccgcctcagcctctcaaagtgctgggattacaggtgtgagccactgcgcccagcaggaatattcctaaatataagagggtagaacacctgaaggagaagctcattagccaggcccaggaagtgagccgactgcgatctgagctggtgaggccacaaggctgtcctggggtagcgcagggcc

SEQ ID NO: 280771 - DNA, 3392 bp, Homo sapiens
ggcccgagttaatcatttcctgtggaaagtgtgcgggaggggcgcgagcgggctggccgaggaggaggcggcggcgtggagctgcctcctgccggcgggccgggccgggccgagccccgggcgctgcggcgacgcctggatcctgcctccgccaggccggctgcctggtgccccgaggaggctgctgagccccaggccatggtcccctctcgcaggacgtggaacctgggagccacgccctcgctgcggggcctgtggagagtgggccgggccccggagcccgagccggggatggctcgccccgccccaggccccagccagcccggccgcccgccctttcccacacaccggcccggggaggttgagaactgggcgtggaaaagataccccagtctgcggtgacgaggactccagtgcccgaagtgcagctcgcccagccctagctcagtgccgagcccttagcgtggactgggctggccccggaagcccccacgggctctacctgaccctgcaggtagaacacctgaaggagaagctcattagccaggcccaggaagtgagccgactgcgatctgagctggggggcaccgacttggagaagcaccgggacctgctgatggtggagaatgagcgactgaggcaggagatgcggcgctgtgaggccgagctgcaagagctgcgcacaaagccagcaggtccctgcccaggttgtgagcacagccaggagagcgcccagctccgtgacaagctgtcccagctgcagctggagatggcggaaagcaaaggcatgctgtcagagctgaacctagaggtgcagcagaagaccgaccggctggctgaggtggagctgcgactcaaggactgcctggctgagaaggcacaggaggaggagcggctcagtcggcgcctgcgtgacagccacgagaccattgccagcctgcgggcccagtccccacctgtcaagtatgtcatcaagacagtggaggtggagtcgtccaagaccaagcaggccctcagcgagtcccaggcccggaaccagcacctgcaggagcaggtggctatgcagaggcaggtgctgaaggagatggaacagcagctgcagagctcacaccagctgaccgcgcggctccgggcgcagattgccatgtacgagtcagagctggagcgggcccatgggcagatgctggaggagatgcagtccctggaagaggacaagaaccgggccattgaggaggcctttgccagagcccaggtggagatgaaggctgtgcacgagaatctagcaggcgtccggaccaacttgctgaccttgcagccggcactgcggaccctcaccaacgactacaatgggctcaagcggcaggtgcgcggcttcccactgctgctgcaggaggccctcaggagtgtcaaggccgagataggccaggccatcgaggaggtcaacagcaacaaccaggagctgctgcgcaagtaccgccgcgagctgcagctgcgtaagaagtgccacaatgagctcgtgcggctgaaagggaacatccgagtgattgctcgtgtccggccagtcaccaaagaggatggggaaggacctgaggccaccaatgctgtgactttcgatgccgacgacgactccatcatccacctgctgcacaagggcaagcctgtgtccttcgagctggacaaggtcttctccccacaggcctcgcagcaggacgtgttccaggaggtgcaggccctggtcacctcttgcattgatggcttcaatgtctgcatctttgcgtacggccagacgggcgccggcaagacgtacacgatggaggggaccgctgagaacccaggtatcaaccagcgggccctgcagctgctcttctccgaggtgcaggagaaggcgtctgactgggagtacaccatcaccgtcagcgctgcggagatctacaatgaggtcctcagggacctgctagggaaagagcctcaggaaaaactggagatccggctgtgcccagacggcagtgggcagctgtatgtaccagggctgactgagttccaagtgcagagcgtggacgacatcaacaaggtgtttgagtttggccacactaatcgcacgaccgagttcaccaacctgaacgagcacagctcccgctcgcacgcgctgctcatcgtgacggtgcgaggcgtggactgcagcacaggcctccgcaccacggggaagctgaacctggtggacttggctggctcggagcgcgtgggcaagtcgggggccgagggcagccgcctgcgggaggcgcagcacatcaacaagtcgctgtcggctctgggggacgtcattgctgccctgcgctcccgccaggccacgtgcccttccgcaactccaagctcacctacctgctgcaggattcgcttagtggtgacagcaagaccctcatggtggtacaggtgtcccccgtggagaagaacactagcgagacgctctattccctcaagtttgctgagagggtgcgctctgtggagctggggcctgggctacgcagggcagagcttgggtcctggtcaagccaggagcatctagagtgggagccggcttgtcagacgccacagccctcggcacgggcccactcagcccccagctctgggaccagtagccgccctggatccatccggaggaagctgcagccctcggcctgacggctggggctgcagagtctctagggaagtcgcggccactgcctgtgtgacggatgtgaccccgctgggcctgaagctgggccctcactggcctgtccctgctgcagcgccaggacccccggaggtagaggcgagagtggaggctcttcttctgccccgtctcccctcaaagatgagaaacatgttcagaaggaaacggtgtctctcggctgtggctctgagtgcaaattgcatgggcggaaaggcgggggtggctgctcttcctggcaggcctgggccatcagcgaactgggccccgtgaggagggcgggagtgtggaggagggtgggcctctcacccaggctttctcggcccctctcctcagcttgcagagctggccagccccctccttagggggtgggcgaggagcctctgggcagacccaagaaccatggggactggggtgggttggtggcaccaatggcagccctccccgcccctctccttcaaggagggttcccgcagctggggggtgtgcggaggcgcatggcctcccgccacggggccgtgctgtgtttatggctggcagaggcagccagcgggtgggggattctgctgctcgctcacctgcctggctcgctggtctctcgaattttcttccctctgaaatcctatttaagaacttttggaagcttagccatttttacttattaaaataaaagaagcctttttac

SEQ ID NO: 280772 - DNA, 3459 bp, Homo sapiens
agcggattctattctggcatgtgccatgtgccagctgggcagctgtaggaagtcacttcctctctgagccttcacttcccagtctctaaactggggctcacaaatgtcgcattgcagtttgggggtggatcttttgtaagaatggacagaaaaaagatggtcaactgtaatgtgtggtgcatcgtgagctgtcactcccgtgtgccctggtctcctgctggcctcactgtggtttgactcagacttggactttcctggaattctgaactttgcctctctaagcaaagcccgccagggggtacactctgccttgttttccatggtgccgtgtttccagccctatccaccactggcttctgatcggctgctttttcacactgctgttcctgcaaggctgtgtggccccatggttaagggtgagggttctgcaagggtcagccagatgcgagttccggtcctaggtccaccacttactggtcaggtgacctcaaaactcttttcatcttctgctactgaaatttgggcctcattaaagagtaactcctcattcgccatctgtctccgtgggtttgactgctcatgtagaacacctgaaggagaagctcattagccaggcccaggaagtgagccgactgcgatctgagctggggggcaccgacttggagaagcaccgggacctgctgatggtggagaatgagcgactgaggcaggagatgcggcgctgtgaggccgagctgcaagagctgcgcacaaagccagcaggtccctgcccaggttgtgagcacagccaggagagcgcccagctccgtgacaagctgtcccagctgcagctggagatggcggaaagcaaaggcatgctgtcagagctgaacctagaggtgcagcagaagaccgaccggctggctgaggtggagctgcgactcaaggactgcctggctgagaaggcacaggaggaggagcggctcagtcggcgcctgcgtgacagccacgagaccattgccagcctgcgggcccagtccccacctgtcaagtatgtcatcaagacagtggaggtggagtcgtccaagaccaagcaggccctcagcgagtcccaggcccggaaccagcacctgcaggagcaggtggctatgcagaggcaggtgctgaaggagatggaacagcagctgcagagctcacaccagctgaccgcgcggctccgggcgcagattgccatgtacgagtcagagctggagcgggcccatgggcagatgctggaggagatgcagtccctggaagaggacaagaaccgggccattgaggaggcctttgccagagcccaggtggagatgaaggctgtgcacgagaatctagcaggcgtccggaccaacttgctgaccttgcagccggcactgcggaccctcaccaacgactacaatgggctcaagcggcaggtgcgcggcttcccactgctgctgcaggaggccctcaggagtgtcaaggccgagataggccaggccatcgaggaggtcaacagcaacaaccaggagctgctgcgcaagtaccgccgcgagctgcagctgcgtaagaagtgccacaatgagctcgtgcggctgaaagggaacatccgagtgattgctcgtgtccggccagtcaccaaagaggatggggaaggacctgaggccaccaatgctgtgactttcgatgccgacgacgactccatcatccacctgctgcacaagggcaagcctgtgtccttcgagctggacaaggtcttctccccacaggcctcgcagcaggacgtgttccaggaggtgcaggccctggtcacctcttgcattgatggcttcaatgtctgcatctttgcgtacggccagacgggcgccggcaagacgtacacgatggaggggaccgctgagaacccaggtatcaaccagcgggccctgcagctgctcttctccgaggtgcaggagaaggcgtctgactgggagtacaccatcaccgtcagcgctgcggagatctacaatgaggtcctcagggacctgctagggaaagagcctcaggaaaaactggagatccggctgtgcccagacggcagtgggcagctgtatgtaccagggctgactgagttccaagtgcagagcgtggacgacatcaacaaggtgtttgagtttggccacactaatcgcacgaccgagttcaccaacctgaacgagcacagctcccgctcgcacgcgctgctcatcgtgacggtgcgaggcgtggactgcagcacaggcctccgcaccacggggaagctgaacctggtggacttggctggctcggagcgcgtgggcaagtcgggggccgagggcagccgcctgcgggaggcgcagcacatcaacaagtcgctgtcggctctgggggacgtcattgctgccctgcgctcccgccaggccacgtgcccttccgcaactccaagctcacctacctgctgcaggattcgcttagtggtgacagcaagaccctcatggtggtacaggtgtcccccgtggagaagaacactagcgagacgctctattccctcaagtttgctgagagggtgcgctctgtggagctggggcctgggctacgcagggcagagcttgggtcctggtcaagccaggagcatctagagtgggagccggcttgtcagacgccacagccctcggcacgggcccactcagcccccagctctgggaccagtagccgccctggatccatccggaggaagctgcagccctcggcctgacggctggggctgcagagtctctagggaagtcgcggccactgcctgtgtgacggatgtgaccccgctgggcctgaagctgggccctcactggcctgtccctgctgcagcgccaggacccccggaggtagaggcgagagtggaggctcttcttctgccccgtctcccctcaaagatgagaaacatgttcagaaggaaacggtgtctctcggctgtggctctgagtgcaaattgcatgggcggaaaggcgggggtggctgctcttcctggcaggcctgggccatcagcgaactgggccccgtgaggagggcgggagtgtggaggagggtgggcctctcacccaggctttctcggcccctctcctcagcttgcagagctggccagccccctccttagggggtgggcgaggagcctctgggcagacccaagaaccatggggactggggtgggttggtggcaccaatggcagccctccccgcccctctccttcaaggagggttcccgcagctggggggtgtgcggaggcgcatggcctcccgccacggggccgtgctgtgtttatggctggcagaggcagccagcgggtgggggattctgctgctcgctcacctgcctggctcgctggtctctcgaattttcttccctctgaaatcctatttaagaacttttggaagcttagccatttttacttattaaaataaaagaagcctttttac

SEQ ID NO: 280773 - DNA, 3534 bp, Homo sapiens
  misc_feature (538)..(538): n is a, c, g, or t
agcggattctattctggcatgtgccatgtgccagctgggcagctgtaggaagtcacttcctctctgagccttcacttcccagtctctaaactggggctcacaaatgtcgcattgcagtttgggggtggatcttttgtaagaatggacagaaaaaagatggtcaactgtaatgtgtggtgcatcgtgagctgtcactcccgtgtgccctggtctcctgctggcctcactgtggtttgactcagacttggactttcctggaattctgaactttgcctctctaagcaaagcccgccagggggtacactctgccttgttttccatggtgccgtgtttccagccctatccaccactggcttctgatcggctgctttttcacactgctgttcctgcaaggctgtgtggccccatggttaagggtgagggttctgcaagggtcagccagatgcgagttccggtcctaggtccaccacttactggtcaggtgacctcaaaagacatgctttgtgtctcctcctccttctgccaggattgtaagttncctgaggcctccccagccatgtggaactaactcttttcatcttctgctactgaaatttgggcctcattaaagagtaactcctcattcgccatctgtctccgtgggtttgactgctcatgtagaacacctgaaggagaagctcattagccaggcccaggaagtgagccgactgcgatctgagctggggggcaccgacttggagaagcaccgggacctgctgatggtggagaatgagcgactgaggcaggagatgcggcgctgtgaggccgagctgcaagagctgcgcacaaagccagcaggtccctgcccaggttgtgagcacagccaggagagcgcccagctccgtgacaagctgtcccagctgcagctggagatggcggaaagcaaaggcatgctgtcagagctgaacctagaggtgcagcagaagaccgaccggctggctgaggtggagctgcgactcaaggactgcctggctgagaaggcacaggaggaggagcggctcagtcggcgcctgcgtgacagccacgagaccattgccagcctgcgggcccagtccccacctgtcaagtatgtcatcaagacagtggaggtggagtcgtccaagaccaagcaggccctcagcgagtcccaggcccggaaccagcacctgcaggagcaggtggctatgcagaggcaggtgctgaaggagatggaacagcagctgcagagctcacaccagctgaccgcgcggctccgggcgcagattgccatgtacgagtcagagctggagcgggcccatgggcagatgctggaggagatgcagtccctggaagaggacaagaaccgggccattgaggaggcctttgccagagcccaggtggagatgaaggctgtgcacgagaatctagcaggcgtccggaccaacttgctgaccttgcagccggcactgcggaccctcaccaacgactacaatgggctcaagcggcaggtgcgcggcttcccactgctgctgcaggaggccctcaggagtgtcaaggccgagataggccaggccatcgaggaggtcaacagcaacaaccaggagctgctgcgcaagtaccgccgcgagctgcagctgcgtaagaagtgccacaatgagctcgtgcggctgaaagggaacatccgagtgattgctcgtgtccggccagtcaccaaagaggatggggaaggacctgaggccaccaatgctgtgactttcgatgccgacgacgactccatcatccacctgctgcacaagggcaagcctgtgtccttcgagctggacaaggtcttctccccacaggcctcgcagcaggacgtgttccaggaggtgcaggccctggtcacctcttgcattgatggcttcaatgtctgcatctttgcgtacggccagacgggcgccggcaagacgtacacgatggaggggaccgctgagaacccaggtatcaaccagcgggccctgcagctgctcttctccgaggtgcaggagaaggcgtctgactgggagtacaccatcaccgtcagcgctgcggagatctacaatgaggtcctcagggacctgctagggaaagagcctcaggaaaaactggagatccggctgtgcccagacggcagtgggcagctgtatgtaccagggctgactgagttccaagtgcagagcgtggacgacatcaacaaggtgtttgagtttggccacactaatcgcacgaccgagttcaccaacctgaacgagcacagctcccgctcgcacgcgctgctcatcgtgacggtgcgaggcgtggactgcagcacaggcctccgcaccacggggaagctgaacctggtggacttggctggctcggagcgcgtgggcaagtcgggggccgagggcagccgcctgcgggaggcgcagcacatcaacaagtcgctgtcggctctgggggacgtcattgctgccctgcgctcccgccaggccacgtgcccttccgcaactccaagctcacctacctgctgcaggattcgcttagtggtgacagcaagaccctcatggtggtacaggtgtcccccgtggagaagaacactagcgagacgctctattccctcaagtttgctgagagggtgcgctctgtggagctggggcctgggctacgcagggcagagcttgggtcctggtcaagccaggagcatctagagtgggagccggcttgtcagacgccacagccctcggcacgggcccactcagcccccagctctgggaccagtagccgccctggatccatccggaggaagctgcagccctcggcctgacggctggggctgcagagtctctagggaagtcgcggccactgcctgtgtgacggatgtgaccccgctgggcctgaagctgggccctcactggcctgtccctgctgcagcgccaggacccccggaggtagaggcgagagtggaggctcttcttctgccccgtctcccctcaaagatgagaaacatgttcagaaggaaacggtgtctctcggctgtggctctgagtgcaaattgcatgggcggaaaggcgggggtggctgctcttcctggcaggcctgggccatcagcgaactgggccccgtgaggagggcgggagtgtggaggagggtgggcctctcacccaggctttctcggcccctctcctcagcttgcagagctggccagccccctccttagggggtgggcgaggagcctctgggcagacccaagaaccatggggactggggtgggttggtggcaccaatggcagccctccccgcccctctccttcaaggagggttcccgcagctggggggtgtgcggaggcgcatggcctcccgccacggggccgtgctgtgtttatggctggcagaggcagccagcgggtgggggattctgctgctcgctcacctgcctggctcgctggtctctcgaattttcttccctctgaaatcctatttaagaacttttggaagcttagccatttttacttattaaaataaaagaagcctttttac

SEQ ID NO: 280774 - DNA, 3411 bp, Homo sapiens
cagtgtgagtgcatgtgcgccagcgcgtgcaaggacacggctgcctggtgccccgaggaggctgctgagccccaggccatggtcccctctcgcaggacgtggaacctgggagccacgccctcgctgcggggcctgtggagagtgggccgggccccggagcccgagccggggatggctcgccccgccccaggccccagccagcccggccgcccgccctttcccacacaccggcccggggaggttgagaactgggcgtggaaaagataccccagtctgcggtgacgaggactccagtgcccgaagtgcagctcgcccagccctagctcagtgccgagcccttagcgtggactgggctggccccggaagcccccacgggctctacctgaccctgcagcaggccctgcaggacaaggggtgcaagagccagagtcaggggacgaaagaagagaagctttggaagagacaggcgccggcccccaggcgggcccgggaggcccgggaagctggtggcaccatgaatgtagagaatacaggtagaacacctgaaggagaagctcattagccaggcccaggaagtgagccgactgcgatctgagctggggggcaccgacttggagaagcaccgggacctgctgatggtggagaatgagcgactgaggcaggagatgcggcgctgtgaggccgagctgcaagagctgcgcacaaagccagcaggtccctgcccaggttgtgagcacagccaggagagcgcccagctccgtgacaagctgtcccagctgcagctggagatggcggaaagcaaaggcatgctgtcagagctgaacctagaggtgcagcagaagaccgaccggctggctgaggtggagctgcgactcaaggactgcctggctgagaaggcacaggaggaggagcggctcagtcggcgcctgcgtgacagccacgagaccattgccagcctgcgggcccagtccccacctgtcaagtatgtcatcaagacagtggaggtggagtcgtccaagaccaagcaggccctcagcgagtcccaggcccggaaccagcacctgcaggagcaggtggctatgcagaggcaggtgctgaaggagatggaacagcagctgcagagctcacaccagctgaccgcgcggctccgggcgcagattgccatgtacgagtcagagctggagcgggcccatgggcagatgctggaggagatgcagtccctggaagaggacaagaaccgggccattgaggaggcctttgccagagcccaggtggagatgaaggctgtgcacgagaatctagcaggcgtccggaccaacttgctgaccttgcagccggcactgcggaccctcaccaacgactacaatgggctcaagcggcaggtgcgcggcttcccactgctgctgcaggaggccctcaggagtgtcaaggccgagataggccaggccatcgaggaggtcaacagcaacaaccaggagctgctgcgcaagtaccgccgcgagctgcagctgcgtaagaagtgccacaatgagctcgtgcggctgaaagggaacatccgagtgattgctcgtgtccggccagtcaccaaagaggatggggaaggacctgaggccaccaatgctgtgactttcgatgccgacgacgactccatcatccacctgctgcacaagggcaagcctgtgtccttcgagctggacaaggtcttctccccacaggcctcgcagcaggacgtgttccaggaggtgcaggccctggtcacctcttgcattgatggcttcaatgtctgcatctttgcgtacggccagacgggcgccggcaagacgtacacgatggaggggaccgctgagaacccaggtatcaaccagcgggccctgcagctgctcttctccgaggtgcaggagaaggcgtctgactgggagtacaccatcaccgtcagcgctgcggagatctacaatgaggtcctcagggacctgctagggaaagagcctcaggaaaaactggagatccggctgtgcccagacggcagtgggcagctgtatgtaccagggctgactgagttccaagtgcagagcgtggacgacatcaacaaggtgtttgagtttggccacactaatcgcacgaccgagttcaccaacctgaacgagcacagctcccgctcgcacgcgctgctcatcgtgacggtgcgaggcgtggactgcagcacaggcctccgcaccacggggaagctgaacctggtggacttggctggctcggagcgcgtgggcaagtcgggggccgagggcagccgcctgcgggaggcgcagcacatcaacaagtcgctgtcggctctgggggacgtcattgctgccctgcgctcccgccaggccacgtgcccttccgcaactccaagctcacctacctgctgcaggattcgcttagtggtgacagcaagaccctcatggtggtacaggtgtcccccgtggagaagaacactagcgagacgctctattccctcaagtttgctgagagggtgcgctctgtggagctggggcctgggctacgcagggcagagcttgggtcctggtcaagccaggagcatctagagtgggagccggcttgtcagacgccacagccctcggcacgggcccactcagcccccagctctgggaccagtagccgccctggatccatccggaggaagctgcagccctcggcctgacggctggggctgcagagtctctagggaagtcgcggccactgcctgtgtgacggatgtgaccccgctgggcctgaagctgggccctcactggcctgtccctgctgcagcgccaggacccccggaggtagaggcgagagtggaggctcttcttctgccccgtctcccctcaaagatgagaaacatgttcagaaggaaacggtgtctctcggctgtggctctgagtgcaaattgcatgggcggaaaggcgggggtggctgctcttcctggcaggcctgggccatcagcgaactgggccccgtgaggagggcgggagtgtggaggagggtgggcctctcacccaggctttctcggcccctctcctcagcttgcagagctggccagccccctccttagggggtgggcgaggagcctctgggcagacccaagaaccatggggactggggtgggttggtggcaccaatggcagccctccccgcccctctccttcaaggagggttcccgcagctggggggtgtgcggaggcgcatggcctcccgccacggggccgtgctgtgtttatggctggcagaggcagccagcgggtgggggattctgctgctcgctcacctgcctggctcgctggtctctcgaattttcttccctctgaaatcctatttaagaacttttggaagcttagccatttttacttattaaaataaaagaagcctttttac

SEQ ID NO: 280775 - DNA, 1114 bp, Homo sapiens
gtgctgaggtaatctagaggatcccgatggcgggcgtccgtcattgctgccctgcgctcccgccaggccacgtgcccttccgcaactccaagctcacctacctgctgcaggattcgcttagtggtgacagcaagaccctcatggtggtacaggtgtcccccgtggagaagaacactagcgagacgctctattccctcaagtttgctgagagggtgcgctctgtggagctggggcctgggctacgcagggcagagcttgggtcctggtcaagccaggagcatctagagtgggagccggcttgtcagacgccacagccctcggcacgggcccactcagcccccagctctgggaccagtagccgccctggatccatccggaggaagctgcagccctcggcctgacggctggggctgcagagtctctagggaagtcgcggccactgcctgtgtgacggatgtgaccccgctgggcctgaagctgggccctcactggcctgtccctgctgcagcgccaggacccccggaggtagaggcgagagtggaggctcttcttctgccccgtctcccctcaaagatgagaaacatgttcagaaggaaacggtgtctctcggctgtggctctgagtgcaaattgcatgggcggaaaggcgggggtggctgctcttcctggcaggcctgggccatcagcgaactgggccccgtgaggagggcgggagtgtggaggagggtgggcctctcacccaggctttctcggcccctctcctcagcttgcagagctggccagccccctccttagggggtgggcgaggagcctctgggcagacccaagaaccatggggactggggtgggttggtggcaccaatggcagccctccccgcccctctccttcaaggagggttcccgcagctggggggtgtgcggaggcgcatggcctcccgccacggggccgtgctgtgtttatggctggcagaggcagccagcgggtgggggattctgctgctcgctcacctgcctggctcgctggtctctcgaattttcttccctctgaaatcctatttaagaacttttggaagcttagccatttttacttattaaaataaaagaagcctttttac

SEQ ID NO: 280776 - DNA, 1493 bp, Homo sapiens
  misc_feature (1291)..(1291): n is a, c, g, or t
  misc_feature (1298)..(1298): n is a, c, g, or t
ggcccgagttaatcatttcctgtggaaagtgtgcgggaggggcgcgagcgggctggccgaggaggaggcggcggcgtggagctgcctcctgccggcgggccgggccgggccgagccccgggcgctgcggcgacgcctggatcctgcctccgccaggccggctgcctggtgccccgaggaggctgctgagccccaggccatggtcccctctcgcaggacgtggaacctgggagccacgccctcgctgcggggcctgtggagagtgggccgggccccggagcccgagccggggatggctcgccccgccccaggccccagccagcccggccgcccgccctttcccacacaccggcccggggaggttgagaactgggcgtggaaaagataccccagtctgcggtgacgaggactccagtgcccgaagtgcagctcgcccagccctagctcagtgccgagcccttagcgtggactgggctggccccggaagcccccacgggctctacctgaccctgcaggtagaacacctgaaggagaagctcattagccaggcccaggaagtgagccgactgcgatctgagctggggggcaccgacttggagaagcaccgggacctgctgatggtggagaatgagcgactgaggcaggagatgcggcgctgtgaggccgagctgcaagagctgcgcacaaagccagcaggtccctgcccaggttgtgagcacagccaggagagcgcccagctccgtgacaagctgtcccagctgcagctggagatggcggaaagcaaaggcatgctgtcagagctgaacctagaggtgcagcagaagaccgaccggctggctgaggtggagctgcgactcaaggactgcctggctgagaaggcacaggaggaggagcggctcagtcggcgcctgcgtgacagccacgagaccattgccagcctgcgggcccagtccccacctgtcaagtatgtcatcaagacagtggaggtggagtcgtccaagaccaagcaggccctcagcgagtcccaggcccggaaccagcacctgcaggagcaggtggctatgcagaggcaggtgctgaaggagatggaacagcagctgcagagctcacaccagctgaccgcgcggctccgggcgcagattgccatgtacgagtcagagctggagcgggcccatgggcagatgctggaggagatgcagtccctggaagaggacaagaaccgggccattgaggaggcctttgccagagcccaggtggagatgaaggctgtgcacgagaatctagcagggtcnggacaanctgctgcccttgcagccgggaacgcagagcctcaacaaggatacaatgggcacaagggagatggacaggatccaatgagctagcaagaagacctagaaagtacagggcgcgatagcgaagacatgagaggaaaaggagcacagagataagagcaagtcaacacgaggacagaagagagccagagcgcgcgagacg

SEQ ID NO: 280777 - DNA, 694 bp, Homo sapiens
cagtgtgagtgcatgtgcgccagcgcgtgcaaggacacggctgcctggtgccccgaggaggctgctgagccccaggccatggtcccctctcgcaggacgtggaacctgggagccacgccctcgctgcggggcctgtggagagtgggccgggccccggagcccgagccggggatggctcgccccgccccaggccccagccagcccggccgcccgccctttcccacacaccggcccggggaggttgagaactgggcgtggaaaagataccccagtctgcggtgacgaggactccagtgcccgaagtgcagctcgcccagccctagctcagtgccgagcccttagcgtggactgggctggccccggaagcccccacgggctctacctgaccctgcagcaggccctgcaggacaaggggtgcaagagccagagtcaggggacgaaagaagagaagctttggaagagacaggcgccggcccccaggcgggcccgggaggcccgggaagctggtggcaccatgaatgtagagaatacaggtaaagcaggcctgcccgccaaaccggcactccccagtgaagccagcgcaggagggaggctcttgtgcagttggtatatccccatgccctgtcctgcccggctggaggtggcctagacagactccagctgcctgatccgcagctgcatcccccagcctgcc

SEQ ID NO: 280778 - DNA, 1324 bp, Homo sapiens
aaagaaaaaaaaaaggaggaggaggaggagggtgagagagaagctgggagagcagagaaaaggggccaccggtcgcccccccgcttccccgcacgcgctctccagccgcggccgcccgcctgccgcggtcaccccggcctctgcctctgtcccccagtgatcggatcaaggcgctgagcgaggccctgcctgcggggcggccatgcggcggtgacaggagcgcgaccgacacgcacgggcccctcgccccctctcgcctcccgtccgctcgccagctcccctcagccgaggctgctccgcggcggccgcagcccgcgcgcggcccacactcgcctcccctcggcacccccggccccggagctgcctggaggcggccgcactcggggatcatggcccaagttgcaatgtccaccctccccgttgaagatgaggagtcctcggagagcaggatggtggtgacattcctcatgtcagctctcgagtccatgtgtaaagaactggccaagtccaaagccgaagtggcctgcattgcagtgtatgaaacagacgtgtttgtcgtcggaactgaaagaggacgtgcttttgtcaataccagaaaggattttcaaaaagattttgtaaaatattgtgttgaagaagaagaaaaagctgcagagatgcataaaatgaaatctacaacccaggcaaatcggatgagtgtagatgctgtagaaattgaaacactcagaaaaacagttgaggactatttctgcttttgctatgggaaagctttaggcaaatccacagtggtacctgtaccatatgagaagatgctgcgagaccagtcggctgtggtagtgcaggggcttccggaaggtgttgcctttaaacaccccgagaactatgatcttgcaaccctgaaatggattttggagaacaaagcagggatttcattcatcattaagagaccttttttagagccaaagaagcatgtaggtggtcgtgtgatggtaacagatgctgacaggtcaatactatctccaggtggaagttgtggccccatcaaagtgaaaactgaacccacagaagattctggcatttccctggaaatggcagctgtgacagtaaaggaagaatcagaagatcctgattattatcaatataacattcaaggaagccaccattcttcagagggcaatgaaggcacagaaatggaagtaccagcagaaggttaggagaaaaagagattgcatattttccactatttgttgtatgtttattctattttatagattctattatccttaaaacaccttatttggaaataaaaggtgattcccttggt

SEQ ID NO: 280779 - DNA, 3263 bp, Homo sapiens
aaagaaaaaaaaaaggaggaggaggaggagggtgagagagaagctgggagagcagagaaaaggggccaccggtcgcccccccgcttccccgcacgcgctctccagccgcggccgcccgcctgccgcggtcaccccggcctctgcctctgtcccccagtgatcggatcaaggcgctgagcgaggccctgcctgcggggcggccatgcggcggtgacaggagcgcgaccgacacgcacgggcccctcgccccctctcgcctcccgtccgctcgccagctcccctcagccgaggctgctccgcggcggccgcagcccgcgcgcggcccacactcgcctcccctcggcacccccggccccggagctgcctggaggcggccgcactcggggatcatggcccaagttgcaatgtccaccctccccgttgaagatgaggagtcctcggagagcaggatggtggtgacattcctcatgtcagctctcgagtccatgtgtaaagaactggccaagtccaaagccgaagtggcctgcattgcagtgtatgaaacagacgtgtttgtcgtcggaactgaaagaggacgtgcttttgtcaataccagaaaggattttcaaaaagattttgtaaaatattgtgttgaagaagaagaaaaagctgcagagatgcataaaatgaaatctacaacccaggcaaatcggatgagtgtagatgctgtagaaattgaaacactcagaaaaacagttgaggactatttctgcttttgctatgggaaagctttaggcaaatccacagtggtacctgtaccatatgagaagatgctgcgagaccagtcggctgtggtagtgcaggggcttccggaaggtgttgcctttaaacaccccgagaactatgatcttgcaaccctgaaatggattttggagaacaaagcagggatttcattcatcattaagagaccttttttagagccaaagaagcatgtaggtggtcgtgtgatggtaacagatgctgacaggtcaatactatctccaggtggaagttgtggccccatcaaagtgaaaactgaacccacagaagattctggcatttccctggaaatggcagctgtgacagtaaaggaagaatcagaagatcctgattattatcaatataacattcaaggaagccaccattcttcagagggcaatgaaggcacagaaatggaagtaccagcagaagatgatgattattctccaccgtctaagagaccaaaggccaatgagctaccgcagccaccagtcccggaacccgccaatgctgggaagcggaaagtgagggagttcaacttcgagaaatggaatgctcgcatcactgatctacgtaaacaagttgaagaattgtttgaaaggaaatatgctcaagccataaaagccaaaggtccggtgacgatcccgtaccctcttttccagtctcatgttgaagatctttatgtagaaggacttcctgaaggaattccttttagaaggccatctacttacggaattcctcgcctggagaggatattacttgcaaaggaaaggattcgttttgtgattaagaaacatgagcttctgaattcaacacgtgaagatttacagcttgataagccagcttcaggagtaaaggaagaatggtatgccagaatcactaaattaagaaagatggtggatcagcttttctgcaaaaaatttgcggaagccttggggagcactgaagccaaggctgtaccgtaccaaaaatttgaggcacacccgaatgatctgtacgtggaaggactgccagaaaacattcctttccgaagtccctcatggtatggaatcccaaggctggaaaaaatcattcaagtgggcaatcgaattaaatttgttattaaaagaccagaacttctgactcacagtaccactgaagttactcagccaagaacgaatacaccagtcaaagaagattggaatgtcagaattaccaagctacggaagcaagtggaagagatttttaatttgaaatttgctcaagctcttggactcaccgaggcagtaaaagtaccatatcctgtgtttgaatcaaacccggagttcttgtatgtggaaggcttgccagaggggattcccttccgaagccctacctggtttggaattccacgacttgaaaggatcgtccgcgggagtaataaaatcaagttcgttgttaaaaaacctgaactagttatttcctacttgcctcctgggatggctagtaaaataaacactaaagctttgcagtcccccaaaagaccacgaagtcctgggagtaattcaaaggttcctgaaattgaggtcaccgtggaaggccctaataacaacaatcctcaaacctcagctgttcgaaccccgacccagactaacggttctaacgttcccttcaagccacgagggagagagttttcctttgaggcctggaatgccaaaatcacggacctaaaacagaaagttgaaaatctcttcaatgagaaatgtggggaagctcttggccttaaacaagctgtgaaggtgccgttcgcgttatttgagtctttcccggaagacttttatgtggaaggcttacctgagggtgtgccattccgaagaccatcgacttttggcattccgaggctggagaagatactcagaaacaaagccaaaattaagttcatcattaaaaagcccgaaatgtttgagacggcgattaaggagagcacctcctctaagagccctcccagaaaaataaattcatcacccaatgttaatactactgcatcaggtgttgaagaccttaacatcattcaggtgacaattccagatgatgataatgaaagactctcgaaagttgaaaaagctagacagctaagagaacaagtgaatgacctctttagtcggaaatttggtgaagctattggtatgggttttcctgtgaaagttccctacaggaaaatcacaattaaccctggctgtgtggtggttgatggcatgcccccgggggtgtccttcaaagcccccagctacctggaaatcagctccatgagaaggatcttagactctgccgagtttatcaaattcacggtcattagaccatttccaggacttgtgattaataaccagctggttgatcagagtgagtcagaaggccccgtgatacaagaatcagctgaaccaagccagttggaagttccagccacagaagaaataaaagagactgatggaagctctcagatcaagcaagaaccagaccccacgtggtag

SEQ ID NO: 280780 - DNA, 3385 bp, Homo sapiens
aaagaaaaaaaaaaggaggaggaggaggagggtgagagagaagctgggagagcagagaaaaggggccaccggtcgcccccccgcttccccgcacgcgctctccagccgcggccgcccgcctgccgcggtcaccccggcctctgcctctgtcccccagtgatcggatcaaggcgctgagcgaggccctgcctgcggggcggccatgcggcggtgacaggagcgcgaccgacacgcacgggcccctcgccccctctcgcctcccgtccgctcgccagctcccctcagccgaggctgctccgcggcggccgcagcccgcgcgcggcccacactcgcctcccctcggcacccccggccccggagctgcctggaggcggccgcactcggaaggagtctccctctgtcgcacaggctaaagtgcaatggcgcgatctcggctcactgcaactctcgcctcccaggttcaagcgattctcctgcctcagtctcctgagtagctgggattacagggatcatggcccaagttgcaatgtccaccctccccgttgaagatgaggagtcctcggagagcaggatggtggtgacattcctcatgtcagctctcgagtccatgtgtaaagaactggccaagtccaaagccgaagtggcctgcattgcagtgtatgaaacagacgtgtttgtcgtcggaactgaaagaggacgtgcttttgtcaataccagaaaggattttcaaaaagattttgtaaaatattgtgttgaagaagaagaaaaagctgcagagatgcataaaatgaaatctacaacccaggcaaatcggatgagtgtagatgctgtagaaattgaaacactcagaaaaacagttgaggactatttctgcttttgctatgggaaagctttaggcaaatccacagtggtacctgtaccatatgagaagatgctgcgagaccagtcggctgtggtagtgcaggggcttccggaaggtgttgcctttaaacaccccgagaactatgatcttgcaaccctgaaatggattttggagaacaaagcagggatttcattcatcattaagagaccttttttagagccaaagaagcatgtaggtggtcgtgtgatggtaacagatgctgacaggtcaatactatctccaggtggaagttgtggccccatcaaagtgaaaactgaacccacagaagattctggcatttccctggaaatggcagctgtgacagtaaaggaagaatcagaagatcctgattattatcaatataacattcaaggaagccaccattcttcagagggcaatgaaggcacagaaatggaagtaccagcagaagatgatgattattctccaccgtctaagagaccaaaggccaatgagctaccgcagccaccagtcccggaacccgccaatgctgggaagcggaaagtgagggagttcaacttcgagaaatggaatgctcgcatcactgatctacgtaaacaagttgaagaattgtttgaaaggaaatatgctcaagccataaaagccaaaggtccggtgacgatcccgtaccctcttttccagtctcatgttgaagatctttatgtagaaggacttcctgaaggaattccttttagaaggccatctacttacggaattcctcgcctggagaggatattacttgcaaaggaaaggattcgttttgtgattaagaaacatgagcttctgaattcaacacgtgaagatttacagcttgataagccagcttcaggagtaaaggaagaatggtatgccagaatcactaaattaagaaagatggtggatcagcttttctgcaaaaaatttgcggaagccttggggagcactgaagccaaggctgtaccgtaccaaaaatttgaggcacacccgaatgatctgtacgtggaaggactgccagaaaacattcctttccgaagtccctcatggtatggaatcccaaggctggaaaaaatcattcaagtgggcaatcgaattaaatttgttattaaaagaccagaacttctgactcacagtaccactgaagttactcagccaagaacgaatacaccagtcaaagaagattggaatgtcagaattaccaagctacggaagcaagtggaagagatttttaatttgaaatttgctcaagctcttggactcaccgaggcagtaaaagtaccatatcctgtgtttgaatcaaacccggagttcttgtatgtggaaggcttgccagaggggattcccttccgaagccctacctggtttggaattccacgacttgaaaggatcgtccgcgggagtaataaaatcaagttcgttgttaaaaaacctgaactagttatttcctacttgcctcctgggatggctagtaaaataaacactaaagctttgcagtcccccaaaagaccacgaagtcctgggagtaattcaaaggttcctgaaattgaggtcaccgtggaaggccctaataacaacaatcctcaaacctcagctgttcgaaccccgacccagactaacggttctaacgttcccttcaagccacgagggagagagttttcctttgaggcctggaatgccaaaatcacggacctaaaacagaaagttgaaaatctcttcaatgagaaatgtggggaagctcttggccttaaacaagctgtgaaggtgccgttcgcgttatttgagtctttcccggaagacttttatgtggaaggcttacctgagggtgtgccattccgaagaccatcgacttttggcattccgaggctggagaagatactcagaaacaaagccaaaattaagttcatcattaaaaagcccgaaatgtttgagacggcgattaaggagagcacctcctctaagagccctcccagaaaaataaattcatcacccaatgttaatactactgcatcaggtgttgaagaccttaacatcattcaggtgacaattccagatgatgataatgaaagactctcgaaagttgaaaaagctagacagctaagagaacaagtgaatgacctctttagtcggaaatttggtgaagctattggtatgggttttcctgtgaaagttccctacaggaaaatcacaattaaccctggctgtgtggtggttgatggcatgcccccgggggtgtccttcaaagcccccagctacctggaaatcagctccatgagaaggatcttagactctgccgagtttatcaaattcacggtcattagaccatttccaggacttgtgattaataaccagctggttgatcagagtgagtcagaaggccccgtgatacaagaatcagctgaaccaagccagttggaagttccagccacagaagaaataaaagagactgatggaagctctcagatcaagcaagaaccagaccccacgtggtag

SEQ ID NO: 280781 - DNA, 2217 bp, Homo sapiens
aaagaaaaaaaaaaggaggaggaggaggagggtgagagagaagctgggagagcagagaaaaggggccaccggtcgcccccccgcttccccgcacgcgctctccagccgcggccgcccgcctgccgcggtcaccccggcctctgcctctgtcccccagtgatcggatcaaggcgctgagcgaggccctgcctgcggggcggccatgcggcggtgacaggagcgcgaccgacacgcacgggcccctcgccccctctcgcctcccgtccgctcgccagctcccctcagccgaggctgctccgcggcggccgcagcccgcgcgcggcccacactcgcctcccctcggcacccccggccccggagctgcctggaggcggccgcactcggggatcatggcccaagttgcaatgtccaccctccccgttgaagatgaggagtcctcggagagcaggatggtggtgacattcctcatgtcagctctcgagtccatgtgtaaagaactggccaagtccaaagccgaagtggcctgcattgcagtgtatgaaacagacgtgtttgtcgtcggaactgaaagaggacgtgcttttgtcaataccagaaaggattttcaaaaagattttgtaaaatattgtgttgaagaagaagaaaaagctgcagagatgcataaaatgaaatctacaacccaggcaaatcggatgagtgtagatgctgtagaaattgaaacactcagaaaaacagttgaggactatttctgcttttgctatgggaaagctttaggcaaatccacagtggtacctgtaccatatgagaagatgctgcgagaccagtcggctgtggtagtgcaggggcttccggaaggtgttgcctttaaacaccccgagaactatgatcttgcaaccctgaaatggattttggagaacaaagcagggatttcattcatcattaagagaccttttttagagccaaagaagcatgtaggtggtcgtgtgatggtaacagatgctgacaggtcaatactatctccaggtggaagttgtggccccatcaaagtgaaaactgaacccacagaagattctggcatttccctggaaatggcagctgtgacagtaaaggaagaatcagaagatcctgattattatcaatataacattcaaggaagccaccattcttcagagggcaatgaaggcacagaaatggaagtaccagcagaaggttaggagaaaaagagattgcatattttccactatttgttgtatgtttattctattttatagattctattatccttaaaacaccttatttggaaataaaaggtgattcccttggtatgccttcctagccaacaggttattatttttttaaaaattctaagatgtaatatacttctttgaccatactgattaataaagcctatgggaatgaaactaagtggtaagtaaagctcttacatgatgcaaaatgctacttttttttttgtcctggttttcttgtgccatattaaatatcttttaaggaagaatagcttcagtgtttcagaattaaaattactagctccattcatattttattttcaaatgtattttttaatactttagtctcttagtagggtaggaatttagtctacataaaatttatacaggagagagtttctccctttattttgtactcacaactactccataaatgactttgtcagtttaccagctctacagctttggttttagaattgaacgcctgactgaggtacagttctttttgtttagaatcctgagttcaacttatcatgtagggtggcttcttatttccaaggtgtttaaacggttccacacaaatttttgtagatttctcccaaggaaaatgactggtaaggtaactgaatcttgttttagaattatttctctcataaattggtcatgttatcccttatttttctagaatgaaaagaggagtctgttatgtaactgcttatattccattgtatttacatttttattttaattaaaaaaaaacatttgtttgatcttttaccttctttgagggaaaggcaatcttaaaagttccccagtataggctggtttctccaaattcaattatagaattagggtttctccctggaatacatttctctcaaaaatactgatatgctcattgtaaaccgttggttacatttccctgtcagccctttttatagaagattgtgtgggtgaatgttgtatgctt

SEQ ID NO: 280782 - DNA, 1175 bp, Homo sapiens
aaagaaaaaaaaaaggaggaggaggaggagggtgagagagaagctgggagagcagagaaaaggggccaccggtcgcccccccgcttccccgcacgcgctctccagccgcggccgcccgcctgccgcggtcaccccggcctctgcctctgtcccccagtgatcggatcaaggcgctgagcgaggccctgcctgcggggcggccatgcggcggtgacaggagcgcgaccgacacgcacgggcccctcgccccctctcgcctcccgtccgctcgccagctcccctcagccgaggctgctccgcggcggccgcagcccgcgcgcggcccacactcgcctcccctcggcacccccggccccggagctgcctggaggcggccgcactcggggatcatggcccaagttgcaatgtccaccctccccgttgaagatgaggagtcctcggagagcaggatggtggtgacattcctcatgtcagctctcgagtccatgtgtaaagaactggccaagtccaaagccgaagtggcctgcattgcagtgtatgaaacagacgtgtttgtcgtcggaactgaaagaggacgtgcttttgtcaataccagaaaggattttcaaaaagattttgtaaaatattgtgttgaagaagaagaaaaagctgcagagatgcataaaatgaaatctacaacccaggcaaatcggatgagtgtagatgctgtagaaattgaaacactcagaaaaacagttgaggactatttctgcttttgctatgggaaagctttaggcaaatccacagtggtacctgtaccatatgagaagatgctgcgagaccagtcggctgtggtagtgcaggggcttccggaaggtgttgcctttaaacaccccgagaactatgatcttgcaaccctgaaatggattttggagaacaaagcagggatttcattcatcattaagagaccttttttagagccaaagaagcatgtaggtggtcgtgtgatggtaacagatgctgacaggtcaatactatctccaggtggaagttgtggccccatcaaagtgaaaactgaacccacagaagattctggcatttccctggaaatggcagctgtgacagtaaaggaagaggaataccaagcaggcatttttaattgatttggggggagtttgccggaagaagaaaatgat

SEQ ID NO: 280783 - DNA, 333 bp, Homo sapiens
taactaattggcaatgaacagctgtgtgagaaaggcctgtgagttgcttctaaatgctttattactaatatcaactctgtttctacagaccagaacttctgactcacagtaccactgaagttactcagccaagaacgaatacaccaggtaaactagttgtgaaatccttttttaaaaacacagatcagccaggctcggtggctcacacctgtaatcccagcactttaggaggctgaggcgggcagatcacaaggtcaggagatcaagaccatcctggctaacatggtgaaaccccatgtctactaaaatacaaaaaaattagccgggcctggt

SEQ ID NO: 280784 - DNA, 453 bp, Homo sapiens
ctttaggcaaatccacagtggtacctgtaccatatgagaagatgctgcgagaccagtcggctgtggtagtgcaggggcttccggaaggtgttgcctttaaacaccccgagaactatgatcttgcaaccctgaaatggattttggagaacaaagcagggatttcattcatcattaagaggtgaagtgctttctccctttgtacccatcaacagttgattcgtataaatttgaatatttagcttacgttaatgtatttttaaaatttatatttaacacagaagtcatttaaatgtatgctttacaataattttgcgtattcatacgaagttttgttttgttttgttttaatgcagaccttttttagagccaaagaagcatgtaggtaagtaagtgctttgcttccttgatagctggctggcctccgttttgctagattttcatacactttaatgg

SEQ ID NO: 280785 - DNA, 501 bp, Homo sapiens
ctcccggattcaagtgattcaggtgagcgccaccacgcctggctaatttttgtatttttagtagagatgaggtttcaccatattggccaggctggtcttgaactcctgacctcgtgatctgcccgcctcggcctcccaatgtgttgggattacaggcgtgagccactgtgcccggcccaataactcttatttatgcaataaataaatatgtcagttttaagctgagtcaggtttgcacccaccttggtcaagggagggatcttaacactttgagacccagagactttgaatgctgtgggaatggctgtcaccagcacgtggcttgatcagggctttcttctccttgcagttgtggccccatcaaagtgaaaactgaacccacagaagattctggtatgtactagcacttttagaatcaatggtgaaattaaggaagacttttccttagtgtagaagtttatagtttgactcaattattgttttgttttgataagaaagagg

SEQ ID NO: 280786 - DNA, 390 bp, Homo sapiens
tattattatttttttattttattttttattttttttacaggtgttgaagaagaagaaaaagctgcagagatgcataaaatgaaatctacaacccaggcaaatcggatgagtgtagatgctgtagaaattgaaacactcagaaaaacagttgaggactatttctgcttttgctatggtaaaaacaatagatttaatttttctaaaagatacattatataattgaattttctaaagggaagcttatgtaattgattcgaaaatcatataacacacattttcagtgactgaatggattagcaataaccttactttcttccacttccattttgaaggaacccaggaggaagtgtggccagtagagctgtttctttctttctgtttttttttttt

SEQ ID NO: 280787 - DNA, 3121 bp, Homo sapiens
ctgtctcccaagctggagtgcagtggtgtggtcataggtcactgcagcgtcgaactcctaggctcaagtgatcctcttgcctcaggctcctgagtagctgggacaacaggcgtgtaccacacctggatactttttaaatttttggtagagaagggatctcactctattgccaagctggtgtcgaactcttggtcttaagcagccctcccacgtcagcatcccaaagtgttgggatttcagagggatcatggcccaagttgcaatgtccaccctccccgttgaagatgaggagtcctcggagagcaggatggtggtgacattcctcatgtcagctctcgagtccatgtgtaaagaactggccaagtccaaagccgaagtggcctgcattgcagtgtatgaaacagacgtgtttgtcgtcggaactgaaagaggacgtgcttttgtcaataccagaaaggattttcaaaaagattttgtaaaatattgtgttgaagaagaagaaaaagctgcagagatgcataaaatgaaatctacaacccaggcaaatcggatgagtgtagatgctgtagaaattgaaacactcagaaaaacagttgaggactatttctgcttttgctatgggaaagctttaggcaaatccacagtggtacctgtaccatatgagaagatgctgcgagaccagtcggctgtggtagtgcaggggcttccggaaggtgttgcctttaaacaccccgagaactatgatcttgcaaccctgaaatggattttggagaacaaagcagggatttcattcatcattaagagaccttttttagagccaaagaagcatgtaggtggtcgtgtgatggtaacagatgctgacaggtcaatactatctccaggtggaagttgtggccccatcaaagtgaaaactgaacccacagaagattctggcatttccctggaaatggcagctgtgacagtaaaggaagaatcagaagatcctgattattatcaatataacattcaaggaagccaccattcttcagagggcaatgaaggcacagaaatggaagtaccagcagaagatgatgattattctccaccgtctaagagaccaaaggccaatgagctaccgcagccaccagtcccggaacccgccaatgctgggaagcggaaagtgagggagttcaacttcgagaaatggaatgctcgcatcactgatctacgtaaacaagttgaagaattgtttgaaaggaaatatgctcaagccataaaagccaaaggtccggtgacgatcccgtaccctcttttccagtctcatgttgaagatctttatgtagaaggacttcctgaaggaattccttttagaaggccatctacttacggaattcctcgcctggagaggatattacttgcaaaggaaaggattcgttttgtgattaagaaacatgagcttctgaattcaacacgtgaagatttacagcttgataagccagcttcaggagtaaaggaagaatggtatgccagaatcactaaattaagaaagatggtggatcagcttttctgcaaaaaatttgcggaagccttggggagcactgaagccaaggctgtaccgtaccaaaaatttgaggcacacccgaatgatctgtacgtggaaggactgccagaaaacattcctttccgaagtccctcatggtatggaatcccaaggctggaaaaaatcattcaagtgggcaatcgaattaaatttgttattaaaagaccagaacttctgactcacagtaccactgaagttactcagccaagaacgaatacaccagtcaaagaagattggaatgtcagaattaccaagctacggaagcaagtggaagagatttttaatttgaaatttgctcaagctcttggactcaccgaggcagtaaaagtaccatatcctgtgtttgaatcaaacccggagttcttgtatgtggaaggcttgccagaggggattcccttccgaagccctacctggtttggaattccacgacttgaaaggatcgtccgcgggagtaataaaatcaagttcgttgttaaaaaacctgaactagttatttcctacttgcctcctgggatggctagtaaaataaacactaaagctttgcagtcccccaaaagaccacgaagtcctgggagtaattcaaaggttcctgaaattgaggtcaccgtggaaggccctaataacaacaatcctcaaacctcagctgttcgaaccccgacccagactaacggttctaacgttcccttcaagccacgagggagagagttttcctttgaggcctggaatgccaaaatcacggacctaaaacagaaagttgaaaatctcttcaatgagaaatgtggggaagctcttggccttaaacaagctgtgaaggtgccgttcgcgttatttgagtctttcccggaagacttttatgtggaaggcttacctgagggtgtgccattccgaagaccatcgacttttggcattccgaggctggagaagatactcagaaacaaagccaaaattaagttcatcattaaaaagcccgaaatgtttgagacggcgattaaggagagcacctcctctaagagccctcccagaaaaataaattcatcacccaatgttaatactactgcatcaggtgttgaagaccttaacatcattcaggtgacaattccagatgatgataatgaaagactctcgaaagttgaaaaagctagacagctaagagaacaagtgaatgacctctttagtcggaaatttggtgaagctattggtatgggttttcctgtgaaagttccctacaggaaaatcacaattaaccctggctgtgtggtggttgatggcatgcccccgggggtgtccttcaaagcccccagctacctggaaatcagctccatgagaaggatcttagactctgccgagtttatcaaattcacggtcattagaccatttccaggacttgtgattaataaccagctggttgatcagagtgagtcagaaggccccgtgatacaagaatcagctgaaccaagccagttggaagttccagccacagaagaaataaaagagactgatggaagctctcagatcaagcaagaaccagaccccacgtggtag

SEQ ID NO: 280788 - DNA, 3326 bp, Homo sapiens
aaagaaaaaaaaaaggaggaggaggaggagggtgagagagaagctgggagagcagagaaaaggggccaccggtcgcccccccgcttccccgcacgcgctctccagccgcggccgcccgcctgccgcggtcaccccggcctctgcctctgtcccccagtgatcggatcaaggcgctgagcgaggccctgcctgcggggcggccatgcggcggtgacaggagcgcgaccgacacgcacgggcccctcgccccctctcgcctcccgtccgctcgccagctcccctcagccgaggctgctccgcggcggccgcagcccgcgcgcggcccacactcgcctcccctcggcacccccggccccggagctgcctggaggcggccgcactcggggatcatggcccaagttgcaatgtccaccctccccgttgaagatgaggagtcctcggagagcaggatggtggtgacattcctcatgtcagctctcgagtccatgtgtaaagaactggccaagtccaaagccgaagtggcctgcattgcagtgtatgaaacagacgtgtttgtcgtcggaactgaaagaggacgtgcttttgtcaataccagaaaggattttcaaaaagattttgtaaaatattgtgttgaagaagaagaaaaagctgcagagatgcataaaatgaaatctacaacccaggcaaatcggatgagtgtagatgctgtagaaattgaaacactcagaaaaacagttgaggactatttctgcttttgctatgggaaagctttaggcaaatccacagtggtacctgtaccatatgagaagatgctgcgagaccagtcggctgtggtagtgcaggggcttccggaaggtgttgcctttaaacaccccgagaactatgatcttgcaaccctgaaatggattttggagaacaaagcagggatttcattcatcattaagagaccttttttagagccaaagaagcatgtaggtggtcgtgtgatggtaacagatgctgacaggtcaatactatctccaggtggaagttgtggccccatcaaagtgaaaactgaacccacagaagattctggcatttccctggaaatggcagctgtgacagtaaaggaagaatcagaagatcctgattattatcaatataacattcaaggaagccaccattcttcagagggcaatgaaggcacagaaatggaagtaccagcagaagattctactcaacatgtcccttcagaaacaagtgaggaccctgaagttgaggtgactattgaagatgatgattattctccaccgtctaagagaccaaaggccaatgagctaccgcagccaccagtcccggaacccgccaatgctgggaagcggaaagtgagggagttcaacttcgagaaatggaatgctcgcatcactgatctacgtaaacaagttgaagaattgtttgaaaggaaatatgctcaagccataaaagccaaaggtccggtgacgatcccgtaccctcttttccagtctcatgttgaagatctttatgtagaaggacttcctgaaggaattccttttagaaggccatctacttacggaattcctcgcctggagaggatattacttgcaaaggaaaggattcgttttgtgattaagaaacatgagcttctgaattcaacacgtgaagatttacagcttgataagccagcttcaggagtaaaggaagaatggtatgccagaatcactaaattaagaaagatggtggatcagcttttctgcaaaaaatttgcggaagccttggggagcactgaagccaaggctgtaccgtaccaaaaatttgaggcacacccgaatgatctgtacgtggaaggactgccagaaaacattcctttccgaagtccctcatggtatggaatcccaaggctggaaaaaatcattcaagtgggcaatcgaattaaatttgttattaaaagaccagaacttctgactcacagtaccactgaagttactcagccaagaacgaatacaccagtcaaagaagattggaatgtcagaattaccaagctacggaagcaagtggaagagatttttaatttgaaatttgctcaagctcttggactcaccgaggcagtaaaagtaccatatcctgtgtttgaatcaaacccggagttcttgtatgtggaaggcttgccagaggggattcccttccgaagccctacctggtttggaattccacgacttgaaaggatcgtccgcgggagtaataaaatcaagttcgttgttaaaaaacctgaactagttatttcctacttgcctcctgggatggctagtaaaataaacactaaagctttgcagtcccccaaaagaccacgaagtcctgggagtaattcaaaggttcctgaaattgaggtcaccgtggaaggccctaataacaacaatcctcaaacctcagctgttcgaaccccgacccagactaacggttctaacgttcccttcaagccacgagggagagagttttcctttgaggcctggaatgccaaaatcacggacctaaaacagaaagttgaaaatctcttcaatgagaaatgtggggaagctcttggccttaaacaagctgtgaaggtgccgttcgcgttatttgagtctttcccggaagacttttatgtggaaggcttacctgagggtgtgccattccgaagaccatcgacttttggcattccgaggctggagaagatactcagaaacaaagccaaaattaagttcatcattaaaaagcccgaaatgtttgagacggcgattaaggagagcacctcctctaagagccctcccagaaaaataaattcatcacccaatgttaatactactgcatcaggtgttgaagaccttaacatcattcaggtgacaattccagatgatgataatgaaagactctcgaaagttgaaaaagctagacagctaagagaacaagtgaatgacctctttagtcggaaatttggtgaagctattggtatgggttttcctgtgaaagttccctacaggaaaatcacaattaaccctggctgtgtggtggttgatggcatgcccccgggggtgtccttcaaagcccccagctacctggaaatcagctccatgagaaggatcttagactctgccgagtttatcaaattcacggtcattagaccatttccaggacttgtgattaataaccagctggttgatcagagtgagtcagaaggccccgtgatacaagaatcagctgaaccaagccagttggaagttccagccacagaagaaataaaagagactgatggaagctctcagatcaagcaagaaccagaccccacgtggtag

SEQ ID NO: 280789 - DNA, 1240 bp, Homo sapiens
aaagaaaaaaaaaaggaggaggaggaggagggtgagagagaagctgggagagcagagaaaaggggccaccggtcgcccccccgcttccccgcacgcgctctccagccgcggccgcccgcctgccgcggtcaccccggcctctgcctctgtcccccagtgatcggatcaaggcgctgagcgaggccctgcctgcggggcggccatgcggcggtgacaggagcgcgaccgacacgcacgggcccctcgccccctctcgcctcccgtccgctcgccagctcccctcagccgaggctgctccgcggcggccgcagcccgcgcgcggcccacactcgcctcccctcggcacccccggccccggagctgcctggaggcggccgcactcggggatcatggcccaagttgcaatgtccaccctccccgttgaagatgaggagtcctcggagagcaggatggtggtgacattcctcatgtcagctctcgagtccatgtgtaaagaactggccaagtccaaagccgaagtggcctgcattgcagtgtatgaaacagacgtgtttgtcgtcggaactgaaagaggacgtgcttttgtcaataccagaaaggattttcaaaaagattttgtaaaatattgtgttgaagaagaagaaaaagctgcagagatgcataaaatgaaatctacaacccaggcaaatcggatgagtgtagatgctgtagaaattgaaacactcagaaaaacagttgaggactatttctgcttttgctatgggaaagctttaggcaaatccacagtggtacctgtaccatatgagaagatgctgcgagaccagtcggctgtggtagtgcaggggcttccggaaggtgttgcctttaaacaccccgagaactatgatcttgcaaccctgaaatggattttggagaacaaagcagggatttcattcatcattaagagaccttttttagagccaaagaagcatgtaggtggtcgtgtgatggtaacagatgctgacaggtcaatactatctccaggtggaagttgtggccccatcaaagtgaaaactgaacccacagaagattctggcatttccctggaaatggcagctgtgacagtaaaggaagaatcagaagatcctgattattatcaatataacattcaagcaggcccttctgaaactgatgatgttgatgaaaaacagcccctatcgaagcctttgcaaggtataatcttttcacttccattctccca

SEQ ID NO: 280790 - DNA, 840 bp, Homo sapiens
agcagttgttgtccaaccaggaaagacttcactggtgagaaaatatttcaagaagataccatcccacgaatacaggcttgttttccttctttctatctgtgttcgtgggatggtatcttcttgaagataccatcccacgaacacagatagaaagaaggaaaacaagcctgtatttttccagcaaatataacaaagaagctcttagccccccacgacgtaaagcctttaagaaatggacacctcctcggtcaccttttaatctcgttcaagaaacactttttcatgatccatggaagcttctcatcgctactatatttctcaatcggacctcaggcaaaatggcaatacctgtgctttggaagtttctggagaagtatccttcagctgaggtagcaagaaccgcagactggagagatgtgtcagaacttcttaaacctcttggtctctacgatcttcgggcaaaaaccattgtcaagttctcagatgaatacctgacaaagcagtggaagtatccaattgagcttcatgggattggtgcaccctgaagaccacaaattaaataaatatcatgactggctttgggaaaatcatgaaaaattaagtctatcttaaactctgcagctttcaagctcatctgttatgcatagctttgcacttcaaaaaagcttaattaagtacaaccaaccacctttccagccatagagattttaattagcccaactagaagcctagtgtgtgtgctttcttaatgtgtgtgccaatggtggatctttgctactgaatgtgtttgaacatgttttgagatttttttaaaataaattattatttgacaacaatcca

SEQ ID NO: 280791 - DNA, 2617 bp, Homo sapiens
atgtccgaaagggaaagccagaaaagcagcaaaagcaatggtggcactggagcccctaaggcgccagcgcaaccagagcgcgagcgattggtcggggcgtgtgggggcggtgcgtcttcctcgagaatggatttgattggtggagcgtggaaatggcggctgtagccgagggggcggccggaaagcagcggcggcgtctggggcgctttcgcaacattcagacctcggttgcagcccggtgccgtgagctgaagaggtttcacatcttactccgccccacaccctgggcgttgcggcgctgggctcgttgctgcagccggaccctgctcgatgggcacgactgggctggagagtctgagtctgggggaccgcggagctgcccccaccgtcacctctagtgagcgcctagtcccagacccgccgaatgacctccgcaaagaagatgttgctatggaattggaaagagtgggagaagatgaggaacaaatgatgataaaaagaagcagtgaatgtaatcccttgctacaagaacccatcgcttctgctcagtttggtgctactgcaggaacagaatgccgtaagtctgtcccatgtggatgggaaagagttgtgaagcaaaggttatttgggaagacagcaggaagatttgatgtgtactttatcagcccacaaggactgaagttcagatccaaaagttcacttgctaattatcttcacaaaaatggagagacttctcttaagccagaagattttgattttactgtactttctaaaaggggtatcaagtcaagatataaagactgcagcatggcagccctgacatcccatctacaaaaccaaagtaacaattcaaactggaacctcaggacccgaagcaagtgcaaaaaggatgtgtttatgccgccaagtagtagttcagagttgcaggagagcagaggactctctaactttacttccactcatttgcttttgaaagaagatgagggtgttgatgatgttaacttcagaaaggttagaaagcccaaaggaaaggtgactattttgaaaggaatcccaattaagaaaactaaaaaaggatgtaggaagagctgttcaggttttgttcaaagtgatagcaaaagagaatctgtgtgtaataaagcagatgctgaaagtgaacctgttgcacaaaaaagtcagcttgatagaactgtctgcatttctgatgctggagcatgtggtgagaccctcagtgtgaccagtgaagaaaacagccttgtaaaaaaaaaagaaagatcattgagttcaggatcaaatttttgttctgaacaaaaaacttctggcatcataaacaaattttgttcagccaaagactcagaacacaacgagaagtatgaggatacctttttagaatctgaagaaatcggaacaaaagtagaagttgtggaaaggaaagaacatttgcatactgacattttaaaacgtggctctgaaatggacaacaactgctcaccaaccaggaaagacttcactggaagataccatcccacgaacacagatagaaagaaggaaaacaagcctgtatttttccagcaaatataacaaagaagctcttagccccccacgacgtaaagcctttaagaaatggacacctcctcggtcaccttttaatctcgttcaagaaacactttttcatgatccatggaagcttctcatcgctactatatttctcaatcggacctcaggcaaaatggcaatacctgtgctttggaagtttctggagaagtatccttcagctgaggtagcaagaaccgcagactggagagatgtgtcagaacttcttaaacctcttggtctctacgatcttcgggcaaaaaccattgtcaagttctcagatgaatacctgacaaagcagtggaagtatccaattgagcttcatgggattggtaaatatggcaacgactcttaccgaattttttgtgtcaatgagtggaagcaggtgcaccctgaagaccacaaattaaataaatatcatgactggctttgggaaaatcatgaaaaattaagtctatcttaaactctgcagctttcaagctcatctgttatgcatagctttgcacttcaaaaaagcttaattaagtacaaccaaccacctttccagccatagagattttaattagcccaactagaagcctagtgtgtgtgctttcttaatgtgtgtgccaatggtggatctttgctactgaatgtgtttgaacatgttttgagatttttttaaaataaattattatttgacaacaatccaaaaaaaatacggcttttccaatgatgaaatataatcagaagatgaaaaatagttctaaactatcaataatacaaagcaaatttctatcagccttgctaaagctaggggcccactaaatatttttatcggctaggcgtggtggtgcatgcctgtaatctcggaaggctgaggcaggaggatcatttgagctcatgagggcccaggaggtcaaggcttcagtgagccatgatcatgccactgcactccagtctggatgacagagagagaccctgtctcaaaaaatatatatttaaaaaataaaaataaaagctgaccccaaagacaaataagatt

SEQ ID NO: 280792 - DNA, 3541 bp, Homo sapiens
atgtccgaaagggaaagccagaaaagcagcaaaagcaatggtggcactggagcccctaaggcgccagcgcaaccagagcgcgagcgattggtcggggcgtgtgggggcggtgcgtcttcctcgagaatggatttgattggtggagcgtggaaatggcggctgtagccgagggggcggccggaaagcagcggcggcgtctggggcgctttcgcaacattcagacctcggttgcagcccggtgccgtgagctgaagaggtttcacatcttactccgccccacaccctgggcgttgcggcgctgggctcgttgctgcagccggaccctgctcgatgggcacgactgggctggagagtctgagtctgggggaccgcggagctgcccccaccgtcacctctagtgagcgcctagtcccagacccgccgaatgacctccgcaaagaagatgttgctatggaattggaaagagtgggagaagatgaggaacaaatgatgataaaaagaagcagtgaatgtaatcccttgctacaagaacccatcgcttctgctcagtttggtgctactgcaggaacagaatgccgtaagtctgtcccatgtggatgggaaagagttgtgaagcaaaggttatttgggaagacagcaggaagatttgatgtgtactttatcagcccacaaggactgaagttcagatccaaaagttcacttgctaattatcttcacaaaaatggagagacttctcttaagccagaagattttgattttactgtactttctaaaaggggtatcaagtcaagatataaagactgcagcatggcagccctgacatcccatctacaaaaccaaagtaacaattcaaactggaacctcaggacccgaagcaagtgcaaaaaggatgtgtttatgccgccaagtagtagttcagagttgcaggagagcagaggactctctaactttacttccactcatttgcttttgaaagaagatgagggtgttgatgatgttaacttcagaaaggttagaaagcccaaaggaaaggtgactattttgaaaggaatcccaattaagaaaactaaaaaaggatgtaggaagagctgttcaggttttgttcaaagtgatagcaaaagagaatctgtgtgtaataaagcagatgctgaaagtgaacctgttgcacaaaaaagtcagcttgatagaactgtctgcatttctgatgctggagcatgtggtgagaccctcagtgtgaccagtgaagaaaacagccttgtaaaaaaaaaagaaagatcattgagttcaggatcaaatttttgttctgaacaaaaaacttctggcatcataaacaaattttgttcagccaaagactcagaacacaacgagaagtatgaggatacctttttagaatctgaagaaatcggaacaaaagtagaagttgtggaaaggaaagaacatttgcatactgacattttaaaacgtggctctgaaatggacaacaactgctcaccaaccaggaaagacttcactggaagataccatcccacgaacacagatagaaagaaggaaaacaagcctgtatttttccagcaaatataacaaagaagctcttagccccccacgacgtaaagcctttaagaaatggacacctcctcggtcaccttttaatctcgttcaagaaacactttttcatgatccatggaagcttctcatcgctactatatttctcaatcggacctcaggcaaaatggcaatacctgtgctttggaagtttctggagaagtatccttcagctgaggtagcaagaaccgcagactggagagatgtgtcagaacttcttaaacctcttggtctctacgatcttcgggcaaaaaccattgtcaagttctcagatgaatacctgacaaagcagtggaagtatccaattgagcttcatgggattggtaaatatggcaacgactcttaccgaattttttgtgtcaatgagtggaagcaggtgaggctcactcccatccataattcagcacatttggtctctgaggcaaaataagtccaccattatggttaagactatttattggatacaaatgctattacagtcacaaacaattgtgttcctggctgcggggaagcgggtggcatgtgggttttggggtttttgatcagtaggcgctcccaagtccacaaagaccagtccagcggcgtggcctctgactcatctccagtggtttgtcacctctggccctgttcctgtcattccctatttgtgtgctatctctaagcctgacgtggttttcctcctgtcaaaagtacaccactacaggaaagcaggaaggtttgggcctgcaatgtatgcatattgggtttctcttagtggtctcagactacgtttgtggtgactgggtcctgcttcagccctgttgaatatgcccagcctgtggcatgctggtggtcatcctggcagctggtgggtggcctggtatgctgcccactcagcttgagactcaccctcatgcattcagccagtaggtctggccaagcctgaactgaaggaccatggtcctatcccagcttcatcagagcaatccattgtgacctgagaatccatttaacctctcggtctagaacctccttctggaaagtgaggtattaatacttgactcatgttatcgccaccccacattctaagtcatggttgagtagtaatttggacagtaccttgtaaattgtgtgagattaccttaatataaggtataacttaaaatattcatgaatcccaggaggttaaaggttataacttttaggtatggtatcgtaatgtactgtcccccagcaaacatttaaaaagccaattttaaaaaatgtatttctgactaagttacattaaggtctctgcctctgtatcttatgtttcttccaggtgcaccctgaagaccacaaattaaataaatatcatgactggctttgggaaaatcatgaaaaattaagtctatcttaaactctgcagctttcaagctcatctgttatgcatagctttgcacttcaaaaaagcttaattaagtacaaccaaccacctttccagccatagagattttaattagcccaactagaagcctagtgtgtgtgctttcttaatgtgtgtgccaatggtggatctttgctactgaatgtgtttgaacatgttttgagatttttttaaaataaattattatttgacaacaatccaaaaaaaatacggcttttccaatgatgaaatataatcagaagatgaaaaatagttctaaactatcaataatacaaagcaaatttctatcagccttgctaaagctaggggcccactaaatatttttatcggctaggcgtggtggtgcatgcctgtaatctcggaaggctgaggcaggaggatcatttgagctcatgagggcccaggaggtcaaggcttcagtgagccatgatcatgccactgcactccagtctggatgacagagagagaccctgtctcaaaaaatatatatttaaaaaataaaaataaaagctgaccccaaagacaaataagatt

SEQ ID NO: 280793 - DNA, 3226 bp, Homo sapiens
atgtccgaaagggaaagccagaaaagcagcaaaagcaatggtggcactggagcccctaaggcgccagcgcaaccagagcgcgagcgattggtcggggcgtgtgggggcggtgcgtcttcctcgagaatggatttgattggtggagcgtggaaatggcggctgtagccgagggggcggccggaaagcagcggcggcgtctggggcgctttcgcaacattcagacctcggttgcagcccggtgccgtgagctgaagaggtttcacatcttactccgccccacaccctgggcgttgcggcgctgggctcgttgctgcagccggaccctgctcgatgggcacgactgggctggagagtctgagtctgggggaccgcggagctgcccccaccgtcacctctagtgagcgcctagtcccagacccgccgaatgacctccgcaaagaagatgttgctatggaattggaaagagtgggagaagatgaggaacaaatgatgataaaaagaagcagtgaatgtaatcccttgctacaagaacccatcgcttctgctcagtttggtgctactgcaggaacagaatgccgtaagtctgtcccatgtggatgggaaagagttgtgaagcaaaggttatttgggaagacagcaggaagatttgatgtgtactttatcagcccacaaggactgaagttcagatccaaaagttcacttgctaattatcttcacaaaaatggagagacttctcttaagccagaagattttgattttactgtactttctaaaaggggtatcaagtcaagatataaagactgcagcatggcagccctgacatcccatctacaaaaccaaagtaacaattcaaactggaacctcaggacccgaagcaagtgcaaaaaggatgtgtttatgccgccaagtagtagttcagagttgcaggagagcagaggactctctaactttacttccactcatttgcttttgaaagaagatgagggtgttgatgatgttaacttcagaaaggttagaaagcccaaaggaaaggtgactattttgaaaggaatcccaattaagaaaactaaaaaaggatgtaggaagagctgttcaggttttgttcaaagtgatagcaaaagagaatctgtgtgtaataaagcagatgctgaaagtgaacctgttgcacaaaaaagtcagcttgatagaactgtctgcatttctgatgctggagcatgtggtgagaccctcagtgtgaccagtgaagaaaacagccttgtaaaaaaaaaagaaagatcattgagttcaggatcaaatttttgttctgaacaaaaaacttctggcatcataaacaaattttgttcagccaaagactcagaacacaacgagaagtatgaggatacctttttagaatctgaagaaatcggaacaaaagtagaagttgtggaaaggaaagaacatttgcatactgacattttaaaacgtggctctgaaatggacaacaactgctcaccaaccaggaaagacttcactggtgagaaaatatttcaaggaagataccatcccacgaacacagatagaaagaaggaaaacaagcctgtatttttccagcaaatataacaaagaagctcttagccccccacgacgtaaagcctttaagaaatggacacctcctcggtcaccttttaatctcgttcaagaaacactttttcatgatccatggaagcttctcatcgctactatatttctcaatcggacctcaggcaaaatggcaatacctgtgctttggaagtttctggagaagtatccttcagctgaggtagcaagaaccgcagactggagagatgtgtcagaacttcttaaacctcttggtctctacgatcttcgggcaaaaaccattgtcaagttctcagatgaatacctgacaaagcagtggaagtatccaattgagcttcatgggattggtaaatatggcaacgactcttaccgaattttttgtgtcaatgagtggaagcaggtgaggctcactcccatccataattcagcacatttggtctctgaggcaaaataagtccaccattatggttaagactatttattggatacaaatgctattacagtcacaaacaattgtgttcctggctgcggggaagcgggtggcatgtgggttttggggtttttgatcagtaggcgctcccaagtccacaaagaccagtccagcggcgtggcctctgactcatctccagtggtttgtcacctctggccctgttcctgtcattccctatttgtgtgctatctctaagcctgacgtggttttcctcctgtcaaaagtacaccactacaggaaagcaggaaggtttgggcctgcaatgtatgcatattgggtttctcttagtggtctcagactacgtttgtggtgactgggtcctgcttcagccctgttgaatatgcccagcctgtggcatgctggtggtcatcctggcagctggtgggtggcctggtatgctgcccactcagcttgagactcaccctcatgcattcagccagtaggtctggccaagcctgaactgaaggaccatggtcctatcccagcttcatcagagcaatccattgtgacctgagaatccatttaacctctcggtctagaacctccttctggaaagtgaggtattaatacttgactcatgttatcgccaccccacattctaagtcatggttgagtagtaatttggacagtaccttgtaaattgtgtgagattaccttaatataaggtataacttaaaatattcatgaatcccaggaggttaaaggttataacttttaggtatggtatcgtaatgtactgtcccccagcaaacatttaaaaagccaattttaaaaaatgtatttctgactaagttacattaaggtctctgcctctgtatcttatgtttcttccaggtgcaccctgaagaccacaaattaaataaatatcatgactggctttgggaaaatcatgaaaaattaagtctatcttaaactctgcagctttcaagctcatctgttatgcatagctttgcacttcaaaaaagcttaattaagtacaaccaaccacctttccagccatagagattttaattagcccaactagaagcctagtgtgtgtgctttcttaatgtgtgtgccaatggtggatctttgctactgaatgtgtttgaacatgttttgagatttttttaaaataaattattatttgacaacaatcca

SEQ ID NO: 280794 - DNA, 2231 bp, Homo sapiens
atgtccgaaagggaaagccagaaaagcagcaaaagcaatggtggcactggagcccctaaggcgccagcgcaaccagagcgcgagcgattggtcggggcgtgtgggggcggtgcgtcttcctcgagaatggatttgattggtggagcgtggaaatggcggctgtagccgagggggcggccggaaagcagcggcggcgtctggggcgctttcgcaacattcagacctcggttgcagcccggtgccgtgagctgaagaggtttcacatcttactccgccccacaccctgggcgttgcggcgctgggctcgttgctgcagccggaccctgctcgatgggcacgactgggctggagagtctgagtctgggggaccgcggagctgcccccaccgtcacctctagtgagcgcctagtcccagacccgccgaatgacctccgcaaagaagatgttgctatggaattggaaagagtgggagaagatgaggaacaaatgatgataaaaagaagcagtgaatgtaatcccttgctacaagaacccatcgcttctgctcagtttggtgctactgcaggaacagaatgccgtaagtctgtcccatgtggatgggaaagagttgtgaagcaaaggttatttgggaagacagcaggaagatttgatgtgtactttatcagcccacaaggactgaagttcagatccaaaagttcacttgctaattatcttcacaaaaatggagagacttctcttaagccagaagattttgattttactgtactttctaaaaggggtatcaagtcaagatataaagactgcagcatggcagccctgacatcccatctacaaaaccaaagtaacaattcaaactggaacctcaggacccgaagcaagtgcaaaaaggatgtgtttatgccgccaagtagtagttcagagttgcaggagagcagaggactctctaactttacttccactcatttgcttttgaaagaagatgagggtgttgatgatgttaacttcagaaaggttagaaagcccaaaggaaaggtgactattttgaaaggaatcccaattaagaaaactaaaaaaggatgtaggaagagctgttcaggttttgttcaaagtgatagcaaaagagaatctgtgtgtaataaagcagatgctgaaagtgaacctgttgcacaaaaaagtcagcttgatagaactgtctgcatttctgatgctggagcatgtggtgagaccctcagtgtgaccagtgaagaaaacagccttgtaaaaaaaaaagaaagatcattgagttcaggatcaaatttttgttctgaacaaaaaacttctggcatcataaacaaattttgttcagccaaagactcagaacacaacgagaagtatgaggatacctttttagaatctgaagaaatcggaacaaaagtagaagttgtggaaaggaaagaacatttgcatactgacattttaaaacgtggctctgaaatggacaacaactgctcaccaaccaggaaagacttcactggaagataccatcccacgaacacagatagaaagaaggaaaacaagcctgtatttttccagcaaatataacaaagaagctcttagccccccacgacgtaaagcctttaagaaatggacacctcctcggtcaccttttaatctcgttcaagaaacactttttcatgatccatggaagcttctcatcgctactatatttctcaatcggacctcaggcaaaatggcaatacctgtgctttggaagtttctggagaagtatccttcagctgaggtagcaagaaccgcagactggagagatgtgtcagaacttcttaaacctcttggtctctacgatcttcgggcaaaaaccattgtcaagttctcagatgaatacctgacaaagcagtggaagtatccaattgagcttcatgggattggtgcaccctgaagaccacaaattaaataaatatcatgactggctttgggaaaatcatgaaaaattaagtctatcttaaactctgcagctttcaagctcatctgttatgcatagctttgcacttcaaaaaagcttaattaagtacaaccaaccacctttccagccatagagattttaattagcccaactagaagcctagtgtgtgtgctttcttaatgtgtgtgccaatggtggatctttgctactgaatgtgtttgaacatgttttgagatttttttaaaataaattattatttgacaacaatcca

SEQ ID NO: 280795 - DNA, 2595 bp, Homo sapiens
atgtccgaaagggaaagccagaaaagcagcaaaagcaatggtggcactggagcccctaaggcgccagcgcaaccagagcgcgagcgattggtcggggcgtgtgggggcggtgcgtcttcctcgagaatggatttgattggtggagcgtggaaatggcggctgtagccgagggggcggccggaaagcagcggcggcgtctggggcgctttcgcaacattcagacctcggttgcagcccggtgccgtgagctgaagaggtttcacatcttactccgccccacaccctgggcgttgcggcgctgggctcgttgctgcagccggaccctgctcgatgggcacgactgggctggagagtctgagtctgggggaccgcggagctgcccccaccgtcacctctagtgagcgcctagtcccagacccgccgaatgacctccgcaaagaagatgttgctatggaattggaaagagtgggagaagatgaggaacaaatgatgataaaaagaagcagtgaatgtaatcccttgctacaagaacccatcgcttctgctcagtttggtgctactgcaggaacagaatgccgtaagtctgtcccatgtggatgggaaagagttgtgaagcaaaggttatttgggaagacagcaggaagatttgatgtgtactttatcagcccacaaggactgaagttcagatccaaaagttcacttgctaattatcttcacaaaaatggagagacttctcttaagccagaagattttgattttactgtactttctaaaaggggtatcaagtcaagatataaagactgcagcatggcagccctgacatcccatctacaaaaccaaagtaacaattcaaactggaacctcaggacccgaagcaagtgcaaaaaggatgtgtttatgccgccaagtagtagttcagagttgcaggagagcagaggactctctaactttacttccactcatttgcttttgaaagaagatgagggtgttgatgatgttaacttcagaaaggttagaaagcccaaaggaaaggtgactattttgaaaggaatcccaattaagaaaactaaaaaaggatgtaggaagagctgttcaggttttgttcaaagtgatagcaaaagagaatctgtgtgtaataaagcagatgctgaaagtgaacctgttgcacaaaaaagtcagcttgatagaactgtctgcatttctgatgctggagcatgtggtgagaccctcagtgtgaccagtgaagaaaacagccttgtaaaaaaaaaagaaagatcattgagttcaggatcaaatttttgttctgaacaaaaaacttctggcatcataaacaaattttgttcagccaaagactcagaacacaacgagaagtatgaggatacctttttagaatctgaagaaatcggaacaaaagtagaagttgtggaaaggaaagaacatttgcatactgacattttaaaacgtggctctgaaatggacaacaactgctcaccaaccaggaaagacttcactggaagataccatcccacgaacacagatagaaagaaggaaaacaagcctgtatttttccagcaaatataacaaagaagctcttagccccccacgacgtaaagcctttaagaaatggacacctcctcggtcaccttttaatctcgttcaagaaacactttttcatgatccatggaagcttctcatcgctactatatttctcaatcggacctcaggcaaaatggcaatacctgtgctttggaagtttctggagaagtatccttcagctgaggtagcaagaaccgcagactggagagatgtgtcagaacttcttaaacctcttggtctctacgatcttcgggcaaaaaccattgtcaagttctcagatgaatacctgacaaagcagtggaagtatccaattgagcttcatgggattggtaaatatggcaacgactcttaccgaattttttgtgtcaatgagtggaagcaggtgcaccctgaagaccacaaattaaataaatatcatgactggctttgggaaaatcatgaaaaattaagtctatcttaaactctgcagctttcaagctcatctgttatgcatagctttgcacttcaaaaaagcttaattaagtacaaccaaccacctttccagccatagaagcctagtgtgtgtgctttcttaatgtgtgtgccaatggtggatctttgctactgaatgtgtttgaacatgttttgagatttttttaaaataaattattatttgacaacaatccaaaaaaaatacggcttttccaatgatgaaatataatcagaagatgaaaaatagttctaaactatcaataatacaaagcaaatttctatcagccttgctaaagctaggggcccactaaatatttttatcggctaggcgtggtggtgcatgcctgtaatctcggaaggctgaggcaggaggatcatttgagctcatgagggcccaggaggtcaaggcttcagtgagccatgatcatgccactgcactccagtctggatgacagagagagaccctgtctcaaaaaatatatatttaaaaaataaaaataaaagctgaccccaaagacaaataagatt

SEQ ID NO: 280796 - DNA, 1817 bp, Homo sapiens
agcagttgttgtccaaccaggaaagacttcactggtgagaaaatatttcaagaagataccatcccacgaatacaggcttgttttccttctttctatctgtgttcgtgggatggtatcttcttgaagataccatcccacgaacacagatagaaagaaggaaaacaagcctgtatttttccagcaaatataacaaagaagctcttagccccccacgacgtaaagcctttaagaaatggacacctcctcggtcaccttttaatctcgttcaagaaacactttttcatgatccatggaagcttctcatcgctactatatttctcaatcggacctcaggcaaaatggcaatacctgtgctttggaagtttctggagaagtatccttcagctgaggtagcaagaaccgcagactggagagatgtgtcagaacttcttaaacctcttggtctctacgatcttcgggcaaaaaccattgtcaagttctcagatgaatacctgacaaagcagtggaagtatccaattgagcttcatgggattggtaaatatggcaacgactcttaccgaattttttgtgtcaatgagtggaagcaggtgaggctcactcccatccataattcagcacatttggtctctgaggcaaaataagtccaccattatggttaagactatttattggatacaaatgctattacagtcacaaacaattgtgttcctggctgcggggaagcgggtggcatgtgggttttggggtttttgatcagtaggcgctcccaagtccacaaagaccagtccagcggcgtggcctctgactcatctccagtggtttgtcacctctggccctgttcctgtcattccctatttgtgtgctatctctaagcctgacgtggttttcctcctgtcaaaagtacaccactacaggaaagcaggaaggtttgggcctgcaatgtatgcatattgggtttctcttagtggtctcagactacgtttgtggtgactgggtcctgcttcagccctgttgaatatgcccagcctgtggcatgctggtggtcatcctggcagctggtgggtggcctggtatgctgcccactcagcttgagactcaccctcatgcattcagccagtaggtctggccaagcctgaactgaaggaccatggtcctatcccagcttcatcagagcaatccattgtgacctgagaatccatttaacctctcggtctagaacctccttctggaaagtgaggtattaatacttgactcatgttatcgccaccccacattctaagtcatggttgagtagtaatttggacagtaccttgtaaattgtgtgagattaccttaatataaggtataacttaaaatattcatgaatcccaggaggttaaaggttataacttttaggtatggtatcgtaatgtactgtcccccagcaaacatttaaaaagccaattttaaaaaatgtatttctgactaagttacattaaggtctctgcctctgtatcttatgtttcttccaggtgcaccctgaagaccacaaattaaataaatatcatgactggctttgggaaaatcatgaaaaattaagtctatcttaaactctgcagctttcaagctcatctgttatgcatagctttgcacttcaaaaaagcttaattaagtacaaccaaccacctttccagccatagagattttaattagcccaactagaagcctagtgtgtgtgctttcttaatgtgtgtgccaatggtggatctttgctactgaatgtgtttgaacatgttttgagatttttttaaaataaattattatttgacaacaatcca

SEQ ID NO: 280797 - DNA, 396 bp, Homo sapiens
atctgatcatttaaaagctaatcatgcaaggccagttttcagcataatttggactattagcccaatatattagcagttttggcatttgattctgaaagtggttgctggttcagataatggcttctcaccagtgtttttttgttttttgttttctttaaaaaaaaaaaccctctggatgagatttctatgagaaactacttgaacatgaaatcagcccacctggagtcttgtaatcattcagttacttttacttcccaggcaaaatggcaatacctgtgctttggaagtttctggagaagtatccttcagctgaggtagcaagaaccgcagactggagagatgtgtcagaacttcttaaacctcttggtctctacgatcttcgggcaaaaaccattg

SEQ ID NO: 280798 - DNA, 2284 bp, Homo sapiens
atgtccgaaagggaaagccagaaaagcagcaaaagcaatggtggcactggagcccctaaggcgccagcgcaaccagagcgcgagcgattggtcggggcgtgtgggggcggtgcgtcttcctcgagaatggatttgattggtggagcgtggaaatggcggctgtagccgagggggcggccggaaagcagcggcggcgtctggggcgctttcgcaacattcagacctcggttgcagcccggtgccgtgagctgaagaggtttcacatcttactccgccccacaccctgggcgttgcggcgctgggctcgttgctgcagccggaccctgctcgatgggcacgactgggctggagagtctgagtctgggggaccgcggagctgcccccaccgtcacctctagtgagcgcctagtcccagacccgccgaatgacctccgcaaagaagatgttgctatggaattggaaagagtgggagaagatgaggaacaaatgatgataaaaagaagcagtgaatgtaatcccttgctacaagaacccatcgcttctgctcagtttggtgctactgcaggaacagaatgccgtaagtctgtcccatgtggatgggaaagagttgtgaagcaaaggttatttgggaagacagcaggaagatttgatgtgtactttatcagcccacaaggactgaagttcagatccaaaagttcacttgctaattatcttcacaaaaatggagagacttctcttaagccagaagattttgattttactgtactttctaaaaggggtatcaagtcaagatataaagactgcagcatggcagccctgacatcccatctacaaaaccaaagtaacaattcaaactggaacctcaggacccgaagcaagtgcaaaaaggatgtgtttatgccgccaagtagtagttcagagttgcaggagagcagaggactctctaactttacttccactcatttgcttttgaaagaagatgagggtgttgatgatgttaacttcagaaaggttagaaagcccaaaggaaaggtgactattttgaaaggaatcccaattaagaaaactaaaaaaggatgtaggaagagctgttcaggttttgttcaaagtgatagcaaaagagaatctgtgtgtaataaagcagatgctgaaagtgaacctgttgcacaaaaaagtcagcttgatagaactgtctgcatttctgatgctggagcatgtggtgagaccctcagtgtgaccagtgaagaaaacagccttgtaaaaaaaaaagaaagatcattgagttcaggatcaaatttttgttctgaacaaaaaacttctggcatcataaacaaattttgttcagccaaagactcagaacacaacgagaagtatgaggatacctttttagaatctgaagaaatcggaacaaaagtagaagttgtggaaaggaaagaacatttgcatactgacattttaaaacgtggctctgaaatggacaacaactgctcaccaaccaggaaagacttcactggaagataccatcccacgaacacagatagaaagaaggaaaacaagcctgtatttttccagcaaatataacaaagaagctcttagccccccacgacgtaaagcctttaagaaatggacacctcctcggtcaccttttaatctcgttcaagaaacactttttcatgatccatggaagcttctcatcgctactatatttctcaatcggacctcaggcaaaatggcaatacctgtgctttggaagtttctggagaagtatccttcagctgaggtagcaagaaccgcagactggagagatgtgtcagaacttcttaaacctcttggtctctacgatcttcgggcaaaaaccattgtcaagttctcagatgaatacctgacaaagcagtggaagtatccaattgagcttcatgggattggtaaatatggcaacgactcttaccgaattttttgtgtcaatgagtggaagcaggtgcaccctgaagaccacaaattaaataaatatcatgactggctttgggaaaatcatgaaaaattaagtctatcttaaactctgcagctttcaagctcatctgttatgcatagctttgcacttcaaaaaagcttaattaagtacaaccaaccacctttccagccatagagattttaattagcccaactagaagcctagtgtgtgtgctttcttaatgtgtgtgccaatggtggatctttgctactgaatgtgtttgaacatgttttgagatttttttaaaataaattattatttgacaacaatcca

SEQ ID NO: 280799 - DNA, 3208 bp, Homo sapiens
atgtccgaaagggaaagccagaaaagcagcaaaagcaatggtggcactggagcccctaaggcgccagcgcaaccagagcgcgagcgattggtcggggcgtgtgggggcggtgcgtcttcctcgagaatggatttgattggtggagcgtggaaatggcggctgtagccgagggggcggccggaaagcagcggcggcgtctggggcgctttcgcaacattcagacctcggttgcagcccggtgccgtgagctgaagaggtttcacatcttactccgccccacaccctgggcgttgcggcgctgggctcgttgctgcagccggaccctgctcgatgggcacgactgggctggagagtctgagtctgggggaccgcggagctgcccccaccgtcacctctagtgagcgcctagtcccagacccgccgaatgacctccgcaaagaagatgttgctatggaattggaaagagtgggagaagatgaggaacaaatgatgataaaaagaagcagtgaatgtaatcccttgctacaagaacccatcgcttctgctcagtttggtgctactgcaggaacagaatgccgtaagtctgtcccatgtggatgggaaagagttgtgaagcaaaggttatttgggaagacagcaggaagatttgatgtgtactttatcagcccacaaggactgaagttcagatccaaaagttcacttgctaattatcttcacaaaaatggagagacttctcttaagccagaagattttgattttactgtactttctaaaaggggtatcaagtcaagatataaagactgcagcatggcagccctgacatcccatctacaaaaccaaagtaacaattcaaactggaacctcaggacccgaagcaagtgcaaaaaggatgtgtttatgccgccaagtagtagttcagagttgcaggagagcagaggactctctaactttacttccactcatttgcttttgaaagaagatgagggtgttgatgatgttaacttcagaaaggttagaaagcccaaaggaaaggtgactattttgaaaggaatcccaattaagaaaactaaaaaaggatgtaggaagagctgttcaggttttgttcaaagtgatagcaaaagagaatctgtgtgtaataaagcagatgctgaaagtgaacctgttgcacaaaaaagtcagcttgatagaactgtctgcatttctgatgctggagcatgtggtgagaccctcagtgtgaccagtgaagaaaacagccttgtaaaaaaaaaagaaagatcattgagttcaggatcaaatttttgttctgaacaaaaaacttctggcatcataaacaaattttgttcagccaaagactcagaacacaacgagaagtatgaggatacctttttagaatctgaagaaatcggaacaaaagtagaagttgtggaaaggaaagaacatttgcatactgacattttaaaacgtggctctgaaatggacaacaactgctcaccaaccaggaaagacttcactggaagataccatcccacgaacacagatagaaagaaggaaaacaagcctgtatttttccagcaaatataacaaagaagctcttagccccccacgacgtaaagcctttaagaaatggacacctcctcggtcaccttttaatctcgttcaagaaacactttttcatgatccatggaagcttctcatcgctactatatttctcaatcggacctcaggcaaaatggcaatacctgtgctttggaagtttctggagaagtatccttcagctgaggtagcaagaaccgcagactggagagatgtgtcagaacttcttaaacctcttggtctctacgatcttcgggcaaaaaccattgtcaagttctcagatgaatacctgacaaagcagtggaagtatccaattgagcttcatgggattggtaaatatggcaacgactcttaccgaattttttgtgtcaatgagtggaagcaggtgaggctcactcccatccataattcagcacatttggtctctgaggcaaaataagtccaccattatggttaagactatttattggatacaaatgctattacagtcacaaacaattgtgttcctggctgcggggaagcgggtggcatgtgggttttggggtttttgatcagtaggcgctcccaagtccacaaagaccagtccagcggcgtggcctctgactcatctccagtggtttgtcacctctggccctgttcctgtcattccctatttgtgtgctatctctaagcctgacgtggttttcctcctgtcaaaagtacaccactacaggaaagcaggaaggtttgggcctgcaatgtatgcatattgggtttctcttagtggtctcagactacgtttgtggtgactgggtcctgcttcagccctgttgaatatgcccagcctgtggcatgctggtggtcatcctggcagctggtgggtggcctggtatgctgcccactcagcttgagactcaccctcatgcattcagccagtaggtctggccaagcctgaactgaaggaccatggtcctatcccagcttcatcagagcaatccattgtgacctgagaatccatttaacctctcggtctagaacctccttctggaaagtgaggtattaatacttgactcatgttatcgccaccccacattctaagtcatggttgagtagtaatttggacagtaccttgtaaattgtgtgagattaccttaatataaggtataacttaaaatattcatgaatcccaggaggttaaaggttataacttttaggtatggtatcgtaatgtactgtcccccagcaaacatttaaaaagccaattttaaaaaatgtatttctgactaagttacattaaggtctctgcctctgtatcttatgtttcttccaggtgcaccctgaagaccacaaattaaataaatatcatgactggctttgggaaaatcatgaaaaattaagtctatcttaaactctgcagctttcaagctcatctgttatgcatagctttgcacttcaaaaaagcttaattaagtacaaccaaccacctttccagccatagagattttaattagcccaactagaagcctagtgtgtgtgctttcttaatgtgtgtgccaatggtggatctttgctactgaatgtgtttgaacatgttttgagatttttttaaaataaattattatttgacaacaatcca

SEQ ID NO: 280800 - DNA, 2302 bp, Homo sapiens
atgtccgaaagggaaagccagaaaagcagcaaaagcaatggtggcactggagcccctaaggcgccagcgcaaccagagcgcgagcgattggtcggggcgtgtgggggcggtgcgtcttcctcgagaatggatttgattggtggagcgtggaaatggcggctgtagccgagggggcggccggaaagcagcggcggcgtctggggcgctttcgcaacattcagacctcggttgcagcccggtgccgtgagctgaagaggtttcacatcttactccgccccacaccctgggcgttgcggcgctgggctcgttgctgcagccggaccctgctcgatgggcacgactgggctggagagtctgagtctgggggaccgcggagctgcccccaccgtcacctctagtgagcgcctagtcccagacccgccgaatgacctccgcaaagaagatgttgctatggaattggaaagagtgggagaagatgaggaacaaatgatgataaaaagaagcagtgaatgtaatcccttgctacaagaacccatcgcttctgctcagtttggtgctactgcaggaacagaatgccgtaagtctgtcccatgtggatgggaaagagttgtgaagcaaaggttatttgggaagacagcaggaagatttgatgtgtactttatcagcccacaaggactgaagttcagatccaaaagttcacttgctaattatcttcacaaaaatggagagacttctcttaagccagaagattttgattttactgtactttctaaaaggggtatcaagtcaagatataaagactgcagcatggcagccctgacatcccatctacaaaaccaaagtaacaattcaaactggaacctcaggacccgaagcaagtgcaaaaaggatgtgtttatgccgccaagtagtagttcagagttgcaggagagcagaggactctctaactttacttccactcatttgcttttgaaagaagatgagggtgttgatgatgttaacttcagaaaggttagaaagcccaaaggaaaggtgactattttgaaaggaatcccaattaagaaaactaaaaaaggatgtaggaagagctgttcaggttttgttcaaagtgatagcaaaagagaatctgtgtgtaataaagcagatgctgaaagtgaacctgttgcacaaaaaagtcagcttgatagaactgtctgcatttctgatgctggagcatgtggtgagaccctcagtgtgaccagtgaagaaaacagccttgtaaaaaaaaaagaaagatcattgagttcaggatcaaatttttgttctgaacaaaaaacttctggcatcataaacaaattttgttcagccaaagactcagaacacaacgagaagtatgaggatacctttttagaatctgaagaaatcggaacaaaagtagaagttgtggaaaggaaagaacatttgcatactgacattttaaaacgtggctctgaaatggacaacaactgctcaccaaccaggaaagacttcactggtgagaaaatatttcaaggaagataccatcccacgaacacagatagaaagaaggaaaacaagcctgtatttttccagcaaatataacaaagaagctcttagccccccacgacgtaaagcctttaagaaatggacacctcctcggtcaccttttaatctcgttcaagaaacactttttcatgatccatggaagcttctcatcgctactatatttctcaatcggacctcaggcaaaatggcaatacctgtgctttggaagtttctggagaagtatccttcagctgaggtagcaagaaccgcagactggagagatgtgtcagaacttcttaaacctcttggtctctacgatcttcgggcaaaaaccattgtcaagttctcagatgaatacctgacaaagcagtggaagtatccaattgagcttcatgggattggtaaatatggcaacgactcttaccgaattttttgtgtcaatgagtggaagcaggtgcaccctgaagaccacaaattaaataaatatcatgactggctttgggaaaatcatgaaaaattaagtctatcttaaactctgcagctttcaagctcatctgttatgcatagctttgcacttcaaaaaagcttaattaagtacaaccaaccacctttccagccatagagattttaattagcccaactagaagcctagtgtgtgtgctttcttaatgtgtgtgccaatggtggatctttgctactgaatgtgtttgaacatgttttgagatttttttaaaataaattattatttgacaacaatcca

SEQ ID NO: 280801 - DNA, 2564 bp, Homo sapiens
atgtccgaaagggaaagccagaaaagcagcaaaagcaatggtggcactggagcccctaaggcgccagcgcaaccagagcgcgagcgattggtcggggcgtgtgggggcggtgcgtcttcctcgagaatggatttgattggtggagcgtggaaatggcggctgtagccgagggggcggccggaaagcagcggcggcgtctggggcgctttcgcaacattcagacctcggttgcagcccggtgccgtgagctgaagaggtttcacatcttactccgccccacaccctgggcgttgcggcgctgggctcgttgctgcagccggaccctgctcgatgggcacgactgggctggagagtctgagtctgggggaccgcggagctgcccccaccgtcacctctagtgagcgcctagtcccagacccgccgaatgacctccgcaaagaagatgttgctatggaattggaaagagtgggagaagatgaggaacaaatgatgataaaaagaagcagtgaatgtaatcccttgctacaagaacccatcgcttctgctcagtttggtgctactgcaggaacagaatgccgtaagtctgtcccatgtggatgggaaagagttgtgaagcaaaggttatttgggaagacagcaggaagatttgatgtgtactttatcagcccacaaggactgaagttcagatccaaaagttcacttgctaattatcttcacaaaaatggagagacttctcttaagccagaagattttgattttactgtactttctaaaaggggtatcaagtcaagatataaagactgcagcatggcagccctgacatcccatctacaaaaccaaagtaacaattcaaactggaacctcaggacccgaagcaagtgcaaaaaggatgtgtttatgccgccaagtagtagttcagagttgcaggagagcagaggactctctaactttacttccactcatttgcttttgaaagaagatgagggtgttgatgatgttaacttcagaaaggttagaaagcccaaaggaaaggtgactattttgaaaggaatcccaattaagaaaactaaaaaaggatgtaggaagagctgttcaggttttgttcaaagtgatagcaaaagagaatctgtgtgtaataaagcagatgctgaaagtgaacctgttgcacaaaaaagtcagcttgatagaactgtctgcatttctgatgctggagcatgtggtgagaccctcagtgtgaccagtgaagaaaacagccttgtaaaaaaaaaagaaagatcattgagttcaggatcaaatttttgttctgaacaaaaaacttctggcatcataaacaaattttgttcagccaaagactcagaacacaacgagaagtatgaggatacctttttagaatctgaagaaatcggaacaaaagtagaagttgtggaaaggaaagaacatttgcatactgacattttaaaacgtggctctgaaatggacaacaactgctcaccaaccaggaaagacttcactggaagataccatcccacgaacacagatagaaagaaggaaaacaagcctgtatttttccagcaaatataacaaagaagctcttagccccccacgacgtaaagcctttaagaaatggacacctcctcggtcaccttttaatctcgttcaagaaacactttttcatgatccatggaagcttctcatcgctactatatttctcaatcggacctcaggcaaaatggcaatacctgtgctttggaagtttctggagaagtatccttcagctgaggtagcaagaaccgcagactggagagatgtgtcagaacttcttaaacctcttggtctctacgatcttcgggcaaaaaccattgtcaagttctcagatgaatacctgacaaagcagtggaagtatccaattgagcttcatgggattggtgcaccctgaagaccacaaattaaataaatatcatgactggctttgggaaaatcatgaaaaattaagtctatcttaaactctgcagctttcaagctcatctgttatgcatagctttgcacttcaaaaaagcttaattaagtacaaccaaccacctttccagccatagagattttaattagcccaactagaagcctagtgtgtgtgctttcttaatgtgtgtgccaatggtggatctttgctactgaatgtgtttgaacatgttttgagatttttttaaaataaattattatttgacaacaatccaaaaaaaatacggcttttccaatgatgaaatataatcagaagatgaaaaatagttctaaactatcaataatacaaagcaaatttctatcagccttgctaaagctaggggcccactaaatatttttatcggctaggcgtggtggtgcatgcctgtaatctcggaaggctgaggcaggaggatcatttgagctcatgagggcccaggaggtcaaggcttcagtgagccatgatcatgccactgcactccagtctggatgacagagagagaccctgtctcaaaaaatatatatttaaaaaataaaaataaaagctgaccccaaagacaaataagatt

SEQ ID NO: 280802 - DNA, 1859 bp, Homo sapiens
agctaggtcgaggccgggtgtgaatcggccgaggggaagagtgggagaagatgaggaacaaatgatgataaaaagaagcagtgaatgtaatcccttgctacaagaacccatcgcttctgctcagtttggtgctactgcaggaacagaatgccgtaagtctgtcccatgtggatgggaaagagttgtgaagcaaaggttatttgggaagacagcaggaagatttgatgtgtactttatcagcccacaaggactgaagttcagatccaaaagttcacttgctaattatcttcacaaaaatggagagacttctcttaagccagaagattttgattttactgtactttctaaaaggggtatcaagtcaagatataaagactgcagcatggcagccctgacatcccatctacaaaaccaaagtaacaattcaaactggaacctcaggacccgaagcaagtgcaaaaaggatgtgtttatgccgccaagtagtagttcagagttgcaggagagcagaggactctctaactttacttccactcatttgcttttgaaagaagatgagggtgttgatgatgttaacttcagaaaggttagaaagcccaaaggaaaggtgactattttgaaaggaatcccaattaagaaaactaaaaaaggatgtaggaagagctgttcaggttttgttcaaagtgatagcaaaagagaatctgtgtgtaataaagcagatgctgaaagtgaacctgttgcacaaaaaagtcagcttgatagaactgtctgcatttctgatgctggagcatgtggtgagaccctcagtgtgaccagtgaagaaaacagccttgtaaaaaaaaaagaaagatcattgagttcaggatcaaatttttgttctgaacaaaaaacttctggcatcataaacaaattttgttcagccaaagactcagaacacaacgagaagtatgaggatacctttttagaatctgaagaaatcggaacaaaagtagaagttgtggaaaggaaagaacatttgcatactgacattttaaaacgtggctctgaaatggacaacaactgctcaccaaccaggaaagacttcactggaagataccatcccacgaacacagatagaaagaaggaaaacaagcctgtatttttccagcaaatataacaaagaagctcttagccccccacgacgtaaagcctttaagaaatggacacctcctcggtcaccttttaatctcgttcaagaaacactttttcatgatccatggaagcttctcatcgctactatatttctcaatcggacctcaggcaaaatggcaatacctgtgctttggaagtttctggagaagtatccttcagctgaggtagcaagaaccgcagactggagagatgtgtcagaacttcttaaacctcttggtctctacgatcttcgggcaaaaaccattgtcaagttctcagatgaatacctgacaaagcagtggaagtatccaattgagcttcatgggattggtaaatatggcaacgactcttaccgaattttttgtgtcaatgagtggaagcaggtgcaccctgaagaccacaaattaaataaatatcatgactggctttgggaaaatcatgaaaaattaagtctatcttaaactctgcagctttcaagctcatctgttatgcatagctttgcacttcaaaaaagcttaattaagtacaaccaaccacctttccagccatagagattttaattagcccaactagaagcctagtgtgtgtgctttcttaatgtgtgtgccaatggtggatctttgctactgaatgtgtttgaacatgttttgagatttttttaaaataaattattatttgacaacaatcca

SEQ ID NO: 280803 - DNA, 1670 bp, Homo sapiens
ccaattttccattgaaatatgttgacaaatttccttacacataaatgtctattcatatcagatgatttcaacaatgataaattcttagaaacataatttctgggtctgaactttttttttttttttttttttgagacagagtcccctctctactaaaaatacaaaaattagctgggcgtggtggtgcacacctgtaatcccggctactcaggaggctgatgcagaagaatcgcttgaacccaggaggagacggaggttgcagtgagccaagatcacgccattgcactccagcctgggtgacagagtgaggctttgtctcaaaaataaaataataaaataaatgaaataagataaaataaaaatacagtactttgataaggaaaggtaactgtcagaaaggtgcgattcccccagtcctcacttaggagagagaccaacagcctgagttaaccaagtcctttgtagcccacagcaacagggagctagggactgagtcaggctctctgtaactgtccctatttgccctgggtccccaggagggtaatgttattaagcttcaggtatctgtcgctgttcttcttgaggccacaaggaggcagcacagtgtctctgtcaggaaaatacacttggatgtggtgacagacgttttcccgaggcttacgtttgattctgcaccaggcgctgcgtacacctgcttggaggctgcaacggggcgggctctgctgcgtcaacacatggacatcactggagaggaaaacccactcaacaagctccgcgtgaagattgaaccaggtccaggaggctcctctgtctgacacccactcccctcaattgagcttggagccccaagttaatgcgaacttcatgttgatcagtgcacgcttagaatactttatttggagggaggggcactccagagctctttgtagccaattctctggcccctgggctgactgaacccaagccattgcagccagataggagttctgtccagtctgtgcggttcgtgatgacttcaccattgctttgcatttgcacaagtccatatcgttttaccaggctctttcgcattccttcatgatcatcagggcagatctgtggattctgtagaataaaagcattagccttattttacagaggatgggactgagtgccagacaagttaagtgtcttgtccaggtcatgtacctaatcagtgcatgactgcaactgagatccgggtcctctctccaaattcagatctttttacttcctaacattttccttcattccatgtgtgactaatctgaaacctttttatgcaattgaagctcatgttccttgatgccgttaagtttgcagatgaatttcttagagacgggtaattagttttagcctggaacagctgtaaaaacaacacattggctgggcatggtggttcacgcctgtaatcccaggtcaaagcgggtggatcatgaggtcaagagttcgagaccagcctagccaatatggagaaccctgtctctactaaaaatacaaaaattagctgggtgtggtgatgcacacctgtaatcccagctactggggaggctgaggcaggagaatcgctcgaccccaggaggcagaggttgcagtgagctgagatcgtgccactgcactccagcctgggtgatagagcaagactccgtctt

SEQ ID NO: 280804 - DNA, 2409 bp, Homo sapiens
gccggccggtgagcaacggctctgcggccatggcgagcggcgagcattcccccggcagcggcgcggcccggcggccgctgcactccgcgcaggctgtggacgtggcctcggcctccaacttccgggcctttgagctgctgcacttgcacctggacctgcgggctgagttcgggcctccagggcccggcgcagggagccgggggctgagcggcaccgcggtcctggacctgcgctgcctggagcccgagggcgccgccgagctgcggctggactcgcacccgtgcctggaggtgacggcggcggcgctgcggcgggagcggcccggctcggaggagccgcctgcggagcccgtgagcttctacacgcagcccttctcgcactatggccaggccctgtgcgtgtccttcccgcagccctgccgcgccgccgagcgcctccaggtgctgctcacctaccgcgtcggggagggacccggggtttgctggttggctcccgagcagacagcaggaaagaagaagcccttcgtgtacacccagggccaggctgtcctaaaccgggccttcttcccttgcttcgacacgcctgctgttaaatacaagtattcagctcttattgaggtcccagatggcttcacagctgtgatgagtgctagcacctgggagaagagaggtccaaataagttcttcttccagatgtgtcagcccatcccctcctatctgatagctttggccatcggagatctggtttcggctgaagttggacccaggagccgggtgtgggctgagccctgcctgattgatgctgccaaggaggagtacaacggggtgatagaagaatttttggcaacaggagagaagctttttggaccttatgtttggggaaggtatgacttgctcttcatgccaccgtcctttccatttggaggaatggagaacccttgtctgacctttgtcaccccctgcctgctagctggggaccgctccttggcagatgtcatcatccatgagatctcccacagttggtttgggaacctggtcaccaacgccaactggggtgaattctggctcaatgaaggtttcaccatgtacgcccagaggaggatctccaccatcctctttggcgctgcgtacacctgcttggaggctgcaacggggcgggctctgctgcgtcaacacatggacatcactggagaggaaaacccactcaacaagctccgcgtgaagattgaaccaggcgttgacccggacgacacctataatgagaccccctacgagaaaggtttctgctttgtctcatacctggcccacttggtgggtgatcaggatcagtttgacagttttctcaaggcctatgtgcatgaattcaaattccgaagcatcttagccgatgactttctggacttctacttggaatatttccctgagcttaagaaaaagagagtggatatcattccaggttttgagtttgatcgatggctgaatacccccggctggcccccgtacctccctgatctctcccctggggactcactcatgaagcctgctgaagagctagcccaactgtgggcagccgaggagctggacatgaaggccattgaagccgtggccatctctccctggaagacctaccagctggtctacttcctggataagatcctccagaaatcccctctccctcctgggaatgtgaaaaaacttggagacacatacccaagtatctcaaatgcccggaatgcagagctccggctgcgatggggccaaatcgtccttaagaacgaccaccaggaagatttctggaaagtgaaggagttcctgcataaccaggggaagcagaagtatacacttccgctgtaccacgcaatgatgggtggcagtgaggtggcccagaccctcgccaaggagacttttgcatccaccgcctcccagctccacagcaatgttgtcaactatgtccagcagatcgtggcacccaagggcagttagaggctcgtgtgcatggcccctgcctcttcaggctctccaggctttcagaataattgtttgttcccaaattcctgttccctgatcaacttcctggagtttatatcccctcaggataatctattctctagcttaggtatctgtgactcttgggcctctgctctggtgggaacttacttctctatagcccactgagccccgagacagagaacctgcccacagctctccccgctacaggctgcaggcactgcagggcagcgggtattctcctccccacctaagtctctgggaagaagtggagaggactgatgctcttcttttttctctttctgtcctttttcttgctgattttatgcaaagggctggcattctgattgttcttttttcaggtttaatccttattttaataaagttttcaagcaaaaattaa

SEQ ID NO: 280805 - DNA, 3851 bp, Homo sapiens
  misc_feature (1116)..(1116): n is a, c, g, or t
  misc_feature (1131)..(1131): n is a, c, g, or t
  misc_feature (1256)..(1256): n is a, c, g, or t
  misc_feature (1731)..(1731): n is a, c, g, or t
  misc_feature (1921)..(1921): n is a, c, g, or t
  misc_feature (2040)..(2040): n is a, c, g, or t
  misc_feature (2062)..(2062): n is a, c, g, or t
ttcacacggcacgacttcatcgagaccaacggggacaactgcctggtgacactgctgccgctgctaaacatggcctacaagttccgcacccacagccctgaagccctggagcagctatacccctgggagtgcttcgtcttctgcctgatcatcttcggcaccttcaccaaccagatccacaagtggtcgcacacgtactttgggctgccacgctgggtcaccctcctgcaggactggcatgtcatcctgccacgtaaacaccatcgcatccaccacgtctcaccccacgagacctacttctgcatcaccacaggagtaaaagtccctcgcaatttcgactgttggaagaactcgaagaaggccagaaaggagtaggagatggcacagttagctggggtctagaagatgacgaagacatgacacttacaagatggacagggatgataattgggcctccaagaacaatttatgaaaaccgaatatacagccttaaaatagaatgtggacctaaatacccagaagcacccccctttgtaagatttgtaacaaaaattaatatgaatggagtaaatagttctaatggagtggtggacccaagagccatatcagtgctagcaaaatggcagaattcatatagcatcaaagttgtcctgcaagagcttcggcgcctaatgatgtctaaagaaaatatgaaactccctcagccgcccgaaggacagtgttacagcaattaatcaaaaagaaaaaccacaggcccttccccttccccccaattcgatttaatcagtcttcattttccacagtagtaaattttctagatacgtcttgtagacctcaaagtaccggaaaggaagctcccattcaaaggaaatttatcttaagatactgtaaatgatactaattttttgtccatttgaaatatataagttgtgctataacaaatcatcctgtcaagtgtaaccactgtccacgtagttgaacttctgggatcaagaaagtctatttaaattgattcccatcataactggtggggcacatctaactcaactgtgaaaagacacatcacacaatcaccttgctgctgattacacggcctggggtctctgccttctcccnttaccctcccgcctnccaccctccctgcaacaacagccctctagcctggggggcttgttagagtagatgtgaaggtttcaggtcgcagcctgtgggactactgctaggtgtgtggggtgtttcgcctgcacccctggttnctttaagtcttaagtgatgccccttccaaaccatcatcctgtccccacgctcctccactcccgcccttggccgaagcatagattgtaacccctccactcccctctgagattggccttcggtgaggaattcagggctttccccatatcttctctccccccacctttatcgaggggtgctgctttttctccctcctcctcaagttcctttttgcaccgtcaccacccaacaccttccatgacacttccttgctttggccagaagccatcaggtaaggttggaaagagcctctgacctcccttgtttagttttggaaccatactcactcactctccaccagcctgggaaatgaatattgggtcctcagccctgccaccctctgctgtcatcagctgatgcattgtttttagctcaggttttgataaggtgaaaagaatagtcaccagggttactcagacctgccagctctcggagtcnttggtggttgaacttggagaaagaccgcatgaagatacttgtaagcacacatgatccctctgaattgttttactttcctgtaactgcttttgcttttaaaaattgaagaagttttaaacagggctttcatttggtcatccttgcaatccattggggtctagtttggaatctgacaactggaacaaaaagnaccttgaatccggtgcatgccttggttttggtgctgctgctgcttcccaagatcctcagcagggattaagaaggaacccggtgtgcacagcagatccccgaaattggtgggcttgaccncctggcaaattgctgcgtcttnccacttgctgttcaggaccactaaatgctgaaatgtggatgcataccgaaataaaagcaattcattgtgtactaaaggttttttttttttttttaatttagtatttgtgtaaaaccaccttttgaagcagcaactatcaagtctgaaaagcaattgatgtttccattaatctttttctggggggaaaaccttagttctaaggatttaacatcctgtaagtgaagtttaacataacagtattccataagcagcctttttattgtcagaccattgcctgattttaatataataaaaaaaaagtgtgcgttaatatttaaaaaaaaaacctttgtcaccccctgcctgctagctggggaccgctccttggcagatgtcatcatccatgagatctcccacagttggtttgggaacctggtcaccaacgccaactggggtgaattctggctcaatgaaggtttcaccatgtacgcccagaggaggatctccaccatcctctttggcgctgcgtacacctgcttggaggctgcaacggggcgggctctgctgcgtcaacacatggacatcactggagaggaaaacccactcaacaagctccgcgtgaagattgaaccaggcgttgacccggacgacacctataatgagaccccctacgagaaaggtttctgctttgtctcatacctggcccacttggtgggtgatcaggatcagtttgacagttttctcaaggcctatgtgcatgaattcaaattccgaagcatcttagccgatgactttctggacttctacttggaatatttccctgagcttaagaaaaagagagtggatatcattccaggttttgagtttgatcgatggctgaatacccccggctggcccccgtacctccctgatctctcccctggggactcactcatgaagcctgctgaagagctagcccaactgtgggcagccgaggagctggacatgaaggccattgaagccgtggccatctctccctggaagacctaccagctggtctacttcctggataagatcctccagaaatcccctctccctcctgggaatgtgaaaaaacttggagacacatacccaagtatctcaaatgcccggaatgcagagctccggctgcgatggggccaaatcgtccttaagaacgaccaccaggaagatttctggaaagtgaaggagttcctgcataaccaggggaagcagaagtatacacttccgctgtaccacgcaatgatgggtggcagtgaggtggcccagaccctcgccaaggagacttttgcatccaccgcctcccagctccacagcaatgttgtcaactatgtccagcagatcgtggcacccaagggcagttagaggctcgtgtgcatggcccctgcctcttcaggctctccaggctttcagaataattgtttgttcccaaattcctgttccctgatcaacttcctggagtttatatcccctcaggataatctattctctagcttaggtatctgtgactcttgggcctctgctctggtgggaacttacttctctatagcccactgagccccgagacagagaacctgcccacagctctccccgctacaggctgcaggcactgcagggcagcgggtattctcctccccacctaagtctctgggaagaagtggagaggactgatgctcttcttttttctctttctgtcctttttcttgctgattttatgcaaagggctggcattctgattgttcttttttcaggtttaatccttattttaataaagttttcaagcaaaaattaa

SEQ ID NO: 280806 - DNA, 3550 bp, Homo sapiens
  misc_feature (815)..(815): n is a, c, g, or t
  misc_feature (830)..(830): n is a, c, g, or t
  misc_feature (955)..(955): n is a, c, g, or t
  misc_feature (1430)..(1430): n is a, c, g, or t
  misc_feature (1620)..(1620): n is a, c, g, or t
  misc_feature (1739)..(1739): n is a, c, g, or t
  misc_feature (1761)..(1761): n is a, c, g, or t
aggaaagcattttatctccacagcaatcctatgaggttgatactactatcctcatagaaggggaaactgatgccaggagaggttcaagcgtcttacctgaagtcacaaagcaaactgagtgatgaaggaagacttgaacctagaaaatttcactgcaaagacaatttatgaaaaccgaatatacagccttaaaatagaatgtggacctaaatacccagaagcacccccctttgtaagatttgtaacaaaaattaatatgaatggagtaaatagttctaatggagtggtggacccaagagccatatcagtgctagcaaaatggcagaattcatatagcatcaaagttgtcctgcaagagcttcggcgcctaatgatgtctaaagaaaatatgaaactccctcagccgcccgaaggacagtgttacagcaattaatcaaaaagaaaaaccacaggcccttccccttccccccaattcgatttaatcagtcttcattttccacagtagtaaattttctagatacgtcttgtagacctcaaagtaccggaaaggaagctcccattcaaaggaaatttatcttaagatactgtaaatgatactaattttttgtccatttgaaatatataagttgtgctataacaaatcatcctgtcaagtgtaaccactgtccacgtagttgaacttctgggatcaagaaagtctatttaaattgattcccatcataactggtggggcacatctaactcaactgtgaaaagacacatcacacaatcaccttgctgctgattacacggcctggggtctctgccttctcccnttaccctcccgcctnccaccctccctgcaacaacagccctctagcctggggggcttgttagagtagatgtgaaggtttcaggtcgcagcctgtgggactactgctaggtgtgtggggtgtttcgcctgcacccctggttnctttaagtcttaagtgatgccccttccaaaccatcatcctgtccccacgctcctccactcccgcccttggccgaagcatagattgtaacccctccactcccctctgagattggccttcggtgaggaattcagggctttccccatatcttctctccccccacctttatcgaggggtgctgctttttctccctcctcctcaagttcctttttgcaccgtcaccacccaacaccttccatgacacttccttgctttggccagaagccatcaggtaaggttggaaagagcctctgacctcccttgtttagttttggaaccatactcactcactctccaccagcctgggaaatgaatattgggtcctcagccctgccaccctctgctgtcatcagctgatgcattgtttttagctcaggttttgataaggtgaaaagaatagtcaccagggttactcagacctgccagctctcggagtcnttggtggttgaacttggagaaagaccgcatgaagatacttgtaagcacacatgatccctctgaattgttttactttcctgtaactgcttttgcttttaaaaattgaagaagttttaaacagggctttcatttggtcatccttgcaatccattggggtctagtttggaatctgacaactggaacaaaaagnaccttgaatccggtgcatgccttggttttggtgctgctgctgcttcccaagatcctcagcagggattaagaaggaacccggtgtgcacagcagatccccgaaattggtgggcttgaccncctggcaaattgctgcgtcttnccacttgctgttcaggaccactaaatgctgaaatgtggatgcataccgaaataaaagcaattcattgtgtactaaaggttttttttttttttttaatttagtatttgtgtaaaaccaccttttgaagcagcaactatcaagtctgaaaagcaattgatgtttccattaatctttttctggggggaaaaccttagttctaaggatttaacatcctgtaagtgaagtttaacataacagtattccataagcagcctttttattgtcagaccattgcctgattttaatataataaaaaaaaagtgtgcgttaatatttaaaaaaaaaacctttgtcaccccctgcctgctagctggggaccgctccttggcagatgtcatcatccatgagatctcccacagttggtttgggaacctggtcaccaacgccaactggggtgaattctggctcaatgaaggtttcaccatgtacgcccagaggaggatctccaccatcctctttggcgctgcgtacacctgcttggaggctgcaacggggcgggctctgctgcgtcaacacatggacatcactggagaggaaaacccactcaacaagctccgcgtgaagattgaaccaggcgttgacccggacgacacctataatgagaccccctacgagaaaggtttctgctttgtctcatacctggcccacttggtgggtgatcaggatcagtttgacagttttctcaaggcctatgtgcatgaattcaaattccgaagcatcttagccgatgactttctggacttctacttggaatatttccctgagcttaagaaaaagagagtggatatcattccaggttttgagtttgatcgatggctgaatacccccggctggcccccgtacctccctgatctctcccctggggactcactcatgaagcctgctgaagagctagcccaactgtgggcagccgaggagctggacatgaaggccattgaagccgtggccatctctccctggaagacctaccagctggtctacttcctggataagatcctccagaaatcccctctccctcctgggaatgtgaaaaaacttggagacacatacccaagtatctcaaatgcccggaatgcagagctccggctgcgatggggccaaatcgtccttaagaacgaccaccaggaagatttctggaaagtgaaggagttcctgcataaccaggggaagcagaagtatacacttccgctgtaccacgcaatgatgggtggcagtgaggtggcccagaccctcgccaaggagacttttgcatccaccgcctcccagctccacagcaatgttgtcaactatgtccagcagatcgtggcacccaagggcagttagaggctcgtgtgcatggcccctgcctcttcaggctctccaggctttcagaataattgtttgttcccaaattcctgttccctgatcaacttcctggagtttatatcccctcaggataatctattctctagcttaggtatctgtgactcttgggcctctgctctggtgggaacttacttctctatagcccactgagccccgagacagagaacctgcccacagctctccccgctacaggctgcaggcactgcagggcagcgggtattctcctccccacctaagtctctgggaagaagtggagaggactgatgctcttcttttttctctttctgtcctttttcttgctgattttatgcaaagggctggcattctgattgttcttttttcaggtttaatccttattttaataaagttttcaagcaaaaattaa

SEQ ID NO: 280807 - DNA, 690 bp, Homo sapiens
ctgtgtggtgatccgatcttgcactccgtcactgtggctgactgcattgtcacattcacttggcggaggccaatttcctacaggtgctttcaggatcaggtcactgcgatggtctctaaacaccattctgctttctctgctctcttgtctttaggagccgggtgtgggctgagccctgcctgattgatgctgccaaggaggagtacaacggggtgatagaagaatttttggcaacaggagagaagctttttggaccttatgtttggggaaggtatgacttgctcttcatgccaccgtcctttccatttggaggaatggagaacccttgtctgacctttgtcaccccctgcctgctagctggggaccgctccttggcagatgtcatcatccatgagatctcccacagttggtttgggaacctggtcaccaacgccaactggggtgaattctggctcaatgaaggtttcaccatgtacgcccagaggaggatctccaccatcctctttggcgctgcgtacacctgcttggaggctgcaacggggcgggctctgctgcgtcaacacatggacatcactggagaggaaaacccactcaacaagctccgcgtgaagattgaaccaggcgttgacccgcacgacacctataactgagaccatgtatcgagaagtacgcgagcatcgattcgtatca

SEQ ID NO: 280808 - DNA, 516 bp, Homo sapiens
ctgtgtggtgatccgatcttgcactccgtcactgtggctgactgcattgtcacattcacttggcggaggccaatttcctacaggtgctttcaggatcaggtcactgcgatggtctctaaacaccattctgctttctctgctctcttgtctttaggagccgggtgtgggctgagccctgcctgattgatgctgccaaggaggagtacaacggggtgatagaagaatttttggcaacaggagagaagctttttggaccttatgtttggggaaggtgtggtatcacattgactctagtgtctcctgttaaactgagtcactggcttccattcttcctcttcgtgtggcttttccacctcctgcctcccagagcaaagtttccctgatcccagaagtgaaggagaggaggaagagaggagggtatgagccaggcttctcactgttgctgaggagagggcctaggagatgaggttctttgtgtgtgtgtgtgtgtgtgtgtgtgtgtgtgtgtgtgtgtgt

SEQ ID NO: 280809 - DNA, 630 bp, Homo sapiens
tacagatgacaagatcagaggctcggtccaaggtctctgagatgacccatgggatgcagtgaggaatggaccctttctggtggctctgccctgtgaagtggatgtcatactttggcatggattccaggatgaactaaatacacagaggagagagctttctagttcaaaccagactggctggcggaaaggttttaaggattacctaaaattctctcattccagccagctcacttctctggccagactgagctcgtgtgggagatgtcagttctgaaatgttcttcttttcgcttaggtttgctggttggctcccgagcagacagcaggaaagaagaagcccttcgtgtacacccagggccaggctgtcctaaaccgggccttcttcccttgcttcgacacgcctgctgttaaatacaagtattcagctcttattgaggtaaggagactaaggttaggtgcacctgcccttgggatgaagaaatgatttcagatctatcaatcaggtcacgtttcagtggtaaattattatatccattcagtggtacttctgaaaaattgcttacttttaaattcttccacctactgaagttgtatgtagcctctgtatacggtgccgagctcgattcgtat

SEQ ID NO: 280810 - DNA, 2122 bp, Homo sapiens
  misc_feature (27)..(28): n is a, c, g, or t
  misc_feature (30)..(32): n is a, c, g, or t
  misc_feature (39)..(42): n is a, c, g, or t
  misc_feature (44)..(44): n is a, c, g, or t
atcacgccactgggcggtgcatccttnncnnnttcggcnnnngngtctcctccctggccctggaggcttgtccagatgcgccgcattcccgctcatcgcacactgccgtttctaacattttccgtggctttctagatgacctgttgttcatgcacttcacttagtgccctcttggacttttgggccgaggtttgctggttggctcccgagcagacagcaggaaagaagaagcccttcgtgtacacccagggccaggctgtcctaaaccgggccttcttcccttgcttcgacacgcctgctgttaaatacaagtattcagctcttattgaggtcccagatggcttcacagctgtgatgagtgctagcacctgggagaagagaggtccaaataagttcttcttccagatgtgtcagcccatcccctcctatctgatagctttggccatcggagatctggtttcggctgaagttggacccaggagccgggtgtgggctgagccctgcctgattgatgctgccaaggaggagtacaacggggtgatagaagaatttttggcaacaggagagaagctttttggaccttatgtttggggaaggtatgacttgctcttcatgccaccgtcctttccatttggaggaatggagaacccttgtctgacctttgtcaccccctgcctgctagctggggaccgctccttggcagatgtcatcatccatgagatctcccacagttggtttgggaacctggtcaccaacgccaactggggtgaattctggctcaatgaaggtttcaccatgtacgcccagaggaggatctccaccatcctctttggcgctgcgtacacctgcttggaggctgcaacggggcgggctctgctgcgtcaacacatggacatcactggagaggaaaacccactcaacaagctccgcgtgaagattgaaccaggcgttgacccggacgacacctataatgagaccccctacgagaaaggtttctgctttgtctcatacctggcccacttggtgggtgatcaggatcagtttgacagttttctcaaggcctatgtgcatgaattcaaattccgaagcatcttagccgatgactttctggacttctacttggaatatttccctgagcttaagaaaaagagagtggatatcattccaggttttgagtttgatcgatggctgaatacccccggctggcccccgtacctccctgatctctcccctggggactcactcatgaagcctgctgaagagctagcccaactgtgggcagccgaggagctggacatgaaggccattgaagccgtggccatctctccctggaagacctaccagctggtctacttcctggataagatcctccagaaatcccctctccctcctgggaatgtgaaaaaacttggagacacatacccaagtatctcaaatgcccggaatgcagagctccggctgcgatggggccaaatcgtccttaagaacgaccaccaggaagatttctggaaagtgaaggagttcctgcataaccaggggaagcagaagtatacacttccgctgtaccacgcaatgatgggtggcagtgaggtggcccagaccctcgccaaggagacttttgcatccaccgcctcccagctccacagcaatgttgtcaactatgtccagcagatcgtggcacccaagggcagttagaggctcgtgtgcatggcccctgcctcttcaggctctccaggctttcagaataattgtttgttcccaaattcctgttccctgatcaacttcctggagtttatatcccctcaggataatctattctctagcttaggtatctgtgactcttgggcctctgctctggtgggaacttacttctctatagcccactgagccccgagacagagaacctgcccacagctctccccgctacaggctgcaggcactgcagggcagcgggtattctcctccccacctaagtctctgggaagaagtggagaggactgatgctcttcttttttctctttctgtcctttttcttgctgattttatgcaaagggctggcattctgattgttcttttttcaggtttaatccttattttaataaagttttcaagcaaaaattaa

SEQ ID NO: 280811 - DNA, 2228 bp, Homo sapiens
tacagatgacaagatcagaggctcggtccaaggtctctgagatgacccatgggatgcagtgaggaatggaccctttctggtggctctgccctgtgaagtggatgtcatactttggcatggattccaggatgaactaaatacacagaggagagagctttctagttcaaaccagactggctggcggaaaggttttaaggattacctaaaattctctcattccagccagctcacttctctggccagactgagctcgtgtgggagatgtcagttctgaaatgttcttcttttcgcttaggtttgctggttggctcccgagcagacagcaggaaagaagaagcccttcgtgtacacccagggccaggctgtcctaaaccgggccttcttcccttgcttcgacacgcctgctgttaaatacaagtattcagctcttattgaggtcccagatggcttcacagctgtgatgagtgctagcacctgggagaagagaggtccaaataagttcttcttccagatgtgtcagcccatcccctcctatctgatagctttggccatcggagatctggtttcggctgaagttggacccaggagccgggtgtgggctgagccctgcctgattgatgctgccaaggaggagtacaacggggtgatagaagaatttttggcaacaggagagaagctttttggaccttatgtttggggaaggtatgacttgctcttcatgccaccgtcctttccatttggaggaatggagaacccttgtctgacctttgtcaccccctgcctgctagctggggaccgctccttggcagatgtcatcatccatgagatctcccacagttggtttgggaacctggtcaccaacgccaactggggtgaattctggctcaatgaaggtttcaccatgtacgcccagaggaggatctccaccatcctctttggcgctgcgtacacctgcttggaggctgcaacggggcgggctctgctgcgtcaacacatggacatcactggagaggaaaacccactcaacaagctccgcgtgaagattgaaccaggcgttgacccggacgacacctataatgagaccccctacgagaaaggtttctgctttgtctcatacctggcccacttggtgggtgatcaggatcagtttgacagttttctcaaggcctatgtgcatgaattcaaattccgaagcatcttagccgatgactttctggacttctacttggaatatttccctgagcttaagaaaaagagagtggatatcattccaggttttgagtttgatcgatggctgaatacccccggctggcccccgtacctccctgatctctcccctggggactcactcatgaagcctgctgaagagctagcccaactgtgggcagccgaggagctggacatgaaggccattgaagccgtggccatctctccctggaagacctaccagctggtctacttcctggataagatcctccagaaatcccctctccctcctgggaatgtgaaaaaacttggagacacatacccaagtatctcaaatgcccggaatgcagagctccggctgcgatggggccaaatcgtccttaagaacgaccaccaggaagatttctggaaagtgaaggagttcctgcataaccaggggaagcagaagtatacacttccgctgtaccacgcaatgatgggtggcagtgaggtggcccagaccctcgccaaggagacttttgcatccaccgcctcccagctccacagcaatgttgtcaactatgtccagcagatcgtggcacccaagggcagttagaggctcgtgtgcatggcccctgcctcttcaggctctccaggctttcagaataattgtttgttcccaaattcctgttccctgatcaacttcctggagtttatatcccctcaggataatctattctctagcttaggtatctgtgactcttgggcctctgctctggtgggaacttacttctctatagcccactgagccccgagacagagaacctgcccacagctctccccgctacaggctgcaggcactgcagggcagcgggtattctcctccccacctaagtctctgggaagaagtggagaggactgatgctcttcttttttctctttctgtcctttttcttgctgattttatgcaaagggctggcattctgattgttcttttttcaggtttaatccttattttaataaagttttcaagcaaaaattaa

SEQ ID NO: 280812 - DNA, 1797 bp, Homo sapiens
ctgtgtggtgatccgatcttgcactccgtcactgtggctgactgcattgtcacattcacttggcggaggccaatttcctacaggtgctttcaggatcaggtcactgcgatggtctctaaacaccattctgctttctctgctctcttgtctttaggagccgggtgtgggctgagccctgcctgattgatgctgccaaggaggagtacaacggggtgatagaagaatttttggcaacaggagagaagctttttggaccttatgtttggggaaggtatgacttgctcttcatgccaccgtcctttccatttggaggaatggagaacccttgtctgacctttgtcaccccctgcctgctagctggggaccgctccttggcagatgtcatcatccatgagatctcccacagttggtttgggaacctggtcaccaacgccaactggggtgaattctggctcaatgaaggtttcaccatgtacgcccagaggaggatctccaccatcctctttggcgctgcgtacacctgcttggaggctgcaacggggcgggctctgctgcgtcaacacatggacatcactggagaggaaaacccactcaacaagctccgcgtgaagattgaaccaggcgttgacccggacgacacctataatgagaccccctacgagaaaggtttctgctttgtctcatacctggcccacttggtgggtgatcaggatcagtttgacagttttctcaaggcctatgtgcatgaattcaaattccgaagcatcttagccgatgactttctggacttctacttggaatatttccctgagcttaagaaaaagagagtggatatcattccaggttttgagtttgatcgatggctgaatacccccggctggcccccgtacctccctgatctctcccctggggactcactcatgaagcctgctgaagagctagcccaactgtgggcagccgaggagctggacatgaaggccattgaagccgtggccatctctccctggaagacctaccagctggtctacttcctggataagatcctccagaaatcccctctccctcctgggaatgtgaaaaaacttggagacacatacccaagtatctcaaatgcccggaatgcagagctccggctgcgatggggccaaatcgtccttaagaacgaccaccaggaagatttctggaaagtgaaggagttcctgcataaccaggggaagcagaagtatacacttccgctgtaccacgcaatgatgggtggcagtgaggtggcccagaccctcgccaaggagacttttgcatccaccgcctcccagctccacagcaatgttgtcaactatgtccagcagatcgtggcacccaagggcagttagaggctcgtgtgcatggcccctgcctcttcaggctctccaggctttcagaataattgtttgttcccaaattcctgttccctgatcaacttcctggagtttatatcccctcaggataatctattctctagcttaggtatctgtgactcttgggcctctgctctggtgggaacttacttctctatagcccactgagccccgagacagagaacctgcccacagctctccccgctacaggctgcaggcactgcagggcagcgggtattctcctccccacctaagtctctgggaagaagtggagaggactgatgctcttcttttttctctttctgtcctttttcttgctgattttatgcaaagggctggcattctgattgttcttttttcaggtttaatccttattttaataaagttttcaagcaaaaattaa

SEQ ID NO: 280813 - DNA, 2173 bp, Homo sapiens
gccggccggtgagcaacggctctgcggccatggcgagcggcgagcattcccccggcagcggcgcggcccggcggccgctgcactccgcgcaggctgtggacgtggcctcggcctccaacttccgggcctttgagctgctgcacttgcacctggacctgcgggctgagttcgggcctccagggcccggcgcagggagccgggggctgagcggcaccgcggtcctggacctgcgctgcctggagcccgagggcgccgccgagctgcggctggactcgcacccgtgcctggaggtgacggcggcggcgctgcggcgggagcggcccggctcggaggagccgcctgcggagcccgtgagcttctacacgcagcccttctcgcactatggccaggccctgtgcgtgtccttcccgcagccctgccgcgccgccgagcgcctccaggtgctgctcacctaccgcgtcggggagggacccggggtttgctggttggctcccgagcagacagcaggaaagaagaagcccttcgtgtacacccagggccaggctgtcctaaaccgggccttcttcccttgcttcgacacgcctgctgttaaatacaagtattcagctcttattgaggtcccagatggcttcacagctgtgatgagtgctagcacctgggagaagagaggtccaaataagttcttcttccagatgtgtcagcccatcccctcctatctgatagctttggccatcggagatctggtttcggctgaagttggacccaggagccgggtgtgggctgagccctgcctgattgatgctgccaaggaggagtacaacggggtgatagaagaatttttggcaacaggagagaagctttttggaccttatgtttggggaaggcgctgcgtacacctgcttggaggctgcaacggggcgggctctgctgcgtcaacacatggacatcactggagaggaaaacccactcaacaagctccgcgtgaagattgaaccaggcgttgacccggacgacacctataatgagaccccctacgagaaaggtttctgctttgtctcatacctggcccacttggtgggtgatcaggatcagtttgacagttttctcaaggcctatgtgcatgaattcaaattccgaagcatcttagccgatgactttctggacttctacttggaatatttccctgagcttaagaaaaagagagtggatatcattccaggttttgagtttgatcgatggctgaatacccccggctggcccccgtacctccctgatctctcccctggggactcactcatgaagcctgctgaagagctagcccaactgtgggcagccgaggagctggacatgaaggccattgaagccgtggccatctctccctggaagacctaccagctggtctacttcctggataagatcctccagaaatcccctctccctcctgggaatgtgaaaaaacttggagacacatacccaagtatctcaaatgcccggaatgcagagctccggctgcgatggggccaaatcgtccttaagaacgaccaccaggaagatttctggaaagtgaaggagttcctgcataaccaggggaagcagaagtatacacttccgctgtaccacgcaatgatgggtggcagtgaggtggcccagaccctcgccaaggagacttttgcatccaccgcctcccagctccacagcaatgttgtcaactatgtccagcagatcgtggcacccaagggcagttagaggctcgtgtgcatggcccctgcctcttcaggctctccaggctttcagaataattgtttgttcccaaattcctgttccctgatcaacttcctggagtttatatcccctcaggataatctattctctagcttaggtatctgtgactcttgggcctctgctctggtgggaacttacttctctatagcccactgagccccgagacagagaacctgcccacagctctccccgctacaggctgcaggcactgcagggcagcgggtattctcctccccacctaagtctctgggaagaagtggagaggactgatgctcttcttttttctctttctgtcctttttcttgctgattttatgcaaagggctggcattctgattgttcttttttcaggtttaatccttattttaataaagttttcaagcaaaaattaa

SEQ ID NO: 280814 - DNA, 2119 bp, Homo sapiens
  misc_feature (27)..(28): n is a, c, g, or t
  misc_feature (30)..(32): n is a, c, g, or t
  misc_feature (39)..(42): n is a, c, g, or t
  misc_feature (44)..(44): n is a, c, g, or t
atcacgccactgggcggtgcatccttnncnnnttcggcnnnngngtctcctccctggccctggaggcttgtccagatgcgccgcattcccgctcatcgcacactgccgtttctaacattttccgtggctttctagatgacctgttgttcatgcacttcacttagtgccctcttggacttttgggccgaggtttgctggttggctcccgagcagacagcaggaaagaagaagcccttcgtgtacacccagggccaggctgtcctaaaccgggccttcttcccttgcttcgacacgcctgctgttaaatacaagtattcagctcttattgaggagccgggtgtgggctgagccctgcctgattgatgctgccaaggaggagtacaacggggtgatagaagaatttttggcaacaggagagaagctttttggaccttatgtttggggaaggtgtggtatcacattgactctagtgtctcctgttaaactgagtcactggcttccattcttcctcttcgtgtggcttttccacctcctgcctcccagagcaaagtttccctgatcccagaagtgaaggagaggaggaagagaggagggtatgacttgctcttcatgccaccgtcctttccatttggaggaatggagaacccttgtctgacctttgtcaccccctgcctgctagctggggaccgctccttggcagatgtcatcatccatgagatctcccacagttggtttgggaacctggtcaccaacgccaactggggtgaattctggctcaatgaaggtttcaccatgtacgcccagaggaggatctccaccatcctctttggcgctgcgtacacctgcttggaggctgcaacggggcgggctctgctgcgtcaacacatggacatcactggagaggaaaacccactcaacaagctccgcgtgaagattgaaccaggcgttgacccggacgacacctataatgagaccccctacgagaaaggtttctgctttgtctcatacctggcccacttggtgggtgatcaggatcagtttgacagttttctcaaggcctatgtgcatgaattcaaattccgaagcatcttagccgatgactttctggacttctacttggaatatttccctgagcttaagaaaaagagagtggatatcattccaggttttgagtttgatcgatggctgaatacccccggctggcccccgtacctccctgatctctcccctggggactcactcatgaagcctgctgaagagctagcccaactgtgggcagccgaggagctggacatgaaggccattgaagccgtggccatctctccctggaagacctaccagctggtctacttcctggataagatcctccagaaatcccctctccctcctgggaatgtgaaaaaacttggagacacatacccaagtatctcaaatgcccggaatgcagagctccggctgcgatggggccaaatcgtccttaagaacgaccaccaggaagatttctggaaagtgaaggagttcctgcataaccaggggaagcagaagtatacacttccgctgtaccacgcaatgatgggtggcagtgaggtggcccagaccctcgccaaggagacttttgcatccaccgcctcccagctccacagcaatgttgtcaactatgtccagcagatcgtggcacccaagggcagttagaggctcgtgtgcatggcccctgcctcttcaggctctccaggctttcagaataattgtttgttcccaaattcctgttccctgatcaacttcctggagtttatatcccctcaggataatctattctctagcttaggtatctgtgactcttgggcctctgctctggtgggaacttacttctctatagcccactgagccccgagacagagaacctgcccacagctctccccgctacaggctgcaggcactgcagggcagcgggtattctcctccccacctaagtctctgggaagaagtggagaggactgatgctcttcttttttctctttctgtcctttttcttgctgattttatgcaaagggctggcattctgattgttcttttttcaggtttaatccttattttaataaagttttcaagcaaaaattaa

SEQ ID NO: 280815 - DNA, 2345 bp, Homo sapiens
gccggccggtgagcaacggctctgcggccatggcgagcggcgagcattcccccggcagcggcgcggcccggcggccgctgcactccgcgcaggctgtggacgtggcctcggcctccaacttccgggcctttgagctgctgcacttgcacctggacctgcgggctgagttcgggcctccagggcccggcgcagggagccgggggctgagcggcaccgcggtcctggacctgcgctgcctggagcccgagggcgccgccgagctgcggctggactcgcacccgtgcctggaggtgacggcggcggcgctgcggcgggagcggcccggctcggaggagccgcctgcggagcccgtgagcttctacacgcagcccttctcgcactatggccaggccctgtgcgtgtccttcccgcagccctgccgcgccgccgagcgcctccaggtgctgctcacctaccgcgtcggggagggacccggggtttgctggttggctcccgagcagacagcaggaaagaagaagcccttcgtgtacacccagggccaggctgtcctaaaccgggccttcttcccttgcttcgacacgcctgctgttaaatacaagtattcagctcttattgaggtcccagatggcttcacagctgtgatgagtgctagcacctgggagaagagaggtccaaataagttcttcttccagatgtgtcagcccatcccctcctatctgatagctttggccatcggagatctggtttcggctgaagttggacccaggagccgggtgtgggctgagccctgcctgattgatgctgccaaggaggagtacaacggggtgatagaagaatttttggcaacaggagagaagctttttggaccttatgtttggggaaggtatgacttgctcttcatgccaccgtcctttccatttggaggaatggagaacccttgtctgacctttgtcaccccctgcctgctagctggggaccgctccttggcagatgtcatcatccatgagatctcccacagttggtttgggaacctggtcaccaacgccaactggggtgaattctggctcaatgaaggtttcaccatgtacgcccagaggaggatctccaccatcctctttggcgctgcgtacacctgcttggaggctgcaacggggcgggctctgctgcgtcaacacatggacatcactggagaggaaaacccactcaacaagctccgcgtgaagattgaaccaggcgttgacccggacgacacctataatgagaccccctacgagaaaggtttctgctttgtctcatacctggcccacttggtgggtgatcaggatcagtttgacagttttctcaaggcctatgtgcatgaattcaaattccgaagcatcttagccgatgactttctggacttctacttggaatatttccctgagcttaagaaaaagagagtggatatcattccaggttttgagtttgatcgatggctgaatacccccggctggcccccgtacctccctgatctctcccctggggactcactcatgaagcctgctgaagagctagcccaactgtgggcagccgaggagctggacatgaaggccattgaagccgtggccatctctccctggaagacctaccagctggtctacttcctggataagatcctccagaaatcccctctccctcctggctgcgatggggccaaatcgtccttaagaacgaccaccaggaagatttctggaaagtgaaggagttcctgcataaccaggggaagcagaagtatacacttccgctgtaccacgcaatgatgggtggcagtgaggtggcccagaccctcgccaaggagacttttgcatccaccgcctcccagctccacagcaatgttgtcaactatgtccagcagatcgtggcacccaagggcagttagaggctcgtgtgcatggcccctgcctcttcaggctctccaggctttcagaataattgtttgttcccaaattcctgttccctgatcaacttcctggagtttatatcccctcaggataatctattctctagcttaggtatctgtgactcttgggcctctgctctggtgggaacttacttctctatagcccactgagccccgagacagagaacctgcccacagctctccccgctacaggctgcaggcactgcagggcagcgggtattctcctccccacctaagtctctgggaagaagtggagaggactgatgctcttcttttttctctttctgtcctttttcttgctgattttatgcaaagggctggcattctgattgttcttttttcaggtttaatccttattttaataaagttttcaagcaaaaattaa

SEQ ID NO: 280816 - DNA, 1886 bp, Homo sapiens
  misc_feature (27)..(28): n is a, c, g, or t
  misc_feature (30)..(32): n is a, c, g, or t
  misc_feature (39)..(42): n is a, c, g, or t
  misc_feature (44)..(44): n is a, c, g, or t
atcacgccactgggcggtgcatccttnncnnnttcggcnnnngngtctcctccctggccctggaggcttgtccagatgcgccgcattcccgctcatcgcacactgccgtttctaacattttccgtggctttctagatgacctgttgttcatgcacttcacttagtgccctcttggacttttgggccgaggtttgctggttggctcccgagcagacagcaggaaagaagaagcccttcgtgtacacccagggccaggctgtcctaaaccgggccttcttcccttgcttcgacacgcctgctgttaaatacaagtattcagctcttattgaggtcccagatggcttcacagctgtgatgagtgctagcacctgggagaagagaggtccaaataagttcttcttccagatgtgtcagcccatcccctcctatctgatagctttggccatcggagatctggtttcggctgaagttggacccaggagccgggtgtgggctgagccctgcctgattgatgctgccaaggaggagtacaacggggtgatagaagaatttttggcaacaggagagaagctttttggaccttatgtttggggaaggcgctgcgtacacctgcttggaggctgcaacggggcgggctctgctgcgtcaacacatggacatcactggagaggaaaacccactcaacaagctccgcgtgaagattgaaccaggcgttgacccggacgacacctataatgagaccccctacgagaaaggtttctgctttgtctcatacctggcccacttggtgggtgatcaggatcagtttgacagttttctcaaggcctatgtgcatgaattcaaattccgaagcatcttagccgatgactttctggacttctacttggaatatttccctgagcttaagaaaaagagagtggatatcattccaggttttgagtttgatcgatggctgaatacccccggctggcccccgtacctccctgatctctcccctggggactcactcatgaagcctgctgaagagctagcccaactgtgggcagccgaggagctggacatgaaggccattgaagccgtggccatctctccctggaagacctaccagctggtctacttcctggataagatcctccagaaatcccctctccctcctgggaatgtgaaaaaacttggagacacatacccaagtatctcaaatgcccggaatgcagagctccggctgcgatggggccaaatcgtccttaagaacgaccaccaggaagatttctggaaagtgaaggagttcctgcataaccaggggaagcagaagtatacacttccgctgtaccacgcaatgatgggtggcagtgaggtggcccagaccctcgccaaggagacttttgcatccaccgcctcccagctccacagcaatgttgtcaactatgtccagcagatcgtggcacccaagggcagttagaggctcgtgtgcatggcccctgcctcttcaggctctccaggctttcagaataattgtttgttcccaaattcctgttccctgatcaacttcctggagtttatatcccctcaggataatctattctctagcttaggtatctgtgactcttgggcctctgctctggtgggaacttacttctctatagcccactgagccccgagacagagaacctgcccacagctctccccgctacaggctgcaggcactgcagggcagcgggtattctcctccccacctaagtctctgggaagaagtggagaggactgatgctcttcttttttctctttctgtcctttttcttgctgattttatgcaaagggctggcattctgattgttcttttttcaggtttaatccttattttaataaagttttcaagcaaaaattaa

SEQ ID NO: 280817 - DNA, 1968 bp, Homo sapiens
ccaattttccattgaaatatgttgacaaatttccttacacataaatgtctattcatatcagatgatttcaacaatgataaattcttagaaacataatttctgggtctgaactttttttttttttttttttttgagacagagtcccctctctactaaaaatacaaaaattagctgggcgtggtggtgcacacctgtaatcccggctactcaggaggctgatgcagaagaatcgcttgaacccaggaggagacggaggttgcagtgagccaagatcacgccattgcactccagcctgggtgacagagtgaggctttgtctcaaaaataaaataataaaataaatgaaataagataaaataaaaatacagtactttgataaggaaaggtaactgtcagaaaggtgcgattcccccagtcctcacttaggagagagaccaacagcctgagttaaccaagtcctttgtagcccacagcaacagggagctagggactgagtcaggctctctgtaactgtccctatttgccctgggtccccaggagggtaatgttattaagcttcaggtatctgtcgctgttcttcttgaggccacaaggaggcagcacagtgtctctgtcaggaaaatacacttggatgtggtgacagacgttttcccgaggcttacgtttgattctgcaccaggcgctgcgtacacctgcttggaggctgcaacggggcgggctctgctgcgtcaacacatggacatcactggagaggaaaacccactcaacaagctccgcgtgaagattgaaccaggcgttgacccggacgacacctataatgagaccccctacgagaaaggtttctgctttgtctcatacctggcccacttggtgggtgatcaggatcagtttgacagttttctcaaggcctatgtgcatgaattcaaattccgaagcatcttagccgatgactttctggacttctacttggaatatttccctgagcttaagaaaaagagagtggatatcattccaggttttgagtttgatcgatggctgaatacccccggctggcccccgtacctccctgatctctcccctggggactcactcatgaagcctgctgaagagctagcccaactgtgggcagccgaggagctggacatgaaggccattgaagccgtggccatctctccctggaagacctaccagctggtctacttcctggataagatcctccagaaatcccctctccctcctgggaatgtgaaaaaacttggagacacatacccaagtatctcaaatgcccggaatgcagagctccggctgcgatggggccaaatcgtccttaagaacgaccaccaggaagatttctggaaagtgaaggagttcctgcataaccaggggaagcagaagtatacacttccgctgtaccacgcaatgatgggtggcagtgaggtggcccagaccctcgccaaggagacttttgcatccaccgcctcccagctccacagcaatgttgtcaactatgtccagcagatcgtggcacccaagggcagttagaggctcgtgtgcatggcccctgcctcttcaggctctccaggctttcagaataattgtttgttcccaaattcctgttccctgatcaacttcctggagtttatatcccctcaggataatctattctctagcttaggtatctgtgactcttgggcctctgctctggtgggaacttacttctctatagcccactgagccccgagacagagaacctgcccacagctctccccgctacaggctgcaggcactgcagggcagcgggtattctcctccccacctaagtctctgggaagaagtggagaggactgatgctcttcttttttctctttctgtcctttttcttgctgattttatgcaaagggctggcattctgattgttcttttttcaggtttaatccttattttaataaagttttcaagcaaaaattaa

SEQ ID NO: 280818 - DNA, 2325 bp, Homo sapiens
gccggccggtgagcaacggctctgcggccatggcgagcggcgagcattcccccggcagcggcgcggcccggcggccgctgcactccgcgcaggctgtggacgtggcctcggcctccaacttccgggcctttgagctgctgcacttgcacctggacctgcgggctgagttcgggcctccagggcccggcgcagggagccgggggctgagcggcaccgcggtcctggacctgcgctgcctggagcccgagggcgccgccgagctgcggctggactcgcacccgtgcctggaggtgacggcggcggcgctgcggcgggagcggcccggctcggaggagccgcctgcggagcccgtgagcttctacacgcagcccttctcgcactatggccaggccctgtgcgtgtccttcccgcagccctgccgcgccgccgagcgcctccaggtgctgctcacctaccgcgtcggggagggacccggggtttgctggttggctcccgagcagacagcaggaaagaagaagcccttcgtgtacacccagggccaggctgtcctaaaccgggccttcttcccttgcttcgacacgcctgctgttaaatacaagtattcagctcttattgaggtcccagatggcttcacagctgtgatgagtgctagcacctgggagaagagaggtccaaataagttcttcttccagatgtgtcagcccatcccctcctatctgatagctttggccatcggagatctggtttcggctgaagttggacccaggagccgggtgtgggctgagccctgcctgattgatgctgccaaggaggagtacaacggggtgatagaagaatttttggcaacaggagagaagctttttggaccttatgtttggggaaggtatgacttgctcttcatgccaccgtcctttccatttggaggaatggagaacccttgtctgacctttgtcaccccctgcctgctagctggggaccgctccttggcagatgtcatcatccatgagatctcccacagttggtttgggaacctggtcaccaacgccaactggggtgaattctggctcaatgaaggtttcaccatgtacgcccagaggaggatctccaccatcctctttggcgctgcgtacacctgcttggaggctgcaacggggcgggctctgctgcgtcaacacatggacatcactggagaggaaaacccactcaacaagctccgcgtgaagattgaaccaggcgttgacccggacgacacctataatgagaccccctacgagaaaggtttctgctttgtctcatacctggcccacttggtgggtgatcaggatcagtttgacagttttctcaaggcctatgtgcatgaattcaaattccgaagcatcttagccgatgactttctggacttctacttggaatatttccctgagcttaagaaaaagagagtggatatcattccaggttttgagtttgatcgatggctgaatacccccggctggcccccgtacctccctgatctctcccctggggactcactcatgaagcctgctgaagagctagcccaactgtgggcagccgaggagctggacatgaaggccattgaagccgtggccatctctccctggaagacctaccagctggtctacttcctggataagatcctccagaaatcccctctccctcctgggaatgtgaaaaaacttggagacacatacccaagtatctcaaatgcccggaatgcagagctccggctgcgatggggccaaatcgtccttaagaacgaccaccaggaagatttctggaaagtgaaggagttcctgcataaccaggggaagcagaagtatacacttccgctgtaccacgcaatgatgggtggcagtgaggtggcccagaccctcgccaaggagacttttgcatccaccgcctcccagctccacagcaatgttgtcaactatgtccagcagatcgtggcacccaagggcagttagaggctcgtgtgcatggcccctgcctcttcaggctctccaggctttcagaataattgtttgttcccaaattcctgttccctgatcaacttcctggagtttatatcccctcaggataatctattctctagcttaggtatctgtgactcttgggcctctgctctggtgggaacttacttctctatagcccactgagccccgagacagagaacctgcccacagctctccccgctacaggctgcaggcactgcagggcagcgggtattctcctccccacctaagtctctgggaagaagtggagaggactgatgcagtgtgttccgtgttgcagttctttccagctacg

SEQ ID NO: 280819 - DNA, 1339 bp, Homo sapiens
gcccgtggcctcccagctggttaatgacagagcaggggtaggaacccaggcagcctggtcctagagcctgggtgcttaagtacagtgtggttgtgatcggtaggagaatgtgcacgtgaatagagcatccaccaacttggctctgacaacacagtgctaatttggagcgaaaagcactttcacggtcgaaacggcacagtctctagatgtcgttataactaggaccctgctggagcgaatagttacatgggaaagtaatgttaaatgctggggaaagagtttgggatggagagaggagaaacttgaggtctctgggagttgcttaaaccagttgaccgtaacctggccagagaattctgatagtgtcttctctcctcccaaacaggttttgagtttgatcgatggctgaatacccccggctggcccccgtacctccctgatctctcccctggggactcactcatgaagcctgctgaagagctagcccaactgtgggcagccgaggagctggacatgaaggccattgaagccgtggccatctctccctggaagacctaccagctggtctacttcctggataagatcctccagaaatcccctctccctcctgggaatgtgaaaaaacttggagacacatacccaagtatctcaaatgcccggaatgcagagctccggctgcgatggggccaaatcgtccttaagaacgaccaccaggaagatttctggaaagtgaaggagttcctgcataaccaggggaagcagaagtatacacttccgctgtaccacgcaatgatgggtggcagtgaggtggcccagaccctcgccaaggagacttttgcatccaccgcctcccagctccacagcaatgttgtcaactatgtccagcagatcgtggcacccaagggcagttagaggctcgtgtgcatggcccctgcctcttcaggctctccaggctttcagaataattgtttgttcccaaattcctgttccctgatcaacttcctggagtttatatcccctcaggataatctattctctagcttaggtatctgtgactcttgggcctctgctctggtgggaacttacttctctatagcccactgagccccgagacagagaacctgcccacagctctccccgctacaggctgcaggcactgcagggcagcgggtattctcctccccacctaagtctctgggaagaagtggagaggactgatgctcttcttttttctctttctgtcctttttcttgctgattttatgcaaagggctggcattctgattgttcttttttcaggtttaatccttattttaataaagttttcaagcaaaaattaa

SEQ ID NO: 280820 - DNA, 861 bp, Homo sapiens
tagcaggatccttactccagacagttgaccgtagacgtccccatgttagtatggattgggacgcgtattgagatccatctccatggatctttgtgcgcccaagacagatgcctgaattagagcacttctgatgagaagctcctcattccagctgtgatgcccacatcccttttagcacctagccatggctgctgttagactggcactgggggcagcagggctggacagatccaccaggcaagcttcttaggcatgtgtatgtgtgtttcttgcaggggaagcagaagtatacacttccgctgtaccacgcaatgatgggtggcagtgaggtggcccagaccctcgccaaggagacttttgcatccaccgcctcccagctccacagcaatgttgtcaactatgtccagcagatcgtggcacccaagggcagttagaggctcgtgtgcatggcccctgcctcttcaggctctccaggctttcagaataattgtttgttcccaaattcctgttccctgatcaacttcctggagtttatatcccctcaggataatctattctctagcttaggtatctgtgactcttgggcctctgctctggtgggaacttacttctctatagcccactgagccccgagacagagaacctgcccacagctctccccgctacaggctgcaggcactgcagggcagcgggtattctcctccccacctaagtctctgggaagaagtggagaggactgatgctcttcttttttctctttctgtcctttttcttgctgattttatgcaaagggctggcattctgattgttcttttttcaggtttaatccttattttaataaagttttcaagcaaaaattaa

SEQ ID NO: 280821 - DNA, 604 bp, Homo sapiens
cagcggaacaagcaatgttgtcaactatgtccagcagatcgtggcacccaagggcagttagaggctcgtgtgcatggcccctgcctcgccaaggagacttttgcatccaccgcctcccagctccacagcaatgttgtcaactatgtccagcagatcgtggcacccaagggcagttagaggctcgtgtgcatggcccctgcctcttcaggctctccaggctttcagaataattgtttgttcccaaattcctgttccctgatcaacttcctggagtttatatcccctcaggataatctattctctagcttaggtatctgtgactcttgggcctctgctctggtgggaacttacttctctatagcccactgagccccgagacagagaacctgcccacagctctccccgctacaggctgcaggcactgcagggcagcgggtattctcctccccacctaagtctctgggaagaagtggagaggactgatgctcttcttttttctctttctgtcctttttcttgctgattttatgcaaagggctggcattctgattgttcttttttcaggtttaatccttattttaataaagttttcaagcaaaaattaa

SEQ ID NO: 280822 - DNA, 1150 bp, Homo sapiens
gccggccggtgagcaacggctctgcggccatggcgagcggcgagcattcccccggcagcggcgcggcccggcggccgctgcactccgcgcaggctgtggacgtggcctcggcctccaacttccgggcctttgagctgctgcacttgcacctggacctgcgggctgagttcgggcctccagggcccggcgcagggagccgggggctgagcggcaccgcggtcctggacctgcgctgcctggagcccgagggcgccgccgagctgcggctggactcgcacccgtgcctggaggtgacggcggcggcgctgcggcgggagcggcccggctcggaggagccgcctgcggagcccgtgagcttctacacgcagcccttctcgcactatggccaggccctgtgcgtgtccttcccgcagccctgccgcgccgccgagcgcctccaggtgctgctcacctaccgcgtcggggagggacccggggtttgctggttggctcccgagcagacagcaggaaagaagaagcccttcgtgtacacccagggccaggctgtcctaaaccgggccttcttcccttgcttcgacacgcctgctgttaaatacaagtattcagctcttattgaggtcccagatggcttcacagctgtgatgagtgctagcacctgggagaagagaggtccaaataagttcttcttccagatgtgtcagcccatcccctcctatctgatagctttggccatcggagatctggtttcggctgaagttggacccaggagccgggtgtgggctgagccctgcctgattgatgctgccaaggaggagtacaacggggtgatagaagaatttttggcaacaggagagaagctttttggaccttatgtttggggaaggtatgacttgctcttcatgccaccgtcctttccatttggaggaatggagaacccttgtctgacctttgtcaccccctgcctgctagctggggaccgctccttggcagatgtcatcatccatgagatctcccacagttggtttgggaacctggtcaccaacgccaactggggtgaattctggctcaatgaaggtttcaccatgtacgcccagaggaggatctccaccatcctctttgcgtaacccggcgaaccagcgccaggtgacca

SEQ ID NO: 280823 - DNA, 1128 bp, Homo sapiens
gccggccggtgagcaacggctctgcggccatggcgagcggcgagcattcccccggcagcggcgcggcccggcggccgctgcactccgcgcaggctgtggacgtggcctcggcctccaacttccgggcctttgagctgctgcacttgcacctggacctgcgggctgagttcgggcctccagggcccggcgcagggagccgggggctgagcggcaccgcggtcctggacctgcgctgcctggagcccgagggcgccgccgagctgcggctggactcgcacccgtgcctggaggtgacggcggcggcgctgcggcgggagcggcccggctcggaggagccgcctgcggagcccgtgagcttctacacgcagcccttctcgcactatggccaggccctgtgcgtgtccttcccgcagccctgccgcgccgccgagcgcctccaggtgctgctcacctaccgcgtcggggagggacccggggtttgctggttggctcccgagcagacagcaggaaagaagaagcccttcgtgtacacccagggccaggctgtcctaaaccgggccttcttcccttgcttcgacacgcctgctgttaaatacaagtattcagctcttattgaggtcccagatggcttcacagctgtgatgagtgctagcacctgggagaagagaggtccaaataagttcttcttccagatgtgtcagcccatcccctcctatctgatagctttggccatcggagatctggtttcggctgaagttggacccaggagccgggtgtgggctgagccctgcctgattgatgctgccaaggaggagtacaacggggtgatagaagaatttttggcaacaggagagaagctttttggaccttatgtttggggaaggtgtggtatcacattgactctagtgtctcctgttaaactgagtcactggcttccattcttcctcttcgtgtggcttttccacctcctgcctcccagagcaaagtttccctgatcccagaagtgaaggagaggaggaagagaggagggtatgagccaggcttctcactgttgctgaggagagggcctaggagatgaggttctttgtgtgtgtgtgtgtgtgtgtgtgtgtgtgtgtgtgtgtgtgt

SEQ ID NO: 280824 - DNA, 401 bp, Homo sapiens
ggagactaaggttaggtgcacctgcccttgggatgaagaaatgatttcagatctatcaatcaggtcacgtttcagtggtaaattattatatccattcagtggtacttctgaaaaattgcttacttttaaattcttccacctactgaagttgtatgtagccttcctctaaatcccatcagttgagcacagatttagtttcttgaaacctttgtgttctccaagatagactccaggccattatcatcacacacaggtggccggtcatgctcttattcaaactaatcaaaaggaaactctctccaggtaaaatctcctaagctttctctgttgtcaggtcccagatggcttcacagctgtgatgagtgctagcacctgggagaagagaggtccaaataagttct

SEQ ID NO: 280825 - DNA, 2434 bp, Homo sapiens
gccggccggtgagcaacggctctgcggccatggcgagcggcgagcattcccccggcagcggcgcggcccggcggccgctgcactccgcgcaggctgcggccgctgcactccgcgcaggctgtggacgtggcctcggcctccaacttccgggcctttgagctgctgcacttgcacctggacctgcgggctgagttcgggcctccagggcccggcgcagggagccgggggctgagcggcaccgcggtcctggacctgcgctgcctggagcccgagggcgccgccgagctgcggctggactcgcacccgtgcctggaggtgacggcggcggcgctgcggcgggagcggcccggctcggaggagccgcctgcggagcccgtgagcttctacacgcagcccttctcgcactatggccaggccctgtgcgtgtccttcccgcagccctgccgcgccgccgagcgcctccaggtgctgctcacctaccgcgtcggggagggacccggggtttgctggttggctcccgagcagacagcaggaaagaagaagcccttcgtgtacacccagggccaggctgtcctaaaccgggccttcttcccttgcttcgacacgcctgctgttaaatacaagtattcagctcttattgaggtcccagatggcttcacagctgtgatgagtgctagcacctgggagaagagaggtccaaataagttcttcttccagatgtgtcagcccatcccctcctatctgatagctttggccatcggagatctggtttcggctgaagttggacccaggagccgggtgtgggctgagccctgcctgattgatgctgccaaggaggagtacaacggggtgatagaagaatttttggcaacaggagagaagctttttggaccttatgtttggggaaggtatgacttgctcttcatgccaccgtcctttccatttggaggaatggagaacccttgtctgacctttgtcaccccctgcctgctagctggggaccgctccttggcagatgtcatcatccatgagatctcccacagttggtttgggaacctggtcaccaacgccaactggggtgaattctggctcaatgaaggtttcaccatgtacgcccagaggaggatctccaccatcctctttggcgctgcgtacacctgcttggaggctgcaacggggcgggctctgctgcgtcaacacatggacatcactggagaggaaaacccactcaacaagctccgcgtgaagattgaaccaggcgttgacccggacgacacctataatgagaccccctacgagaaaggtttctgctttgtctcatacctggcccacttggtgggtgatcaggatcagtttgacagttttctcaaggcctatgtgcatgaattcaaattccgaagcatcttagccgatgactttctggacttctacttggaatatttccctgagcttaagaaaaagagagtggatatcattccaggttttgagtttgatcgatggctgaatacccccggctggcccccgtacctccctgatctctcccctggggactcactcatgaagcctgctgaagagctagcccaactgtgggcagccgaggagctggacatgaaggccattgaagccgtggccatctctccctggaagacctaccagctggtctacttcctggataagatcctccagaaatcccctctccctcctgggaatgtgaaaaaacttggagacacatacccaagtatctcaaatgcccggaatgcagagctccggctgcgatggggccaaatcgtccttaagaacgaccaccaggaagatttctggaaagtgaaggagttcctgcataaccaggggaagcagaagtatacacttccgctgtaccacgcaatgatgggtggcagtgaggtggcccagaccctcgccaaggagacttttgcatccaccgcctcccagctccacagcaatgttgtcaactatgtccagcagatcgtggcacccaagggcagttagaggctcgtgtgcatggcccctgcctcttcaggctctccaggctttcagaataattgtttgttcccaaattcctgttccctgatcaacttcctggagtttatatcccctcaggataatctattctctagcttaggtatctgtgactcttgggcctctgctctggtgggaacttacttctctatagcccactgagccccgagacagagaacctgcccacagctctccccgctacaggctgcaggcactgcagggcagcgggtattctcctccccacctaagtctctgggaagaagtggagaggactgatgctcttcttttttctctttctgtcctttttcttgctgattttatgcaaagggctggcattctgattgttcttttttcaggtttaatccttattttaataaagttttcaagcaaaaattaa

SEQ ID NO: 280826 - DNA, 3699 bp, Homo sapiens
  misc_feature (964)..(964): n is a, c, g, or t
  misc_feature (979)..(979): n is a, c, g, or t
  misc_feature (1104)..(1104): n is a, c, g, or t
  misc_feature (1579)..(1579): n is a, c, g, or t
  misc_feature (1769)..(1769): n is a, c, g, or t
  misc_feature (1888)..(1888): n is a, c, g, or t
  misc_feature (1910)..(1910): n is a, c, g, or t
aggaaagcattttatctccacagcaatcctatgaggttgatactactatcctcatagaaggggaaactgatgccaggagaggttcaagcgtcttacctgaagtcacaaagcaaactgagtgatgaaggaagacttgaacctagaaaatttcactgcaaagggagtaaaagtccctcgcaatttcgactgttggaagaactcgaagaaggccagaaaggagtaggagatggcacagttagctggggtctagaagatgacgaagacatgacacttacaagatggacagggatgataattgggcctccaagaacaatttatgaaaaccgaatatacagccttaaaatagaatgtggacctaaatacccagaagcacccccctttgtaagatttgtaacaaaaattaatatgaatggagtaaatagttctaatggagtggtggacccaagagccatatcagtgctagcaaaatggcagaattcatatagcatcaaagttgtcctgcaagagcttcggcgcctaatgatgtctaaagaaaatatgaaactccctcagccgcccgaaggacagtgttacagcaattaatcaaaaagaaaaaccacaggcccttccccttccccccaattcgatttaatcagtcttcattttccacagtagtaaattttctagatacgtcttgtagacctcaaagtaccggaaaggaagctcccattcaaaggaaatttatcttaagatactgtaaatgatactaattttttgtccatttgaaatatataagttgtgctataacaaatcatcctgtcaagtgtaaccactgtccacgtagttgaacttctgggatcaagaaagtctatttaaattgattcccatcataactggtggggcacatctaactcaactgtgaaaagacacatcacacaatcaccttgctgctgattacacggcctggggtctctgccttctcccnttaccctcccgcctnccaccctccctgcaacaacagccctctagcctggggggcttgttagagtagatgtgaaggtttcaggtcgcagcctgtgggactactgctaggtgtgtggggtgtttcgcctgcacccctggttnctttaagtcttaagtgatgccccttccaaaccatcatcctgtccccacgctcctccactcccgcccttggccgaagcatagattgtaacccctccactcccctctgagattggccttcggtgaggaattcagggctttccccatatcttctctccccccacctttatcgaggggtgctgctttttctccctcctcctcaagttcctttttgcaccgtcaccacccaacaccttccatgacacttccttgctttggccagaagccatcaggtaaggttggaaagagcctctgacctcccttgtttagttttggaaccatactcactcactctccaccagcctgggaaatgaatattgggtcctcagccctgccaccctctgctgtcatcagctgatgcattgtttttagctcaggttttgataaggtgaaaagaatagtcaccagggttactcagacctgccagctctcggagtcnttggtggttgaacttggagaaagaccgcatgaagatacttgtaagcacacatgatccctctgaattgttttactttcctgtaactgcttttgcttttaaaaattgaagaagttttaaacagggctttcatttggtcatccttgcaatccattggggtctagtttggaatctgacaactggaacaaaaagnaccttgaatccggtgcatgccttggttttggtgctgctgctgcttcccaagatcctcagcagggattaagaaggaacccggtgtgcacagcagatccccgaaattggtgggcttgaccncctggcaaattgctgcgtcttnccacttgctgttcaggaccactaaatgctgaaatgtggatgcataccgaaataaaagcaattcattgtgtactaaaggttttttttttttttttaatttagtatttgtgtaaaaccaccttttgaagcagcaactatcaagtctgaaaagcaattgatgtttccattaatctttttctggggggaaaaccttagttctaaggatttaacatcctgtaagtgaagtttaacataacagtattccataagcagcctttttattgtcagaccattgcctgattttaatataataaaaaaaaagtgtgcgttaatatttaaaaaaaaaacctttgtcaccccctgcctgctagctggggaccgctccttggcagatgtcatcatccatgagatctcccacagttggtttgggaacctggtcaccaacgccaactggggtgaattctggctcaatgaaggtttcaccatgtacgcccagaggaggatctccaccatcctctttggcgctgcgtacacctgcttggaggctgcaacggggcgggctctgctgcgtcaacacatggacatcactggagaggaaaacccactcaacaagctccgcgtgaagattgaaccaggcgttgacccggacgacacctataatgagaccccctacgagaaaggtttctgctttgtctcatacctggcccacttggtgggtgatcaggatcagtttgacagttttctcaaggcctatgtgcatgaattcaaattccgaagcatcttagccgatgactttctggacttctacttggaatatttccctgagcttaagaaaaagagagtggatatcattccaggttttgagtttgatcgatggctgaatacccccggctggcccccgtacctccctgatctctcccctggggactcactcatgaagcctgctgaagagctagcccaactgtgggcagccgaggagctggacatgaaggccattgaagccgtggccatctctccctggaagacctaccagctggtctacttcctggataagatcctccagaaatcccctctccctcctgggaatgtgaaaaaacttggagacacatacccaagtatctcaaatgcccggaatgcagagctccggctgcgatggggccaaatcgtccttaagaacgaccaccaggaagatttctggaaagtgaaggagttcctgcataaccaggggaagcagaagtatacacttccgctgtaccacgcaatgatgggtggcagtgaggtggcccagaccctcgccaaggagacttttgcatccaccgcctcccagctccacagcaatgttgtcaactatgtccagcagatcgtggcacccaagggcagttagaggctcgtgtgcatggcccctgcctcttcaggctctccaggctttcagaataattgtttgttcccaaattcctgttccctgatcaacttcctggagtttatatcccctcaggataatctattctctagcttaggtatctgtgactcttgggcctctgctctggtgggaacttacttctctatagcccactgagccccgagacagagaacctgcccacagctctccccgctacaggctgcaggcactgcagggcagcgggtattctcctccccacctaagtctctgggaagaagtggagaggactgatgctcttcttttttctctttctgtcctttttcttgctgattttatgcaaagggctggcattctgattgttcttttttcaggtttaatccttattttaataaagttttcaagcaaaaattaa

SEQ ID NO: 280827 - DNA, 3220 bp, Homo sapiens
  misc_feature (3220)..(3220): n is a, c, g, or t
gccggccggtgagcaacggctctgcggccatggcgagcggcgagcattcccccggcagcggcgcggcccggcggccgctgcactccgcgcaggctgtggacgtggcctcggcctccaacttccgggcctttgagctgctgcacttgcacctggacctgcgggctgagttcgggcctccagggcccggcgcagggagccgggggctgagcggcaccgcggtcctggacctgcgctgcctggagcccgagggcgccgccgagctgcggctggactcgcacccgtgcctggaggtgacggcggcggcgctgcggcgggagcggcccggctcggaggagccgcctgcggagcccgtgagcttctacacgcagcccttctcgcactatggccaggccctgtgcgtgtccttcccgcagccctgccgcgccgccgagcgcctccaggtgctgctcacctaccgcgtcggggagggacccggggtttgctggttggctcccgagcagacagcaggaaagaagaagcccttcgtgtacacccagggccaggctgtcctaaaccgggccttcttcccttgcttcgacacgcctgctgttaaatacaagtattcagctcttattgaggtcccagatggcttcacagctgtgatgagtgctagcacctgggagaagagaggtccaaataagttcttcttccagatgtgtcagcccatcccctcctatctgatagctttggccatcggagatctggtttcggctgaagttggacccaggagccgggtgtgggctgagccctgcctgattgatgctgccaaggaggagtacaacggggtgatagaagaatttttggcaacaggagagaagctttttggaccttatgtttggggaaggtatgacttgctcttcatgccaccgtcctttccatttggaggaatggagaacccttgtctgacctttgtcaccccctgcctgctagctggggaccgctccttggcagatgtcatcatccatgagatctcccacagttggtttgggaacctggtcaccaacgccaactggggtgaattctggctcaatgaaggtttcaccatgtacgcccagaggaggatctccaccatcctctttggcgctgcgtacacctgcttggaggctgcaacggggcgggctctgctgcgtcaacacatggacatcactggagaggaaaacccactcaacaagctccgcgtgaagattgaaccaggcgttgacccggacgacacctataatgagaccccctacgagaaaggtttctgctttgtctcatacctggcccacttggtgggtgatcaggatcagtttgacagttttctcaaggcctatgtgcatgaattcaaattccgaagcatcttagccgatgactttctggacttctacttggaatatttccctgagcttaagaaaaagagagtggatatcattccaggttttgagtttgatcgatggctgaatacccccggctggcccccgtacctccctgatctctcccctggggactcactcatgaagcctgctgaagagctagcccaactgtgggcagccgaggagctggacatgaaggccattgaagccgtggccatctctccctggaagacctaccagctggtctacttcctggataagatcctccagaaatcccctctccctcctgggaatgtgaaaaaacttggagacacatacccaagtatctcaaatgcccggaatgcagagctccggctgcgatggggccaaatcgtccttaagaacgaccaccaggaagatttctggaaagtgaaggagttcctgcataaccaggggaagcagaagtatacacttccgctgtaccacgcaatgatgggtggcagtgaggtggcccagaccctcgccaaggagacttttgcatccaccgcctcccagctccacagcaatgttgtcaactatgtccagcagatcgtggcacccaagggcagttagaggctcgtgtgcatggcccctgcctcttcaggctctccaggctttcagaataattgtttgttcccaaattcctgttccctgatcaacttcctggagtttatatcccctcaggataatctattctctagcttaggtatctgtgactcttgggcctctgctctggtgggaacttacttctctatagcccactgagccccgagacagagaacctgcccacagctctccccgctacaggctgcaggcactgcagggcagcgggtattctcctccccacctaagtctctgggaagaagtggagaggactgatgctcttcttttttctctttctgtcctttttcttgctgattttatgcaaagggctggcattctgattgttcttttttcaggtttaatccttattttaataaagttttcaagcaaaaattaaaaaaaaaaaaaaaaaaaacaaaaaaaacaaaaaaaaaaaacaaccaaaaacaaatcaacaacacgagggggggcgcgcgccccacaaaaattccccccgcgggggcgccccccctcttcccgcgcccccccccccctttttgtgcgcacagcggggcgcccccccgccgcgccgcgcccttcttcacaccccacggccacccgcgccctctcttaccacccgcgttgctctgggtgtacaacagctgttccctccgtggccctcttccctgccgcgcgcggcccacccctctcttcgcggcgcgcgccgaccatatcatggcggcacccctctcccttccccagcgcctttctcgccccctctcgccgggccaatcccaccctcttccgcggcggtctgctctcagcggtcccccaccgtccgcgctttcttcccctcccccgccccgcaactctctgcgcctccccgcccgctcttctcccgccggaccatctcttccgacgcgccgcgctcccgtcatacactccgccgcccgccgtcggtccggcggggctcctgcgcggcggtgccgtggcggggcggctctggcgggctcggccgcggcgggcctgtcgccgcggcgcgcctcgccgcgcgccgcgcgcgccgcgccgggtcgctgccgctgctcgtcgcgcgcccgtgcgcggcggcgctgccggcgcccgcgctctcccccccccgcgcggcgccgccgccggccgcggggtccggcgcgcgtgccgggcgcgggcgccgccgccggggcgccgctgcgcgctcgcggctcggn

SEQ ID NO: 280828 - DNA, 2103 bp, Homo sapiens
gccggccggtgagcaacggctctgcggccatggcgagcggcgagcattcccccggcagcggcgcggcccggcggccgctgcactccgcgcaggctgtggacgtggcctcggcctccaacttccgggcctttgagctgctgctcacctaccgcgtcggggagggacccggggtttgctggttggctcccgagcagacagcaggaaagaagaagcccttcgtgtacacccagggccaggctgtcctaaaccgggccttcttcccttgcttcgacacgcctgctgttaaatacaagtattcagctcttattgaggtcccagatggcttcacagctgtgatgagtgctagcacctgggagaagagaggtccaaataagttcttcttccagatgtgtcagcccatcccctcctatctgatagctttggccatcggagatctggtttcggctgaagttggacccaggagccgggtgtgggctgagccctgcctgattgatgctgccaaggaggagtacaacggggtgatagaagaatttttggcaacaggagagaagctttttggaccttatgtttggggaaggtatgacttgctcttcatgccaccgtcctttccatttggaggaatggagaacccttgtctgacctttgtcaccccctgcctgctagctggggaccgctccttggcagatgtcatcatccatgagatctcccacagttggtttgggaacctggtcaccaacgccaactggggtgaattctggctcaatgaaggtttcaccatgtacgcccagaggaggatctccaccatcctctttggcgctgcgtacacctgcttggaggctgcaacggggcgggctctgctgcgtcaacacatggacatcactggagaggaaaacccactcaacaagctccgcgtgaagattgaaccaggcgttgacccggacgacacctataatgagaccccctacgagaaaggtttctgctttgtctcatacctggcccacttggtgggtgatcaggatcagtttgacagttttctcaaggcctatgtgcatgaattcaaattccgaagcatcttagccgatgactttctggacttctacttggaatatttccctgagcttaagaaaaagagagtggatatcattccaggttttgagtttgatcgatggctgaatacccccggctggcccccgtacctccctgatctctcccctggggactcactcatgaagcctgctgaagagctagcccaactgtgggcagccgaggagctggacatgaaggccattgaagccgtggccatctctccctggaagacctaccagctggtctacttcctggataagatcctccagaaatcccctctccctcctgggaatgtgaaaaaacttggagacacatacccaagtatctcaaatgcccggaatgcagagctccggctgcgatggggccaaatcgtccttaagaacgaccaccaggaagatttctggaaagtgaaggagttcctgcataaccaggggaagcagaagtatacacttccgctgtaccacgcaatgatgggtggcagtgaggtggcccagaccctcgccaaggagacttttgcatccaccgcctcccagctccacagcaatgttgtcaactatgtccagcagatcgtggcacccaagggcagttagaggctcgtgtgcatggcccctgcctcttcaggctctccaggctttcagaataattgtttgttcccaaattcctgttccctgatcaacttcctggagtttatatcccctcaggataatctattctctagcttaggtatctgtgactcttgggcctctgctctggtgggaacttacttctctatagcccactgagccccgagacagagaacctgcccacagctctccccgctacaggctgcaggcactgcagggcagcgggtattctcctccccacctaagtctctgggaagaagtggagaggactgatgctcttcttttttctctttctgtcctttttcttgctgattttatgcaaagggctggcattctgattgttcttttttcaggtttaatccttattttaataaagttttcaagcaaaaattaa

SEQ ID NO: 280829 - DNA, 2260 bp, Homo sapiens
gccggccggtgagcaacggctctgcggccatggcgagcggcgagcattcccccggcagcggcgcggcccggcggccgctgcactccgcgcaggctgtggacgtggcctcggcctccaacttccgggcctttgagctgctgcacttgcacctggacctgcgggctgagttcgggcctccagggcccggcgcagggagccgggggctgagcggcaccgcggtcctggacctgcgctgcctggagcccgagggcgccgccgagctgcggctggactcgcacccgtgcctggaggtgacggcggcggcgctgcggcgggagcggcccggctcggaggagccgcctgcggagcccgtgagcttctacacgcagcccttctcgcactatggccaggccctgtgcgtgtccttcccgcagccctgccgcgccgccgagcgcctccaggtgctgctcacctaccgcgtcggggagggacccggggtttgctggttggctcccgagcagacagcaggaaagaagaagcccttcgtgtacacccagggccaggctgtcctaaaccgggccttcttcccttgcttcgacacgcctgctgttaaatacaagtattcagctcttattgaggagccgggtgtgggctgagccctgcctgattgatgctgccaaggaggagtacaacggggtgatagaagaatttttggcaacaggagagaagctttttggaccttatgtttggggaaggtatgacttgctcttcatgccaccgtcctttccatttggaggaatggagaacccttgtctgacctttgtcaccccctgcctgctagctggggaccgctccttggcagatgtcatcatccatgagatctcccacagttggtttgggaacctggtcaccaacgccaactggggtgaattctggctcaatgaaggtttcaccatgtacgcccagaggaggatctccaccatcctctttggcgctgcgtacacctgcttggaggctgcaacggggcgggctctgctgcgtcaacacatggacatcactggagaggaaaacccactcaacaagctccgcgtgaagattgaaccaggcgttgacccggacgacacctataatgagaccccctacgagaaaggtttctgctttgtctcatacctggcccacttggtgggtgatcaggatcagtttgacagttttctcaaggcctatgtgcatgaattcaaattccgaagcatcttagccgatgactttctggacttctacttggaatatttccctgagcttaagaaaaagagagtggatatcattccaggttttgagtttgatcgatggctgaatacccccggctggcccccgtacctccctgatctctcccctggggactcactcatgaagcctgctgaagagctagcccaactgtgggcagccgaggagctggacatgaaggccattgaagccgtggccatctctccctggaagacctaccagctggtctacttcctggataagatcctccagaaatcccctctccctcctgggaatgtgaaaaaacttggagacacatacccaagtatctcaaatgcccggaatgcagagctccggctgcgatggggccaaatcgtccttaagaacgaccaccaggaagatttctggaaagtgaaggagttcctgcataaccaggggaagcagaagtatacacttccgctgtaccacgcaatgatgggtggcagtgaggtggcccagaccctcgccaaggagacttttgcatccaccgcctcccagctccacagcaatgttgtcaactatgtccagcagatcgtggcacccaagggcagttagaggctcgtgtgcatggcccctgcctcttcaggctctccaggctttcagaataattgtttgttcccaaattcctgttccctgatcaacttcctggagtttatatcccctcaggataatctattctctagcttaggtatctgtgactcttgggcctctgctctggtgggaacttacttctctatagcccactgagccccgagacagagaacctgcccacagctctccccgctacaggctgcaggcactgcagggcagcgggtattctcctccccacctaagtctctgggaagaagtggagaggactgatgctcttcttttttctctttctgtcctttttcttgctgattttatgcaaagggctggcattctgattgttcttttttcaggtttaatccttattttaataaagttttcaagcaaaaattaa

SEQ ID NO: 280830 - DNA, 2406 bp, Homo sapiens
gccggccggtgagcaacggctctgcggccatggcgagcggcgagcattcccccggcagcggcgcggcccggcggccgctgcactccgcgcaggctgtggacgtggcctcggcctccaacttccgggcctttgagctgctgcacttgcacctggacctgcgggctgagttcgggcctccagggcccggcgcagggagccgggggctgagcggcaccgcggtcctggacctgcgctgcctggagcccgagggcgccgccgagctgcggctggactcgcacccgtgcctggaggtgacggcggcggcgctgcggcgggagcggcccggctcggaggagccgcctgcggagcccgtgagcttctacacgcagcccttctcgcactatggccaggccctgtgcgtgtccttcccgcagccctgccgcgccgccgagcgcctccaggtgctgctcacctaccgcgtcggggagggacccggggtttgctggttggctcccgagcagacagcaggaaagaagaagcccttcgtgtacacccagggccaggctgtcctaaaccgggccttcttcccttgcttcgacacgcctgctgttaaatacaagtattcagctcttattgaggagccgggtgtgggctgagccctgcctgattgatgctgccaaggaggagtacaacggggtgatagaagaatttttggcaacaggagagaagctttttggaccttatgtttggggaaggtgtggtatcacattgactctagtgtctcctgttaaactgagtcactggcttccattcttcctcttcgtgtggcttttccacctcctgcctcccagagcaaagtttccctgatcccagaagtgaaggagaggaggaagagaggagggtatgacttgctcttcatgccaccgtcctttccatttggaggaatggagaacccttgtctgacctttgtcaccccctgcctgctagctggggaccgctccttggcagatgtcatcatccatgagatctcccacagttggtttgggaacctggtcaccaacgccaactggggtgaattctggctcaatgaaggtttcaccatgtacgcccagaggaggatctccaccatcctctttggcgctgcgtacacctgcttggaggctgcaacggggcgggctctgctgcgtcaacacatggacatcactggagaggaaaacccactcaacaagctccgcgtgaagattgaaccaggcgttgacccggacgacacctataatgagaccccctacgagaaaggtttctgctttgtctcatacctggcccacttggtgggtgatcaggatcagtttgacagttttctcaaggcctatgtgcatgaattcaaattccgaagcatcttagccgatgactttctggacttctacttggaatatttccctgagcttaagaaaaagagagtggatatcattccaggttttgagtttgatcgatggctgaatacccccggctggcccccgtacctccctgatctctcccctggggactcactcatgaagcctgctgaagagctagcccaactgtgggcagccgaggagctggacatgaaggccattgaagccgtggccatctctccctggaagacctaccagctggtctacttcctggataagatcctccagaaatcccctctccctcctgggaatgtgaaaaaacttggagacacatacccaagtatctcaaatgcccggaatgcagagctccggctgcgatggggccaaatcgtccttaagaacgaccaccaggaagatttctggaaagtgaaggagttcctgcataaccaggggaagcagaagtatacacttccgctgtaccacgcaatgatgggtggcagtgaggtggcccagaccctcgccaaggagacttttgcatccaccgcctcccagctccacagcaatgttgtcaactatgtccagcagatcgtggcacccaagggcagttagaggctcgtgtgcatggcccctgcctcttcaggctctccaggctttcagaataattgtttgttcccaaattcctgttccctgatcaacttcctggagtttatatcccctcaggataatctattctctagcttaggtatctgtgactcttgggcctctgctctggtgggaacttacttctctatagcccactgagccccgagacagagaacctgcccacagctctccccgctacaggctgcaggcactgcagggcagcgggtattctcctccccacctaagtctctgggaagaagtggagaggactgatgctcttcttttttctctttctgtcctttttcttgctgattttatgcaaagggctggcattctgattgttcttttttcaggtttaatccttattttaataaagttttcaagcaaaaattaa

SEQ ID NO: 280831 - DNA, 1943 bp, Homo sapiens
ctgtgtggtgatccgatcttgcactccgtcactgtggctgactgcattgtcacattcacttggcggaggccaatttcctacaggtgctttcaggatcaggtcactgcgatggtctctaaacaccattctgctttctctgctctcttgtctttaggagccgggtgtgggctgagccctgcctgattgatgctgccaaggaggagtacaacggggtgatagaagaatttttggcaacaggagagaagctttttggaccttatgtttggggaaggtgtggtatcacattgactctagtgtctcctgttaaactgagtcactggcttccattcttcctcttcgtgtggcttttccacctcctgcctcccagagcaaagtttccctgatcccagaagtgaaggagaggaggaagagaggagggtatgacttgctcttcatgccaccgtcctttccatttggaggaatggagaacccttgtctgacctttgtcaccccctgcctgctagctggggaccgctccttggcagatgtcatcatccatgagatctcccacagttggtttgggaacctggtcaccaacgccaactggggtgaattctggctcaatgaaggtttcaccatgtacgcccagaggaggatctccaccatcctctttggcgctgcgtacacctgcttggaggctgcaacggggcgggctctgctgcgtcaacacatggacatcactggagaggaaaacccactcaacaagctccgcgtgaagattgaaccaggcgttgacccggacgacacctataatgagaccccctacgagaaaggtttctgctttgtctcatacctggcccacttggtgggtgatcaggatcagtttgacagttttctcaaggcctatgtgcatgaattcaaattccgaagcatcttagccgatgactttctggacttctacttggaatatttccctgagcttaagaaaaagagagtggatatcattccaggttttgagtttgatcgatggctgaatacccccggctggcccccgtacctccctgatctctcccctggggactcactcatgaagcctgctgaagagctagcccaactgtgggcagccgaggagctggacatgaaggccattgaagccgtggccatctctccctggaagacctaccagctggtctacttcctggataagatcctccagaaatcccctctccctcctgggaatgtgaaaaaacttggagacacatacccaagtatctcaaatgcccggaatgcagagctccggctgcgatggggccaaatcgtccttaagaacgaccaccaggaagatttctggaaagtgaaggagttcctgcataaccaggggaagcagaagtatacacttccgctgtaccacgcaatgatgggtggcagtgaggtggcccagaccctcgccaaggagacttttgcatccaccgcctcccagctccacagcaatgttgtcaactatgtccagcagatcgtggcacccaagggcagttagaggctcgtgtgcatggcccctgcctcttcaggctctccaggctttcagaataattgtttgttcccaaattcctgttccctgatcaacttcctggagtttatatcccctcaggataatctattctctagcttaggtatctgtgactcttgggcctctgctctggtgggaacttacttctctatagcccactgagccccgagacagagaacctgcccacagctctccccgctacaggctgcaggcactgcagggcagcgggtattctcctccccacctaagtctctgggaagaagtggagaggactgatgctcttcttttttctctttctgtcctttttcttgctgattttatgcaaagggctggcattctgattgttcttttttcaggtttaatccttattttaataaagttttcaagcaaaaattaa

SEQ ID NO: 280832 - DNA, 2432 bp, Homo sapiens
gccggccggtgagcaacggctctgcggccatggcgagcggcgagcattcccccggcagcggcgcggcccggcggccgctgcactccgcgcaggctgtggacgtggcctcggcctccaacttccgggcctttgagctgctgcacttgcacctggacctgcgggctgagttcgggcctccagggcccggcgcagggagccgggggctgagcggcaccgcggtcctggacctgcgctgcctggagcccgagggcgccgccgagctgcggctggactcgcacccgtgcctggaggtgacggcggcggcgctgcggcgggagcggcccggctcggaggagccgcctgcggagcccgtgagcttctacacgcagcccttctcgcactatggccaggccctgtgcgtgtccttcccgcagccctgccgcgccgccgagcgcctccaggtgctgctcacctaccgcgtcggggagggacccggggtttgctggttggctcccgagcagacagcaggaaagaagaagcccttcgtgtacacccagggccaggctgtcctaaaccgggccttcttcccttgcttcgacacgcctgctgttaaatacaagtattcagctcttattgaggtcccagatggcttcacagctgtgatgagtgctagcacctgggagaagagaggtccaaataagttcttcttccagatgtgtcagcccatcccctcctatctgatagctttggccatcggagatctggtttcggctgaagttggacccaggagccgggtgtgggctgagccctgcctgattgatgctgccaaggaggagtacaacggggtgatagaagaatttttggcaacaggagagaagctttttggaccttatgtttggggaaggtatgacttgctcttcatgccaccgtcctttccatttggaggaatggagaacccttgtctgacctttgtcaccccctgcctgctagctggggaccgctccttggcagatgtcatcatccatgagatctcccacagttggtttgggaacctggtcaccaacgccaactggggtgaattctggctcaatgaaggtttcaccatgtacgcccagaggaggatctccaccatcctctttggcgctgcgtacacctgcttggaggctgcaacggggcgggctctgctgcgtcaacacatggacatcactggagaggaaaacccactcaacaagctccgcgtgaagattgaaccaggcgttgacccggacgacacctataatgagaccccctacgagaaaggtttctgctttgtctcatacctggcccacttggtgggtgatcaggatcagtttgacagttttctcaaggcctatgtgcatgaattcaaattccgaagcatcttagccgatgactttctggacttctacttggaatatttccctgagcttaagaaaaagagagtggatatcattccaggttttgagtttgatcgatggctgaatacccccggctggcccccgtacctccctgatctctcccctggggactcactcatgaagcctgctgaagagctagcccaactgtgggcagccgaggagctggacatgaaggccattgaagccgtggccatctctccctggaagacctaccagctggtctacttcctggataagatcctccagaaatcccctctccctcctgggaatgtgaaaaaacttggagacacatacccaagtatctcaaatgcccggaatgcagagctccggctgcgatggggccaaatcgtccttaagaacgaccaccaggaagatttctggaaagtgaaggagttcctgcataaccaggggaagcagaagtatacacttccgctgtaccacgcaatgatgggtggcagtgaggtggcccagaccctcgccaaggagacttttgcatccaccgcctcccagctccacagcaatgttgtcaactatgtccagcagatcgtggcacccaagggcagttagaggctcgtgtgcatggcccctgcctcttcaggctctccaggctttcagaataattgtttgttcccaaattcctgttccctgatcaacttcctggagtttatatcccctcaggataatctattctctagcttaggtatctgtgactcttgggcctctgctctggtgggaacttacttctctatagcccactgagccccgagacagagaacctgcccacagctctccccgctacaggctgcaggcactgcagggcagcgggtattctcctccccacctaagtctctgggaagaagtggagaggactgatgctcttcttttttctctttctgtcctttttcttgctgattttatgcaaagggctggcattctgattgttcttttttcaggtttaatccttattttaataaagttttcaagcaaaaattaagaccccaaaaggggaaccgagct

SEQ ID NO: 280833 - DNA, 1359 bp, Homo sapiens
  misc_feature (6)..(8): n is a, c, g, or t
ccgagnnnagcatctacggctaggtacgaggctgggtgttgcagaggaggatctccaccatcctctttggcgctgcgtacacctgcttggaggctgcaacggggcgggctctgctgcgtcaacacatggacatcactggagaggaaaacccactcaacaagctccgcgtgaagattgaaccaggcgttgacccggacgacacctataatgagaccccctacgagaaaggtttctgctttgtctcatacctggcccacttggtgggtgatcaggatcagtttgacagttttctcaaggcctatgtgcatgaattcaaattccgaagcatcttagccgatgactttctggacttctacttggaatatttccctgagcttaagaaaaagagagtggatatcattccaggttttgagtttgatcgatggctgaatacccccggctggcccccgtacctccctgatctctcccctggggactcactcatgaagcctgctgaagagctagcccaactgtgggcagccgaggagctggacatgaaggccattgaagccgtggccatctctccctggaagacctaccagctggtctacttcctggataagatcctccagaaatcccctctccctcctgggaatgtgaaaaaacttggagacacatacccaagtatctcaaatgcccggaatgcagagctccggctgcgatggggccaaatcgtccttaagaacgaccaccaggaagatttctggaaagtgaaggagttcctgcataaccaggggaagcagaagtatacacttccgctgtaccacgcaatgatgggtggcagtgaggtggcccagaccctcgccaaggagacttttgcatccaccgcctcccagctccacagcaatgttgtcaactatgtccagcagatcgtggcacccaagggcagttagaggctcgtgtgcatggcccctgcctcttcaggctctccaggctttcagaataattgtttgttcccaaattcctgttccctgatcaacttcctggagtttatatcccctcaggataatctattctctagcttaggtatctgtgactcttgggcctctgctctggtgggaacttacttctctatagcccactgagccccgagacagagaacctgcccacagctctccccgctacaggctgcaggcactgcagggcagcgggtattctcctccccacctaagtctctgggaagaagtggagaggactgatgctcttcttttttctctttctgtcctttttcttgctgattttatgcaaagggctggcattctgattgttcttttttcaggtttaatccttattttaataaagttttcaagcaaaaattaa

SEQ ID NO: 280834 - DNA, 1291 bp, Homo sapiens
gggaagctgaattctgatctcttccatcgctagtctttgactgtggagctagagaagaacgttacgggtgacaggctacaaaagctcaaatcttgtctgctttctcctctgccaggcgttgacccggacgacacctataatgagaccccctacgagaaaggtttctgctttgtctcatacctggcccacttggtgggtgatcaggatcagtttgacagttttctcaaggcctatgtgcatgaattcaaattccgaagcatcttagccgatgactttctggacttctacttggaatatttccctgagcttaagaaaaagagagtggatatcattccaggttttgagtttgatcgatggctgaatacccccggctggcccccgtacctccctgatctctcccctggggactcactcatgaagcctgctgaagagctagcccaactgtgggcagccgaggagctggacatgaaggccattgaagccgtggccatctctccctggaagacctaccagctggtctacttcctggataagatcctccagaaatcccctctccctcctgggaatgtgaaaaaacttggagacacatacccaagtatctcaaatgcccggaatgcagagctccggctgcgatggggccaaatcgtccttaagaacgaccaccaggaagatttctggaaagtgaaggagttcctgcataaccaggggaagcagaagtatacacttccgctgtaccacgcaatgatgggtggcagtgaggtggcccagaccctcgccaaggagacttttgcatccaccgcctcccagctccacagcaatgttgtcaactatgtccagcagatcgtggcacccaagggcagttagaggctcgtgtgcatggcccctgcctcttcaggctctccaggctttcagaataattgtttgttcccaaattcctgttccctgatcaacttcctggagtttatatcccctcaggataatctattctctagcttaggtatctgtgactcttgggcctctgctctggtgggaacttacttctctatagcccactgagccccgagacagagaacctgcccacagctctccccgctacaggctgcaggcactgcagggcagcgggtattctcctccccacctaagtctctgggaagaagtggagaggactgatgctcttcttttttctctttctgtcctttttcttgctgattttatgcaaagggctggcattctgattgttcttttttcaggtttaatccttattttaataaagttttcaagcaaaaattaa

SEQ ID NO: 280835 - DNA, 1593 bp, Homo sapiens
gccggccggtgagcaacggctctgcggccatggcgagcggcgagcattcccccggcagcggcgcggcccggcggccgctgcactccgcgcaggctgtggacgtggcctcggcctccaacttccgggcctttgagctgctgcacttgcacctggacctgcgggctgagttcgggcctccagggcccggcgcagggagccgggggctgagcggcaccgcggtcctggacctgcgctgcctggagcccgagggcgccgccgagctgcggctggactcgcacccgtgcctggaggtgacggcggcggcgctgcggcgggagcggcccggctcggaggagccgcctgcggagcccgtgagcttctacacgcagcccttctcgcactatggccaggccctgtgcgtgtccttcccgcagccctgccgcgccgccgagcgcctccaggtgctgctcacctaccgcgtcggggagggacccggggtttgctggttggctcccgagcagacagcaggaaagaagaagcccttcgtgtacacccagggccaggctgtcctaaaccgggccttcttcccttgcttcgacacgcctgctgttaaatacaagtattcagctcttattgaggtcccagatggcttcacagctgtgatgagtgctagcacctgggagaagagaggtccaaataagttcttcttccagatgtgtcagcccatcccctcctatctgatagctttggccatcggagatctggtttcggctgaagttggacccaggagccgggtgtgggctgagccctgcctgattgatgctgccaaggaggagtacaacggggtgatagaagaatttttggcaacaggagagaagctttttggaccttatgtttggggaaggtatgacttgctcttcatgccaccgtcctttccatttggaggaatggagaacccttgtctgacctttgtcaccccctgcctgctagctggggaccgctccttggcagatgtcatcatccatgagatctcccacagttggtttgggaacctggtcaccaacgccaactggggtgaattctggctcaatgaaggtttcaccatgtacgcccagaggaggatctccaccatcctctttggcgctgcgtacacctgcttggaggctgcaacggggcgggctctgctgcgtcaacacatggacatcactggagaggaaaacccactcaacaagctccgcgtgaagattgaaccaggcgttgacccggacgacacctataatgagaccccctacgagaaaggtttctgctttgtctcatacctggcccacttggtgggtgatcaggatcagtttgacagttttctcaaggcctatgtgcatgaattcaaattccgaagcatcttagccgatgactttctggacttctacttggaatatttccctgagcttaagaaaaagagagtggatatcattccaggttttgagtttgatcgatggctgaataccccccggcatgcattccgggggggagggacgagaagagaaaggggagtcacagaggaggctgcagatgagcacgagtttattgactctgcctcgccgtcatggtacgact

SEQ ID NO: 280836 - DNA, 2111 bp, Homo sapiens
gccggccggtgagcaacggctctgcggccatggcgagcggcgagcattcccccggcagcggcgcggcccggcggccgctgcactccgcgcaggctgtggacgtggcctcggcctccaacttccgggcctttgagctgctgcacttgcacctggacctgcgggctgagttcgggcctccagggcccggcgcagggagccgggggctgagcggcaccgcggtcctggacctgcgctgcctggagcccgagggcgccgccgagctgcggctggactcgcacccgtgcctggaggtgacggcggcggcgctgcggcgggagcggcccggctcggaggagccgcctgcggagcccgtgagcttctacacgcagcccttctcgcactatggccaggccctgtgcgtgtccttcccgcagccctgccgcgccgccgagcgcctccaggtgctgctcacctaccgcgtcggggagggacccggggtttgctggttggctcccgagcagacagcaggaaagaagaagcccttcgtgtacacccagggccaggctgtcctaaaccgggccttcttcccttgcttcgacacgcctgctgttaaatacaagtattcagctcttattgaggtcccagatggcttcacagctgtgatgagtgctagcacctgggagaagagaggtccaaataagttcttcttccagatgtgtcagcccatcccctcctatctgatagctttggccatcggagatctggtttcggctgaagttggacccaggagccgggtgtgggctgagccctgcctgattgatgctgccaaggaggagtacaacggggtgatagaagaatttttggcaacaggagagaagctttttggaccttatgtttggggaaggtatgacttgctcttcatgccaccgtcctttccatttggaggaatggagaacccttgtctgacctttgtcaccccctgcctgctagctggggaccgctccttggcagatgtcatcatccatgagatctcccacagttggtttgggaacctggtcaccaacgccaactggggtgaattctggctcaatgaaggtttcaccatgtacgcccagaggaggatctccaccatcctctttggcgctgcgtacacctgcttggaggctgcaacggggcgggctctgctgcgtcaacacatggacatcactggagaggaaaacccactcaacaagctccgcgtgaagattgaaccaggtccaggaggctcctctgtctgacacccactcccctcaattgagcttggagccccaagttaatgcgaacttcatgttgatcagtgcacgcttagaatactttatttggagggaggggcactccagagctctttgtagccaattctctggcccctgggctgactgaacccaagccattgcagccagataggagttctgtccagtctgtgcggttcgtgatgacttcaccattgctttgcatttgcacaagtccatatcgttttaccaggctctttcgcattccttcatgatcatcagggcagatctgtggattctgtagaataaaagcattagccttattttacagaggatgggactgagtgccagacaagttaagtgtcttgtccaggtcatgtacctaatcagtgcatgactgcaactgagatccgggtcctctctccaaattcagatctttttacttcctaacattttccttcattccatgtgtgactaatctgaaacctttttatgcaattgaagctcatgttccttgatgccgttaagtttgcagatgaatttcttagagacgggtaattagttttagcctggaacagctgtaaaaacaacacattggctgggcatggtggttcacgcctgtaatcccaggtcaaagcgggtggatcatgaggtcaagagttcgagaccagcctagccaatatggagaaccctgtctctactaaaaatacaaaaattagctgggtgtggtgatgcacacctgtaatcccagctactggggaggctgaggcaggagaatcgctcgaccccaggaggcagaggttgcagtgagctgagatcgtgccactgcactccagcctgggtgatagagcaagactccgtctt

SEQ ID NO: 280837 - DNA, 3514 bp, Homo sapiens
ggcgtgcaacggccgttagaggagctgagggagggaaccaccgctcaccgcagacgtagtggctgcagtcagtcttcccgagtgagggatttcgccgcccgctttcaggcccgtttggcttaaataactgtgattgatggccatgcaggagaaatatccaactgaggggatctctcacgtcacttcaccgagttccgatgtgattcagaagggcagttccctggggactgaatggcagaccccagttatctcggagccctttcggagccgcttcagccgctgttcaagtgtagccgacagtggggacacagccattggtacatcatgctcagatattgcggaggatttttgcagctcaagtggcagtcctcctttccagcccatcaaaagccacgtaaccattccaacagcccatgtgatgccttctactttagggacctctcctgccaagccaaattctacacctgttggaccctcttcctctaaactccctttgtcagggttggctgaaagtgtgggaatgacaagaaatggagacctcggtgcaatgaaacattctccaggcctatctagagatctcatgtatttctctggtgctactggagaaaatggaattgagcagtcctggtttccagcagtgggccatgaaagacaagaagaggcgaggaagtttgatattcctagcatggaatctaccctcaatcagtcggcaatgatggagacactttattcagatcctcaccaccgagtccgcttccacaacccaagaaccagcacaagtaaggagttgtacagagtgttgcctgaggccaagaaggcaccgggcagcggggcagtgtttgagcggaatggaccacattctaatagcagtggggtcctccctttgggactccagcctgctcccgggctctccaagcctctgccctctcaggtgtggcagccgagtcctgacacttggcatccccgagagcaatcttgtgaactcagcacttgtcggcagcagctggaattgattcgtttacagatggagcaaatgcagcttcagaatggagccatctgccaccatcctgctgcttttggtccttcactgcccatcttagagccagcacagtggatcagcatcttgaacagtaatgaacaccttctgaaggaaaaagagcttctcattgacaagcagaggaaacacatctctcagctggagcagaaagtgcgagagagcgaactgcaagtccacagtgccctcttgggccgccctgccccctttggtgatgtctgcttgctgaggctacaggaattgcagcgagaaaacactttcttacgtgcacagtttgcacagaagacagaagccttgagcagagaaaagattgaccttgaaaagaaactctctgcttctgaagttgaagtccagctcatcagagagtcgctcaaagtggcgttgcagaagcattctgaggaagtgaagaaacaggaagaaagggtcaaaggtcgtgataaacatatcaataatttgaaaaagaaatgccagaaggaatcagagcagaaccgggagaagcagcagcgtattgagaccttggagcgctacctggctgacctgcccacactggaagaccatcagaagcagagccagcagcttaaggattctgagttgaagagcacagagctgcaggagaaagtgactgagctggagagtttgctggaggagacccaggcaatctgcagagagaaggagattcaactggaaagcctgaggcagagagaagcagaattctcctccgctggacatagcctgcaagataaacagtctgtggaggagaccagtggagaaggtccagaagtggaaatggagtcctggcagaagcgatacgattcgctccaaaagattgtggagaagcagcagcagaagatggatcagttgcgctcacaagtacagagcctagagcaggaagtggctcaagaagaaggaacaagccaggccctgagagaggaggcccagcgaagggattcagccctgcagcagctgcgcacagccgtgaaggagctttcagtgcaaaaccaggacttgattgagaagaatctgacactccaggaacacctgcgccaggcccaaccagggtctccaccttcaccagacacggcccagctggcacttgagctgcaccaggagttggccagttgccttcaagatctgcaggctgtctgtagcattgtgacccagagggcccagggccatgaccccaatctctccctgctcctgggcattcactcagcacagcacccagagactcagctagatttgcagaagccagatgtgatcaagaggaaactagaagaggttcaacagctgcgtcgtgacattgaggacttaaggaccaccatgtcagacagatatgcccaggacatgggagaaaactgtgtcacacagtgaggaattctgggggattcccccagggaggagctgggctgctgagagcctagtccagcaggtttctgccctgacattctcttgtctgctattcccagagaggtctcagaggggaggggagagcctgcatctgggggccaagggctgattagggaactgtgtcctacccacactggcatgttggattacgtttgtcctgttaattcactctcgacggtgagttactaattaacttttggcaggtacaacagataagtcctcacaaactgttcccagccctaggctgacatgagagacgaacaggctgtccacctttcttctccatccaatgggatggatccatgttcattcccacttcacaccttggtcctgctgattagagagctcatcagaggggcctggaaaggctgagcaagtaccagtgacaatggccatttaagaattctcaggccccatgtgccagccttcttgggaactgagctggctttctgggttttctcatgcctggtcttactgcttcttcctcagggctcttgttctcccagaagcctcagggtaatgtgttggttagcacgtaactactaggattggggccctagggattatagccaggactctaatctgcctaccatgccatttaacaagagatcccactctccagctgccttgtgtccctagggtcctggccatgtgtttagtgtgctaaactttctcctttgttctcaggccttccaggtagtccccttcctggacttaagagtgcaaactcttctctgtggttctagccttgggcagaattatatcccagagaccacagagcaactgtcaagctgcttaccccctcacccagggctacagcctgtgcccagccctctaatttgtgcctctcttgtgttgggggtggtgggggttattcctttccctttcctgctctggcctccttgaaagttcagagtacccagtacaagtcaccaccatgctgacgggtatttttcctcataaagtttataaccagttatttatatgaatctttgttatgtccatttgtttgtattgcgtattttgattataaaataaagtatcttaacagac

SEQ ID NO: 280838 - DNA, 1066 bp, Homo sapiens
ccattgttccatctgcgaggagcaccctttctgcagaaagtaaaaattgccttgctgaggaaattaaatatagcttaaggattctgagttgaagagcacagagctgcaggagaaagtgactgagctggagagtttgctggaggagacccaggcaatctgcagagagaaggagattcaactggaaagcctgaggcagagagaagcagaattctcctccgctggacatagcctgcaagataaacagtctgtggaggagaccagtggagaaggtccagaagtggaaatggagtcctggcagaagcgatacgattcgctccaaaagattgtggagaagcagcagcagaagatggatcagttgcgctcacaagtacagagtctcgctcttgtcgcccaggctggagtgcaatggcgcaatctcggctcactgtaacctctgcctcccaggttcaagcaattctcctgcctcagcctcccgagtagctggtattacgggtgcccaccatcacgcccggctaatttttgtattttttgtagagacggggtttcaccacgttggccagactggtctcgaactcctgacctcaggtgatctgcccgcctcggcctcccaaagtgctgggattacaggcgtgagccatcatgcccagcctattacagcatgtaattgggatgtgatgtggtcaggtttgcaactcaggctcaagtgtggaagattggcatcctggagagaagaaaggtccagggggactgttggagaaattctcgtgagaggtgatgagggaacctggcataaggcagcatagcagcgaggagatgtgaggggacagatttaagtgactttaggaggtaacatcaagcggaatcagtgactgacaagatgtaggggttgaagaatagggaagaatcaaatatgactccaggtttctattttgggccagagtgggagtgtctttaactgggttctccaagaaattctgggtaaagcaggttcactcagcgtctctttggactctaaaagttttcacaccaaaacacccgaaatgcactcgttttgagggaataagtg

SEQ ID NO: 280839 - DNA, 3853 bp, Homo sapiens
gcagtcaggtttggggtatgggagagagaacagaatcctgcctcagatgccatactccctgtcctgcatactgagcaagactgtctagttcgcttcattcttcagatagtttggactcgttgctcaccttcctgggggagcttttggaggtcgcagaagattctggtgactcttggaaaggatatttttattagatttgattatagctgagagttgtccagcttccagaagagtaggacctaactcattttccttaaatttttgcagctcaagtggcagtcctcctttccagcccatcaaaagccacgtaaccattccaacagcccatgtgatgccttctactttagggacctctcctgccaagccaaattctacacctgttggaccctcttcctctaaactccctttgtcagggttggctgaaagtgtgggaatgacaagaaatggagacctcggtgcaatgaaacattctccaggcctatctagagatctcatgtatttctctggtgctactggagaaaatggaattgagcagtcctggtttccagcagtgggccatgaaagacaagaagaggcgaggaagtttgatattcctagcatggaatctaccctcaatcagtcggcaatgatggagacactttattcagatcctcaccaccgagtccgcttccacaacccaagaaccagcacaagtaaggagttgtacagagtgttgcctgaggccaagaaggcaccgggcagcggggcagtgtttgagcggaatggaccacattctaatagcagtggggtcctccctttgggactccagcctgctcccgggctctccaagcctctgccctctcaggtgtggcagccgagtcctgacacttggcatccccgagagcaatcttgtgaactcagcacttgtcggcagcagctggaattgattcgtttacagatggagcaaatgcagcttcagaatggagccatctgccaccatcctgctgcttttggtccttcactgcccatcttagagccagcacagtggatcagcatcttgaacagtaatgaacaccttctgaaggaaaaagagcttctcattgacaagcagaggaaacacatctctcagctggagcagaaagtgcgagagagcgaactgcaagtccacagtgccctcttgggccgccctgccccctttggtgatgtctgcttgctgaggctacaggaattgcagcgagaaaacactttcttacgtgcacagtttgcacagaagacagaagccttgagcagagaaaagattgaccttgaaaagaaactctctgcttctgaagttgaagtccagctcatcagagagtcgctcaaagtggcgttgcagaagcattctgaggaagtgaagaaacaggaagaaagggtcaaaggtcgtgataaacatatcaataatttgaaaaagaaatgccagaaggaatcagagcagaaccgggagaagcagcagcgtattgagaccttggagcgctacctggctgacctgcccacactggaagaccatcagaagcagagccagcagcttaaggattctgagttgaagagcacagagctgcaggagaaagtgactgagctggagagtttgctggaggagacccaggcaatctgcagagagaaggagattcaactggaaagcctgaggcagagagaagcagaattctcctccgctggacatagcctgcaagataaacagtctgtggaggagaccagtggagaaggtccagaagtggaaatggagtcctggcagaagcgatacgattcgctccaaaagattgtggagaagcagcagcagaagatggatcagttgcgctcacaagtacagagcctagagcaggaagtggctcaagaagaaggaacaagccaggccctgagagaggaggcccagcgaagggattcagccctgcagcagctgcgcacagccgtgaaggagctttcagtgcaaaaccaggacttgattgagaagaatctgacactccaggaacacctgcgccaggcccaaccagggtctccaccttcaccagacacggcccagctggcacttgagctgcaccaggagttggccagttgccttcaagatctgcaggctgtctgtagcattgtgacccagagggcccagggccatgaccccaatctctccctgctcctgggcattcactcagcacagcacccagagactcagctagatttgcagaagccagatgtgatcaagaggaaactagaagaggttcaacagctgcgtcgtgacattgaggacttaaggaccaccatgtcagacagatatgcccaggacatgggagaaaactgtgtcacacagtgaggaattctgggggattcccccagggaggagctgggctgctgagagcctagtccagcaggtttctgccctgacattctcttgtctgctattcccagagaggtctcagaggggaggggagagcctgcatctgggggccaagggctgattagggaactgtgtcctacccacactggcatgttggattacgtttgtcctgttaattcactctcgacggtgagttactaattaacttttggcaggtacaacagataagtcctcacaaactgttcccagccctaggctgacatgagagacgaacaggctgtccacctttcttctccatccaatgggatggatccatgttcattcccacttcacaccttggtcctgctgattagagagctcatcagaggggcctggaaaggctgagcaagtaccagtgacaatggccatttaagaattctcaggccccatgtgccagccttcttgggaactgagctggctttctgggttttctcatgcctggtcttactgcttcttcctcagggctcttgttctcccagaagcctcagggtaatgtgttggttagcacgtaactactaggattggggccctagggattatagccaggactctaatctgcctaccatgccatttaacaagagatcccactctccagctgccttgtgtccctagggtcctggccatgtgtttagtgtgctaaactttctcctttgttctcaggccttccaggtagtccccttcctggacttaagagtgcaaactcttctctgtggttctagccttgggcagaattatatcccagagaccacagagcaactgtcaagctgcttaccccctcacccagggctacagcctgtgcccagccctctaatttgtgcctctcttgtgttgggggtggtgggggttattcctttccctttcctgctctggcctccttgaaagttcagagtacccagtacaagtcagctttaaagtacagcttttagtgtttcctgggttgtttctctggggctttagtgagggacctttgccctctggtttttcttgcctcctggtttagggagcatctcacacttgttagtatctggttgttgggccagccgtgcctcctctagatctggagccaggccaggcaggggccacgtgtgggccagtcagccactacaagatttttgctaagctttgggctgttggcagcatcttggacctcatgcctgggcctgaatgaggctctttcttaagtgtttttacaagtttgtgttttatttatggagtgacttatcccttccattcagagcagccccacccagccagcccttcagcctctgggctcctgctgcttaaaggcagagccgcctggttggtctccaccctgtgcattgggagcccagccaccatgctgacgggtatttttcctcataaagtttataaccagttatttatatgaatctttgttatgtccatttgtttgtattgcgtattttgattataaaataaagtatcttaacagac

SEQ ID NO: 280840 - DNA, 2383 bp, Homo sapiens
ccattgttccatctgcgaggagcaccctttctgcagaaagtaaaaattgccttgctgaggaaattaaatatagcttaaggattctgagttgaagagcacagagctgcaggagaaagtgactgagctggagagtttgctggaggagacccaggcaatctgcagagagaaggagattcaactggaaagcctgaggcagagagaagcagaattctcctccgctggacatagcctgcaagataaacagtctgtggaggagaccagtggagaaggtccagaagtggaaatggagtcctggcagaagcgatacgattcgctccaaaagattgtggagaagcagcagcagaagatggatcagttgcgctcacaagtacagagcctagagcaggaagtggctcaagaagaaggaacaagccaggccctgagagaggaggcccagcgaagggattcagccctgcagcagctgcgcacagccgtgaaggagctttcagtgcaaaaccaggacttgattgagaagaatctgacactccaggaacacctgcgccaggcccaaccagggtctccaccttcaccagacacggcccagctggcacttgagctgcaccaggagttggccagttgccttcaagatctgcaggctgtctgtagcattgtgacccagagggcccagggccatgaccccaatctctccctgctcctgggcattcactcagcacagcacccagagactcagctagatttgcagaagccagatgtgatcaagaggaaactagaagaggttcaacagctgcgtcgtgacattgaggacttaaggaccaccatgtcagacagatatgcccaggacatgggagaaaactgtgtcacacagtgaggaattctgggggattcccccagggaggagctgggctgctgagagcctagtccagcaggtttctgccctgacattctcttgtctgctattcccagagaggtctcagaggggaggggagagcctgcatctgggggccaagggctgattagggaactgtgtcctacccacactggcatgttggattacgtttgtcctgttaattcactctcgacggtgagttactaattaacttttggcaggtacaacagataagtcctcacaaactgttcccagccctaggctgacatgagagacgaacaggctgtccacctttcttctccatccaatgggatggatccatgttcattcccacttcacaccttggtcctgctgattagagagctcatcagaggggcctggaaaggctgagcaagtaccagtgacaatggccatttaagaattctcaggccccatgtgccagccttcttgggaactgagctggctttctgggttttctcatgcctggtcttactgcttcttcctcagggctcttgttctcccagaagcctcagggtaatgtgttggttagcacgtaactactaggattggggccctagggattatagccaggactctaatctgcctaccatgccatttaacaagagatcccactctccagctgccttgtgtccctagggtcctggccatgtgtttagtgtgctaaactttctcctttgttctcaggccttccaggtagtccccttcctggacttaagagtgcaaactcttctctgtggttctagccttgggcagaattatatcccagagaccacagagcaactgtcaagctgcttaccccctcacccagggctacagcctgtgcccagccctctaatttgtgcctctcttgtgttgggggtggtgggggttattcctttccctttcctgctctggcctccttgaaagttcagagtacccagtacaagtcagctttaaagtacagcttttagtgtttcctgggttgtttctctggggctttagtgagggacctttgccctctggtttttcttgcctcctggtttagggagcatctcacacttgttagtatctggttgttgggccagccgtgcctcctctagatctggagccaggccaggcaggggccacgtgtgggccagtcagccactacaagatttttgctaagctttgggctgttggcagcatcttggacctcatgcctgggcctgaatgaggctctttcttaagtgtttttacaagtttgtgttttatttatggagtgacttatcccttccattcagagcagccccacccagccagcccttcagcctctgggctcctgctgcttaaaggcagagccgcctggttggtctccaccctgtgcattgggagcccagccaccatgctgacgggtatttttcctcataaagtttataaccagttatttatatgaatctttgttatgtccatttgtttgtattgcgtattttgattataaaataaagtatcttaacagac

SEQ ID NO: 280841 - DNA, 2623 bp, Homo sapiens
ggcgtgcaacggccgttagaggagctgagggagggaaccaccgctcaccgcagacgtagtggctgcagtcagtcttcccgagtgagggatttcgccgcccgctttcaggcccgtttggcttaaataactgtgattgatggccatgcaggagaaatatccaactgaggggatctctcacgtcacttcaccgagttccgatgtgattcagaagggcagttccctggggactgaatggcagaccccagttatctcggagccctttcggagccgcttcagccgctgttcaagtgtagccgacagtggggacacagccattggtacatcatgctcagatattgcggaggatttttgcagctcaagtggcagtcctcctttccagcccatcaaaagccacgtaaccattccaacagcccatgtgatgccttctactttagggacctctcctgccaagccaaattctacacctgttggaccctcttcctctaaactccctttgtcagggttggctgaaagtgtgggaatgacaagaaatggagacctcggtgcaatgaaacattctccaggcctatctagagatctcatgtatttctctggtgctactggagaaaatggaattgagcagtcctggtttccagcagtgggccatgaaagacaagaagaggcgaggaagtttgatattcctagcatggaatctaccctcaatcagtcggcaatgatggagacactttattcagatcctcaccaccgagtccgcttccacaacccaagaaccagcacaagtaaggagttgtacagagtgttgcctgaggccaagaaggcaccgggcagcggggcagtgtttgagcggaatggaccacattctaatagcagtggggtcctccctttgggactccagcctgctcccgggctctccaagcctctgccctctcaggtgtggcagccgagtcctgacacttggcatccccgagagcaatcttgtgaactcagcacttgtcggcagcagctggaattgattcgtttacagatggagcaaatgcagcttcagaatggagccatctgccaccatcctgctgcttttggtccttcactgcccatcttagagccagcacagtggatcagcatcttgaacagtaatgaacaccttctgaaggaaaaagagcttctcattgacaagcagaggaaacacatctctcagctggagcagaaagtgcgagagagcgaactgcaagtccacagtgccctcttgggccgccctgccccctttggtgatgtctgcttgctgaggctacaggaattgcagcgagaaaacactttcttacgtgcacagtttgcacagaagacagaagccttgagcagagaaaagattgaccttgaaaagaaactctctgcttctgaagttgaagtccagctcatcagagagtcgctcaaagtggcgttgcagaagcattctgaggaagtgaagaaacaggaagaaagggtcaaaggtcgtgataaacatatcaataatttgaaaaagaaatgccagaaggaatcagagcagaaccgggagaagcagcagcgtattgagaccttggagcgctacctggctgacctgcccacactggaagaccatcagaagcagagccagcagcttaaggattctgagttgaagagcacagagctgcaggagaaagtgactgagctggagagtttgctggaggagacccaggcaatctgcagagagaaggagattcaactggaaagcctgaggcagagagaagcagaattctcctccgctggacatagcctgcaagataaacagtctgtggaggagaccagtggagaaggtccagaagtggaaatggagtcctggcagaagcgatacgattcgctccaaaagattgtggagaagcagcagcagaagatggatcagttgcgctcacaagtacagagtctcgctcttgtcgcccaggctggagtgcaatggcgcaatctcggctcactgtaacctctgcctcccaggttcaagcaattctcctgcctcagcctcccgagtagctggtattacgggtgcccaccatcacgcccggctaatttttgtattttttgtagagacggggtttcaccacgttggccagactggtctcgaactcctgacctcaggtgatctgcccgcctcggcctcccaaagtgctgggattacaggcgtgagccatcatgcccagcctattacagcatgtaattgggatgtgatgtggtcaggtttgcaactcaggctcaagtgtggaagattggcatcctggagagaagaaaggtccagggggactgttggagaaattctcgtgagaggtgatgagggaacctggcataaggcagcatagcagcgaggagatgtgaggggacagatttaagtgactttaggaggtaacatcaagcggaatcagtgactgacaagatgtaggggttgaagaatagggaagaatcaaatatgactccaggtttctattttgggccagagtgggagtgtctttaactgggttctccaagaaattctgggtaaagcaggttcactcagcgtctctttggactctaaaagttttcacaccaaaacacccgaaatgcactcgttttgagggaataagtg

SEQ ID NO: 280842 - DNA, 463 bp, Homo sapiens
agcctagagcaggaagtggctcaagaagaaggaacaagccaggccctgagagaggaggcccagcgaagggattcagccctgcagcagctgcgcacagccgtgaaggaggtgagcaacattagtcagacctcttggttttgcctccacaaacccgatttctttgtttgccctccccatctctaccccaataagagccccagtgtttgaaagggaaaggtccctactgagctctgggggcagaggaaaggtgcattgcatcattctttatattacagaccctaagcctgttttagcatgtccataattattacctaggaaggttttttttttttttttaagacagagtcttgctctgtcgccaggctagagtgcagtggcgcaatctcggctcactgcaacctccgcctcccaggttcaagcgattcccctgcctcagcctcctgtgtagctgggactacaggca

SEQ ID NO: 280843 - DNA, 3940 bp, Homo sapiens
ggcgtgcaacggccgttagaggagctgagggagggaaccaccgctcaccgcagacgtagtggctgcagtcagtcttcccgagtgagggatttcgccgcccgctttcaggcccgtttggcttaaataactgtgattgatggccatgcaggagaaatatccaactgaggggatctctcacgtcacttcaccgagttccgatgtgattcagaagggcagttccctggggactgaatggcagaccccagttatctcggagccctttcggagccgcttcagccgctgttcaagtgtagccgacagtggggacacagccattggtacatcatgctcagatattgcggaggatttttgcagctcaagtggcagtcctcctttccagcccatcaaaagccacgtaaccattccaacagcccatgtgatgccttctactttagggacctctcctgccaagccaaattctacacctgttggaccctcttcctctaaactccctttgtcagggttggctgaaagtgtgggaatgacaagaaatggagacctcggtgcaatgaaacattctccaggcctatctagagatctcatgtatttctctggtgctactggagaaaatggaattgagcagtcctggtttccagcagtgggccatgaaagacaagaagaggcgaggaagtttgatattcctagcatggaatctaccctcaatcagtcggcaatgatggagacactttattcagatcctcaccaccgagtccgcttccacaacccaagaaccagcacaagtaaggagttgtacagagtgttgcctgaggccaagaaggcaccgggcagcggggcagtgtttgagcggaatggaccacattctaatagcagtggggtcctccctttgggactccagcctgctcccgggctctccaagcctctgccctctcaggtgtggcagccgagtcctgacacttggcatccccgagagcaatcttgtgaactcagcacttgtcggcagcagctggaattgattcgtttacagatggagcaaatgcagcttcagaatggagccatctgccaccatcctgctgcttttggtccttcactgcccatcttagagccagcacagtggatcagcatcttgaacagtaatgaacaccttctgaaggaaaaagagcttctcattgacaagcagaggaaacacatctctcagctggagcagaaagtgcgagagagcgaactgcaagtccacagtgccctcttgggccgccctgccccctttggtgatgtctgcttgctgaggctacaggaattgcagcgagaaaacactttcttacgtgcacagtttgcacagaagacagaagccttgagcagagaaaagattgaccttgaaaagaaactctctgcttctgaagttgaagtccagctcatcagagagtcgctcaaagtggcgttgcagaagcattctgaggaagtgaagaaacaggaagaaagggtcaaaggtcgtgataaacatatcaataatttgaaaaagaaatgccagaaggaatcagagcagaaccgggagaagcagcagcgtattgagaccttggagcgctacctggctgacctgcccacactggaagaccatcagaagcagagccagcagcttaaggattctgagttgaagagcacagagctgcaggagaaagtgactgagctggagagtttgctggaggagacccaggcaatctgcagagagaaggagattcaactggaaagcctgaggcagagagaagcagaattctcctccgctggacatagcctgcaagataaacagtctgtggaggagaccagtggagaaggtccagaagtggaaatggagtcctggcagaagcgatacgattcgctccaaaagattgtggagaagcagcagcagaagatggatcagttgcgctcacaagtacagagcctagagcaggaagtggctcaagaagaaggaacaagccaggccctgagagaggaggcccagcgaagggattcagccctgcagcagctgcgcacagccgtgaaggagctttcagtgcaaaaccaggacttgattgagaagaatctgacactccaggaacacctgcgccaggcccaaccagggtctccaccttcaccagacacggcccagctggcacttgagctgcaccaggagttggccagttgccttcaagatctgcaggctgtctgtagcattgtgacccagagggcccagggccatgaccccaatctctccctgctcctgggcattcactcagcacagcacccagagactcagctagatttgcagaagccagatgtgatcaagaggaaactagaagaggttcaacagctgcgtcgtgacattgaggacttaaggaccaccatgtcagacagatatgcccaggacatgggagaaaactgtgtcacacagtgaggaattctgggggattcccccagggaggagctgggctgctgagagcctagtccagcaggtttctgccctgacattctcttgtctgctattcccagagaggtctcagaggggaggggagagcctgcatctgggggccaagggctgattagggaactgtgtcctacccacactggcatgttggattacgtttgtcctgttaattcactctcgacggtgagttactaattaacttttggcaggtacaacagataagtcctcacaaactgttcccagccctaggctgacatgagagacgaacaggctgtccacctttcttctccatccaatgggatggatccatgttcattcccacttcacaccttggtcctgctgattagagagctcatcagaggggcctggaaaggctgagcaagtaccagtgacaatggccatttaagaattctcaggccccatgtgccagccttcttgggaactgagctggctttctgggttttctcatgcctggtcttactgcttcttcctcagggctcttgttctcccagaagcctcagggtaatgtgttggttagcacgtaactactaggattggggccctagggattatagccaggactctaatctgcctaccatgccatttaacaagagatcccactctccagctgccttgtgtccctagggtcctggccatgtgtttagtgtgctaaactttctcctttgttctcaggccttccaggtagtccccttcctggacttaagagtgcaaactcttctctgtggttctagccttgggcagaattatatcccagagaccacagagcaactgtcaagctgcttaccccctcacccagggctacagcctgtgcccagccctctaatttgtgcctctcttgtgttgggggtggtgggggttattcctttccctttcctgctctggcctccttgaaagttcagagtacccagtacaagtcagctttaaagtacagcttttagtgtttcctgggttgtttctctggggctttagtgagggacctttgccctctggtttttcttgcctcctggtttagggagcatctcacacttgttagtatctggttgttgggccagccgtgcctcctctagatctggagccaggccaggcaggggccacgtgtgggccagtcagccactacaagatttttgctaagctttgggctgttggcagcatcttggacctcatgcctgggcctgaatgaggctctttcttaagtgtttttacaagtttgtgttttatttatggagtgacttatcccttccattcagagcagccccacccagccagcccttcagcctctgggctcctgctgcttaaaggcagagccgcctggttggtctccaccctgtgcattgggagcccagccaccatgctgacgggtatttttcctcataaagtttataaccagttatttatatgaatctttgttatgtccatttgtttgtattgcgtattttgattataaaataaagtatcttaacagac

SEQ ID NO: 280844 - DNA, 3847 bp, Homo sapiens
ggcgtgcaacggccgttagaggagctgagggagggaaccaccgctcaccgcagacgtagtggctgcagtcagtcttcccgagtgagggatttcgccgcccgctttcaggcccgtttggcttaaataactgtgattgatggccatgcaggagaaatatccaactgaggggatctctcacgtcacttcaccgagttccgatgtgattcagaagggcagttccctggggactgaatggcagaccccagttatctcggagccctttcggagccgcttcagccgctgttcaagtgtagccgacagtggggacacagccattggtacatcatgctcagatattgcggaggatttttgcagctcaagtggcagtcctcctttccagcccatcaaaagccacgtaaccattccaacagcccatgtgatgccttctactttagggacctctcctgccaagccaaattctacacctgttggaccctcttcctctaaactccctttgtcagggttggctgaaagtgtgggaatgacaagaaatggagacctcggtgcaatgaaacattctccaggcctatctagagatctcatgtatttctctggtgctactggagaaaatggaattgagcagtcctggtttccagcagtgggccatgaaagacaagaagaggcgaggaagtttgatattcctagcatggaatctaccctcaatcagtcggcaatgatggagacactttattcagatcctcaccaccgagtccgcttccacaacccaagaaccagcacaagtaaggagttgtacagagtgttgcctgaggccaagaaggcaccgggcagcggggcagtgtttgagcggaatggaccacattctaatagcagtggggtcctccctttgggactccagcctgctcccgggctctccaagcctctgccctctcaggtgtggcagccgagtcctgacacttggcatccccgagagcaatcttgtgaactcagcacttgtcggcagcagctggaattgattcgtttacagatggagcaaatgcagcttcagaatggagccatctgccaccatcctgctgcttttggtccttcactgcccatcttagagccagcacagtggatcagcatcttgaacagtaatgaacaccttctgaaggaaaaagagcttctcattgacaagcagaggaaacacatctctcagctggagcagaaagtgcgagagagcgaactgcaagtccacagtgccctcttgggccgccctgccccctttggtgatgtctgcttgctgaggctacaggaattgcagcgagaaaacactttcttacgtgcacagtttgcacagaagacagaagccttgagcagagaaaagattgaccttgaaaagaaactctctgcttctgaagttgaagtccagctcatcagagagtcgctcaaagtggcgttgcagaagcattctgaggaagtgaagaaacaggaagaaagggtcaaaggtcgtgataaacatatcaataatttgaaaaagaaatgccagaaggaatcagagcagaaccgggagaagcagcagcgtattgagaccttggagcgctacctggctgacctgcccacactggaagaccatcagaagcagagccagcagcttaaggattctgagttgaagagcacagagctgcaggagaaagtgactgagctggagagtttgctggaggagacccaggcaatctgcagagagaaggagattcaactggaaagcctgaggcagagagaagcagaattctcctccgctggacatagcctgcaagataaacagtctgtggaggagaccagtggagaaggtccagaagtggaaatggagtcctggcagaagcgatacgattcgctccaaaagattgtggagaagcagcagcagaagatggatcagttgcgctcacaagtacagagcctagagcaggaagtggctcaagaagaaggaacaagccaggccctgagagaggaggcccagcgaagggattcagccctgcagcagctgcgcacagccgtgaaggagctttcagtgcaaaaccaggacttgattgagaagaatctgacactccaggaacacctgcgccaggcccaaccagggtctccaccttcaccagacacggcccagctggcacttgagctgcaccaggagttggccagttgccttcaagatctgcaggctgtctgtagcattgtgacccagagggcccagggccatgaccccaatctctccctgctcctgggcattcactcagcacagcacccagagactcagctagatttgcagaagccagatgtgatcaagaggaaactagaagaggttcaacagctgcgtcgtgacattgaggacttaaggaccaccatgtcagacagatatgcccaggacatgggagaaaactgtgtcacacagtgaggaattctgggggattcccccagggaggagctgggctgctgagagcctagtccagcaggtttctgccctgacattctcttgtctgctattcccagagaggtctcagaggggaggggagagcctgcatctgggggccaagggctgattagggaactgtgtcctacccacactggcatgttggattacgtttgtcctgttaattcactctcgacggtgagttactaattaacttttggcaggtacaacagataagtcctcacaaactgttcccagccctaggctgacatgagagacgaacaggctgtccacctttcttctccatccaatgggatggatccatgttcattcccacttcacaccttggtcctgctgattagagagctcatcagaggggcctggaaaggctgagcaagtaccagtgacaatggccatttaagaattctcaggccccatgtgccagccttcttgggaactgagctggctttctgggttttctcatgcctggtcttactgcttcttcctcagggctcttgttctcccagaagcctcagggtaatgtgttggttagcacgtaactactagggtcctggccatgtgtttagtgtgctaaactttctcctttgttctcaggccttccaggtagtccccttcctggacttaagagtgcaaactcttctctgtggttctagccttgggcagaattatatcccagagaccacagagcaactgtcaagctgcttaccccctcacccagggctacagcctgtgcccagccctctaatttgtgcctctcttgtgttgggggtggtgggggttattcctttccctttcctgctctggcctccttgaaagttcagagtacccagtacaagtcagctttaaagtacagcttttagtgtttcctgggttgtttctctggggctttagtgagggacctttgccctctggtttttcttgcctcctggtttagggagcatctcacacttgttagtatctggttgttgggccagccgtgcctcctctagatctggagccaggccaggcaggggccacgtgtgggccagtcagccactacaagatttttgctaagctttgggctgttggcagcatcttggacctcatgcctgggcctgaatgaggctctttcttaagtgtttttacaagtttgtgttttatttatggagtgacttatcccttccattcagagcagccccacccagccagcccttcagcctctgggctcctgctgcttaaaggcagagccgcctggttggtctccaccctgtgcattgggagcccagccaccatgctgacgggtatttttcctcataaagtttataaccagttatttatatgaatctttgttatgtccatttgtttgtattgcgtattttgattataaaataaagtatcttaacagac

SEQ ID NO: 280845 - DNA, 2178 bp, Homo sapiens
ggcgtgcaacggccgttagaggagctgagggagggaaccaccgctcaccgcagacgtagtggctgcagtcagtcttcccgagtgagggatttcgccgcccgctttcaggcccgtttggcttaaataactgtgattgatggccatgcaggagaaatatccaactgaggggatctctcacgtcacttcaccgagttccgatgtgattcagaagggcagttccctggggactgaatggcagaccccagttatctcggagccctttcggagccgcttcagccgctgttcaagtgtagccgacagtggggacacagccattggtacatcatgctcagatattgcggaggatttttgcagctcaagtggcagtcctcctttccagcccatcaaaagccacgtaaccattccaacagcccatgtgatgccttctactttagggacctctcctgccaagccaaattctacacctgttggaccctcttcctctaaactccctttgtcagggttggctgaaagtgtgggaatgacaagaaatggagacctcggtgcaatgaaacattctccaggcctatctagagatctcatgtatttctctggtgctactggagaaaatggaattgagcagtcctggtttccagcagtgggccatgaaagacaagaagaggcgaggaagtttgatattcctagcatggaatctaccctcaatcagtcggcaatgatggagacactttattcagatcctcaccaccgagtccgcttccacaacccaagaaccagcacaagtaaggagttgtacagagtgttgcctgaggccaagaaggcaccgggcagcggggcagtgtttgagcggaatggaccacattctaatagcagtggggtcctccctttgggactccagcctgctcccgggctctccaagcctctgccctctcaggtgtggcagccgagtcctgacacttggcatccccgagagcaatcttgtgaactcagcacttgtcggcagcagctggaattgattcgtttacagatggagcaaatgcagcttcagaatggagccatctgccaccatcctgctgcttttggtccttcactgcccatcttagagccagcacagtggatcagcatcttgaacagtaatgaacaccttctgaaggaaaaagagcttctcattgacaagcagaggaaacacatctctcagctggagcagaaagtgcgagagagcgaactgcaagtccacagtgccctcttgggccgccctgccccctttggtgatgtctgcttgctgaggctacaggaattgcagcgagaaaacactttcttacgtgcacagtttgcacagaagacagaagccttgagcagagaaaagattgaccttgaaaagaaactctctgcttctgaagttgaagtccagctcatcagagagtcgctcaaagtggcgttgcagaagcattctgaggaagtgaagaaacaggaagaaagggtgagctgagtagctgatagccctagttcacaaaggagttggcagtcagctgtctactctaaagcctaagctgtttctggcctggaactaagaggagacaattgggtgagatcctccactggcttctcacacagaatcgtcacagatctcctttttgctagaaatggaactctcctccctccctcatttttgcttcatctccacaaaaccacaacagtcagagaaagttgtatgatccctcactgtcccaggttgtgctgtgcaatgtaccaccagctggtctgggtagaaaaccaacctgagtactcataccaggtggcactgttgcaaaatacacctgtggtatatttgtatcattcagtctggtttctcacccttcctaaaaagtagagaaaaattccatgtgcatcaggcatggtggctcacgcctgtaatcccagcactttgggaggctgaaacgggtggatcacctgaggtccagagttcgagaccagcctggccaacatggtgaaaccccgtctctactaaaggtgcaaaaattggctgggtgtggtggctggcgcctgtagtctcagctacttgggaggctgaagcaggagaatggcttgaacccgggagacagaggttgcagtgaaccaggatcacgccatcatgccattgcactccagcctaggtgatagagcaagactccgtctcaggaa

SEQ ID NO: 280846 - DNA, 506 bp, Homo sapiens
caggattatccagaaaggcagattttggttaattacacagaaccatctttcaagaagtggagatttccaaaaggatcagcactcctaagtaaaggattccccaaatatcggaagcagaagcagatgaatgactggatgatggctcacctgagatgcagaagcaggggcaaatggattggattcagctacttcaagatcctttccttttctaagagctctttagtattatgttgaagactagtaatgaaggtggcacccttgtttctatgcataaggaaactaacaggtaatagagccagactagtagtcaaaagacctaccatcaagctcagtgaccttggacagggtctcactatgctgcacaaggcaatctcaaactctgggctcaagcaatcctccagcctcagccttccaaagtcctgcaattacaggcatgagccagccactacacctgtcctgtacaagctatctgtactttaatgcataaatactgttgcatgtaaatc

SEQ ID NO: 280847 - DNA, 357 bp, Homo sapiens
cctcagcattaggcaaaggagtcctacagcactcttacatgtcattctatttcaacagatgattcaactggtcctgtagatccgatgactgttcaacactaggaattagaatagagacagggtttatctgaaatgagcaataataaagacatctttgtacaactatttacaaattttttttttccattacagacagggtctcactatgctgcacaaggcaatctcaaactctgggctcaagcaatcctccagcctcagccttccaaagtcctgcaattacaggcatgagccagccactacacctgtcctgtacaagctatctgtactttaatgcataaatactgttgcatgtaaatc

SEQ ID NO: 280848 - DNA, 1985 bp, Homo sapiens
agccgccgcctcgccgcttcccctcgtcggagcggccgctcgtccgcccggcttgaggcccgcggggagcgcggcgcaattcgtcggcccgcgggggggcggcctcccggcatcttcgcggcgaccaaggactaccaggaaggggagcggctgggatggcgcgtccgcggccccgcgagtacaaagcgggcgacctggtcttcgccaagatgaagggctacccgcactggccggcccggattgatgaactcccagagggcgctgtgaagcctccagcaaacaagtatcctatcttcttttttggcacccatgaaactgcatttctaggtcccaaagacctttttccatataaggagtacaaagacaagtttggaaagtcaaacaaacggaaaggatttaacgaaggattgtgggaaatagaaaataacccaggagtaaagtttactggctaccaggcaattcagcaacagagctcttcagaaactgagggagaaggtggaaatactgcagatgcaagcagtgaggaagaaggtgatagagtagaagaagatggaaaaggcaaaagaaagaatgaaaaagcaggctcaaaacggaaaaagtcatatacttcaaagaaatcctctaaacagtcccggaaatctccaggagatgaagatgacaaagactgcaaagaagaggaaaacaaaagcagctctgagggtggagatgcgggcaacgacacaagaaacacaacttcagacttgcagaaaaccagtgaagggacctaactaccataatgaatgctgcatattaagagaaaccacaagaaggttatatgtttggttgtctaatattcttggatttgatatgaaccaacacatagtccttgttgtcattgacagaaccccagtttgtatgtacattattcatattcctctctgttgtgtttcggggggaaaagacattttagccttttttaaaagttactgatttaatttcatgttatttggttgcatgaagttgcccttaaccactaaggattatcaagatttttgcgcagacttatacatgtctaggatccttttatcaaggcagttatgatcatcgttttcctgccttgaccccaccatcatcaaacactcagttaaatataaattaacattttttagatgaccactcaacataatgcttaagaatggaatttcctctctgtgacagaacccaggaattaattcctaaatacataacgttggtatattgaagacgaaattaaaattgtccttcagttttgaggccatgtgtaaagtttaaccatattgtaaaatatctattccgtattagaaatagctagttgacagcttatacttctcaaaattcatattgttatgtacacaaactaagtttctatatgtgaagttagtgagtctttttgtgttactccaaaataaaggcaatgatttatttttttcccagtgccaatacaattttgagctaagcactcaaggtggatactttacattttaaagctggaatcagcaacagccctatgggaaaccagacaaagcattgacttttaaatgtagacttttaaaataaactgttttcttttggaactacaattagaatagttaatattcatccttaaaccattattatgtgtacattattgttgctattgtgataatagagaattttatttatttttatgccagcttatattgtgagaacacatttagtcagtttgggttttatcaatcctgttaatgcttgtccttggaacatctttcgcgtattcacggtttgtagttgaaaagtttactgtaaaaaaatcaaaaacaaaaaaatgtattgtttttacagaataaatttattggaatgtgtactgggagtaagatttgaggttgtaagcaaactaagttagtgtaatttggcttcatatatgtaacgtgaggtattaatgtaattcatatattaaagcaaaaattgttcacagcaagctgacaata

SEQ ID NO: 280849 - DNA, 2805 bp, Homo sapiens
tgaaaagatccttacggcttctgttgtttcatagcttctgcttacagtgttctgggtatccttcagttttgctaccaccctatagcctctcagtgtgcctcacatttagatacctccagagagaatccgattggattcttcagccattatctaatataggggtgcatggcaaccagtgcataaggaaccacttgtggctacttactcagaggagacttcagatctaggagacagtcagagtaccatgtccagaatatataccatgatgaattagcaagatgcagttttcaatacatagatgcaaagtgattatggtatgagaattttttaatctcagattttgtaatttgcttttacaaagcacccatttgacagcaccttgtttaaagaccacaaaaagcatgtccttaaaactatagtcacattcttggtgctcccttcactttgtttggggtattaatactactctgaggctgccatgggaccacctgttccaaaaatattctttgatgtggattgagtagtttttactgtgattattctaccaagataaacatagaatttattgcctttcacagtaataataagaaaacattgttaaagaaggtttcggccaggcacggtggctcacgcctgtaatcccagcactttgggaggccgccgagccaggcagatcacaaggtcaggagtttgagaccagcctgaccaacgtggtgaaatcccatctctactaaaaatacaaaaattagccgggcatggtagcacacacctgtaatcccagctactcaggaggctgaggcaggagaatcacttgaaccggggaggtggaggttgcagtgagctcacatcacgccactgtactccagcctaggtgacagagcgagactctgtctcaaaaaaaaaaaaaaaaaaactttctttggttgactaacaatttttcattgttctaatgggtgtcttcctccttcacaagggaggaagatcctccaaagtatctgtgagtataatcttataactggtgtttttgttaagaaataattaggagtcaccaggcactccattttttaagttcacaaatttcaaactttttttttaaagatttacttcctcattttaatagggacagaaggataaaaagtatatttctgccatcttagggggatggaagttttggtaactctctctcctttgaaggtcctggaatcgtttattataatatataccatttagtatacatgttgggctgtctgaatgagaacatacccatcagtgtgcacatgtgcttacaaacatgttcattcatttagtgaaattaagagtggaagcaggctgttttcagaaaaaatatttgagggctgagttccctctttcattcatcccatgagggtattactagggggtttaatatatttgggttaatgatgagggggaaaaaatagcatccttttggggaaatagaaccagacacaatttaaagtgggacccaaatagaaacataattcttttatgaaacaaatgttttattttctgtttgtcacacggatgccatctaaattttaaaagaaatctaggcttcctcttattctttatgttttttttaaaagcaagaagtcagagactttgtacatcatgattaacttctacatttgtttgagctatgtgtcacaagtaattaagttataaatattctgaagattaattggtgcacactctaagtgctttttaaattttacacagcttacctttctttctgaagaatgtcctcacaaagatagattatatcaatttctccactgatgatgtattccagcaataaacatagtcctagaattgtagaatgtgcactgctgcactctgtcctaacagacagtagacaaggtttataatttttttctatgggacactaaaaataccctaggatttcctttaactttttgcactgacaggtctaaagcaaagccacagaagctgctcttgctcagtaagtattgttaatgctgcagtgcatattaaaatttcagaaaacccaattatgtactatctaggtgtggatagctctcattgttagtatcctaaatcatctaaaggcttgttttctttcttttttttttttttacagacctaactaccataatgaatgctgcatattaagagaaaccacaagaaggttatatgtttggttgtctaatattcttggatttgatatgaaccaacacatagtccttgttgtcattgacagaaccccagtttgtatgtacattattcatattcctctctgttgtgtttcggggggaaaagacattttagccttttttaaaagttactgatttaatttcatgttatttggttgcatgaagttgcccttaaccactaaggattatcaagatttttgcgcagacttatacatgtctaggatccttttatcaaggcagttatgatcatcgttttcctgccttgaccccaccatcatcaaacactcagttaaatataaattaacattttttagatgaccactcaacataatgcttaagaatggaatttcctctctgtgacagaacccaggaattaattcctaaatacataacgttggtatattgaagacgaaattaaaattgtccttcagttttgaggccatgtgtaaagtttaaccatattgtaaaatatctattccgtattagaaatagctagttgacagcttatacttctcaaaattcatattgttatgtacacaaactaagtttctatatgtgaagttagtgagtctttttgtgttactccaaaataaaggcaatgatttattttttt

SEQ ID NO: 280850 - DNA, 3166 bp, Homo sapiens
agccgccgcctcgccgcttcccctcgtcggagcggccgctcgtccgcccggcttgaggcccgcggggagcgcggcgcaattcgtcggcccgcgggggggcggcctcccggcatcttcgcggcgaccaaggactaccaggaaggggagcggctgggatggcgcgtccgcggccccgcgagtacaaagcgggcgacctggtcttcgccaagatgaagggctacccgcactggccggcccggattgatgaactcccagagggcgctgtgaagcctccagcaaacaagtatcctatcttcttttttggcacccatgaaactgcatttctaggtcccaaagacctttttccatataaggagtacaaagacaagtttggaaagtcaaacaaacggaaaggatttaacgaaggattgtgggaaatagaaaataacccaggagtaaagtttactggctaccaggcaattcagcaacagagctcttcagaaactgagggagaaggtggaaatactgcagatgcaagcagtgaggaagaaggtgatagagtagaagaagatggaaaaggcaaaagaaagaatgaaaaagcaggctcaaaacggaaaaagtcatatacttcaaagaaatcctctaaacagtcccggaaatctccaggagatgaagatgacaaagactgcaaagaagaggaaaacaaaagcagctctgagggtggagatgcgggcaacgacacaagaaacacaacttcagacttgcagaaaaccagtgaagggacctaactaccataatgaatgctgcatattaagagaaaccacaagaaggttatatgtttggttgtctaatattcttggatttgatatgaaccaacacatagtccttgttgtcattgacagaaccccagtttgtatgtacattattcatattcctctctgttgtgtttcggggggaaaagacattttagccttttttaaaagttactgatttaatttcatgttatttggttgcatgaagttgcccttaaccactaaggattatcaagatttttgcgcagacttatacatgtctaggatccttttatcaaggcagttatgatcatcgttttcctgccttgaccccaccatcatcaaacactcagttaaatataaattaacattttttagatgaccactcaacataatgcttaagaatggaatttcctctctgtgacagaacccaggaattaattcctaaatacataacgttggtatattgaagacgaaattaaaattgtccttcagttttgaggccatgtgtaaagtttaaccatattgtaaaatatctattccgtattagaaatagctagttgacagcttatacttctcaaaattcatattgttatgtacacaaactaagtttctatatgtgaagttagtgagtctttttgtgttactccaaaataaaggcaatgatttatttttttcccagtgccaatacaattttgagctaagcactcaaggtggatactttacattttaaagctggaatcagcaacagccctatgggaaaccagacaaagcattgacttttaaatgtagacttttaaaataaactgttttcttttggaactacaattagaatagttaatattcatccttaaaccattattatgtgtacattattgttgctattgtgataatagagaattttatttatttttatgccagcttatattgtgagaacacatttagtcagtttgggttttatcaatcctgttaatgcttgtccttggaacatctttcgcgtattcacggtttgtagttgaaaagtttactgtaaaaaaatcaaaaacaaaaaaatgtattgtttttacagaataaatttattggaatgtgtactgggagtaagatttgaggttgtaagcaaactaagttagtgtaatttggcttcatatatgtaacgtgaggtattaatgtaattcatatattaaagcaaaaattgttcacagcaagctgacaatagaatcaagtgcaggtgagggtttttctttttctttcttttttttttttaaacactctctgggttttagattatttgaaaacactgtaggggatgatggggagatgactacatgatttgcttacacttacatatttaccagcccagtggaccctagattttgtaatttgatattatccatgcattgatttgtatcccattttcttttggttttcttgatgagagctaataaaaacatgagaaaatgtgagcagacctaaaagcctagggccgttaataatgatgatggtgatgatggcagctaagggtatgaaagcaccagtccatttatcattccagggcacagtgaggaggtggctgtttgtatttttggtgtgtttctttcatttagtgaatactgattttctctagtatactcaacatacaatcccaaacatgaaaagttcataaaaagatagtagggatgtcgatctaatacttcttccttaaaaggtcctttttaattttgaatatttgaatgtattttttaattaatgaaatttaattcatcaaaagacctcttcattgctcacactgaaacataaggggaatgtagatggcattttgaattggaatatacaactcacaaattttctttaaaagcgttttatgtgtatatatgaaatgtttcaaatttaataagatttgtctttataagaggccaaaaataattttattaaaaatatacacagaaatacaatagaaatatttccagccaccaataaaacaaatgttcattaaggatagagataaagttactgatccctatttagctgtttaaattcacacaaaaaaatttagtaaaagtaattttcttgaaacagcagcaaataataaactttccttgggaaaacatttttcaaacaacatttaaaaatattctgatgatttgccttttatattgagtttaataatgaagcatattcatcttatttgcaaaagttactcctccagtctgcattcactgttttgaattttttaatatgcacaggccatattctcttttgaatagtttcatttcatgctcactactgttggcactaaattgtaattttttacacttataattattttatatgtcaaacaatattgagatggatgatcaagtttattcacaaatgattttgaatatatttctttaaac

SEQ ID NO: 280851 - DNA, 1447 bp, Homo sapiens
agccgccgcctcgccgcttcccctcgtcggagcggccgctcgtccgcccggcttgaggcccgcggggagcgcggcgcaattcgtcggcccgcgggggggcggcctcccggcatcttcgcggcgaccaaggactaccaggaaggggagcggctgggatggcgcgtccgcggccccgcgagtacaaagcgggcgacctggtcttcgccaagatgaagggctacccgcactggccggcccggattgatgaactcccagagggcgctgtgaagcctccagcaaacaagtatcctatcttcttttttggcacccatgaaactgcatttctaggtcccaaagacctttttccatataaggagtacaaagacaagtttggaaagtcaaacaaacggaaaggatttaacgaaggattgtgggaaatagaaaataacccaggagtaaagtttactggctaccaggcaattcagcaacagagctcttcagaaactgagggagaaggtggaaatactgcagatgcaagcagtgaggaagaaggtgatagagtagaagaagatggaaaaggcaaaagaaagaatgaaaaagcaggctcaaaacggaaaaagtcatatacttcaaagaaatcctctaaacagtcccggaaatctccaggagatgaagatgacaaagactgcaaagaagaggaaaacaaaagcagctctgagggtggagatgcgggcaacgacacaagaaacacaacttcagacttgcagaaaaccagtgaagggacctaactaccataatgaatgctgcatattaagagaaaccacaagaaggttatatgtttggttgtctaatattcttggatttgatatgaaccaacacatagtccttgttgtcattgacagaaccccagtttgtatgtacattattcatattcctctctgttgtgtttcggggggaaaagacattttagccttttttaaaagttactgatttaatttcatgttatttggttgcatgaagttgcccttaaccactaaggattatcaagatttttgcgcagacttatacatgtctaggatccttttatcaaggcagttatgatcatcgttttcctgccttgaccccaccatcatcaaacactcagttaaatataaattaacattttttagatgaccactcaacataatgcttaagaatggaatttcctctctgtgacagaacccaggaattaattcctaaatacataacgttggtatattgaagacgaaattaaaattgtccttcagttttgaggccatgtgtaaagtttaaccatattgtaaaatatctattccgtattagaaatagctagttgacagcttatacttctcaaaattcatattgttatgtacacaaactaagtttctatatgtgaagttagtgagtctttttgtgttactccaaaataaaggcaatgatttattttttt

SEQ ID NO: 280852 - DNA, 3113 bp, Homo sapiens
agccgccgcctcgccgcttcccctcgtcggagcggccgctcgtccgcccggcttgaggcccgcggggagcgcggcgcaattcgtcggcccgcgggggggcggcctcccggcatcttcgcggcgaccaaggactaccaggaaggggagcggctgggatggcgcgtccgcggccccgcgagtacaaagcgggcgacctggtcttcgccaagatgaagggctacccgcactggccggcccggattgatgaactcccagagggcgctgtgaagcctccagcaaacaagtatcctatcttcttttttggcacccatgaaactgcatttctaggtcccaaagacctttttccatataaggagtacaaagacaagtttggaaagtcaaacaaacggaaaggatttaacgaaggattgtgggaaatagaaaataacccaggagtaaagtttactggctaccaggcaattcagcaacagagctcttcagaaactgagggagaaggtggaaatactgcagatgcaagcagtgaggaagaaggtgatagagtagaagaagatggaaaaggcaaaagaaagaatgaaaaagcaggctcaaaacggaaaaagtcatatacttcaaagaaatcctctaaacagtcccggaaatctccaggagatgaagatgacaaagactgcaaagaagaggaaaacaaaagcagctctgagggtggagatgcgggcaacgacacaagaaacacaacttcagacttgcagaaaaccagtgaagggacctaactaccataatgaatgctgcatattaagagaaaccacaagaaggttatatgtttggttgtctaatattcttggatttgatatgaaccaacacatagtccttgttgtcattgacagaaccccagtttgtatgtacattattcatattcctctctgttgtgtttcggggggaaaagacattttagccttttttcactaaggattatcaagatttttgcgcagacttatacatgtctaggatccttttatcaaggcagttatgatcatcgttttcctgccttgaccccaccatcatcaaacactcagttaaatataaattaacattttttagatgaccactcaacataatgcttaagaatggaatttcctctctgtgacagaacccaggaattaattcctaaatacataacgttggtatattgaagacgaaattaaaattgtccttcagttttgaggccatgtgtaaagtttaaccatattgtaaaatatctattccgtattagaaatagctagttgacagcttatacttctcaaaattcatattgttatgtacacaaactaagtttctatatgtgaagttagtgagtctttttgtgttactccaaaataaaggcaatgatttatttttttcccagtgccaatacaattttgagctaagcactcaaggtggatactttacattttaaagctggaatcagcaacagccctatgggaaaccagacaaagcattgacttttaaatgtagacttttaaaataaactgttttcttttggaactacaattagaatagttaatattcatccttaaaccattattatgtgtacattattgttgctattgtgataatagagaattttatttatttttatgccagcttatattgtgagaacacatttagtcagtttgggttttatcaatcctgttaatgcttgtccttggaacatctttcgcgtattcacggtttgtagttgaaaagtttactgtaaaaaaatcaaaaacaaaaaaatgtattgtttttacagaataaatttattggaatgtgtactgggagtaagatttgaggttgtaagcaaactaagttagtgtaatttggcttcatatatgtaacgtgaggtattaatgtaattcatatattaaagcaaaaattgttcacagcaagctgacaatagaatcaagtgcaggtgagggtttttctttttctttcttttttttttttaaacactctctgggttttagattatttgaaaacactgtaggggatgatggggagatgactacatgatttgcttacacttacatatttaccagcccagtggaccctagattttgtaatttgatattatccatgcattgatttgtatcccattttcttttggttttcttgatgagagctaataaaaacatgagaaaatgtgagcagacctaaaagcctagggccgttaataatgatgatggtgatgatggcagctaagggtatgaaagcaccagtccatttatcattccagggcacagtgaggaggtggctgtttgtatttttggtgtgtttctttcatttagtgaatactgattttctctagtatactcaacatacaatcccaaacatgaaaagttcataaaaagatagtagggatgtcgatctaatacttcttccttaaaaggtcctttttaattttgaatatttgaatgtattttttaattaatgaaatttaattcatcaaaagacctcttcattgctcacactgaaacataaggggaatgtagatggcattttgaattggaatatacaactcacaaattttctttaaaagcgttttatgtgtatatatgaaatgtttcaaatttaataagatttgtctttataagaggccaaaaataattttattaaaaatatacacagaaatacaatagaaatatttccagccaccaataaaacaaatgttcattaaggatagagataaagttactgatccctatttagctgtttaaattcacacaaaaaaatttagtaaaagtaattttcttgaaacagcagcaaataataaactttccttgggaaaacatttttcaaacaacatttaaaaatattctgatgatttgccttttatattgagtttaataatgaagcatattcatcttatttgcaaaagttactcctccagtctgcattcactgttttgaattttttaatatgcacaggccatattctcttttgaatagtttcatttcatgctcactactgttggcactaaattgtaattttttacacttataattattttatatgtcaaacaatattgagatggatgatcaagtttattcacaaatgattttgaatatatttctttaaac

SEQ ID NO: 280853 - DNA, 818 bp, Homo sapiens
agccgccgcctcgccgcttcccctcgtcggagcggccgctcgtccgcccggcttgaggcccgcggggagcgcggcgcaattcgtcggcccgcgggggggcggcctcccggcatcttcgcggcgaccaaggactaccaggaaggggagcggctgggatggcgcgtccgcggccccgcgagtacaaagcgggcgacctggtcttcgccaagatgaagggctacccgcactggccggcccggattgatgaactcccagagggcgctgtgaagcctccagcaaacaagtatcctatcttcttttttggcacccatgaaactgcatttctaggtcccaaagacctttttccatataaggagtacaaagacaagtttggaaagtcaaacaaacggaaaggatttaacgaaggattgtgggaaatagaaaataacccaggagtaaagtttactggctaccaggcaattcagcaacagagctcttcagaaactgagggagaaggtggaaatactgcagatgcaagcagtgaggaagaaggtgatagagtagaagaagatggaaaaggcaaaagaaagaatgaaaaagcaggctcaaaacggaaaaagtcatatacttcaaagaaatcctctaaacagtcccggaaatctccaggagatgaagatgacaaagactgcaaagaagaggaaaacaaaagcagctctgagggtggagatgcgggcttaatacctaggtgatgagacaatctgtgcaacaaaccaccatggcacctatttacatatgtagcaacctgcacatcctgtacatgtaccccgacttgtataaca

SEQ ID NO: 280854 - DNA, 1832 bp, Homo sapiens
ggcggcggctgaggcaaggggtgggcggggggcgcagcaggcccggcaaatcacggcccggcagcgggggggcggcctcccggcatcttcgcggcgaccaaggactaccaggaaggggagcggctgggatggcgcgtccgcggccccgcgagtacaaagcgggcgacctggtcttcgccaagatgaagggctacccgcactggccggcccggattgatgaactcccagagggcgctgtgaagcctccagcaaacaagtatcctatcttcttttttggcacccatgaaactgcatttctaggtcccaaagacctttttccatataaggagtacaaagacaagtttggaaagtcaaacaaacggaaaggatttaacgaaggattgtgggaaatagaaaataacccaggagtaaagtttactggctaccaggcaattcagcaacagagctcttcagaaactgagggagaaggtggaaatactgcagatgcaagcagtgaggaagaaggtgatagagtagaagaagatggaaaaggcaaaagaaagaatgaaaaagcaggctcaaaacggaaaaagtcatatacttcaaagaaatcctctaaacagtcccggaaatctccaggagatgaagatgacaaagactgcaaagaagaggaaaacaaaagcagctctgagggtggagatgcgggcaacgacacaagaaacacaacttcagacttgcagaaaaccagtgaagggacctaactaccataatgaatgctgcatattaagagaaaccacaagaaggttatatgtttggttgtctaatattcttggatttgatatgaaccaacacatagtccttgttgtcattgacagaaccccagtttgtatgtacattattcatattcctctctgttgtgtttcggggggaaaagacattttagccttttttaaaagttactgatttaatttcatgttatttggttgcatgaagttgcccttaaccactaaggattatcaagatttttgcgcagacttatacatgtctaggatccttttatcaaggcagttatgatcatcgttttcctgccttgaccccaccatcatcaaacactcagttaaatataaattaacattttttagatgaccactcaacataatgcttaagaatggaatttcctctctgtgacagaacccaggaattaattcctaaatacataacgttggtatattgaagacgaaattaaaattgtccttcagttttgaggccatgtgtaaagtttaaccatattgtaaaatatctattccgtattagaaatagctagttgacagcttatacttctcaaaattcatattgttatgtacacaaactaagtttctatatgtgaagttagtgagtctttttgtgttactccaaaataaaggcaatgatttatttttttcccagtgccaatacaattttgagctaagcactcaaggtggatactttacattttaaagctggaatcagcaacagccctatgggaaaccagacaaagcattgacttttaaatgtagacttttaaaataaactgttttcttttggaactacaattagaatagttaatattcatccttaaaccattattatgtgtacattattgttgctattgtgataatagagaattttatttatttttatgccagcttatattgtgagaacacatttagtcagtttgggttttatcaatcctgttaatgcttgtccttggaacatctttcgcgtattcacggtttgtagttgaaaagtttactgtaaaaaaatcaaaaacaaaaaaatgtattgtttttacagaataaatttattggaatgtg

SEQ ID NO: 280855 - DNA, 1792 bp, Homo sapiens
cacccgcgtatagcttctgccctgggcttggcctgaattgtggcacgagttctttatgcttatggctattacacggggccgcgggccttgtacgcgtacaaggccccgcgagtacaaagcgggcgacctggtcttcgccaagatgaagggctacccgcactggccggcccggattgatgaactcccagagggcgctgtgaagcctccagcaaacaagtatcctatcttcttttttggcacccatgaaactgcatttctaggtcccaaagacctttttccatataaggagtacaaagacaagtttggaaagtcaaacaaacggaaaggatttaacgaaggattgtgggaaatagaaaataacccaggagtaaagtttactggctaccaggcaattcagcaacagagctcttcagaaactgagggagaaggtggaaatactgcagatgcaagcagtgaggaagaaggtgatagagtagaagaagatggaaaaggcaaaagaaagaatgaaaaagcaggctcaaaacggaaaaagtcatatacttcaaagaaatcctctaaacagtcccggaaatctccaggagatgaagatgacaaagactgcaaagaagaggaaaacaaaagcagctctgagggtggagatgcgggcaacgacacaagaaacacaacttcagacttgcagaaaaccagtgaagggacctaactaccataatgaatgctgcatattaagagaaaccacaagaaggttatatgtttggttgtctaatattcttggatttgatatgaaccaacacatagtccttgttgtcattgacagaaccccagtttgtatgtacattattcatattcctctctgttgtgtttcggggggaaaagacattttagccttttttaaaagttactgatttaatttcatgttatttggttgcatgaagttgcccttaaccactaaggattatcaagatttttgcgcagacttatacatgtctaggatccttttatcaaggcagttatgatcatcgttttcctgccttgaccccaccatcatcaaacactcagttaaatataaattaacattttttagatgaccactcaacataatgcttaagaatggaatttcctctctgtgacagaacccaggaattaattcctaaatacataacgttggtatattgaagacgaaattaaaattgtccttcagttttgaggccatgtgtaaagtttaaccatattgtaaaatatctattccgtattagaaatagctagttgacagcttatacttctcaaaattcatattgttatgtacacaaactaagtttctatatgtgaagttagtgagtctttttgtgttactccaaaataaaggcaatgatttatttttttcccagtgccaatacaattttgagctaagcactcaaggtggatactttacattttaaagctggaatcagcaacagccctatgggaaaccagacaaagcattgacttttaaatgtagacttttaaaataaactgttttcttttggaactacaattagaatagttaatattcatccttaaaccattattatgtgtacattattgttgctattgtgataatagagaattttatttatttttatgccagcttatattgtgagaacacatttagtcagtttgggttttatcaatcctgttaatgcttgtccttggaacatctttcgcgtattcacggtttgtagttgaaaagtttactgtaaaaaaatcaaaaacaaaaaaatgtattgtttttacagaataaatttattggaatgtg

SEQ ID NO: 280856 - DNA, 1660 bp, Homo sapiens
  misc_feature (25)..(25): n is a, c, g, or t
  misc_feature (28)..(28): n is a, c, g, or t
  misc_feature (35)..(35): n is a, c, g, or t
  misc_feature (37)..(37): n is a, c, g, or t
gttttatgtaacgtgactctcttanttnccaccgntncagattgatgaactcccagagggcgctgtgaagcctccagcaaacaagtatcctatcttcttttttggcacccatgaaactgcatttctaggtcccaaagacctttttccatataaggagtacaaagacaagtttggaaagtcaaacaaacggaaaggatttaacgaaggattgtgggaaatagaaaataacccaggagtaaagtttactggctaccaggcaattcagcaacagagctcttcagaaactgagggagaaggtggaaatactgcagatgcaagcagtgaggaagaaggtgatagagtagaagaagatggaaaaggcaaaagaaagaatgaaaaagcaggctcaaaacggaaaaagtcatatacttcaaagaaatcctctaaacagtcccggaaatctccaggagatgaagatgacaaagactgcaaagaagaggaaaacaaaagcagctctgagggtggagatgcgggcaacgacacaagaaacacaacttcagacttgcagaaaaccagtgaagggacctaactaccataatgaatgctgcatattaagagaaaccacaagaaggttatatgtttggttgtctaatattcttggatttgatatgaaccaacacatagtccttgttgtcattgacagaaccccagtttgtatgtacattattcatattcctctctgttgtgtttcggggggaaaagacattttagccttttttaaaagttactgatttaatttcatgttatttggttgcatgaagttgcccttaaccactaaggattatcaagatttttgcgcagacttatacatgtctaggatccttttatcaaggcagttatgatcatcgttttcctgccttgaccccaccatcatcaaacactcagttaaatataaattaacattttttagatgaccactcaacataatgcttaagaatggaatttcctctctgtgacagaacccaggaattaattcctaaatacataacgttggtatattgaagacgaaattaaaattgtccttcagttttgaggccatgtgtaaagtttaaccatattgtaaaatatctattccgtattagaaatagctagttgacagcttatacttctcaaaattcatattgttatgtacacaaactaagtttctatatgtgaagttagtgagtctttttgtgttactccaaaataaaggcaatgatttatttttttcccagtgccaatacaattttgagctaagcactcaaggtggatactttacattttaaagctggaatcagcaacagccctatgggaaaccagacaaagcattgacttttaaatgtagacttttaaaataaactgttttcttttggaactacaattagaatagttaatattcatccttaaaccattattatgtgtacattattgttgctattgtgataatagagaattttatttatttttatgccagcttatattgtgagaacacatttagtcagtttgggttttatcaatcctgttaatgcttgtccttggaacatctttcgcgtattcacggtttgtagttgaaaagtttactgtaaaaaaatcaaaaacaaaaaaatgtattgtttttacagaataaatttattggaatgtg

SEQ ID NO: 280857 - DNA, 1295 bp, Homo sapiens
  misc_feature (44)..(44): n is a, c, g, or t
  misc_feature (49)..(49): n is a, c, g, or t
ataatcttaataattattcttttttattgaataaaatttgtgtngttgncaaatcctctaaacagtcccggaaatctccaggagatgaagatgacaaagactgcaaagaagaggaaaacaaaagcagctctgagggtggagatgcgggcaacgacacaagaaacacaacttcagacttgcagaaaaccagtgaagggacctaactaccataatgaatgctgcatattaagagaaaccacaagaaggttatatgtttggttgtctaatattcttggatttgatatgaaccaacacatagtccttgttgtcattgacagaaccccagtttgtatgtacattattcatattcctctctgttgtgtttcggggggaaaagacattttagccttttttaaaagttactgatttaatttcatgttatttggttgcatgaagttgcccttaaccactaaggattatcaagatttttgcgcagacttatacatgtctaggatccttttatcaaggcagttatgatcatcgttttcctgccttgaccccaccatcatcaaacactcagttaaatataaattaacattttttagatgaccactcaacataatgcttaagaatggaatttcctctctgtgacagaacccaggaattaattcctaaatacataacgttggtatattgaagacgaaattaaaattgtccttcagttttgaggccatgtgtaaagtttaaccatattgtaaaatatctattccgtattagaaatagctagttgacagcttatacttctcaaaattcatattgttatgtacacaaactaagtttctatatgtgaagttagtgagtctttttgtgttactccaaaataaaggcaatgatttatttttttcccagtgccaatacaattttgagctaagcactcaaggtggatactttacattttaaagctggaatcagcaacagccctatgggaaaccagacaaagcattgacttttaaatgtagacttttaaaataaactgttttcttttggaactacaattagaatagttaatattcatccttaaaccattattatgtgtacattattgttgctattgtgataatagagaattttatttatttttatgccagcttatattgtgagaacacatttagtcagtttgggttttatcaatcctgttaatgcttgtccttggaacatctttcgcgtattcacggtttgtagttgaaaagtttactgtaaaaaaatcaaaaacaaaaaaatgtattgtttttacagaataaatttattggaatgtg

SEQ ID NO: 280858 - DNA, 4524 bp, Homo sapiens
tgaaaagatccttacggcttctgttgtttcatagcttctgcttacagtgttctgggtatccttcagttttgctaccaccctatagcctctcagtgtgcctcacatttagatacctccagagagaatccgattggattcttcagccattatctaatataggggtgcatggcaaccagtgcataaggaaccacttgtggctacttactcagaggagacttcagatctaggagacagtcagagtaccatgtccagaatatataccatgatgaattagcaagatgcagttttcaatacatagatgcaaagtgattatggtatgagaattttttaatctcagattttgtaatttgcttttacaaagcacccatttgacagcaccttgtttaaagaccacaaaaagcatgtccttaaaactatagtcacattcttggtgctcccttcactttgtttggggtattaatactactctgaggctgccatgggaccacctgttccaaaaatattctttgatgtggattgagtagtttttactgtgattattctaccaagataaacatagaatttattgcctttcacagtaataataagaaaacattgttaaagaaggtttcggccaggcacggtggctcacgcctgtaatcccagcactttgggaggccgccgagccaggcagatcacaaggtcaggagtttgagaccagcctgaccaacgtggtgaaatcccatctctactaaaaatacaaaaattagccgggcatggtagcacacacctgtaatcccagctactcaggaggctgaggcaggagaatcacttgaaccggggaggtggaggttgcagtgagctcacatcacgccactgtactccagcctaggtgacagagcgagactctgtctcaaaaaaaaaaaaaaaaaaactttctttggttgactaacaatttttcattgttctaatgggtgtcttcctccttcacaagggaggaagatcctccaaagtatctgtgagtataatcttataactggtgtttttgttaagaaataattaggagtcaccaggcactccattttttaagttcacaaatttcaaactttttttttaaagatttacttcctcattttaatagggacagaaggataaaaagtatatttctgccatcttagggggatggaagttttggtaactctctctcctttgaaggtcctggaatcgtttattataatatataccatttagtatacatgttgggctgtctgaatgagaacatacccatcagtgtgcacatgtgcttacaaacatgttcattcatttagtgaaattaagagtggaagcaggctgttttcagaaaaaatatttgagggctgagttccctctttcattcatcccatgagggtattactagggggtttaatatatttgggttaatgatgagggggaaaaaatagcatccttttggggaaatagaaccagacacaatttaaagtgggacccaaatagaaacataattcttttatgaaacaaatgttttattttctgtttgtcacacggatgccatctaaattttaaaagaaatctaggcttcctcttattctttatgttttttttaaaagcaagaagtcagagactttgtacatcatgattaacttctacatttgtttgagctatgtgtcacaagtaattaagttataaatattctgaagattaattggtgcacactctaagtgctttttaaattttacacagcttacctttctttctgaagaatgtcctcacaaagatagattatatcaatttctccactgatgatgtattccagcaataaacatagtcctagaattgtagaatgtgcactgctgcactctgtcctaacagacagtagacaaggtttataatttttttctatgggacactaaaaataccctaggatttcctttaactttttgcactgacaggtctaaagcaaagccacagaagctgctcttgctcagtaagtattgttaatgctgcagtgcatattaaaatttcagaaaacccaattatgtactatctaggtgtggatagctctcattgttagtatcctaaatcatctaaaggcttgttttctttcttttttttttttttacagacctaactaccataatgaatgctgcatattaagagaaaccacaagaaggttatatgtttggttgtctaatattcttggatttgatatgaaccaacacatagtccttgttgtcattgacagaaccccagtttgtatgtacattattcatattcctctctgttgtgtttcggggggaaaagacattttagccttttttaaaagttactgatttaatttcatgttatttggttgcatgaagttgcccttaaccactaaggattatcaagatttttgcgcagacttatacatgtctaggatccttttatcaaggcagttatgatcatcgttttcctgccttgaccccaccatcatcaaacactcagttaaatataaattaacattttttagatgaccactcaacataatgcttaagaatggaatttcctctctgtgacagaacccaggaattaattcctaaatacataacgttggtatattgaagacgaaattaaaattgtccttcagttttgaggccatgtgtaaagtttaaccatattgtaaaatatctattccgtattagaaatagctagttgacagcttatacttctcaaaattcatattgttatgtacacaaactaagtttctatatgtgaagttagtgagtctttttgtgttactccaaaataaaggcaatgatttatttttttcccagtgccaatacaattttgagctaagcactcaaggtggatactttacattttaaagctggaatcagcaacagccctatgggaaaccagacaaagcattgacttttaaatgtagacttttaaaataaactgttttcttttggaactacaattagaatagttaatattcatccttaaaccattattatgtgtacattattgttgctattgtgataatagagaattttatttatttttatgccagcttatattgtgagaacacatttagtcagtttgggttttatcaatcctgttaatgcttgtccttggaacatctttcgcgtattcacggtttgtagttgaaaagtttactgtaaaaaaatcaaaaacaaaaaaatgtattgtttttacagaataaatttattggaatgtgtactgggagtaagatttgaggttgtaagcaaactaagttagtgtaatttggcttcatatatgtaacgtgaggtattaatgtaattcatatattaaagcaaaaattgttcacagcaagctgacaatagaatcaagtgcaggtgagggtttttctttttctttcttttttttttttaaacactctctgggttttagattatttgaaaacactgtaggggatgatggggagatgactacatgatttgcttacacttacatatttaccagcccagtggaccctagattttgtaatttgatattatccatgcattgatttgtatcccattttcttttggttttcttgatgagagctaataaaaacatgagaaaatgtgagcagacctaaaagcctagggccgttaataatgatgatggtgatgatggcagctaagggtatgaaagcaccagtccatttatcattccagggcacagtgaggaggtggctgtttgtatttttggtgtgtttctttcatttagtgaatactgattttctctagtatactcaacatacaatcccaaacatgaaaagttcataaaaagatagtagggatgtcgatctaatacttcttccttaaaaggtcctttttaattttgaatatttgaatgtattttttaattaatgaaatttaattcatcaaaagacctcttcattgctcacactgaaacataaggggaatgtagatggcattttgaattggaatatacaactcacaaattttctttaaaagcgttttatgtgtatatatgaaatgtttcaaatttaataagatttgtctttataagaggccaaaaataattttattaaaaatatacacagaaatacaatagaaatatttccagccaccaataaaacaaatgttcattaaggatagagataaagttactgatccctatttagctgtttaaattcacacaaaaaaatttagtaaaagtaattttcttgaaacagcagcaaataataaactttccttgggaaaacatttttcaaacaacatttaaaaatattctgatgatttgccttttatattgagtttaataatgaagcatattcatcttatttgcaaaagttactcctccagtctgcattcactgttttgaattttttaatatgcacaggccatattctcttttgaatagtttcatttcatgctcactactgttggcactaaattgtaattttttacacttataattattttatatgtcaaacaatattgagatggatgatcaagtttattcacaaatgattttgaatatatttctttaaac

SEQ ID NO: 280859 - DNA, 1859 bp, Homo sapiens
agccgccgcctcgccgcttcccctcgtcggagcggccgctcgtccgcccggcttgaggcccgcggggagcgcggcgcaattcgtcggcccgcgggggggcggcctcccggcatcttcgcggcgaccaaggactaccaggaaggggagcggctgggatggcgcgtccgcggccccgcgagtacaaagcgggcgacctggtcttcgccaagatgaagggctacccgcactggccggcccggattgatgaactcccagagggcgctgtgaagcctccagcaaacaagtatcctatcttcttttttggcacccatgaaactgcatttctaggtcccaaagacctttttccatataaggagtacaaagacaagtttggaaagtcaaacaaacggaaaggatttaacgaaggattgtgggaaatagaaaataacccaggagtaaagtttactggctaccaggcaattcagcaacagagctcttcagaaactgagggagaaggtggaaatactgcagatgcaagcagtgaggaagaaggtgatagagtagaagaagatggaaaaggcaaaagaaagaatgaaaaagcaggctcaaaacggaaaaagtcatatacttcaaagaaatcctctaaacagtcccggaaatctccaggagatgaagatgacaaagactgcaaagaagaggaaaacaaaagcagctctgagggtggagatgcgggcaacgacacaagaaacacaacttcagacttgcagaaaaccagtgaagggacctaactaccataatgaatgctgcatattaagagaaaccacaagaaggttatatgtttggttgtctaatattcttggatttgatatgaaccaacacatagtccttgttgtcattgacagaaccccagtttgtatgtacattattcatattcctctctgttgtgtttcggggggaaaagacattttagccttttttaaaagttactgatttaatttcatgttatttggttgcatgaagttgcccttaaccactaaggattatcaagatttttgcgcagacttatacatgtctaggatccttttatcaaggcagttatgatcatcgttttcctgccttgaccccaccatcatcaaacactcagttaaatataaattaacattttttagatgaccactcaacataatgcttaagaatggaatttcctctctgtgacagaacccaggaattaattcctaaatacataacgttggtatattgaagacgaaattaaaattgtccttcagttttgaggccatgtgtaaagtttaaccatattgtaaaatatctattccgtattagaaatagctagttgacagcttatacttctcaaaattcatattgttatgtacacaaactaagtttctatatgtgaagttagtgagtctttttgtgttactccaaaataaaggcaatgatttatttttttcccagtgccaatacaattttgagctaagcactcaaggtggatactttacattttaaagctggaatcagcaacagccctatgggaaaccagacaaagcattgacttttaaatgtagacttttaaaataaactgttttcttttggaactacaattagaatagttaatattcatccttaaaccattattatgtgtacattattgttgctattgtgataatagagaattttatttatttttatgccagcttatattgtgagaacacatttagtcagtttgggttttatcaatcctgttaatgcttgtccttggaacatctttcgcgtattcacggtttgtagttgaaaagtttactgtaaaaaaatcaaaaacaaaaaaatgtattgtttttacagaataaatttattggaatgtg

SEQ ID NO: 280860 - DNA, 1117 bp, Homo sapiens
cgtacaaggcccgctggcgtgaagccggccccttacattttgcgaagtgcattatatgtccttgtttttctctccctcgtgggggcaacgacccctcccctggcagtaggggtggggtaggtgactctcgctagatccctccaaagcagaccggtggcgatgtcagcggatgtcacgagctcgttagctgcgttcggggaaggttggggcgtcagggagctctcggatcacagcggcccccgccctctcctaggcctggcccggcagagcccccagagtggaccccccagcgactggggtcttctccccactcctccctccttctggtctgatgcggcagtgcgggggccttgtacgcgtacaaggccccgcgagtacaaagcgggcgacctggtcttcgccaagatgaagggctacccgcactggccggcccggattgatgaactcccagagggcgctgtgaagcctccagcaaacaagtatcctatcttcttttttggcacccatgaaactgcatttctaggtcccaaagacctttttccatataaggagtacaaagacaagtttggaaagtcaaacaaacggaaaggatttaacgaaggattgtgggaaatagaaaataacccaggagtaaagtttactggctaccaggcaattcagcaacagagctcttcagaaactgagggagaaggtggaaatactgcagatgcaagcagtgaggaagaaggtgatagagtagaagaagatggaaaaggcaaaagaaagaatgaaaaagcaggctcaaaacggaaaaagtcatatacttcaaagaaatcctctaaacagtcccggaaatctccaggagatgaagatgacaaagactgcaaagaagaggaaaacaaaagcagctctgagggtggagatgcggggccttgtacgtacaaggccccgtggggtgttgcagagaagtgaattctcattaggtcccttatgtgtaggtggttgaaaagatgttgatctcggagtcaaatgtgtgatcatgtagaacgcagtggcagtgggatggttatctgtcagcgtaaggtatgggtgcgcagtgtaaggtgaaatatctccatacagaagaggagcggtactg

SEQ ID NO: 280861 - DNA, 2135 bp, Homo sapiens
agccgccgcctcgccgcttcccctcgtcggagcggccgctcgtccgcccggcttgaggcccgcggggagcgcggcgcaattcgtcggcccgcgggggggcggcctcccggcatcttcgcggcgaccaaggactaccaggaaggggagcggctgggatggcgcgtccgcggccccgcgagtacaaagcgggcgacctggtcttcgccaagatgaagggctacccgcactggccggcccggattgatgaactcccagagggcgctgtgaagcctccagcaaacaagtatcctatcttcttttttggcacccatgaaactgcatttctaggtcccaaagacctttttccatataaggagtacaaagacaagtttggaaagtcaaacaaacggaaaggatttaacgaaggattgtgggaaatagaaaataacccaggagtaaagtttactggctaccaggcaattcagcaacagagctcttcagaaactgagggagaaggtggaaatactgcagatgcaagcagtgaggaagaaggtgatagagtagaagaagatggaaaaggcaaaagaaagaatgaaaaagcaggctcaaaacggaaaaagtcatatacttcaaagaaatcctctaaacagtcccggaaatctccaggagatgaagatgacaaagactgcaaagaagaggaaaacaaaagcagctctgagggtggagatgcgggcaacgacacaagaaacacaacttcagacttgcagaaaaccagtgaagggacctaactaccataatgaatgctgcatattaagagaaaccacaagaaggttatatgtttggttgtctaatattcttggatttgatatgaaccaacacatagtccttgttgtcattgacagaaccccagtttgtatgtacattattcatattcctctctgttgtgtttcggggggaaaagacattttagccttttttaaaagttactgatttaatttcatgttatttggttgcatgaagttgcccttaaccactaaggattatcaagatttttgcgcagacttatacatgtctaggatccttttatcaaggcagttatgatcatcgttttcctgccttgaccccaccatcatcaaacactcagttaaatataaattaacattttttagatgaccactcaacataatgcttaagaatggaatttcctctctgtgacagaacccaggaattaattcctaaatacataacgttggtatattgaagacgaaattaaaattgtccttcagttttgaggccatgtgtaaagtttaaccatattgtaaaatatctattccgtattagaaatagctagttgacagcttatacttctcaaaattcatattgttatgtacacaaactaagtttctatatgtgaagttagtgagtctttttgtgttactccaaaataaaggcaatgatttatttttttcccagtgccaatacaattttgagctaagcactcaaggtggatactttacattttaaagctggaatcagcaacagccctatgggaaaccagacaaagcattgacttttaaatgtagacttttaaaataaactgttttcttttggaactacaattagaatagttaatattcatccttaaaccattattatgtgtacattattgttgctattgtgataatagagaattttatttatttttatgccagcttatattgtgagaacacatttagtcagtttgggttttatcaatcctgttaatgcttgtccttggaacatctttcgcgtattcacggtttgtagttgaaaagtttactgtaaaaaaatcaaaaacaaaaaaatgtattgtttttacagaataaatttattggaatgtgtactgggagtaagatttgaggttgtaagcaaactaagttagtgtaatttggcttcatatatgtaacgtgaggtattaatgtaattcatatattaaagcaaaaattgttcacagcaagctgacaataaaaaaacaacaggcaaaccacaacacaaactctcttttgggcccgcccgggcccttggaaaaagtttttcaacaccccttcggttggggcgccggggccccatagggtacggggaaccttgggccacagcggttccaggaggaacccggg

SEQ ID NO: 280862 - DNA, 921 bp, Homo sapiens
agccgccgcctcgccgcttcccctcgtcggagcggccgctcgtccgcccggcttgaggcccgcggggagcgcggcgcaattcgtcggcccgcgggggggcggcctcccggcatcttcgcggcgaccaaggactaccaggaaggggagcggctgggatggcgcgtccgcggccccgcgagtacaaagcgggcgacctggtcttcgccaagatgaagggctacccgcactggccggcccggattgatgaactcccagagggcgctgtgaagcctccagcaaacaagtatcctatcttcttttttggcacccatgaaactgcatttctaggtcccaaagacctttttccatataaggagtacaaagacaagtttggaaagtcaaacaaacggaaaggatttaacgaaggattgtgggaaatagaaaataacccaggagtaaagtttactggctaccaggcaattcagcaacagagctcttcagaaactgagggagaaggtggaaatactgcagatgcaagcagtgaggaagaaggtgatagagtagaagaagatggaaaaggcaaaagaaagaatgaaaaagcaggctcaaaacggaaaaagtcatatacttcaaagaaatcctctaaacagtcccggaaatctccaggagatgaagatgacaaagactgcaaagaagaggaaaacaaaagcagctctgagggtggagatgcggggccttgtacgtacaaggccccgtggggtgttgcagagaagtgaattctcattaggtcccttatgtgtaggtggttgaaaagatgttgatctcggagtcaaatgtgtgatcatgtagaacgcagtggcagtgggatggttatctgtcagcgtaaggtatgggtgcgcagtgtaaggtgaaatatctccatacagaagaggagcggtactg

SEQ ID NO: 280863 - DNA, 2055 bp, Homo sapiens
cgtacaaggcccgctggcgtgaagccggccccttacattttgcgaagtgcattatatgtccttgtttttctctccctcgtgggggcaacgacccctcccctggcagtaggggtggggtaggtgactctcgctagatccctccaaagcagaccggtggcgatgtcagcggatgtcacgagctcgttagctgcgttcggggaaggttggggcgtcagggagctctcggatcacagcggcccccgccctctcctaggcctggcccggcagagcccccagagtggaccccccagcgactggggtcttctccccactcctccctccttctggtctgatgcggcagtgcgggggccttgtacgcgtacaaggccccgcgagtacaaagcgggcgacctggtcttcgccaagatgaagggctacccgcactggccggcccggattgatgaactcccagagggcgctgtgaagcctccagcaaacaagtatcctatcttcttttttggcacccatgaaactgcatttctaggtcccaaagacctttttccatataaggagtacaaagacaagtttggaaagtcaaacaaacggaaaggatttaacgaaggattgtgggaaatagaaaataacccaggagtaaagtttactggctaccaggcaattcagcaacagagctcttcagaaactgagggagaaggtggaaatactgcagatgcaagcagtgaggaagaaggtgatagagtagaagaagatggaaaaggcaaaagaaagaatgaaaaagcaggctcaaaacggaaaaagtcatatacttcaaagaaatcctctaaacagtcccggaaatctccaggagatgaagatgacaaagactgcaaagaagaggaaaacaaaagcagctctgagggtggagatgcgggcaacgacacaagaaacacaacttcagacttgcagaaaaccagtgaagggacctaactaccataatgaatgctgcatattaagagaaaccacaagaaggttatatgtttggttgtctaatattcttggatttgatatgaaccaacacatagtccttgttgtcattgacagaaccccagtttgtatgtacattattcatattcctctctgttgtgtttcggggggaaaagacattttagccttttttaaaagttactgatttaatttcatgttatttggttgcatgaagttgcccttaaccactaaggattatcaagatttttgcgcagacttatacatgtctaggatccttttatcaaggcagttatgatcatcgttttcctgccttgaccccaccatcatcaaacactcagttaaatataaattaacattttttagatgaccactcaacataatgcttaagaatggaatttcctctctgtgacagaacccaggaattaattcctaaatacataacgttggtatattgaagacgaaattaaaattgtccttcagttttgaggccatgtgtaaagtttaaccatattgtaaaatatctattccgtattagaaatagctagttgacagcttatacttctcaaaattcatattgttatgtacacaaactaagtttctatatgtgaagttagtgagtctttttgtgttactccaaaataaaggcaatgatttatttttttcccagtgccaatacaattttgagctaagcactcaaggtggatactttacattttaaagctggaatcagcaacagccctatgggaaaccagacaaagcattgacttttaaatgtagacttttaaaataaactgttttcttttggaactacaattagaatagttaatattcatccttaaaccattattatgtgtacattattgttgctattgtgataatagagaattttatttatttttatgccagcttatattgtgagaacacatttagtcagtttgggttttatcaatcctgttaatgcttgtccttggaacatctttcgcgtattcacggtttgtagttgaaaagtttactgtaaaaaaatcaaaaacaaaaaaatgtattgtttttacagaataaatttattggaatgtg

SEQ ID NO: 280864 - DNA, 518 bp, Homo sapiens
ggcggcggctgaggcaaggggtgggcggggggcgcagcaggcccggcaaatcacggcccggcagcgggggggcggcctcccggcatcttcgcggcgaccaaggactaccaggaaggggagcggctgggatggcgcgtccgcggccccgcgagtacaaagcgggcgacctggtcttcgccaagatgaagggctacccgcactggccggcccggattgatgaactcccagagggcgctgtgaagcctccagcaaacaagtatcctatcttcttttttggcacccatgaaacgtaagttagcaaaaatagtttcaacagctctagcttgactctgctatgctacattgttatggatgatctctgacatcttacgtcttattaaaatcattataatcagttatataaaattgccaaagttaataatgtatttttgttaatgtaaatagttttcatgatagaagtctttatgactaaaagcgtatctttgcttttgaatgtcatttgtgtttctgcttaaatg

SEQ ID NO: 280865 - DNA, 1400 bp, Homo sapiens
tgaagggccaggggagtgaggagatggaaggaagggagtccaagcagaggaaggatagctgtgaagacagaagcaggttggttctgtcaggcctgagttggacttggccagctttgaatcccagctcttccagtgctcaccatgcgacctcagcgttgtcatttcactctttaagccacagctctctttctccattcagtggcggcattgtgcggagaatgtgagtgaagggatgaaaatcgctcggcccgtgcctggcccctagtaagccacagagaaatgtgagccgctgccagtcaggctgagaggacgccactgaggaagtccaggccagggtgggacatgctgcgcacagtggggaaggagaggaggtggccagaggaggggatggtcctttccagtcatacacgcatgtctgcttgtgtgtgtacatgtgggggcctggtgcagggcgtgggggtgctgttcagagttggaccccccatcatccatcctgccagcctcctataccctgaggcctgacccaccctggcccccacaccaccccagcagcggagatgagggtaagtgagggctccttaggaagcagagaggaggccacagggccaaatgtgacactcagaagggccactggagaccacgcatggcgtttcctgccagcccactcagcatctagcccagggccagactggacactgccccgcaggacccagcaggcctaagcctcaggacctccatgtccacaccaggttcagcctcctctgctggcacgtgacttctccccgtctcccgccccccagtgtcctgaggctgggagggcattaacagaaaccacctgacacacagcaggtgcccagtttgtgcccacagacaaagcacggggactgcagaggagacccacagagctctctagggagggtttgtgaggaccccctaagatgcccccccccacgatcctgagcacggtccctcggcagatgttcagcgatgcaggtagcggggacgatgccttggatggagacgatgacctggtgatcgacatcccggagtgaccgtgacatcacgccatgcccaccacggccccgcccggcgccctccccgtgccagcacacacgagtccagcttcctcggaggtgtttattgatgcccagctgccatgctccggccactgacacaaccagaaaaggcgtaaacatgcacgggtgtcccccaggagggtggcaggggccctgccttcaaaccccggccccctccaggggacagttatttaaacgagtggccgggagcatctgccacctgctggggaggcagagaccctgcaatggccacctctttaaaagggcagctgtacagggctaggttttttcaatgaagtttctgtattaaaggagtggctctgg

SEQ ID NO: 280866 - DNA, 1058 bp, Homo sapiens
cagtgcctgcttctcctcgggctccaggtggctgcggcccgagtgagctaagtacctccgccgcacgatggaatgcgtaagcgtgctgcagggacatggtgtcaggacggagtcccgacccacccgcgccctttccaaccccatctccaaccccctgggcacctgaggtccgggcggcctcggaagaagctacgggtgaactcctgcatctccttctcccgcgccattttgctcaacccgggattgacggctcccgcctttttttcttctcggcctccgtcagcgcgtttgacagcggctcgcgcacgcgcagtgctgcggcaacgtggggcgagggaccgttggcccttggccgcggaccgcgtgggccgagaactttgccagacgagacttgttttctctgggcagttggagggtctcgcggctcctacccttttttggaacggatcattttaaaagttctcgttagaaaccaattcggcgccggcaccctttgggtgaaacctaatcagcccgcgacgctgcctttctcactggtcacgggcaacagctaggctgctgttatttcgcaaggcagaagagaaaaggcatcctcgcgagcagatgaggaacctcggggataaatccttttgtggcttcaagtgtctaagtacattagagtcaggaacggcgctttccagcgtccgccatttttgtggcgtcaccgcgtcgctgctacgccatccccagcgcagtggctgccgcgctcctgtcccagtgtcccccgggaggtcggcccgtgcggtgacgcccctgagcgcggggtacgccgggagttgtagtcctgacggcacagccttgcagcgtctccggaagtggaggcgggagcggcacggcagccactgcttggggtagcgggagggcagactctgggcgccactcccgggccggtcatgaacgggccggcggacggcgaagtggactacaaaaaaaaataccggaatctgaagcggaagctcaagttcctcatctacgtgagtgctgccgcgggaaggctgtgggggatgaggcctggcgcg

SEQ ID NO: 280867 - DNA, 1608 bp, Homo sapiens
tgaagggccaggggagtgaggagatggaaggaagggagtccaagcagaggaaggatagctgtgaagacagaagcaggttggttctgtcaggcctgagttggacttggccagctttgaatcccagctcttccagtgctcaccatgcgacctcagcgttgtcatttcactctttaagccacagctctctttctccattcagtggcggcattgtgcggagaatgtgagtgaagggatgaaaatcgctcggcccgtgcctggcccctagtaagccacagagaaatgtgagccgctgccagtcaggctgagaggacgccactgaggaagtccaggccagggtgggacatgctgcgcacagtggggaaggagaggaggtggccagaggaggggatggtcctttccagtcatacacgcatgtctgcttgtgtgtgtacatgtgggggcctggtgcagggcgtgggggtgctgttcagagttggaccccccatcatccatcctgccagcctcctataccctgaggcctgacccaccctggcccccacaccaccccagcagcggagatgagggtaagtgagggctccttaggaagcagagaggaggccacagggccaaatgtgacactcagaagggccactggagaccacgcatggcgtttcctgccagcccactcagcatctagcccagggccagactggacactgccccgcaggacccagcaggcctaagcctcaggacctccatgtccacaccaggttcagcctcctctgctggcacgtgacttctccccgtctcccgccccccagtgtcctgaggctgggagggcattaacagaaaccacctgacacacagcaggtgcccagtttgtgcccacagacaaagcacggggactgcagaggagacccacagagctctctagggagggtttgtgaggacctggcagcgggggggagctgaagggttgagcagggcagaggccacttcccaccctcagaggacaaagcaggacttctgacaaatagagcaggatgcccagggggaggggctgcctgtcgtcccgcaggcggcactcccgccccgaggccccgagtggcacggtgacgcgctcaggtctgtgttttagagcgcgcgctctggctgccgtgcggaggagctggatctgggagaggctgcgggcagggagtccagttaggaggctgggaccgcagcccaggtgagctaagaggagggctgggcctaggccacagctgccgggaccccgaggaggggcccatccaagacataatacaagcttcttgggggcagataagccgctggggctcctggctcaggcagcctgcaataccctccaccgaaccagtgagtgccgcagaagagggagaggaggagtagggagaggaagctggtggcaggtggcacctccggggccggcaggcaggcaagcactccaggccgactccgactctggcttaacccctgtctcagggcagcccaggcgcctccctggagagggcaggtgcccgggcctttccctcccggtttcctgtgagacacccccatcccctcatctcacctctatcaccacccccaggcacttgctggtttgaggctctc

SEQ ID NO: 280868 - DNA, 1898 bp, Homo sapiens
cagtgcctgcttctcctcgggctccaggtggctgcggcccgagtgagctaagtacctccgccgcacgatggaatgcgtaagcgtgctgcagggacatggtgtcaggacggagtcccgacccacccgcgccctttccaaccccatctccaaccccctgggcacctgaggtccgggcggcctcggaagaagctacgggtgaactcctgcatctccttctcccgcgccattttgctcaacccgggattgacggctcccgcctttttttcttctcggcctccgtcagcgcgtttgacagcggctcgcgcacgcgcagtgctgcggcaacgtggggcgagggaccgttggcccttggccgcggaccgcgtgggccgagaactttgccagacgagacttgttttctctgggcagttggagggtctcgcggctcctacccttttttggaacggatcattttaaaagttctcgttagaaaccaattcggcgccggcaccctttgggtgaaacctaatcagcccgcgacgctgcctttctcactggtcacgggcaacagctaggctgctgttatttcgcaaggcagaagagaaaaggcatcctcgcgagcagatgaggaacctcggggataaatccttttgtggcttcaagtgtctaagtacattagagtcaggaacggcgctttccagcgtccgccatttttgtggcgtcaccgcgtcgctgctacgccatccccagcgcagtggctgccgcgctcctgtcccagtgtcccccgggaggtcggcccgtgcggtgacgcccctgagcgcggggtacgccgggagttgtagtcctgacggcacagccttgcagcgtctccggaagtggaggcgggagcggcacggcagccactgcttggggtagcgggagggcagactctgggcgccactcccgggccggtcatgaacgggccggcggacggcgaagtggactacaaaaaaaaataccggaatctgaagcggaagctcaagttcctcatctacgagcacgagtgcttccaggaggagctgaggaaagcgcaaaggaaattactgaaggtgtcccgggacaagagtttcctcctagaccgacttctgcagtacgagaacgtggatgaagactcttcggactcagatgccactgcatcatcagataacagcgagacggaggggacacccaagttgtctgacacaccggcccctaagaggaagagaagccctccgctggggggcgccccctctccctccagcctctccctgcctccttcaacagggtttccccttcaggcctccggggtcccctccccatacctgagctcgatggcggtgggaccccccgactgccctgtgggagggccgctgaccttccctggccggggttctggggctggggtcgggacaaccctgacccccctcccaccccctaagatgcccccccccacgatcctgagcacggtccctcggcagatgttcagcgatgcaggtagcggggacgatgccttggatggagacgatgacctggtgatcgacatcccggagtgaccgtgacatcacgccatgcccaccacggccccgcccggcgccctccccgtgccagcacacacgagtccagcttcctcggaggtgtttattgatgcccagctgccatgctccggccactgacacaaccagaaaaggcgtaaacatgcacgggtgtcccccaggagggtggcaggggccctgccttcaaaccccggccccctccaggggacagttatttaaacgagtggccgggagcatctgccacctgctggggaggcagagaccctgcaatggccacctctttaaaagggcagctgtacagggctaggttttttcaatgaagtttctgtattaaaggagtggctctgg

SEQ ID NO: 280869 - DNA, 2307 bp, Homo sapiens
cagtgcctgcttctcctcgggctccaggtggctgcggcccgagtgagctaagtacctccgccgcacgatggaatgcgtaagcgtgctgcagggacatggtgtcaggacggagtcccgacccacccgcgccctttccaaccccatctccaaccccctgggcacctgaggtccgggcggcctcggaagaagctacgggtgaactcctgcatctccttctcccgcgccattttgctcaacccgggattgacggctcccgcctttttttcttctcggcctccgtcagcgcgtttgacagcggctcgcgcacgcgcagtgctgcggcaacgtggggcgagggaccgttggcccttggccgcggaccgcgtgggccgagaactttgccagacgagacttgttttctctgggcagttggagggtctcgcggctcctacccttttttggaacggatcattttaaaagttctcgttagaaaccaattcggcgccggcaccctttgggtgaaacctaatcagcccgcgacgctgcctttctcactggtcacgggcaacagctaggctgctgttatttcgcaaggcagaagagaaaaggcatcctcgcgagcagatgaggaacctcggggataaatccttttgtggcttcaagtgtctaagtacattagagtcaggaacggcgctttccagcgtccgccatttttgtggcgtcaccgcgtcgctgctacgccatccccagcgcagtggctgccgcgctcctgtcccagtgtcccccgggaggtcggcccgtgcggtgacgcccctgagcgcggggtacgccgggagttgtagtcctgacggcacagccttgcagcgtctccggaagtggaggcgggagcggcacggcagccactgcttggggtagcgggagggcagactctgggcgccactcccgggccggtcatgaacgggccggcggacggcgaagtggactacaaaaaaaaataccggaatctgaagcggaagctcaagttcctcatctacgagcacgagtgcttccaggaggagctgaggaaagcgcaaaggaaattactgaaggtgtcccgggacaagagtttcctcctagaccgacttctgcagtacgagaacgtggatgaagactcttcggactcagatgccactgcatcatcagataacagcgagacggaggggacacccaagttgtctgacacaccggcccctaagaggaagagaagccctccgctggggggcgccccctctccctccagcctctccctgcctccttcaacagggtttccccttcaggcctccggggtcccctccccatacctgagctcggaacggggccaggcctgactgaggagagcaaagcccaggacagcatcctgctgctgcccggcccttctgtgctcgggagccccgggagccgcactcatcaccatctcttttgtttttccatcctccttctgtttgcatttcttcccccaccctcaccccggtccattccgcctcccatctccatccccgctcccgcccgcagctggcctcctcccgctaccccccattcccttctgactacctggccctgcagctgcccgagcccagtcccctgaggcccaagcgggagaaacggccccgcctgccccggaaactcaagagcgcgcgctctggctgccgtgcggaggagctggatctgggagaggctgcgggcagggagtccagttaggaggctgggaccgcagcccagatggcggtgggaccccccgactgccctgtgggagggccgctgaccttccctggccggggttctggggctggggtcgggacaaccctgacccccctcccaccccctaagatgcccccccccacgatcctgagcacggtccctcggcagatgttcagcgatgcaggtagcggggacgatgccttggatggagacgatgacctggtgatcgacatcccggagtgaccgtgacatcacgccatgcccaccacggccccgcccggcgccctccccgtgccagcacacacgagtccagcttcctcggaggtgtttattgatgcccagctgccatgctccggccactgacacaaccagaaaaggcgtaaacatgcacgggtgtcccccaggagggtggcaggggccctgccttcaaaccccggccccctccaggggacagttatttaaacgagtggccgggagcatctgccacctgctggggaggcagagaccctgcaatggccacctctttaaaagggcagctgtacagggctaggttttttcaatgaagtttctgtattaaaggagtggctctgg

SEQ ID NO: 280870 - DNA, 2105 bp, Homo sapiens
cagtgcctgcttctcctcgggctccaggtggctgcggcccgagtgagctaagtacctccgccgcacgatggaatgcgtaagcgtgctgcagggacatggtgtcaggacggagtcccgacccacccgcgccctttccaaccccatctccaaccccctgggcacctgaggtccgggcggcctcggaagaagctacgggtgaactcctgcatctccttctcccgcgccattttgctcaacccgggattgacggctcccgcctttttttcttctcggcctccgtcagcgcgtttgacagcggctcgcgcacgcgcagtgctgcggcaacgtggggcgagggaccgttggcccttggccgcggaccgcgtgggccgagaactttgccagacgagacttgttttctctgggcagttggagggtctcgcggctcctacccttttttggaacggatcattttaaaagttctcgttagaaaccaattcggcgccggcaccctttgggtgaaacctaatcagcccgcgacgctgcctttctcactggtcacgggcaacagctaggctgctgttatttcgcaaggcagaagagaaaaggcatcctcgcgagcagatgaggaacctcggggataaatccttttgtggcttcaagtgtctaagtacattagagtcaggaacggcgctttccagcgtccgccatttttgtggcgtcaccgcgtcgctgctacgccatccccagcgcagtggctgccgcgctcctgtcccagtgtcccccgggaggtcggcccgtgcggtgacgcccctgagcgcggggtacgccgggagttgtagtcctgacggcacagccttgcagcgtctccggaagtggaggcgggagcggcacggcagccactgcttggggtagcgggagggcagactctgggcgccactcccgggccggtcatgaacgggccggcggacggcgaagtggactacaaaaaaaaataccggaatctgaagcggaagctcaagttcctcatctacgagcacgagtgcttccaggaggagctgaggaaagcgcaaaggaaattactgaaggtgtcccgggacaagagtttcctcctagaccgacttctgcagtacgagaacgtggatgaagactcttcggactcagatgccactgcatcatcagataacagcgagacggaggggacacccaagttgtctgacacaccggcccctaagaggaagagaagccctccgctggggggcgccccctctccctccagcctctccctgcctccttcaacagggtttccccttcaggcctccggggtcccctccccatacctgagctcgctggcctcctcccgctaccccccattcccttctgactacctggccctgcagctgcccgagcccagtcccctgaggcccaagcgggagaaacggccccgcctgccccggaaactcaagagcgcgcgctctggctgccgtgcggaggagctggatctgggagaggctgcgggcagggagtccagttaggaggctgggaccgcagcccagatggcggtgggaccccccgactgccctgtgggagggccgctgaccttccctggccggggttctggggctggggtcgggacaaccctgacccccctcccaccccctaagatgcccccccccacgatcctgagcacggtccctcggcagatgttcagcgatgcaggtagcggggacgatgccttggatggagacgatgacctggtgatcgacatcccggagtgaccgtgacatcacgccatgcccaccacggccccgcccggcgccctccccgtgccagcacacacgagtccagcttcctcggaggtgtttattgatgcccagctgccatgctccggccactgacacaaccagaaaaggcgtaaacatgcacgggtgtcccccaggagggtggcaggggccctgccttcaaaccccggccccctccaggggacagttatttaaacgagtggccgggagcatctgccacctgctggggaggcagagaccctgcaatggccacctctttaaaagggcagctgtacagggctaggttttttcaatgaagtttctgtattaaaggagtggctctgg

SEQ ID NO: 280871 - DNA, 1163 bp, Homo sapiens
gacccacgcgtccggacccacgcgtccgactgcttggggtagcgggagggcagactctgggcgccactcccgggccggtcatgaacgggccggcggacggcgaagtggactacaaaaaaaaataccggaatctgaagcggaagctcaagttcctcatctacgagcacgagtgcttccaggaggagctgaggaaagcgcaaaggaaattactgaaggtgtcccgggacaagagtttcctcctagaccgacttctgcagtacgagaacgtggatgaagactcttcggactcagatgccactgcatcatcagataacagcgagacggaggggacacccaagttgtctgacacaccggcccctaagaggaagagaagccctccgctggggggcgccccctctccctccagcctctccctgcctccttcaacagggtttccccttcaggcctccggggtcccctccccatacctgagctcgctggcctcctcccgctaccccccattcccttctgactacctggccctgcagctgcccgagcccagtcccctgaggcccaagcgggagaaacggccccgcctgccccggaaactcaagatggcggtgggaccccccgactgccctgtgggagggccgctgaccttccctggccggggttctggggctggggtcgggacaaccctgacccccctcccaccccctaagatgcccccccccacgatcctgagcacggtccctcggcagatgttcagcgatgcaggtagcggggacgatgccttggatggagacgatgacctggtgatcgacatcccggagtgaccgtgacatcacgccatgcccaccacggccccgcccggcgccctccccgtgccagcacacacgagtccagcttcctcggaggtgtttattgatgcccagctgccatgctccggccactgacacaaccagaaaaggcgtaaacatgcacgggtgtcccccaggagggtggcaggggccctgccttcaaaccccggccccctccaggggacagttatttaaacgagtggccgggagcatctgccacctgctggggaggcagagaccctgcaatggccacctctttaaaagggcagctgtacagggctaggttttttcaatgaagtttctgtattaaaggagtggctctgg

SEQ ID NO: 280872 - DNA, 1868 bp, Homo sapiens
cagtgcctgcttctcctcgggctccaggtggctgcggcccgagtgagctaagtacctccgccgcacgatggaatgcgtaagcgtgctgcagggacatggtgtcaggacggagtcccgacccacccgcgccctttccaaccccatctccaaccccctgggcacctgaggtccgggcggcctcggaagaagctacgggtgaactcctgcatctccttctcccgcgccattttgctcaacccgggattgacggctcccgcctttttttcttctcggcctccgtcagcgcgtttgacagcggctcgcgcacgcgcagtgctgcggcaacgtggggcgagggaccgttggcccttggccgcggaccgcgtgggccgagaactttgccagacgagacttgttttctctgggcagttggagggtctcgcggctcctacccttttttggaacggatcattttaaaagttctcgttagaaaccaattcggcgccggcaccctttgggtgaaacctaatcagcccgcgacgctgcctttctcactggtcacgggcaacagctaggctgctgttatttcgcaaggcagaagagaaaaggcatcctcgcgagcagatgaggaacctcggggataaatccttttgtggcttcaagtgtctaagtacattagagtcaggaacggcgctttccagcgtccgccatttttgtggcgtcaccgcgtcgctgctacgccatccccagcgcagtggctgccgcgctcctgtcccagtgtcccccgggaggtcggcccgtgcggtgacgcccctgagcgcggggtacgccgggagttgtagtcctgacggcacagccttgcagcgtctccggaagtggaggcgggagcggcacggcagccactgcttggggtagcgggagggcagactctgggcgccactcccgggccggtcatgaacgggccggcggacggcgaagtggactacaaaaaaaaataccggaatctgaagcggaagctcaagttcctcatctacgagcacgagtgcttccaggaggagctgaggaaagcgcaaaggaaattactgaaggtgtcccgggacaagagtttcctcctagaccgacttctgcagtacgagaacgtggatgaagactcttcggactcagatgccactgcatcatcagataacagcgagacggaggggacacccaagttgtctgacacaccggcccctaagaggaagagaagccctccgctggggggcgccccctctccctccagcctctccctgcctccttcaacagggtttccccttcaggcctccggggtcccctccccatacctgagctcgctggcctcctcccgctaccccccattcccttctgactacctggccctgcagctgcccgagcccagtcccctgaggcccaagcgggagaaacggccccgcctgccccggaaactcaagatgttcagcgatgcaggtagcggggacgatgccttggatggagacgatgacctggtgatcgacatcccggagtgaccgtgacatcacgccatgcccaccacggccccgcccggcgccctccccgtgccagcacacacgagtccagcttcctcggaggtgtttattgatgcccagctgccatgctccggccactgacacaaccagaaaaggcgtaaacatgcacgggtgtcccccaggagggtggcaggggccctgccttcaaaccccggccccctccaggggacagttatttaaacgagtggccgggagcatctgccacctgctggggaggcagagaccctgcaatggccacctctttaaaagggcagctgtacagggctaggttttttcaatgaagtttctgtattaaaggagtggctctgg

SEQ ID NO: 280873 - DNA, 1026 bp, Homo sapiens
gcgcaccccttgcccgtgatacaggagcacgagtgcttccaggaggagctgaggaaagcgcaaaggaaattactgaaggtgtcccgggacaagagtttcctcctagaccgacttctgcagtacgagaacgtggatgaagactcttcggactcagatgccactgcatcatcagataacagcgagacggaggggacacccaagttgtctgacacaccggcccctaagaggaagagaagccctccgctggggggcgccccctctccctccagcctctccctgcctccttcaacagggtttccccttcaggcctccggggtcccctccccatacctgagctcgctggcctcctcccgctaccccccattcccttctgactacctggccctgcagctgcccgagcccagtcccctgaggcccaagcgggagaaacggccccgcctgccccggaaactcaagatggcggtgggaccccccgactgccctgtgggagggccgctgaccttccctggccggggttctggggctggggtcgggacaaccctgacccccctcccaccccctaagatgcccccccccacgatcctgagcacggtccctcggcagatgttcagcgatgcaggtagcggggacgatgccttggatggagacgatgacctggtgatcgacatcccggagtgaccgtgacatcacgccatgcccaccacggccccgcccggcgccctccccgtgccagcacacacgagtccagcttcctcggaggtgtttattgatgcccagctgccatgctccggccactgacacaaccagaaaaggcgtaaacatgcacgggtgtcccccaggagggtggcaggggccctgccttcaaaccccggccccctccaggggacagttatttaaacgagtggccgggagcatctgccacctgctggggaggcagagaccctgcaatggccacctctttaaaagggcagctgtacagggctaggttttttcaatgaagtttctgtattaaaggagtggctctgg

SEQ ID NO: 280874 - DNA, 1574 bp, Homo sapiens
cccttctgttaggttttggtttgtttcatttttttgaggcagggtcttgctctgtcacccaggctggcgtgcagtgttaaaatcacagctcactgcagtctcaatctccgagtagttctcctgcctcagcctcctgagtagctgggactacaagcacacgccaccatgctcggataattgtttttgtttttaatagagatgaggtcttgctaggttgtccaggctgctcttgaactcctggcctcaagcgatctggccacctcagcctctcacagtgctgggattccaggcgtgagcccccgcacctggtcttccagtgcccttctgtagtgtagaggaggttatacctttctgggatggactgggatccccccatccccactgaccagctgtccccatcacagactcagatgccactgcatcatcagataacagcgagacggaggggacacccaagttgtctgacacaccggcccctaagaggaagagaagccctccgctggggggcgccccctctccctccagcctctccctgcctccttcaacagggtttccccttcaggcctccggggtcccctccccatacctgagctcggaacggggccaggcctgactgaggagagcaaagcccaggacagcatcctgctgctgcccggcccttctgtgctcgggagccccgggagccgcactcatcaccatctcttttgtttttccatcctccttctgtttgcatttcttcccccaccctcaccccggtccattccgcctcccatctccatccccgctcccgcccgcagctggcctcctcccgctaccccccattcccttctgactacctggccctgcagctgcccgagcccagtcccctgaggcccaagcgggagaaacggccccgcctgccccggaaactcaagagcgcgcgctctggctgccgtgcggaggagctggatctgggagaggctgcgggcagggagtccagttaggaggctgggaccgcagcccagatggcggtgggaccccccgactgccctgtgggagggccgctgaccttccctggccggggttctggggctggggtcgggacaaccctgacccccctcccaccccctaagatgcccccccccacgatcctgagcacggtccctcggcagatgttcagcgatgcaggtagcggggacgatgccttggatggagacgatgacctggtgatcgacatcccggagtgaccgtgacatcacgccatgcccaccacggccccgcccggcgccctccccgtgccagcacacacgagtccagcttcctcggaggtgtttattgatgcccagctgccatgctccggccactgacacaaccagaaaaggcgtaaacatgcacgggtgtcccccaggagggtggcaggggccctgccttcaaaccccggccccctccaggggacagttatttaaacgagtggccgggagcatctgccacctgctggggaggcagagaccctgcaatggccacctctttaaaagggcagctgtacagggctaggttttttcaatgaagtttctgtattaaaggagtggctctgg

SEQ ID NO: 280875 - DNA, 1777 bp, Homo sapiens
tgaagggccaggggagtgaggagatggaaggaagggagtccaagcagaggaaggatagctgtgaagacagaagcaggttggttctgtcaggcctgagttggacttggccagctttgaatcccagctcttccagtgctcaccatgcgacctcagcgttgtcatttcactctttaagccacagctctctttctccattcagtggcggcattgtgcggagaatgtgagtgaagggatgaaaatcgctcggcccgtgcctggcccctagtaagccacagagaaatgtgagccgctgccagtcaggctgagaggacgccactgaggaagtccaggccagggtgggacatgctgcgcacagtggggaaggagaggaggtggccagaggaggggatggtcctttccagtcatacacgcatgtctgcttgtgtgtgtacatgtgggggcctggtgcagggcgtgggggtgctgttcagagttggaccccccatcatccatcctgccagcctcctataccctgaggcctgacccaccctggcccccacaccaccccagcagcggagatgagggtaagtgagggctccttaggaagcagagaggaggccacagggccaaatgtgacactcagaagggccactggagaccacgcatggcgtttcctgccagcccactcagcatctagcccagggccagactggacactgccccgcaggacccagcaggcctaagcctcaggacctccatgtccacaccaggttcagcctcctctgctggcacgtgacttctccccgtctcccgccccccagtgtcctgaggctgggagggcattaacagaaaccacctgacacacagcaggtgcccagtttgtgcccacagacaaagcacggggactgcagaggagacccacagagctctctagggagggtttgtgaggacctggcagcgggggggagctgaagggttgagcagggcagaggccacttcccaccctcagaggacaaagcaggacttctgacaaatagagcaggatgcccagggggaggggctgcctgtcgtcccgcaggcggcactcccgccccgaggccccgagtggcacggtgacgcgctcaggtctgtgttttagagcgcgcgctctggctgccgtgcggaggagctggatctgggagaggctgcgggcagggagtccagttaggaggctgggaccgcagcccagatggcggtgggaccccccgactgccctgtgggagggccgctgaccttccctggccggggttctggggctggggtcgggacaaccctgacccccctcccaccccctaagatgcccccccccacgatcctgagcacggtccctcggcagatgttcagcgatgcaggtagcggggacgatgccttggatggagacgatgacctggtgatcgacatcccggagtgaccgtgacatcacgccatgcccaccacggccccgcccggcgccctccccgtgccagcacacacgagtccagcttcctcggaggtgtttattgatgcccagctgccatgctccggccactgacacaaccagaaaaggcgtaaacatgcacgggtgtcccccaggagggtggcaggggccctgccttcaaaccccggccccctccaggggacagttatttaaacgagtggccgggagcatctgccacctgctggggaggcagagaccctgcaatggccacctctttaaaagggcagctgtacagggctaggttttttcaatgaagtttctgtattaaaggagtggctctgg

SEQ ID NO: 280876 - DNA, 1587 bp, Homo sapiens
cagtgcctgcttctcctcgggctccaggtggctgcggcccgagtgagctaagtacctccgccgcacgatggaatgcgtaagcgtgctgcagggacatggtgtcaggacggagtcccgacccacccgcgccctttccaaccccatctccaaccccctgggcacctgaggtccgggcggcctcggaagaagctacgggtgaactcctgcatctccttctcccgcgccattttgctcaacccgggattgacggctcccgcctttttttcttctcggcctccgtcagcgcgtttgacagcggctcgcgcacgcgcagtgctgcggcaacgtggggcgagggaccgttggcccttggccgcggaccgcgtgggccgagaactttgccagacgagacttgttttctctgggcagttggagggtctcgcggctcctacccttttttggaacggatcattttaaaagttctcgttagaaaccaattcggcgccggcaccctttgggtgaaacctaatcagcccgcgacgctgcctttctcactggtcacgggcaacagctaggctgctgttatttcgcaaggcagaagagaaaaggcatcctcgcgagcagatgaggaacctcggggataaatccttttgtggcttcaagtgtctaagtacattagagtcaggaacggcgctttccagcgtccgccatttttgtggcgtcaccgcgtcgctgctacgccatccccagcgcagtggctgccgcgctcctgtcccagtgtcccccgggaggtcggcccgtgcggtgacgcccctgagcgcggggtacgccgggagttgtagtcctgacggcacagccttgcagcgtctccggaagtggaggcgggagcggcacggcagccactgcttggggtagcgggagggcagactctgggcgccactcccgggccggtcatgaacgggccggcggacggcgaagtggactacaaaaaaaaataccggaatctgaagcggaagctcaagttcctcatctacgagcacgagtgcttccaggaggagctgaggaaagcgcaaaggaaattactgaaggtgtcccgggacaagagtttcctcctagaccgacttctgcagtacgagaacgtggatgaagactcttcggactcagatgccactgcatcatcagataacagcgagacggaggggacacccaagttgtctgacacaccggcccctaagaggaagagaagccctccgctggggggcgccccctctccctccagcctctccctgcctccttcaacagggtttccccttcaggcctccggggtcccctccccatacctgagctcgctggcctcctcccgctaccccccattcccttctgactacctggccctgcagctgcccgagcccagtcccctgaggcccaagcgggagaaacggccccgcctgccccggaaactcaagagcgcgcgctctggctgccgtgcggaggagctggatctgggagaggctgcgggcagggagtccagttaggaggctgggaccgcagcccagatgggtggaccccgatgcctgtggaggcgtgactcctggcggtctgggtggg

SEQ ID NO: 280877 - DNA, 1592 bp, Homo sapiens
  misc_feature (1592)..(1592): n is a, c, g, or t
cagtgcctgcttctcctcgggctccaggtggctgcggcccgagtgagctaagtacctccgccgcacgatggaatgcgtaagcgtgctgcagggacatggtgtcaggacggagtcccgacccacccgcgccctttccaaccccatctccaaccccctgggcacctgaggtccgggcggcctcggaagaagctacgggtgaactcctgcatctccttctcccgcgccattttgctcaacccgggattgacggctcccgcctttttttcttctcggcctccgtcagcgcgtttgacagcggctcgcgcacgcgcagtgctgcggcaacgtggggcgagggaccgttggcccttggccgcggaccgcgtgggccgagaactttgccagacgagacttgttttctctgggcagttggagggtctcgcggctcctacccttttttggaacggatcattttaaaagttctcgttagaaaccaattcggcgccggcaccctttgggtgaaacctaatcagcccgcgacgctgcctttctcactggtcacgggcaacagctaggctgctgttatttcgcaaggcagaagagaaaaggcatcctcgcgagcagatgaggaacctcggggataaatccttttgtggcttcaagtgtctaagtacattagagtcaggaacggcgctttccagcgtccgccatttttgtggcgtcaccgcgtcgctgctacgccatccccagcgcagtggctgccgcgctcctgtcccagtgtcccccgggaggtcggcccgtgcggtgacgcccctgagcgcggggtacgccgggagttgtagtcctgacggcacagccttgcagcgtctccggaagtggaggcgggagcggcacggcagccactgcttggggtagcgggagggcagactctgggcgccactcccgggccggtcatgaacgggccggcggacggcgaagtggactacaaaaaaaaataccggaatctgaagcggaagctcaagttcctcatctacgagcacgagtgcttccaggaggagctgaggaaagcgcaaaggaaattactgaaggtgtcccgggacaagagtttcctcctagaccgacttctgcagtacgagaacgtggatgaagactcttcggactcagatgccactgcatcatcagataacagcgagacggaggggacacccaagttgtctgacacaccggcccctaagaggaagagaagccctccgctggggggcgccccctctccctccagcctctccctgcctccttcaacagggtttccccttcaggcctccggggtcccctccccatacctgagctcgctggcctcctcccgctaccccccattcccttctgactacctggccctgcagctgcccgagcccagtcccctgaggcccaagcgggagaaacggccccgcctgccccggaaactcaagagcgcgcgctctggctgccgtgcggaggagctggatctgggagaggctgcgggcagggagtccagttaggaggctgggaccgcagcccagatggcgggtgggacccccagatgccctgtgggagggcagtgacttccctggccgggn

SEQ ID NO: 280878 - DNA, 512 bp, Homo sapiens
gacctcacgggacgtgaagaaggacaacaagaggcagtccctcccctaagatgcccccccccacgatcctgagcacggtccctcggcagatgttcagcgatgcaggtagcggggacgatgccttggatggagacgatgacctggtgatcgacatcccggagtgaccgtgacatcacgccatgcccaccacggccccgcccggcgccctccccgtgccagcacacacgagtccagcttcctcggaggtgtttattgatgcccagctgccatgctccggccactgacacaaccagaaaaggcgtaaacatgcacgggtgtcccccaggagggtggcaggggccctgccttcaaaccccggccccctccaggggacagttatttaaacgagtggccgggagcatctgccacctgctggggaggcagagaccctgcaatggccacctctttaaaagggcagctgtacagggctaggttttttcaatgaagtttctgtattaaaggagtggctctgg

SEQ ID NO: 280879 - DNA, 721 bp, Homo sapiens
gggggcaggccctgagtgcagcatgggttggcccagctgtgcccagggcctcttccccctccccagagctgccctggggggcaaagcctagtctcctgaggccccagtgcctccctgactagtccccctgtgtttcttccccctgctgcagatggcggtgggaccccccgactgccctgtgggagggccgctgaccttccctggccggggttctggggctggggtcgggacaaccctgacccccctcccaccccctaagatgcccccccccacgatcctgagcacggtccctcggcagatgttcagcgatgcaggtagcggggacgatgccttggatggagacgatgacctggtgatcgacatcccggagtgaccgtgacatcacgccatgcccaccacggccccgcccggcgccctccccgtgccagcacacacgagtccagcttcctcggaggtgtttattgatgcccagctgccatgctccggccactgacacaaccagaaaaggcgtaaacatgcacgggtgtcccccaggagggtggcaggggccctgccttcaaaccccggccccctccaggggacagttatttaaacgagtggccgggagcatctgccacctgctggggaggcagagaccctgcaatggccacctctttaaaagggcagctgtacagggctaggttttttcaatgaagtttctgtattaaaggagtggctctgg

SEQ ID NO: 280880 - DNA, 2015 bp, Homo sapiens
cagtgcctgcttctcctcgggctccaggtggctgcggcccgagtgagctaagtacctccgccgcacgatggaatgcgtaagcgtgctgcagggacatggtgtcaggacggagtcccgacccacccgcgccctttccaaccccatctccaaccccctgggcacctgaggtccgggcggcctcggaagaagctacgggtgaactcctgcatctccttctcccgcgccattttgctcaacccgggattgacggctcccgcctttttttcttctcggcctccgtcagcgcgtttgacagcggctcgcgcacgcgcagtgctgcggcaacgtggggcgagggaccgttggcccttggccgcggaccgcgtgggccgagaactttgccagacgagacttgttttctctgggcagttggagggtctcgcggctcctacccttttttggaacggatcattttaaaagttctcgttagaaaccaattcggcgccggcaccctttgggtgaaacctaatcagcccgcgacgctgcctttctcactggtcacgggcaacagctaggctgctgttatttcgcaaggcagaagagaaaaggcatcctcgcgagcagatgaggaacctcggggataaatccttttgtggcttcaagtgtctaagtacattagagtcaggaacggcgctttccagcgtccgccatttttgtggcgtcaccgcgtcgctgctacgccatccccagcgcagtggctgccgcgctcctgtcccagtgtcccccgggaggtcggcccgtgcggtgacgcccctgagcgcggggtacgccgggagttgtagtcctgacggcacagccttgcagcgtctccggaagtggaggcgggagcggcacggcagccactgcttggggtagcgggagggcagactctgggcgccactcccgggccggtcatgaacgggccggcggacggcgaagtggactacaaaaaaaaataccggaatctgaagcggaagctcaagttcctcatctacgagcacgagtgcttccaggaggagctgaggaaagcgcaaaggaaattactgaaggtgtcccgggacaagagtttcctcctagaccgacttctgcagtacgagaacgtggatgaagactcttcggactcagatgccactgcatcatcagataacagcgagacggaggggacacccaagttgtctgacacaccggcccctaagaggaagagaagccctccgctggggggcgccccctctccctccagcctctccctgcctccttcaacagggtttccccttcaggcctccggggtcccctccccatacctgagctcgctggcctcctcccgctaccccccattcccttctgactacctggccctgcagctgcccgagcccagtcccctgaggcccaagcgggagaaacggccccgcctgccccggaaactcaagatggcggtgggaccccccgactgccctgtgggagggccgctgaccttccctggccggggttctggggctggggtcgggacaaccctgacccccctcccaccccctaagatgcccccccccacgatcctgagcacggtccctcggcagatgttcagcgatgcaggtagcggggacgatgccttggatggagacgatgacctggtgatcgacatcccggagtgaccgtgacatcacgccatgcccaccacggccccgcccggcgccctccccgtgccagcacacacgagtccagcttcctcggaggtgtttattgatgcccagctgccatgctccggccactgacacaaccagaaaaggcgtaaacatgcacgggtgtcccccaggagggtggcaggggccctgccttcaaaccccggccccctccaggggacagttatttaaacgagtggccgggagcatctgccacctgctggggaggcagagaccctgcaatggccacctctttaaaagggcagctgtacagggctaggttttttcaatgaagtttctgtattaaaggagtggctctgg

SEQ ID NO: 280881 - DNA, 2217 bp, Homo sapiens
cagtgcctgcttctcctcgggctccaggtggctgcggcccgagtgagctaagtacctccgccgcacgatggaatgcgtaagcgtgctgcagggacatggtgtcaggacggagtcccgacccacccgcgccctttccaaccccatctccaaccccctgggcacctgaggtccgggcggcctcggaagaagctacgggtgaactcctgcatctccttctcccgcgccattttgctcaacccgggattgacggctcccgcctttttttcttctcggcctccgtcagcgcgtttgacagcggctcgcgcacgcgcagtgctgcggcaacgtggggcgagggaccgttggcccttggccgcggaccgcgtgggccgagaactttgccagacgagacttgttttctctgggcagttggagggtctcgcggctcctacccttttttggaacggatcattttaaaagttctcgttagaaaccaattcggcgccggcaccctttgggtgaaacctaatcagcccgcgacgctgcctttctcactggtcacgggcaacagctaggctgctgttatttcgcaaggcagaagagaaaaggcatcctcgcgagcagatgaggaacctcggggataaatccttttgtggcttcaagtgtctaagtacattagagtcaggaacggcgctttccagcgtccgccatttttgtggcgtcaccgcgtcgctgctacgccatccccagcgcagtggctgccgcgctcctgtcccagtgtcccccgggaggtcggcccgtgcggtgacgcccctgagcgcggggtacgccgggagttgtagtcctgacggcacagccttgcagcgtctccggaagtggaggcgggagcggcacggcagccactgcttggggtagcgggagggcagactctgggcgccactcccgggccggtcatgaacgggccggcggacggcgaagtggactacaaaaaaaaataccggaatctgaagcggaagctcaagttcctcatctacgagcacgagtgcttccaggaggagctgaggaaagcgcaaaggaaattactgaaggtgtcccgggacaagagtttcctcctagaccgacttctgcagtacgagaacgtggatgaagactcttcggactcagatgccactgcatcatcagataacagcgagacggaggggacacccaagttgtctgacacaccggcccctaagaggaagagaagccctccgctggggggcgccccctctccctccagcctctccctgcctccttcaacagggtttccccttcaggcctccggggtcccctccccatacctgagctcggaacggggccaggcctgactgaggagagcaaagcccaggacagcatcctgctgctgcccggcccttctgtgctcgggagccccgggagccgcactcatcaccatctcttttgtttttccatcctccttctgtttgcatttcttcccccaccctcaccccggtccattccgcctcccatctccatccccgctcccgcccgcagctggcctcctcccgctaccccccattcccttctgactacctggccctgcagctgcccgagcccagtcccctgaggcccaagcgggagaaacggccccgcctgccccggaaactcaagatggcggtgggaccccccgactgccctgtgggagggccgctgaccttccctggccggggttctggggctggggtcgggacaaccctgacccccctcccaccccctaagatgcccccccccacgatcctgagcacggtccctcggcagatgttcagcgatgcaggtagcggggacgatgccttggatggagacgatgacctggtgatcgacatcccggagtgaccgtgacatcacgccatgcccaccacggccccgcccggcgccctccccgtgccagcacacacgagtccagcttcctcggaggtgtttattgatgcccagctgccatgctccggccactgacacaaccagaaaaggcgtaaacatgcacgggtgtcccccaggagggtggcaggggccctgccttcaaaccccggccccctccaggggacagttatttaaacgagtggccgggagcatctgccacctgctggggaggcagagaccctgcaatggccacctctttaaaagggcagctgtacagggctaggttttttcaatgaagtttctgtattaaaggagtggctctgg

SEQ ID NO: 280882 - DNA, 1856 bp, Homo sapiens
cagtgcctgcttctcctcgggctccaggtggctgcggcccgagtgagctaagtacctccgccgcacgatggaatgcgtaagcgtgctgcagggacatggtgtcaggacggagtcccgacccacccgcgccctttccaaccccatctccaaccccctgggcacctgaggtccgggcggcctcggaagaagctacgggtgaactcctgcatctccttctcccgcgccattttgctcaacccgggattgacggctcccgcctttttttcttctcggcctccgtcagcgcgtttgacagcggctcgcgcacgcgcagtgctgcggcaacgtggggcgagggaccgttggcccttggccgcggaccgcgtgggccgagaactttgccagacgagacttgttttctctgggcagttggagggtctcgcggctcctacccttttttggaacggatcattttaaaagttctcgttagaaaccaattcggcgccggcaccctttgggtgaaacctaatcagcccgcgacgctgcctttctcactggtcacgggcaacagctaggctgctgttatttcgcaaggcagaagagaaaaggcatcctcgcgagcagatgaggaacctcggggataaatccttttgtggcttcaagtgtctaagtacattagagtcaggaacggcgctttccagcgtccgccatttttgtggcgtcaccgcgtcgctgctacgccactgcttggggtagcgggagggcagactctgggcgccactcccgggccggtcatgaacgggccggcggacggcgaagtggactacaaaaaaaaataccggaatctgaagcggaagctcaagttcctcatctacgagcacgagtgcttccaggaggagctgaggaaagcgcaaaggaaattactgaaggtgtcccgggacaagagtttcctcctagaccgacttctgcagtacgagaacgtggatgaagactcttcggactcagatgccactgcatcatcagataacagcgagacggaggggacacccaagttgtctgacacaccggcccctaagaggaagagaagccctccgctggggggcgccccctctccctccagcctctccctgcctccttcaacagggtttccccttcaggcctccggggtcccctccccatacctgagctcgctggcctcctcccgctaccccccattcccttctgactacctggccctgcagctgcccgagcccagtcccctgaggcccaagcgggagaaacggccccgcctgccccggaaactcaagatggcggtgggaccccccgactgccctgtgggagggccgctgaccttccctggccggggttctggggctggggtcgggacaaccctgacccccctcccaccccctaagatgcccccccccacgatcctgagcacggtccctcggcagatgttcagcgatgcaggtagcggggacgatgccttggatggagacgatgacctggtgatcgacatcccggagtgaccgtgacatcacgccatgcccaccacggccccgcccggcgccctccccgtgccagcacacacgagtccagcttcctcggaggtgtttattgatgcccagctgccatgctccggccactgacacaaccagaaaaggcgtaaacatgcacgggtgtcccccaggagggtggcaggggccctgccttcaaaccccggccccctccaggggacagttatttaaacgagtggccgggagcatctgccacctgctggggaggcagagaccctgcaatggccacctctttaaaagggcagctgtacagggctaggttttttcaatgaagtttctgtattaaaggagtggctctgg

SEQ ID NO: 280883 - DNA, 1950 bp, Homo sapiens
cagtgcctgcttctcctcgggctccaggtggctgcggcccgagtgagctaagtacctccgccgcacgatggaatgcgtaagcgtgctgcagggacatggtgtcaggacggagtcccgacccacccgcgccctttccaaccccatctccaaccccctgggcacctgaggtccgggcggcctcggaagaagctacgggtgaactcctgcatctccttctcccgcgccattttgctcaacccgggattgacggctcccgcctttttttcttctcggcctccgtcagcgcgtttgacagcggctcgcgcacgcgcagtgctgcggcaacgtggggcgagggaccgttggcccttggccgcggaccgcgtgggccgagaactttgccagacgagacttgttttctctgggcagttggagggtctcgcggctcctacccttttttggaacggatcattttaaaagttctcgttagaaaccaattcggcgccggcaccctttgggtgaaacctaatcagcccgcgacgctgcctttctcactggtcacgggcaacagctaggctgctgttatttcgcaaggcagaagagaaaaggcatcctcgcgagcagatgaggaacctcggggataaatccttttgtggcttcaagtgtctaagtacattagagtcaggaacggcgctttccagcgtccgccatttttgtggcgtcaccgcgtcgctgctacgccatccccagcgcagtggctgccgcgctcctgtcccagtgtcccccgggaggtcggcccgtgcggtgacgcccctgagcgcggggtacgccgggagttgtagtcctgacggcacagccttgcagcgtctccggaagtggaggcgggagcggcacggcagccactgcttggggtagcgggagggcagactctgggcgccactcccgggccggtcatgaacgggccggcggacggcgaagtggactacaaaaaaaaataccggaatctgaagcggaagctcaagttcctcatctacgagcacgagtgcttccaggaggagctgaggaaagcgcaaaggaaattactgaaggtgtcccgggacaagagtttcctcctagaccgacttctgcagtacgagaacgtggatgaagactcttcggactcagatgccactgcatcatcagataacagcgagacggaggggacacccaagttgtctgacacaccggcccctaagagggtttccccttcaggcctccggggtcccctccccatacctgagctcgctggcctcctcccgctaccccccattcccttctgactacctggccctgcagctgcccgagcccagtcccctgaggcccaagcgggagaaacggccccgcctgccccggaaactcaagatggcggtgggaccccccgactgccctgtgggagggccgctgaccttccctggccggggttctggggctggggtcgggacaaccctgacccccctcccaccccctaagatgcccccccccacgatcctgagcacggtccctcggcagatgttcagcgatgcaggtagcggggacgatgccttggatggagacgatgacctggtgatcgacatcccggagtgaccgtgacatcacgccatgcccaccacggccccgcccggcgccctccccgtgccagcacacacgagtccagcttcctcggaggtgtttattgatgcccagctgccatgctccggccactgacacaaccagaaaaggcgtaaacatgcacgggtgtcccccaggagggtggcaggggccctgccttcaaaccccggccccctccaggggacagttatttaaacgagtggccgggagcatctgccacctgctggggaggcagagaccctgcaatggccacctctttaaaagggcagctgtacagggctaggttttttcaatgaagtttctgtattaaaggagtggctctgg

SEQ ID NO: 280884 - DNA, 1520 bp, Homo sapiens
cagtgcctgcttctcctcgggctccaggtggctgcggcccgagtgagctaagtacctccgccgcacgatggaatgcgtaagcgtgctgcagggacatggtgtcaggacggagtcccgacccacccgcgccctttccaaccccatctccaaccccctgggcacctgaggtccgggcggcctcggaagaagctacgggtgaactcctgcatctccttctcccgcgccattttgctcaacccgggattgacggctcccgcctttttttcttctcggcctccgtcagcgcgtttgacagcggctcgcgcacgcgcagtgctgcggcaacgtggggcgagggaccgttggcccttggccgcggaccgcgtgggccgagaactttgccagacgagacttgttttctctgggcagttggagggtctcgcggctcctacccttttttggaacggatcattttaaaagttctcgttagaaaccaattcggcgccggcaccctttgggtgaaacctaatcagcccgcgacgctgcctttctcactggtcacgggcaacagctaggctgctgttatttcgcaaggcagaagagaaaaggcatcctcgcgagcagatgaggaacctcggggataaatccttttgtggcttcaagtgtctaagtacattagagtcaggaacggcgctttccagcgtccgccatttttgtggcgtcaccgcgtcgctgctacgccatccccagcgcagtggctgccgcgctcctgtcccagtgtcccccgggaggtcggcccgtgcggtgacgcccctgagcgcggggtacgccgggagttgtagtcctgacggcacagccttgcagcgtctccggaagtggaggcgggagcggcacggcagccactgcttggggtagcgggagggcagactctgggcgccactcccgggccggtcatgaacgggccggcggacggcgaagtggactacaaaaaaaaataccggaatctgaagcggaagctcaagttcctcatctacgagcacgagtgcttccaggaggagctgaggaaagcgcaaaggaaattactgaaggtgtcccgggacaagagtttcctcctagaccgacttctgcagtacgagaacgtggatgaagactcttcggactcagatgccactgcatcatcagataacagcgagacggaggggacacccaagttgtctgacacaccggcccctaagaggaagagaagccctccgctggggggcgccccctctccctccagcctctccctgcctccttcaacagggtttccccttcaggcctccggggtcccctccccatacctgagctcgatggcggtgggaccccccgactgccctgtgggagggccgctgaccttccctggccggggttctggggctggggtcgggacaaccctgacccccctcccacggtttaaagaaagcgagagagacggaatcaggagcaacccgaaagagagacgctgatgtagaaggaagataagcaagaagcgcccattggcc

SEQ ID NO: 280885 - DNA, 2279 bp, Homo sapiens
cagtgcctgcttctcctcgggctccaggtggctgcggcccgagtgagctaagtacctccgccgcacgatggaatgcgtaagcgtgctgcagggacatggtgtcaggacggagtcccgacccacccgcgccctttccaaccccatctccaaccccctgggcacctgaggtccgggcggcctcggaagaagctacgggtgaactcctgcatctccttctcccgcgccattttgctcaacccgggattgacggctcccgcctttttttcttctcggcctccgtcagcgcgtttgacagcggctcgcgcacgcgcagtgctgcggcaacgtggggcgagggaccgttggcccttggccgcggaccgcgtgggccgagaactttgccagacgagacttgttttctctgggcagttggagggtctcgcggctcctacccttttttggaacggatcattttaaaagttctcgttagaaaccaattcggcgccggcaccctttgggtgaaacctaatcagcccgcgacgctgcctttctcactggtcacgggcaacagctaggctgctgttatttcgcaaggcagaagagaaaaggcatcctcgcgagcagatgaggaacctcggggataaatccttttgtggcttcaagtgtctaagtacattagagtcaggaacggcgctttccagcgtccgccatttttgtggcgtcaccgcgtcgctgctacgccatccccagcgcagtggctgccgcgctcctgtcccagtgtcccccgggaggtcggcccgtgcggtgacgcccctgagcgcggggtacgccgggagttgtagtcctgacggcacagccttgcagcgtctccggaagtggaggcgggagcggcacggcagccactgcttggggtagcgggagggcagactctgggcgccactcccgggccggtcatgaacgggccggcggacggcgaagtggactacaaaaaaaaaaaaaaaaaacctcgagaacttagtttctcttcttcttccacttatggtgggtctttccttttccccttcaagagcagggagcaattggttccccttgagcattctggggctccactctgacccagggggccttgcttggtgagaaacaggggggtccctttcaaatacattagtgggataggctaatcccatagggaattttcattagaattttgggaaccaggatgtattggaaggaagataatatataacctccttatggtgagggaaatggctactaattatcttgacacagttgaacgcattgctagggatttaaaccctcttacgtggccccctagccatttatacccgttcgtgcaaagggtacatttcacacctcttgtcacactggggcttgcacatcctccagagacatcgtgagctccccctaaattctccataccctgggtcgggacagcagcacttccatgaattgcacacccacatagagagatataaatacatccgcaccaaatcatagtgaccccggtgtcactacatttggggcgccttattcacaaatggcgccccttgaacgcccctgcggctcgttcagaagctgacccctagacacgagtgtgcacaagccagggtttaactctgacaactcacgtaccacgggcatattgtgtgagtacaggcatctcgttaaccacaaggcccggacagcctagcggcagcacaccacgtgcgacagtggaggtcgtgcaccagtgagtgtccttgcccgccccgtctgctcccgtcccgctcgcatttctgtcttgtcgaatcaaggagaacagtatgaccgcaagtcgatcaagagaagcacagcagacagcagaagcatgaccgacactactcgcagcgacagctacaacagacaagacgtcgaggaccggcagcacacagcaaaagcagaaaaacaacacagagggaagggaaaagaggagagaggcggagaacaagcagaaacggcggcacaggcagagggaagagaagaccgcagcgggagaaagggagagagggggaaacaggagaacaggaagaagggagaggcaagacggaaggaacagagagaggaggacaaaagagcgaggcaatcgaagagaacgaaggacacaaggagagcaaagaagacaggagaggagcggaagagcacgcgacacgaacgacaaacacgaacacagcagcaagaaggcgagaacgagcacggagtagggcgacgaagaagaacagaggaaagacgagagcacggagagagaggcccaagccacgaag

SEQ ID NO: 280886 - DNA, 899 bp, Homo sapiens
tgagctcggtacccctacatttgcaggaggaagcagcaggaggaatataagaaaaaggtagcagcactgcctaaacaagaggttatacaagaagaggaagagataatccatgaagataatgaatggggtattgagctggtatctgaggtttcagaagaggaactgaaaaatttttcaggtccagttccagacttacctgaaggaattacagtggcatacacaattccaaaaaagcaagaagattctgtcactgagttaacagtggaagattctggtgaaagcttggaagacctcatggccaaaatgaagaatatgtagataatggactgggatatattgtatttctcatgttaaagcctcttcccttgaaattaaaaaaaaattttaactgataaaacttagggcaacattaattaatgtatattcttacctgaattgttatactttttgaaaatcctgtgacttgcctgtttctccccgctccaacgaaatcattaactctcctaaaatgtgtttcattctagtaagaaaacctcaaaggatattgtaggatataaatcttacttgaaaacaaaaaaaaaaaaagaaccgaaatcactaacgcactacacaacgcgcacaatgtgtgtgggccactcggggccccggaaaagagttccttaaagccacctttggtggtgggccgagcggcccccaagatagtggatgtaagcaacggggccacaaagaggtgttcccgagagagagactcggggtagaaaaaaggggcgtgggatttcccccccataaaaaaaacgccccggggggaaaacccagacggttttcgaaaaaccccccaaaaggggctcagggggcacacagggggggctctcaaaaggagccacaggaacccgtttaat

SEQ ID NO: 280887 - DNA, 455 bp, Homo sapiens
  misc_feature (432)..(432): n is a, c, g, or t
aatgtaaaagactctgtctttcttctaaaaattagaagatagttgttaaagaaaatttaccttataaccttgttgagcatggtcaaaacttgctgattatatattcctaagcatcaagaattctatatggttcttttttcactgtatttcccttatttgtcaatagcaagaagattctgtcactgagttaacagtggaagattctggtgaaagcttggaagacctcatggccaaaatgaagaatatgtagataatggactgggatatattgtatttctcatgttaaagcctcttcccttgaaattaaaaaaaaattttaactgataaaacttagggcaacattaattaatgtatattcttgacagctctagctttttaaacgacatcgtagctaaaactaccgataaacaaaaatgagatcttcatttaatnacaatctagtatgcctgtggtaa

SEQ ID NO: 280888 - DNA, 3386 bp, Homo sapiens
gatgagggggagcgatgtctgcgacgcaccggaagcggctccgaggaaggcctgtgggagtctcggagacgtgtctgtctgtgaggcgctgggtgcacgtccccagggctctgggctaggaaggcagcggcgaggtgcctccccacgtacccctcgcgggcccagccgagcaacgtggggcgaaggcggcggcgaaggcccgggctgggagcgttggcggccggagtcccagccatggcggagtctgtggagcgcctgcagcagcgggtccaggagctggagcgggaacttgcccaggagaggagtctgcaggtcccgaggagcggcgacggagggggcggccgggtccgcatcgagaagatgagctcagaggtggtggattcgaatccctacaggtaacctgcgtcgccggtcggaggcaggcgcgggggagcgaggtcaggctccgtgaggtcagaagtgaggcgcttcccacgtcccgctcatggggacgcccgccacccttttcttggtctgcgaatcctgttcccaaatgggcaaggccacatcttagtactgatcggaagatattctttctcttttttaaaaacctccagtgagtcagccatatggtgctgctcctgtgcctgctgaggacgtgtgtccagtttcctatcacccttgcctcttaattagtccgcctcgctgtgtataagactgatagtaagaactttcagaagatgagatcaaatattaaacctgctaagccgcttgatggcattgaaacgaatgggaattgtaagcgactatgagaaaatccgtacctttgccgtagcaatagtaggtgttggtggagtaggtagtgtgactgctgaaatgctgacaagatgtggcattggtaagttgctactctttgattatgacaaggtggaactagccaatatgaatagacttttcttccaacctcatcaagcaggattaagtaaagttcaagcagcagaacatactctgaggaacattaatcctgatgttctttttgaagtacacaactataatataaccacagtggaaaactttcaacatttcatggatagaataagtaatggtgggttagaagaaggaaaacctgttgatctagttcttagctgtgtggacaattttgaagctcgaatgacaataaatacagcttgtaatgaacttggacaaacatggatggaatctggggtcagtgaaaatgcagtttcagggcatatacagcttataattcctggagaatctgcttgttttgcgtgtgctccaccacttgtagttgctgcaaatattgatgaaaagactctgaaacgagaaggtgtttgtgcagccagtcttcctaccactatgggtgtggttgctgggatcttagtacaaaacgtgttaaagtttctgttaaattttggtactgttagtttttaccttggatacaatgcaatgcaggatttttttcctactatgtccatgaagccaaatcctcagtgtgatgacagaaattgcaggaagcagcaggaggaatataagaaaaaggtagcagcactgcctaaacaagaggttatacaagaagaggaagagataatccatgaagataatgaatggggtattgagctggtatctgaggtttcagaagaggaactgaaaaatttttcaggtccagttccagacttacctgaaggaattacagtggcatacacaattccaaaaaagcaagaagattctgtcactgagttaacagtggaagattctggtgaaagcttggaagacctcatggccaaaatgaagaatatgtagataatggactgggatatattgtatttctcatgttaaagcctcttcccttgaaattaaaaaaaaattttaactgataaaacttagggcaacattaattaatgtatattcttacctgaattgttatactttttgaaaatcctgtgacttgcctgtttctccccgctccaacgaaatcattaactctcctaaaatgtgtttcattctagtaagaaaacctcaaaggatattgtaggatataaatcttacttgaaaacatagctgttgaaatgttttggccttttggagtgggggaaggacaaatctgatcctgtaatctttttctttccagtaatcccttgtgtctgttgcatgaggacatggacaataaagtagtatatgatcctcagatacagggagaaggacaaggcatacagcttattgattagagctggcaagcatctgctcattatgtttggaattgctttctataagaaaattgcccactactactaacttgatcaacaatgaattcaaaatagttaacctatgaaataacatcctctcaaatgtttgctgatgaagtacaagttgaaatgtagttattggaaaagtctgtaacctgtggatcatatatattcaaagtgagacaaaggcaaataaaaagcagctattttcatgaatagacaaagttgatttcaggaagtataaattatattctgcaccgaacaaggaacagaaattattgcatctgtggaacatatatctggagttactatactttactgaagagcaaggcataaatttagactaaaatccatccagattacactcattctttaggctactcctggatacttcatttaaatttgattttcgaggtagtgagatgtcggcaaggtttgtcctgtatattaggaataaaggaaaagttctaaactgcctctgcaatgacttgtagtcagtggaagagtatcactttcccctgatcatgaccactaaactgtaaattgatataaattagttttctctcgagttacacccaagtaatgaagacttaagagaaccttggttgaaataaatttccaatagtttggagactcataaataccatgcaggtgtaaccactgccaataggctgtttctatgcttatttcctattttgatttttactttgaagataggaatatctaaattatatctctagggagaaaatgttgtaaaaaattaaaagtacatccctgattgtaaaataaagttcaaaaaactgatttcagaaagtctcaactaccaaatgttttcaatatattagttttgagatgctaggattatactgtgattcttatgtttatagtaaagtctggaaagcagaaggatagtttttttagcctggaaacttatttatgttgccttggtgagtcttctatcattttttaaaaatttagcttattgaactgtaaaatagcttttctagtatgagagatgttttgaatttaaaaaatgaaatgcagtttttcaaaaataaatttcctttggaaattcttgcatatcaatttagtaaggttttataaaattttacaatttgataaagtatcacatctagaattcac

SEQ ID NO: 280889 - DNA, 3256 bp, Homo sapiens
gatgagggggagcgatgtctgcgacgcaccggaagcggctccgaggaaggcctgtgggagtctcggagacgtgtctgtctgtgaggcgctgggtgcacgtccccagggctctgggctaggaaggcagcggcgaggtgcctccccacgtacccctcgcgggcccagccgagcaacgtggggcgaaggcggcggcgaaggcccgggctgggagcgttggcggccggagtcccagccatggcggagtctgtggagcgcctgcagcagcgggtccaggagctggagcgggaacttgcccaggagaggagtctgcaggtcccgaggagcggcgacggagggggcggccgggtccgcatcgagaagatgagctcagaggtggtggattcgaatccctacagccgcttgatggcattgaaacgaatgggaattgtaagcgactatgagaaaatccgtacctttgccgtagcaatagtaggtgttggtggagtaggtagtgtgactgctgaaatgctgacaagatgtggcattggtaagttgctactctttgattatgacaaggtggaactagccaatatgaatagacttttcttccaacctcatcaagcaggattaagtaaagttcaagcagcagaacatactctgaggaacattaatcctgatgttctttttgaagtacacaactataatataaccacagtggaaaactttcaacatttcatggatagaataagtaatggtgggttagaagaaggaaaacctgttgatctagttcttagctgtgtggacaattttgaagctcgaatgacaataaatacagcttgtaatgaacttggacaaacatggatggaatctggggtcagtgaaaatgcagtttcagggcatatacagcttataattcctggagaatctgcttgttttgcgtgtgctccaccacttgtagttgctgcaaatattgatgaaaagactctgaaacgagaaggtgtttgtgcagccagtcttcctaccactatgggtgtggttgctgggatcttagtacaaaacgtgttaaagtttctgttaaattttggtactgttagtttttaccttggatacaatgcaatgcaggatttttttcctactatgtccatgaagccaaatcctcagtgtgatgacagaaattgcaggaagcagcaggaggaatataaggtatatgacaatctgttagaatgcatgagggatcatattgaataggacaatacataaacagatttggaatacaagataaatggttaatttattcaccatacttcaaaaatgaatgttctttcttgcttttggtaagataaaaagcctgtctgaattcttgattaatgctttagagaactgagaatgagtaagaacactttgatgctgtttgatttctacagaaaaaggtagcagcactgcctaaacaagaggttatacaagaagaggaagagataatccatgaagataatgaatggggtattgagctggtatctgaggtttcagaagaggaactgaaaaatttttcaggtccagttccagacttacctgaaggaattacagtggcatacacaattccaaaaaagcaagaagattctgtcactgagttaacagtggaagattctggtgaaagcttggaagacctcatggccaaaatgaagaatatgtagataatggactgggatatattgtatttctcatgttaaagcctcttcccttgaaattaaaaaaaaattttaactgataaaacttagggcaacattaattaatgtatattcttacctgaattgttatactttttgaaaatcctgtgacttgcctgtttctccccgctccaacgaaatcattaactctcctaaaatgtgtttcattctagtaagaaaacctcaaaggatattgtaggatataaatcttacttgaaaacatagctgttgaaatgttttggccttttggagtgggggaaggacaaatctgatcctgtaatctttttctttccagtaatcccttgtgtctgttgcatgaggacatggacaataaagtagtatatgatcctcagatacagggagaaggacaaggcatacagcttattgattagagctggcaagcatctgctcattatgtttggaattgctttctataagaaaattgcccactactactaacttgatcaacaatgaattcaaaatagttaacctatgaaataacatcctctcaaatgtttgctgatgaagtacaagttgaaatgtagttattggaaaagtctgtaacctgtggatcatatatattcaaagtgagacaaaggcaaataaaaagcagctattttcatgaatagacaaagttgatttcaggaagtataaattatattctgcaccgaacaaggaacagaaattattgcatctgtggaacatatatctggagttactatactttactgaagagcaaggcataaatttagactaaaatccatccagattacactcattctttaggctactcctggatacttcatttaaatttgattttcgaggtagtgagatgtcggcaaggtttgtcctgtatattaggaataaaggaaaagttctaaactgcctctgcaatgacttgtagtcagtggaagagtatcactttcccctgatcatgaccactaaactgtaaattgatataaattagttttctctcgagttacacccaagtaatgaagacttaagagaaccttggttgaaataaatttccaatagtttggagactcataaataccatgcaggtgtaaccactgccaataggctgtttctatgcttatttcctattttgatttttactttgaagataggaatatctaaattatatctctagggagaaaatgttgtaaaaaattaaaagtacatccctgattgtaaaataaagttcaaaaaactgatttcagaaagtctcaactaccaaatgttttcaatatattagttttgagatgctaggattatactgtgattcttatgtttatagtaaagtctggaaagcagaaggatagtttttttagcctggaaacttatttatgttgccttggtgagtcttctatcattttttaaaaatttagcttattgaactgtaaaatagcttttctagtatgagagatgttttgaatttaaaaaatgaaatgcagtttttcaaaaataaatttcctttggaaattcttgcatatcaatttagtaaggttttataaaattttacaatttgataaagtatcacatctagaattcac

SEQ ID NO: 280890 - DNA, 2725 bp, Homo sapiens
tattttctgtgatgatgtatgtctatttgtattactaatacctaaaagactgtaagctttaaaacatatttttctttgttttaagccgcttgatggcattgaaacgaatgggaattgtaagcgactatgagaaaatccgtacctttgccgtagcaatagtaggtgttggtggagtaggtagtgtgactgctgaaatgctgacaagatgtggcattggtaagttgctactctttgattatgacaaggtggaactagccaatatgaatagacttttcttccaacctcatcaagcaggattaagtaaagttcaagcagcagaacatactctgaggaacattaatcctgatgttctttttgaagtacacaactataatataaccacagtggaaaactttcaacatttcatggatagaataagtaatggtgggttagaagaaggaaaacctgttgatctagttcttagctgtgtggacaattttgaagctcgaatgacaataaatacagcttgtaatgaacttggacaaacatggatggaatctggggtcagtgaaaatgcagtttcagggcatatacagcttataattcctggagaatctgcttgttttgcgtgtgctccaccacttgtagttgctgcaaatattgatgaaaagactctgaaacgagaaggtgtttgtgcagccagtcttcctaccactatgggtgtggttgctgggatcttagtacaaaacgtgttaaagtttctgttaaattttggtactgttagtttttaccttggatacaatgcaatgcaggatttttttcctactatgtccatgaagccaaatcctcagtgtgatgacagaaattgcaggaagcagcaggaggaatataagaaaaaggtagcagcactgcctaaacaagaggttatacaagaagaggaagagataatccatgaagataatgaatggggtattgagctggtatctgaggtttcagaagaggaactgaaaaatttttcaggtccagttccagacttacctgaaggaattacagtggcatacacaattccaaaaaagcaagaagattctgtcactgagttaacagtggaagattctggtgaaagcttggaagacctcatggccaaaatgaagaatatgtagataatggactgggatatattgtatttctcatgttaaagcctcttcccttgaaattaaaaaaaaattttaactgataaaacttagggcaacattaattaatgtatattcttacctgaattgttatactttttgaaaatcctgtgacttgcctgtttctccccgctccaacgaaatcattaactctcctaaaatgtgtttcattctagtaagaaaacctcaaaggatattgtaggatataaatcttacttgaaaacatagctgttgaaatgttttggccttttggagtgggggaaggacaaatctgatcctgtaatctttttctttccagtaatcccttgtgtctgttgcatgaggacatggacaataaagtagtatatgatcctcagatacagggagaaggacaaggcatacagcttattgattagagctggcaagcatctgctcattatgtttggaattgctttctataagaaaattgcccactactactaacttgatcaacaatgaattcaaaatagttaacctatgaaataacatcctctcaaatgtttgctgatgaagtacaagttgaaatgtagttattggaaaagtctgtaacctgtggatcatatatattcaaagtgagacaaaggcaaataaaaagcagctattttcatgaatagacaaagttgatttcaggaagtataaattatattctgcaccgaacaaggaacagaaattattgcatctgtggaacatatatctggagttactatactttactgaagagcaaggcataaatttagactaaaatccatccagattacactcattctttaggctactcctggatacttcatttaaatttgattttcgaggtagtgagatgtcggcaaggtttgtcctgtatattaggaataaaggaaaagttctaaactgcctctgcaatgacttgtagtcagtggaagagtatcactttcccctgatcatgaccactaaactgtaaattgatataaattagttttctctcgagttacacccaagtaatgaagacttaagagaaccttggttgaaataaatttccaatagtttggagactcataaataccatgcaggtgtaaccactgccaataggctgtttctatgcttatttcctattttgatttttactttgaagataggaatatctaaattatatctctagggagaaaatgttgtaaaaaattaaaagtacatccctgattgtaaaataaagttcaaaaaactgatttcagaaagtctcaactaccaaatgttttcaatatattagttttgagatgctaggattatactgtgattcttatgtttatagtaaagtctggaaagcagaaggatagtttttttagcctggaaacttatttatgttgccttggtgagtcttctatcattttttaaaaatttagcttattgaactgtaaaatagcttttctagtatgagagatgttttgaatttaaaaaatgaaatgcagtttttcaaaaataaatttcctttggaaattcttgcatatcaatttagtaaggttttataaaattttacaatttgataaagtatcacatctagaattcac

SEQ ID NO: 280891 - DNA, 1904 bp, Homo sapiens
tgagctcggtacccctacatttgcaggaggaagcagcaggaggaatataagaaaaaggtagcagcactgcctaaacaagaggttatacaagaagaggaagagataatccatgaagataatgaatggggtattgagctggtatctgaggtttcagaagaggaactgaaaaatttttcaggtccagttccagacttacctgaaggaattacagtggcatacacaattccaaaaaagcaagaagattctgtcactgagttaacagtggaagattctggtgaaagcttggaagacctcatggccaaaatgaagaatatgtagataatggactgggatatattgtatttctcatgttaaagcctcttcccttgaaattaaaaaaaaattttaactgataaaacttagggcaacattaattaatgtatattcttacctgaattgttatactttttgaaaatcctgtgacttgcctgtttctccccgctccaacgaaatcattaactctcctaaaatgtgtttcattctagtaagaaaacctcaaaggatattgtaggatataaatcttacttgaaaacatagctgttgaaatgttttggccttttggagtgggggaaggacaaatctgatcctgtaatctttttctttccagtaatcccttgtgtctgttgcatgaggacatggacaataaagtagtatatgatcctcagatacagggagaaggacaaggcatacagcttattgattagagctggcaagcatctgctcattatgtttggaattgctttctataagaaaattgcccactactactaacttgatcaacaatgaattcaaaatagttaacctatgaaataacatcctctcaaatgtttgctgatgaagtacaagttgaaatgtagttattggaaaagtctgtaacctgtggatcatatatattcaaagtgagacaaaggcaaataaaaagcagctattttcatgaatagacaaagttgatttcaggaagtataaattatattctgcaccgaacaaggaacagaaattattgcatctgtggaacatatatctggagttactatactttactgaagagcaaggcataaatttagactaaaatccatccagattacactcattctttaggctactcctggatacttcatttaaatttgattttcgaggtagtgagatgtcggcaaggtttgtcctgtatattaggaataaaggaaaagttctaaactgcctctgcaatgacttgtagtcagtggaagagtatcactttcccctgatcatgaccactaaactgtaaattgatataaattagttttctctcgagttacacccaagtaatgaagacttaagagaaccttggttgaaataaatttccaatagtttggagactcataaataccatgcaggtgtaaccactgccaataggctgtttctatgcttatttcctattttgatttttactttgaagataggaatatctaaattatatctctagggagaaaatgttgtaaaaaattaaaagtacatccctgattgtaaaataaagttcaaaaaactgatttcagaaagtctcaactaccaaatgttttcaatatattagttttgagatgctaggattatactgtgattcttatgtttatagtaaagtctggaaagcagaaggatagtttttttagcctggaaacttatttatgttgccttggtgagtcttctatcattttttaaaaatttagcttattgaactgtaaaatagcttttctagtatgagagatgttttgaatttaaaaaatgaaatgcagtttttcaaaaataaatttcctttggaaattcttgcatatcaatttagtaaggttttataaaattttacaatttgataaagtatcacatctagaattcac

SEQ ID NO: 280892 - DNA, 1523 bp, Homo sapiens
gatgagggggagcgatgtctgcgacgcaccggaagcggctccgaggaaggcctgtgggagtctcggagacgtgtctgtctgtgaggcgctgggtgcacgtccccagggctctgggctaggaaggcagcggcgaggtgcctccccacgtacccctcgcgggcccagccgagcaacgtggggcgaaggcggcggcgaaggcccgggctgggagcgttggcggccggagtcccagccatggcggagtctgtggagcgcctgcagcagcgggtccaggagctggagcgggaacttgcccaggagaggagtctgcaggtcccgaggagcggcgacggagggggcggccgggtccgcatcgagaagatgagctcagaggtggtggattcgaatccctacagccgcttgatggcattgaaacgaatgggaattgtaagcgactatgagaaaatccgtacctttgccgtagcaatagtaggtgttggtggagtaggtagtgtgactgctgaaatgctgacaagatgtggcattggtaagttgctactctttgattatgacaaggtggaactagccaatatgaatagacttttcttccaacctcatcaagcaggattaagtaaagttcaagcagcagaacatactctgaggaacattaatcctgatgttctttttgaagtacacaactataatataaccacagtggaaaactttcaacatttcatggatagaataagtaatggtgggttagaagaaggaaaacctgttgatctagttcttagctgtgtggacaattttgaagctcgaatgacaataaatacagcttgtaatgaacttggacaaacatggatggaatctggggtcagtgaaaatgcagtttcagggcatatacagcttataattcctggagaatctgcttgttttgcgtgtgctccaccacttgtagttgctgcaaatattgatgaaaagactctgaaacgagaaggtgtttgtgcagccagtcttcctaccactatgggtgtggttgctgggatcttagtacaaaacgtgttaaagtttctgttaaattttggtactgttagtttttaccttggatacaatgcaatgcaggatttttttcctactatgtccatgaagccaaatcctcagtgtgatgacagaaattgcaggaagcagcaggaggaatataagaaaaaggtagcagcactgcctaaacaagaggttatacaagaagaggaagagataatccatgaagataatgaatggggtattgagctggtatctgaggtttcagaagaggaactgaaaaatttttcaggtccagttccagacttacctgaaggaattacagtggcatacacaattccaaaaaagcaagaagattctgtcactgagttaacagtggaagattctggtgaaagcttggaagacctcatggccaaaatgaagaatatgtagataatggactgggatatattgtatttctcatgttaaagcctcttcccttgaaattaaaaaaaaattttaactga

SEQ ID NO: 280893 - DNA, 1308 bp, Homo sapiens
  misc_feature (608)..(608): n is a, c, g, or t
  misc_feature (724)..(724): n is a, c, g, or t
  misc_feature (781)..(781): n is a, c, g, or t
  misc_feature (870)..(870): n is a, c, g, or t
  misc_feature (915)..(915): n is a, c, g, or t
  misc_feature (933)..(933): n is a, c, g, or t
  misc_feature (958)..(958): n is a, c, g, or t
  misc_feature (968)..(968): n is a, c, g, or t
  misc_feature (981)..(981): n is a, c, g, or t
  misc_feature (1013)..(1013): n is a, c, g, or t
gatgagggggagcgatgtctgcgacgcaccggaagcggctccgaggaaggcctgtgggagtctcggagacgtgtctgtctgtgaggcgctgggtgcacgtccccagggctctgggctaggaaggcagcggcgaggtgcctccccacgtacccctcgcgggcccagccgagcaacgtggggcgaaggcggcggcgaaggcccgggctgggagcgttggcggccggagtcccagccatggcggagtctgtggagcgcctgcagcagcgggtccaggagctggagcgggaacttgcccaggagaggagtctgcaggtcccgaggagcggcgacggagggggcggccgggtccgcatcgagaagatgagctcagaggtggtggattcgaatccctacagccgcttgatggcattgaaacgaatgggaattgtaagcgactatgagaaaatccgtacctttgccgtagcaatagtaggtgttggtggagtaggtagtgtgactgctgaaatgctgacaagatgtggcattggtaagttgctactctttgattatgacaaggtggaactagccaatatgaatagacttttcttccaacctcatcaagcagacancaagcagacatcaagcagacatcaagcagacatcaagcagacatcaagcagacatcaagcagacatcaagcagacatcaagcagacatcaagcagacatcaagcagacatcaagcngacatcaagcagacatcaagcagacatcaagcagacatcaagcagacatcaagcagncatcaagcagacatcaagcagacatcaagcagacatcaagcagacatcaagcagacatcaagcagacatcaagcagacatcaagcaganatcaagcagacatcaagcagacatcaagcagacatcaagcagacntcaagcagacatcaagcngacatcaagcagacatcaagcaganatcaagcagncatcaagcagacntcaagcagacatcaagcagacatcaagcaganatcaagcaggcatcaagcagacatcaagcagacatcaagcagacatcaagcagacatcaagcagacatcaagcagacatcaagcactgcttgatggcattgaaacgaatgggaattgtaagcgactattagagaatccgtacctttgccgtagcaatagtaggtattggtggagtaggtagtgtgactgctgaaatgctgacaagatgtggcattggtaagttgctactctttgattatgacaaggtggaactagccaatatgaatagacttttcttccaacctcatcaagcaga

SEQ ID NO: 280894 - DNA, 2111 bp, Homo sapiens
gatgagggggagcgatgtctgcgacgcaccggaagcggctccgaggaaggcctgtgggagtctcggagacgtgtctgtctgtgaggcgctgggtgcacgtccccagggctctgggctaggaaggcagcggcgaggtgcctccccacgtacccctcgcgggcccagccgagcaacgtggggcgaaggcggcggcgaaggcccgggctgggagcgttggcggccggagtcccagccatggcggagtctgtggagcgcctgcagcagcgggtccaggagctggagcgggaacttgcccaggagaggagtctgcaggtcccgaggagcggcgacggagggggcggccgggtccgcatcgagaagatgagctcagaggtggtggattcgaatccctacagccgcttgatggcattgaaacgaatgggaattgtaagcgactatgagaaaatccgtacctttgccgtagcaatagtaggtgttggtggagtaggtagtgtgactgctgaaatgctgacaagatgtggcattggtaagttgctactctttgattatgacaaggtggaactagccaatatgaatagacttttcttccaacctcatcaagcaggattaagtaaagttcaagcagcagaacatactctgaggaacattaatcctgatgttctttttgaagtacacaactataatataaccacagtggaaaactttcaacatttcatggatagaataagtaatggtgggttagaagaaggaaaacctgttgatctagttcttagctgtgtggacaattttgaagctcgaatgacaataaatacagcttgtaatgaacttggacaaacatggatggaatctggggtcagtgaaaatgcagtttcagggcatatacagcttataattcctggagaatctgcttgttttgcgtgtgctccaccacttgtagttgctgcaaatattgatgaaaagactctgaaacgagaaggtgtttgtgcagccagtcttcctaccactatgggtgtggttgctgggatcttagtacaaaacgtgttaaagtttctgttaaattttggtactgttagtttttaccttggatacaatgcaatgcaggatttttttcctactatgtccatgaagccaaatcctcagtgtgatgacagaaattgcaggaagcagcaggaggaatataagaaaaaggtagcagcactgcctaaacaagaggttatacaagaagaggaagagataatccatgaagataatgaatggggtattgagctggtatctgaggtttcagaagaggaactgaaaaatttttcaggtccagttccagacttacctgaaggaattacagtggcatacacaattccaaaaaagcaagaagattctgtcactgagttaacagtggaagattctggtgaaagcttggaagacctcatggccaaaatgaagaatatgtagataatggactgggatatattgtatttctcatgttaaagcctcttcccttgaaattaaaaaaaaattttaactgataaaacttagggcaacattaattaatgtatattcttacctgaattgttatactttttgaaaatcctgtgacttgcctgtttctccccgctccaacgaaatcattaactctcctaaaatgtgtttcattctagtaagaaaacctcaaaggatattgtaggatataaatcttacttgaaaacatagctgttgaaatgttttggccttttggagtgggggaaggacaaatctgatcctgtaatctttttctttccagtaatcccttgtgtctgttgcatgaggacatggacaataaagtagtatatgatcctcagatacagggagaaggacaaggcatacagcttattgattagagctggcaagcatctgctcattatgtttggaattgctttctataagaaaattgcccactactactaacttgatcaacaatgaattcaaaatagttaacctatgaaataacatcctctcaaatgtttgctgatgaagtacaagttgaaatgtagttattggaaaagtctgtaacctgtggatcatatatattcaaagtgagacaaaggcaaataaaaagcagctattttcatgaatag

SEQ ID NO: 280895 - DNA, 3035 bp, Homo sapiens
gatgagggggagcgatgtctgcgacgcaccggaagcggctccgaggaaggcctgtgggagtctcggagacgtgtctgtctgtgaggcgctgggtgcacgtccccagggctctgggctaggaaggcagcggcgaggtgcctccccacgtacccctcgcgggcccagccgagcaacgtggggcgaaggcggcggcgaaggcccgggctgggagcgttggcggccggagtcccagccatggcggagtctgtggagcgcctgcagcagcgggtccaggagctggagcgggaacttgcccaggagaggagtctgcaggtcccgaggagcggcgacggagggggcggccgggtccgcatcgagaagatgagctcagaggtggtggattcgaatccctacagccgcttgatggcattgaaacgaatgggaattgtaagcgactatgagaaaatccgtacctttgccgtagcaatagtaggtgttggtggagtaggtagtgtgactgctgaaatgctgacaagatgtggcattggtaagttgctactctttgattatgacaaggtggaactagccaatatgaatagacttttcttccaacctcatcaagcaggattaagtaaagttcaagcagcagaacatactctgaggaacattaatcctgatgttctttttgaagtacacaactataatataaccacagtggaaaactttcaacatttcatggatagaataagtaatggtgggttagaagaaggaaaacctgttgatctagttcttagctgtgtggacaattttgaagctcgaatgacaataaatacagcttgtaatgaacttggacaaacatggatggaatctggggtcagtgaaaatgcagtttcagggcatatacagcttataattcctggagaatctgcttgttttgcgtgtgctccaccacttgtagttgctgcaaatattgatgaaaagactctgaaacgagaaggtgtttgtgcagccagtcttcctaccactatgggtgtggttgctgggatcttagtacaaaacgtgttaaagtttctgttaaattttggtactgttagtttttaccttggatacaatgcaatgcaggatttttttcctactatgtccatgaagccaaatcctcagtgtgatgacagaaattgcaggaagcagcaggaggaatataagaaaaaggtagcagcactgcctaaacaagaggttatacaagaagaggaagagataatccatgaagataatgaatggggtattgagctggtatctgaggtttcagaagaggaactgaaaaatttttcaggtccagttccagacttacctgaaggaattacagtggcatacacaattccaaaaaagcaagaagattctgtcactgagttaacagtggaagattctggtgaaagcttggaagacctcatggccaaaatgaagaatatgtagataatggactgggatatattgtatttctcatgttaaagcctcttcccttgaaattaaaaaaaaattttaactgataaaacttagggcaacattaattaatgtatattcttacctgaattgttatactttttgaaaatcctgtgacttgcctgtttctccccgctccaacgaaatcattaactctcctaaaatgtgtttcattctagtaagaaaacctcaaaggatattgtaggatataaatcttacttgaaaacatagctgttgaaatgttttggccttttggagtgggggaaggacaaatctgatcctgtaatctttttctttccagtaatcccttgtgtctgttgcatgaggacatggacaataaagtagtatatgatcctcagatacagggagaaggacaaggcatacagcttattgattagagctggcaagcatctgctcattatgtttggaattgctttctataagaaaattgcccactactactaacttgatcaacaatgaattcaaaatagttaacctatgaaataacatcctctcaaatgtttgctgatgaagtacaagttgaaatgtagttattggaaaagtctgtaacctgtggatcatatatattcaaagtgagacaaaggcaaataaaaagcagctattttcatgaatagacaaagttgatttcaggaagtataaattatattctgcaccgaacaaggaacagaaattattgcatctgtggaacatatatctggagttactatactttactgaagagcaaggcataaatttagactaaaatccatccagattacactcattctttaggctactcctggatacttcatttaaatttgattttcgaggtagtgagatgtcggcaaggtttgtcctgtatattaggaataaaggaaaagttctaaactgcctctgcaatgacttgtagtcagtggaagagtatcactttcccctgatcatgaccactaaactgtaaattgatataaattagttttctctcgagttacacccaagtaatgaagacttaagagaaccttggttgaaataaatttccaatagtttggagactcataaataccatgcaggtgtaaccactgccaataggctgtttctatgcttatttcctattttgatttttactttgaagataggaatatctaaattatatctctagggagaaaatgttgtaaaaaattaaaagtacatccctgattgtaaaataaagttcaaaaaactgatttcagaaagtctcaactaccaaatgttttcaatatattagttttgagatgctaggattatactgtgattcttatgtttatagtaaagtctggaaagcagaaggatagtttttttagcctggaaacttatttatgttgccttggtgagtcttctatcattttttaaaaatttagcttattgaactgtaaaatagcttttctagtatgagagatgttttgaatttaaaaaatgaaatgcagtttttcaaaaataaatttcctttggaaattcttgcatatcaatttagtaaggttttataaaattttacaatttgataaagtatcacatctagaattcac

SEQ ID NO: 280896 - DNA, 3250 bp, Homo sapiens
gatgagggggagcgatgtctgcgacgcaccggaagcggctccgaggaaggcctgtgggagtctcggagacgtgtctgtctgtgaggcgctgggtgcacgtccccagggctctgggctaggaaggcagcggcgaggtgcctccccacgtacccctcgcgggcccagccgagcaacgtggggcgaaggcggcggcgaaggcccgggctgggagcgttggcggccggagtcccagccatggcggagtctgtggagcgcctgcagcagcgggtccaggagctggagcgggaacttgcccaggagaggagtctgcaggtcccgaggagcggcgacggagggggcggccgggtccgcatcgagaagatgagctcagaggtggtggattcgaatccctacaggtaacctgcgtcgccggtcggaggcaggcgcgggggagcgaggtcaggctccgtgaggtcagaagtgaggcgcttcccacgtcccgctcatggggacgcccgccacccttttcttggtctgcgaatcctgttcccaaatgggcaaggccacatcttagtactgatcggaagatattctttctcttttttaaaaacctccagtgagtcagccatatggtgctgctcctgtgcctgctgaggacgtgtgtccagtttcctatcacccttgcctcttaattagtccgcctcgctgtgtataagactgatagtaagaactttcagaagatgagatcaaatattaaacctgctaagttgctactctttgattatgacaaggtggaactagccaatatgaatagacttttcttccaacctcatcaagcaggattaagtaaagttcaagcagcagaacatactctgaggaacattaatcctgatgttctttttgaagtacacaactataatataaccacagtggaaaactttcaacatttcatggatagaataagtaatggtgggttagaagaaggaaaacctgttgatctagttcttagctgtgtggacaattttgaagctcgaatgacaataaatacagcttgtaatgaacttggacaaacatggatggaatctggggtcagtgaaaatgcagtttcagggcatatacagcttataattcctggagaatctgcttgttttgcgtgtgctccaccacttgtagttgctgcaaatattgatgaaaagactctgaaacgagaaggtgtttgtgcagccagtcttcctaccactatgggtgtggttgctgggatcttagtacaaaacgtgttaaagtttctgttaaattttggtactgttagtttttaccttggatacaatgcaatgcaggatttttttcctactatgtccatgaagccaaatcctcagtgtgatgacagaaattgcaggaagcagcaggaggaatataagaaaaaggtagcagcactgcctaaacaagaggttatacaagaagaggaagagataatccatgaagataatgaatggggtattgagctggtatctgaggtttcagaagaggaactgaaaaatttttcaggtccagttccagacttacctgaaggaattacagtggcatacacaattccaaaaaagcaagaagattctgtcactgagttaacagtggaagattctggtgaaagcttggaagacctcatggccaaaatgaagaatatgtagataatggactgggatatattgtatttctcatgttaaagcctcttcccttgaaattaaaaaaaaattttaactgataaaacttagggcaacattaattaatgtatattcttacctgaattgttatactttttgaaaatcctgtgacttgcctgtttctccccgctccaacgaaatcattaactctcctaaaatgtgtttcattctagtaagaaaacctcaaaggatattgtaggatataaatcttacttgaaaacatagctgttgaaatgttttggccttttggagtgggggaaggacaaatctgatcctgtaatctttttctttccagtaatcccttgtgtctgttgcatgaggacatggacaataaagtagtatatgatcctcagatacagggagaaggacaaggcatacagcttattgattagagctggcaagcatctgctcattatgtttggaattgctttctataagaaaattgcccactactactaacttgatcaacaatgaattcaaaatagttaacctatgaaataacatcctctcaaatgtttgctgatgaagtacaagttgaaatgtagttattggaaaagtctgtaacctgtggatcatatatattcaaagtgagacaaaggcaaataaaaagcagctattttcatgaatagacaaagttgatttcaggaagtataaattatattctgcaccgaacaaggaacagaaattattgcatctgtggaacatatatctggagttactatactttactgaagagcaaggcataaatttagactaaaatccatccagattacactcattctttaggctactcctggatacttcatttaaatttgattttcgaggtagtgagatgtcggcaaggtttgtcctgtatattaggaataaaggaaaagttctaaactgcctctgcaatgacttgtagtcagtggaagagtatcactttcccctgatcatgaccactaaactgtaaattgatataaattagttttctctcgagttacacccaagtaatgaagacttaagagaaccttggttgaaataaatttccaatagtttggagactcataaataccatgcaggtgtaaccactgccaataggctgtttctatgcttatttcctattttgatttttactttgaagataggaatatctaaattatatctctagggagaaaatgttgtaaaaaattaaaagtacatccctgattgtaaaataaagttcaaaaaactgatttcagaaagtctcaactaccaaatgttttcaatatattagttttgagatgctaggattatactgtgattcttatgtttatagtaaagtctggaaagcagaaggatagtttttttagcctggaaacttatttatgttgccttggtgagtcttctatcattttttaaaaatttagcttattgaactgtaaaatagcttttctagtatgagagatgttttgaatttaaaaaatgaaatgcagtttttcaaaaataaatttcctttggaaattcttgcatatcaatttagtaaggttttataaaattttacaatttgataaagtatcacatctagaattcac

SEQ ID NO: 280897 - DNA, 2840 bp, Homo sapiens
ggccaggcatccctgacacctgacaagaaagtaaagccaaaagtcagctgaagataatggccatggagatgtctgtggagagccgtaaaagccaatcatggctgagatgcctgcagaatctctgcccatgagaactctgaggcctcctttcctttggctgtggtaagccctctgggaaaagagcagctacccaccaccagccgcttgatggcattgaaacgaatgggaattgtaagcgactatgagaaaatccgtacctttgccgtagcaatagtaggtgttggtggagtaggtagtgtgactgctgaaatgctgacaagatgtggcattggtaagttgctactctttgattatgacaaggtggaactagccaatatgaatagacttttcttccaacctcatcaagcaggattaagtaaagttcaagcagcagaacatactctgaggaacattaatcctgatgttctttttgaagtacacaactataatataaccacagtggaaaactttcaacatttcatggatagaataagtaatggtgggttagaagaaggaaaacctgttgatctagttcttagctgtgtggacaattttgaagctcgaatgacaataaatacagcttgtaatgaacttggacaaacatggatggaatctggggtcagtgaaaatgcagtttcagggcatatacagcttataattcctggagaatctgcttgttttgcgtgtgctccaccacttgtagttgctgcaaatattgatgaaaagactctgaaacgagaaggtgtttgtgcagccagtcttcctaccactatgggtgtggttgctgggatcttagtacaaaacgtgttaaagtttctgttaaattttggtactgttagtttttaccttggatacaatgcaatgcaggatttttttcctactatgtccatgaagccaaatcctcagtgtgatgacagaaattgcaggaagcagcaggaggaatataagaaaaaggtagcagcactgcctaaacaagaggttatacaagaagaggaagagataatccatgaagataatgaatggggtattgagctggtatctgaggtttcagaagaggaactgaaaaatttttcaggtccagttccagacttacctgaaggaattacagtggcatacacaattccaaaaaagcaagaagattctgtcactgagttaacagtggaagattctggtgaaagcttggaagacctcatggccaaaatgaagaatatgtagataatggactgggatatattgtatttctcatgttaaagcctcttcccttgaaattaaaaaaaaattttaactgataaaacttagggcaacattaattaatgtatattcttacctgaattgttatactttttgaaaatcctgtgacttgcctgtttctccccgctccaacgaaatcattaactctcctaaaatgtgtttcattctagtaagaaaacctcaaaggatattgtaggatataaatcttacttgaaaacatagctgttgaaatgttttggccttttggagtgggggaaggacaaatctgatcctgtaatctttttctttccagtaatcccttgtgtctgttgcatgaggacatggacaataaagtagtatatgatcctcagatacagggagaaggacaaggcatacagcttattgattagagctggcaagcatctgctcattatgtttggaattgctttctataagaaaattgcccactactactaacttgatcaacaatgaattcaaaatagttaacctatgaaataacatcctctcaaatgtttgctgatgaagtacaagttgaaatgtagttattggaaaagtctgtaacctgtggatcatatatattcaaagtgagacaaaggcaaataaaaagcagctattttcatgaatagacaaagttgatttcaggaagtataaattatattctgcaccgaacaaggaacagaaattattgcatctgtggaacatatatctggagttactatactttactgaagagcaaggcataaatttagactaaaatccatccagattacactcattctttaggctactcctggatacttcatttaaatttgattttcgaggtagtgagatgtcggcaaggtttgtcctgtatattaggaataaaggaaaagttctaaactgcctctgcaatgacttgtagtcagtggaagagtatcactttcccctgatcatgaccactaaactgtaaattgatataaattagttttctctcgagttacacccaagtaatgaagacttaagagaaccttggttgaaataaatttccaatagtttggagactcataaataccatgcaggtgtaaccactgccaataggctgtttctatgcttatttcctattttgatttttactttgaagataggaatatctaaattatatctctagggagaaaatgttgtaaaaaattaaaagtacatccctgattgtaaaataaagttcaaaaaactgatttcagaaagtctcaactaccaaatgttttcaatatattagttttgagatgctaggattatactgtgattcttatgtttatagtaaagtctggaaagcagaaggatagtttttttagcctggaaacttatttatgttgccttggtgagtcttctatcattttttaaaaatttagcttattgaactgtaaaatagcttttctagtatgagagatgttttgaatttaaaaaatgaaatgcagtttttcaaaaataaatttcctttggaaattcttgcatatcaatttagtaaggttttataaaattttacaatttgataaagtatcacatctagaattcac

SEQ ID NO: 280898 - DNA, 2056 bp, Homo sapiens
gatgagggggagcgatgtctgcgacgcaccggaagcggctccgaggaaggcctgtgggagtctcggagacgtgtctgtctgtgaggcgctgggtgcacgtccccagggctctgggctaggaaggcagcggcgaggtgcctccccacgtacccctcgcgggcccagccgagcaacgtggggcgaaggcggcggcgaaggcccgggctgggagcgttggcggccggagtcccagccatggcggagtctgtggagcgcctgcagcagcgggtccaggagctggagcgggaacttgcccaggagaggagtctgcaggtcccgaggagcggcgacggagggggcggccgggtccgcatcgagaagatgagctcagaggtggtggattcgaatccctacagccgcttgatggcattgaaacgaatgggaattgtaagcgactatgagaaaatccgtacctttgccgtagcaatagtaggtgttggtggagtaggtagtgtgactgctgaaatgctgacaagatgtggcattggtaagttgctactctttgattatgacaaggtggaactagccaatatgaatagacttttcttccaacctcatcaagcaggattaagtaaagttcaagcagcagaacatactctgaggaacattaatcctgatgttctttttgaagtacacaactataatataaccacagtggaaaactttcaacatttcatggatagaataagtaatggtgggttagaagaaggaaaacctgttgatctagttcttagctgtgtggacaattttgaagctcgaatgacaataaatacagcttgtaatgaacttggacaaacatggatggaatctggggtcagtgaaaatgcagtttcagggcatatacagcttataattcctggagaatctgcttgttttgcgtgtgctccaccacttgtagttgctgcaaatattgatgaaaagactctgaaacgagaaggtgtttgtgcagccagtcttcctaccactatgggtgtggttgctgggatcttagtacaaaacgtgttaaagtttctgttaaattttggtactgttagtttttaccttggatacaatgcaatgcaggatttttttcctactatgtccatgaagccaaatcctcagtgtgatgacagaaattgcaggaagcagcaggaggaatataagaaaaaggtagcagcactgcctaaacaagaggttatacaagaagaggaagagataatccatgaagataatgaatggggtattgagctggtatctgaggtttcagaagaggaactgaaaaatttttcaggtccagttccagacttacctgaaggaattacagtggcatacacaattccaaaaaagcaagaagattctgtcactgagttaacagtggaagattctggtgaaagcttggaagacctcatggccaaaatgaagaatatgtagataatggactgggatatattgtatttctcatgttaaagcctcttcccttgaaattaaaaaaaaattttaactgattgaaaatcctgtgacttgcctgtttctccccgctccaacgaaatcattaactctcctaaaatgtgtttcattctagtaagaaaacctcaaaggatattgtaggatataaatcttacttgaaaacatagctgttgaaatgttttggccttttggagtgggggaaggacaaatctgatcctgtaatctttttctttccagtaatcccttgtgtctgttgcatgaggacatggacaataaagtagtatatgatcctcagatacagggagaaggacaaggcatacagcttattgattagagctggcaagcatctgctcattatgtttggaattgctttctataagaaaattgcccactactactaacttgatcaacaatgaattcaaaatagttaacctatgaaataacatcctctcaaatgtttgctgatgaagtacaagttgaaatgtagttattggaaaagtctgtaacctgtggatcatatatattcaaagtgagacaaaggcaaataaaaagcagctattttcatgaatag

SEQ ID NO: 280899 - DNA, 1744 bp, Homo sapiens
gatgagggggagcgatgtctgcgacgcaccggaagcggctccgaggaaggcctgtgggagtctcggagacgtgtctgtctgtgaggcgctgggtgcacgtccccagggctctgggctaggaaggcagcggcgaggtgcctccccacgtacccctcgcgggcccagccgagcaacgtggggcgaaggcggcggcgaaggcccgggctgggagcgttggcggccggagtcccagccatggcggagtctgtggagcgcctgcagcagcgggtccaggagctggagcgggaacttgcccaggagaggagtctgcaggtcccgaggagcggcgacggagggggcggccgggtccgcatcgagaagatgagctcagaggtggtggattcgaatccctacagccgcttgatggcattgaaacgaatgggaattgtaagcgactatgagaaaatccgtacctttgccgtagcaatagtaggtgttggtggagtaggtagtgtgactgctgaaatgctgacaagatgtggcattggtaagttgctactctttgattatgacaaggtggaactagccaatatgaatagacttttcttccaacctcatcaagcaggattaagtaaagttcaagcagcagaacatactctgaggaacattaatcctgatgttctttttgaagtacacaactataatataaccacagtggaaaactttcaacatttcatggatagaataagtaatggtgggttagaagaaggaaaacctgttgatctagttcttagctgtgtggacaattttgaagctcgaatgacaataaatacagcttgtaatgaacttggacaaacatggatggaatctggggtcagtgaaaatgcagtttcagggcatatacagcttataattcctggagaatctgcttgttttgcgtgtgctccaccacttgtagttgctgcaaatattgatgaaaagactctgaaacgagaaggtgtttgtgcagccagtcttcctaccactatgggtgtggttgctgggatcttagtacaaaacgtgttaaagtttctgttaaattttggtactgttagtttttaccttggatacaatgcaatgcaggatttttttcctactatgtccatgaagccaaatcctcagtgtgatgacagaaattgcaggaagcagcaggaggaatataaggtatatgacaatctgttagaatgcatgagggatcatattgaataggacaatacataaacagatttggaatacaagataaatggttaatttattcaccatacttcaaaaatgaatgttctttcttgcttttggtaagataaaaagcctgtctgaattcttgattaatgctttagagaactgagaatgagtaagaacactttgatgctgtttgatttctacagaaaaaggtagcagcactgcctaaacaagaggttatacaagaagaggaagagataatccatgaagataatgaatggggtattgagctggtatctgaggtttcagaagaggaactgaaaaatttttcaggtccagttccagacttacctgaaggaattacagtggcatacacaattccaaaaaagcaagaagattctgtcactgagttaacagtggaagattctggtgaaagcttggaagacctcatggccaaaatgaagaatatgtagataatggactgggatatattgtatttctcatgttaaagcctcttcccttgaaattaaaaaaaaattttaactga
